United States Patent Application Publication US 2007/0054278 A1 - sequence listing, part 130

SEQ ID NO: 329022 - DNA, 201 bp, Homo sapiens
gcactgaatagaaatttctggcagttctgagaaaattcagtttgctttcaaatatgatttgtaggttgcctctaccatgttctcaattcaagttactgacrttttaaaactgcacaagggcttaataaagatactgttatattatcctggctgcctttttctctttccccagtgttctggtgcaaattaaagtgttttaca

SEQ ID NO: 329023 - DNA, 201 bp, Homo sapiens
tcctcttaatttctatctatgttttttaatttaaagtacatcagtggctgctgggtgcggtgactcacgcctgtaatcccagcactttgggaggctgaggygggtgtatcacctgaggtcaggagttcaagaccagcctggccagtatggcaaaatcccatctctcctaatcatacaaaaaaaatagccaagtgtggtggc

SEQ ID NO: 329024 - DNA, 201 bp, Homo sapiens
taataaatattaaagtcaagtagtgcaaattatctgattttttttttctttcaagattgtgttggctgtcttgaccctttatatttctttatacactttgrggtcaacttaccaaattctgcagaaagcctgctatgatattcattggcatttcattgacttttcaagtaaacttaaaaataatttacctctctacaatat

SEQ ID NO: 329025 - DNA, 201 bp, Homo sapiens
cccagcactttgggatgcccaagtgggcagattgcctgagttcagtagttcgagaccagcctggctaacatggtgaaactctgtctctagtaaaaatacaraaattagccatgtgtggtggcgcgcacctgtagtcccagctactcaggaggctgaggcaggagaatcacttcatcccatgaggcagaggttgccgtaggc

SEQ ID NO: 329026 - DNA, 201 bp, Homo sapiens
aaacaccattttctttatttttctttcattattttttattttaaaaagtttattctggccaggagtggtggctcatgcctgtaatcccagcactttgggakgcccaagtgggcagattgcctgagttcagtagttcgagaccagcctggctaacatggtgaaactctgtctctagtaaaaatacaaaaattagccatgtgt

SEQ ID NO: 329027 - DNA, 201 bp, Homo sapiens
aagaccaactcagcctatctgaggtctttaggatattcataggatattcatttattttctgcaaaatattttactactttgtattttaaaggaggatcaaacagagatggtaactctccagtccaaggggataaaaaatactaatggtgagtgttcaaggataagtaagacaaattgtgttgactagaacagactttactt

SEQ ID NO: 329028 - DNA, 201 bp, Homo sapiens
gttacttccctctccaaaagtgagaagctagactcccactttctaccatccactatttacttaataccagtatacatgtaaactggtttcaaaacttttarccttaatccctatgataaacaaatttatcaattaaagtacagtgtttatgtacagtgtacacttccttttatctttaaatacatagttttcagccaaaac

SEQ ID NO: 329029 - DNA, 201 bp, Homo sapiens
tactattaactaaactccaaactttatttggattccaccagtgttcctattaacatatactttctcttctggaattcagtccgagattccgcattgcattyatttgtcatgttactctaagtcctccagcctgtgacaatttttcaggcttttcttatttcttgcgaccttgattatctttagaatactggccaagtatcc

SEQ ID NO: 329030 - DNA, 201 bp, Homo sapiens
aaataggaaagagaatttctttatgcccgtgaaccagtttttcacattgataacatattatattaccatagaatatttgtcagcattaagaaaccaacttkgatatattactattaactaaactccaaactttatttggattccaccagtgttcctattaacatatactttctcttctggaattcagtccgagattccgca

SEQ ID NO: 329031 - DNA, 201 bp, Homo sapiens
agcatctttttcatgtgtttattgtttattcatatatcccatcttgctaagtgttggtccaagtgtttgtccatttcttcacgaacaaattttttttttttattttggaacaatcttagatttacaggaacgttaaaaaaataggaaagagaatttctttatgcccgtgaaccagtttttcacattgataacatattatat

SEQ ID NO: 329032 - DNA, 201 bp, Homo sapiens
tgcaggttagttacatatgtatacatgtgccatgctggtgcgctgcacccactaactcgtcatctagccttaggtatatctcccagtgctatccctccccsctccccccaccccaccacagtccccagagtgtgatattccccttcctgtgtccatgtgatctttacaggacactttgtggacatatgttttaattaatta

SEQ ID NO: 329033 - DNA, 201 bp, Homo sapiens
tttaaacatacaataatttgtttatccatgttcccaataatagacatttcagttgtttgcagttttttgcttttctgaataaagctgcaatgaagattcttttttttttttttttaatttaagttttagggtacatgtgcacattgtgcaggttagttacatatgtatacatgtgccatgctggtgcgctgcacccactaa

SEQ ID NO: 329034 - DNA, 201 bp, Homo sapiens
gtgcaataacaaaaaccacagtgtttctcagactttattgtgtataggaattacctagggatcttacatcctttttttttttcttttttttttttttttttgagacggagtctcgctctgtcacccaggctggagtgcagtggcgtggtctcggctcactgcaagctccgcctctcgggttcacgccattctcctgcctca

SEQ ID NO: 329035 - DNA, 201 bp, Homo sapiens
tatatataagcacatatatataatcatatgcattattcctattattattttgaacaaactgttatctgttagattaagaaaaataaaacttttattttgtyttattttcatatattctttctccagagctctttctttctttatgtagatcaatgtttctgacctttatgatttttcttctctccgaagtacttactgcaa

SEQ ID NO: 329036 - DNA, 201 bp, Homo sapiens
agagaagttaagaagctagcccaaggtcacacacttaataaataaagtccaggatcatcttacctcccaaaaggccccacttgccagtgctcttgcactgsggattaagtttccaacacacgaatttggtggacatattgagctcatagcaggaatgaaattccagtctgtgaactctaaaacttatacacttttcactct

SEQ ID NO: 329037 - DNA, 201 bp, Homo sapiens
ttcaagaccgaaccaggaagaaattgtatccctgaatagaccagtaatgtgttctgtaattgaggcagtaataaatagcctaccaataaaaaaaaaaaaaagcccagaaccagacatataaacagctaaattctaccagaggtccaaggaagagctgatacgatttctactgaaactgttccaaaaaactggaaaggaggg

SEQ ID NO: 329038 - DNA, 201 bp, Homo sapiens
agacggggtttcaccatattggccaggctggtctcgaactcctgaccttgtgatccatctgcctcagcctctcaaagcgctgggattacagccactgtgcycagctacaggcttttaagaaaggaaagacttgagtatatttaattgttgaggggaaggagctaggacagaggaagaagttggagataaaatgaaagagta

SEQ ID NO: 329039 - DNA, 201 bp, Homo sapiens
aggcaaatacacatatactccgaacataaagccaaagataaattgctttaggaaaggtataacccaatgtgctctaggaccttagaagtgggagcagttgstttcatttgtaaggattagggtgcgtgagatcaagtgagacttcttggagcaaatgacaattaattcaagccctaaaggaagaatagaataagaggtgag

SEQ ID NO: 329040 - DNA, 201 bp, Homo sapiens
agaagtaggaatagatgctgaagacccattgacatacccagtacgtaataaatatagccaacctttattgaacattcactgccctttacctgttttcattygtgtaatccccatagcaaccctctgaggtgcatgctattttttgtctacaatttatagatgagaaaactgaagcactgagaagatgaagtagcctgtcca

SEQ ID NO: 329041 - DNA, 201 bp, Homo sapiens
ggaattaaggagaaaccatggaggcaaattagtttctcaggcttccatcgggcaaactgttactctagtacacatttgatgcagcaggaggctgaacaaaktttttcttcttcaaatggtgaactgcttgatcttttgtagttgatagaagcatgagtaaacataaataaacatggatttaaatatactaattagaggaat

SEQ ID NO: 329042 - DNA, 201 bp, Homo sapiens
agcaatgaaaacttttccaaactcttttcttcacagtgctccctccatggcacaagtgttttcaaaaagcagtaactttttcactcattgctaatatatcrtctttactttgtatcaggagagacagagaaagtatatttatttttactgttttcataaaatttgtattgatagcatatagacaggaaaatgcacaaatca

SEQ ID NO: 329043 - DNA, 201 bp, Homo sapiens
catatagtatataatcttttgtgtctggtttcttaaactcagcttgatgcttgtgaagatcatccatgtcattggatataggtgtagttcattcatttttrgtgttgtatagtattccagtgtataaaataccacaattcacatatccgttctattgttaatggacatttaggctgtttctgtacttaactattattaaca

SEQ ID NO: 329044 - DNA, 201 bp, Homo sapiens
aatccttaaaaaaagagagaagaactaatacaaggagaaaacaatcatataaataataaaataatataaatagaaccatttgaaccatcatgcacacttaactgagctctgcttatcccccagcactttggacttcactgtcaccaacagtaggcaacatttaaaagatgttgagcaggatttgtgtgttaaaagttcacc

SEQ ID NO: 329045 - DNA, 201 bp, Homo sapiens
tttaaaagatgttgagcaggatttgtgtgttaaaagttcaccttgatggcagaagatggataggaataaagcaagacagttactttcatggtccagatggsagacaacaaggacccatcatcatgcagctatgatgggagaggagctggtgaatatgagaggtgtgtaggaagtcggcttgacaacacttggtaattagga

SEQ ID NO: 329046 - DNA, 201 bp, Homo sapiens
tgaggcctctgctctgggtcaggccctgttttctggatgttgctggagttagtatgatttggtggcagagagtgaatctggagactggaattttccaagtsccattgctaattttgattagtcagttcatttccctggacctgtcttttcatctgttaaataagcagatctcaaacttttcagactgtagttcacttagaa

SEQ ID NO: 329047 - DNA, 201 bp, Homo sapiens
aaaaggccaaagaaaaacttatgtggcatgattgtgatgccctcaccttccatcctaaccctctctaatcggccaatattaatatcaaatgttaaaaaaakaattatatttattttaaaacagaggacacacatacacaaagccaccacttatgtcaatacagtttaacccctacacaaaggtgacaagacaaacaggtga

SEQ ID NO: 329048 - DNA, 201 bp, Homo sapiens
catatataagatcatacgccttatttacatatatatgcatatggagagaaagagtccctcatttcctgtagcaggatacacaaaatattctctaatctagyttttactgcttctcttcaattcttcagtttttgacattctcaactctattgctttgtatgatccttatctagccatatctagctggactgaattccttgc

SEQ ID NO: 329049 - DNA, 201 bp, Homo sapiens
ccctcaccttccatcctaaccctctctaatcggccaatattaatatcaaatgttaaaaaaataattatatttattttaaaacagaggacacacatacacaragccaccacttatgtcaatacagtttaacccctacacaaaggtgacaagacaaacaggtgagtagaggctaatacctataacaagttctgcacaatctgt

SEQ ID NO: 329050 - DNA, 201 bp, Homo sapiens
atacttccctttagttttgtaagtttttgctccttctattctgaagctttatggttaggtatgaatacagttaagattgctttgtctttctgctgaatctrtcttttagtccttatgaaatatccctctttttccgttttgctccttgttttacagtctacatcatctcctttaataacgcagttcactattattatgatt

SEQ ID NO: 329051 - DNA, 201 bp, Homo sapiens
tgcatctttgttcttggaggatattgatcttttgcttttctcattgtgttcttgtcaggttatattatcagactaaccctggcctcaaaaaatgacttggkatgttttcctttgttctctattttgtggaagagtttgtataagaatggtgttatttcttctttacatatttggtagaatttacaagcaaggccatgtgga

SEQ ID NO: 329052 - DNA, 201 bp, Homo sapiens
aaattttatgccttctatttattttctttgtccattataatgtccatgctaaggtctccaatataatgttgaatcaaagtaatggaagcattatcacaaawaggtataaagatactgtccgattatttttctgtacctattgagatgactatatgaattttctcttgtatattattagtatgttgagttacactgattgat

SEQ ID NO: 329053 - DNA, 201 bp, Homo sapiens
tagtagattccagaaagtaggcactgccaatctcctgagtgttaaacatcaatttccctatgcaaggctgtatgagtaatttatccagtgaagtaatgccsttagcatctcttactgtctggcaattaagaatcacccttgcaggacagttttgcagttgtttccaactctttctctttacctacatcttcctttcccatt

SEQ ID NO: 329054 - DNA, 201 bp, Homo sapiens
tctctttctttctctctctctctttctttctctttctctctttctctctctccctttttccctccctccctccttccttccttccttcctttccttccttmcttcctttctttccttccttccttcctttccttctttgtttctttttctttctctctttcttcagcagagcctgcactgtcacccaggctggagtgcagt

SEQ ID NO: 329055 - DNA, 201 bp, Homo sapiens
attgtttttcatttcacttcagttttggttttgatagtctgtatcttatcacaaaggaggtaagagttagacaaaagcatttttcaataagggcaagtgtwtggttagaagttaatatgacctccctttgattctattatattcacttgaatttgacaaatataaaaaggccatggccccactcttcaagaagattatgat

SEQ ID NO: 329056 - DNA, 201 bp, Homo sapiens
gtcgcccaggctatagtgcagtggtgtgatcttagttcattgcaacctccgcctcccgagttcaagtgattctcctgcctcagcctcctgagcagctgggwgtacaggcgtgtaccaccacagctagctaatttttgtatttttagtagagacaaggtttcattatgtcggccagggtggtctcctgaccttgtgatccgc

SEQ ID NO: 329057 - DNA, 201 bp, Homo sapiens
atcccttctgtcctgaagattcagaatacattaaagcttttagatttctggccaatggaatatatttccaattcagacagatcatttcctaattgactaaraggaattcctatagatcagaaaaatgttaattaactattctattacatattaaatgctaaatacttgatgatcatttaaaatatgtttatgacatattct

SEQ ID NO: 329058 - DNA, 201 bp, Homo sapiens
aagatctcttggagaaggtgatacgagaattgtaacctgaatacaagagaaatcctactgcgcacagatccttgtgttgcagtttttcttttatatatatwtttttccttatttcacatagtctggctttagtttctatgttgtttgtttctcttccttccccatcttggtggtaaattacctcactatcaactcaactca

SEQ ID NO: 329059 - DNA, 201 bp, Homo sapiens
atatattttggggtaagatgctttaatttctttcagggcctgctctctgtcatgttggtattttattactctaaatagtcagctttgtcagtcttctattrtaacgttaatgctggtcagctgtgcctgaattccaacgggaggaggaggagggattaatgaagcatgtccaaccacccattcccatcatggcctgaacta

SEQ ID NO: 329060 - DNA, 201 bp, Homo sapiens
aagttcagtgattcatcattttcttattgtaaaattataaaattcctattttggccaggtgcggtggctcacgcctgtaatcccagcattatgggaggccraggtgggcaaattacctgaggttagaagttcgagaccagcctggccaacatggtgaaaccgtgtctctaataaaaatacaaaaattagccgggcacagtg

SEQ ID NO: 329061 - DNA, 201 bp, Homo sapiens
aagaaagaaatagaagagataagggagctaatttgttatcaagaaatgattatactctaggttctttatatgtgagagtgtatatatatatatatatatakagagagagagagagagagagagagagagaacctaattaatcatcaaaactatccttccaatttttgtgtgttggtttaatttcctccttttttaagttga

SEQ ID NO: 329062 - DNA, 201 bp, Homo sapiens
aaggaaagagctctatttattcaacaaattgaacacactatgaacaactactatgttgtcctactttctagacctttgctttccaaaaaagtagttataaktcacatatggttatttaaatttaattaaaataaaataatacaaaattacaaattcattcctcagttgcactagccacatttcaagtgcttagtagccagt

SEQ ID NO: 329063 - DNA, 201 bp, Homo sapiens
ggatcaactgaggtcaggagtttgagactagcctggccgacatgctgaaaccctgtctctactaaaaatagaaaaaaattacccaggtgtggtggtgggcrcctgtaatcccagctgcttgggaggctgagacaagagaatcacttgaacccgggaggcggaggttgcaatgagctgagattgtgccactgcactcccacc

SEQ ID NO: 329064 - DNA, 201 bp, Homo sapiens
gactcgtctttttttcctctaagtactcagatgtttggttccaaaatatatgatcatggcagaatgtgatccgaaaatcaccaggtcatctttgaatcagkacatagaacccagatctaacatttcttactgtgtgattttggcaagatgtctgttatctcatatacgaagtgatcaggttgagttaaataaacaaggtat

SEQ ID NO: 329065 - DNA, 201 bp, Homo sapiens
ttgtctaattatgggtacagtgttttctgccttatttttctcctcaaacacatctcatgttttccaaccttcttgcttttgctcctgctgtttcttctggraaaaaaaaaaaaaaagtacttcttgttctgatctgttttctaagtactaaatcaaattttctttctcacagtaagcctgtcttcaccaatccaactcatg

SEQ ID NO: 329066 - DNA, 201 bp, Homo sapiens
agtatgtgttaaattaaaatcatgataaaggaagaaaaatcataataaaaacagaacatgatagatttaaaaatatatatagaatgtctaaaaataaaaawggtataaacaattgattaaaaatggatactctgtaggtaggtaaaaaacaataaattgaaatttaaggtaaaaatagaaattagaaaatagtaattagat

SEQ ID NO: 329067 - DNA, 201 bp, Homo sapiens
gaacattagtttattcagcttataaacactttttaagcctctaatatgtgctgaaaatgagtcaacatctcccgaaacacagcccgacaacttttttttttgtttgtttgccctaggagcatggaagttcaaaagtaagtgtctggtgtgcagtagattgagagttgtgaactcataggctgcttgacctcatgcaaaatt

SEQ ID NO: 329068 - DNA, 201 bp, Homo sapiens
cctgcccacacccgataggccccagtgtatgttgtttaccctgccccaaccatgtgtccatgtgttctcatcattcagctcccacttataagtgagaacaygcagtgttgggttttctgttcctgcattaattggctgatgataaaggctttcagctccattcatgtccctgaaaaggacaagatcttgttcctttcactg

SEQ ID NO: 329069 - DNA, 201 bp, Homo sapiens
aatttttatgaaggctctgtatgacaaaacatgaataaaactaagacaagtcagagattggaaacagatattttcaaaacccataataaaagattagtgtycagtatacatcaagtacttcacaagtcaataagaaaaatataaccctatttaaaaatgggcaaggggtatgaacagaaggaagttcaaataaccaataaa

SEQ ID NO: 329070 - DNA, 201 bp, Homo sapiens
tcagaggaggctcacatagtgtgtgtgttgaggcatgaacccaaagctgcttaaatggattactgttgcatctcaaactcagctgcactggtaggtttccrtcataggagaggctttaaaaataaaattataaaggaaaaggtctgtccaggtactgattatatacagatggaaaatgtctgaaaaatttgttttacttat

SEQ ID NO: 329071 - DNA, 201 bp, Homo sapiens
tgtggtccttgccactatgaaaaggggtaacacttagagcctagcttgcttgggaggggagcattaagggttaagcaagatcattggctattcaaaatgcrtggtgaaatcatcaactgatacagtgtcttcacagagacttaagattcctttaaattacataggatgaaagcaattgagcagctgcagtttatgcttgtt

SEQ ID NO: 329072 - DNA, 201 bp, Homo sapiens
taactaaggggggttgggggaatcttgaatatattaaagtcaatcccaatgcagaccgaaaaaatttaaaagaaacctgatagagaaaaagcaaattagarcagttagatttacccagtcatacatatattattcacatttctagaaggaagaattgtttttgggacaagtaggctcctaagtggtaaagagctgttttgg

SEQ ID NO: 329073 - DNA, 201 bp, Homo sapiens
ttttccaatagatatccaggtaatccagcaccattggtcaaaaagatgtttctttcccctctgaatgccattggcgcctttgtcaaaaattattttactayatatttatggtactatatctggactcagtattttgttccagtgatttatatgtctagcatatgccaataccatactgtcttagtaagtatagctttataa

SEQ ID NO: 329074 - DNA, 201 bp, Homo sapiens
taatgatcagactagttttatgagtgtttaaaaagaatatcacagaggtcaactgtccttctcaatacatcacatgaggtgatgtgtaatatctacttgaygtttctggtgacgttaacctttatcacgtggttaaagtagtgtttccagattctctcaagggacaaatctaggtaatatatgtatgtatattatcctatg

SEQ ID NO: 329075 - DNA, 201 bp, Homo sapiens
ttaccatagaatatttgtcagcattaagaaaccaactttgatatattactattaactaaactccaaactttatttggattccaccagtgttcctattaacrtatactttctcttctggaattcagtccgagattccgcattgcatttatttgtcatgttactctaagtcctccagcctgtgacaatttttcaggcttttct

SEQ ID NO: 329076 - DNA, 201 bp, Homo sapiens
aaagtgtcataaaacctgggctgttcatccaagcagtcttcctcttacccacatttaatttttgagtagcaagctgatggcatttgggggaaaggaaaatkattttaagatgattaatctttgcagcttcacccagccctgaaacctgaaatgccattcactgtggtccagtgagttctggctctgcgcaggttcagattt

SEQ ID NO: 329077 - DNA, 201 bp, Homo sapiens
atacacagacccagaacataagagctcttgaaagtgtcataaaacctgggctgttcatccaagcagtcttcctcttacccacatttaatttttgagtagcmagctgatggcatttgggggaaaggaaaatgattttaagatgattaatctttgcagcttcacccagccctgaaacctgaaatgccattcactgtggtccag

SEQ ID NO: 329078 - DNA, 201 bp, Homo sapiens
taattaatggcagtaaaatactgaaaggtgaatatcaaagcttgatctacatttttagcccaattcagaaataaaagactgtaatcagggctgtgtcagcytctctgaaatatctcagttaacatatctcaattgccttatacacagacccagaacataagagctcttgaaagtgtcataaaacctgggctgttcatccaa

SEQ ID NO: 329079 - DNA, 201 bp, Homo sapiens
aatagtgagctaatatttgaatccaggactatctgagtttaccgtctcatgatcttcacgagtcatgcatatataaacttaaatgtttgaatgataatcgwctattagcaataataaaattccatgccaggttatttcttctttttcccaccccaagcttactaattaatggcagtaaaatactgaaaggtgaatatcaaa

SEQ ID NO: 329080 - DNA, 201 bp, Homo sapiens
taaccacattagtcagaatcaatgaactcctttgtaaagttgcattcattttgtcagattattttttatttagagtctcttggaagcaagcaaaaaaaaaagtgtatctattactagtataaacaaaattgttcatgtaatctgagaacatttgtatgtcacatgaagcccaaggataggaaggtggctgacattcattaa

SEQ ID NO: 329081 - DNA, 201 bp, Homo sapiens
gaccaactcagcctatctgaggtctttaggatattcataggatattcatttattttctgcaaaatattttactactttgtattttaaaggaggatcaaacagagatggtaactctccagtccaaggggataaaaaatactaatggtgagtgttcaaggataagtaagacaaattgtgttgactagaacagactttacttat

SEQ ID NO: 329082 - DNA, 201 bp, Homo sapiens
agaccaactcagcctatctgaggtctttaggatattcataggatattcatttattttctgcaaaatattttactactttgtattttaaaggaggatcaaacagagatggtaactctccagtccaaggggataaaaaatactaatggtgagtgttcaaggataagtaagacaaattgtgttgactagaacagactttactta

SEQ ID NO: 329083 - DNA, 201 bp, Homo sapiens
gaagaccaactcagcctatctgaggtctttaggatattcataggatattcatttattttctgcaaaatattttactactttgtattttaaaggaggatcaaacagagatggtaactctccagtccaaggggataaaaaatactaatggtgagtgttcaaggataagtaagacaaattgtgttgactagaacagactttact

SEQ ID NO: 329084 - DNA, 201 bp, Homo sapiens
ccagaagacatgccttttccctccttacttcaaccctgattaacatccccctgaggaaaaataagagtagggaaatttcttaccaactactttaatctatacttttgtacgcaatcatcacaataccaacatgaaatggatcattgttattatctacatttcagaggattagtggggttaagtaccttgtttaaaatcttg

SEQ ID NO: 329085 - DNA, 201 bp, Homo sapiens
accagaagacatgccttttccctccttacttcaaccctgattaacatccccctgaggaaaaataagagtagggaaatttcttaccaactactttaatctatacttttgtacgcaatcatcacaataccaacatgaaatggatcattgttattatctacatttcagaggattagtggggttaagtaccttgtttaaaatctt

SEQ ID NO: 329086 - DNA, 201 bp, Homo sapiens
taaccagaagacatgccttttccctccttacttcaaccctgattaacatccccctgaggaaaaataagagtagggaaatttcttaccaactactttaatctatacttttgtacgcaatcatcacaataccaacatgaaatggatcattgttattatctacatttcagaggattagtggggttaagtaccttgtttaaaatc

SEQ ID NO: 329087 - DNA, 201 bp, Homo sapiens
gtaaccagaagacatgccttttccctccttacttcaaccctgattaacatccccctgaggaaaaataagagtagggaaatttcttaccaactactttaatctatacttttgtacgcaatcatcacaataccaacatgaaatggatcattgttattatctacatttcagaggattagtggggttaagtaccttgtttaaaat

SEQ ID NO: 329088 - DNA, 201 bp, Homo sapiens
gcgagactctgtctcaaaaaaaaaaaaaaaaaaagaggtgaagtacctttcccacagtcacatagttaataaatggaatgactggtccttgaactcagtgwtccaacctcagagagcgttattcttaaccacctcattagagtaagaagaaaacactaaaaccaagaaaactatattgcagtgtgattaggagcagcaatt

SEQ ID NO: 329089 - DNA, 201 bp, Homo sapiens
tattcaaaatgcgtggtgaaatcatcaactgatacagtgtcttcacagagacttaagattcctttaaattacataggatgaaagcaattgagcagctgcartttatgcttgttcagagagctctctagtaaacttgttgctgtactgcattatttttattattgtgatctttggttctgaagtgggcgttataaatacctg

SEQ ID NO: 329090 - DNA, 201 bp, Homo sapiens
tgaccagtatacttaattgtgaaagatcatattttagcatttggggagatatatctttacaatggacaatgattgtgatttttagtaccctctataaattytgggcttttctttttttttttttttttttcagtaggtgacagtttatttcttcacactctaataaaacaacctgaactcaccatagcccttcacttctat

SEQ ID NO: 329091 - DNA, 201 bp, Homo sapiens
aatttctggttacgtagtaatatacaagagtattaaaataccaaaacttgtgaaccttcacttccccgtcagcaatatattgcttatttcatttgttttgktttaatttttatatttatctttttagtgcacattatgaaaagtactttcatgatgcatttaggaaagactagtatcaatattcataatctaacagacaca

SEQ ID NO: 329092 - DNA, 201 bp, Homo sapiens
atgcctggcccaccttggaaaactttttaaaaaccagcacactagttctactctcccccttgtctaaaccaaacacattaattcaacaaaaactaaaatgraggataaactagtaatacatttgctggcagtaggaccaaggaaagagaattatgtcctggtgatcttagtagaatataaggggcaccaggtttcaggcaa

SEQ ID NO: 329093 - DNA, 201 bp, Homo sapiens
tttgaaatgaatgatttctcaatcttattcaacatatttctagggtctaaaagaatgcttgacacatagttgtctttcgtatgatatttaattgatttgargttgtcatcaattttgagatgtgtcattatttcatctattactaaaaaaaagattgccaatgaaaccataacacatcatgaattgcaagatgcatcttga

SEQ ID NO: 329094 - DNA, 201 bp, Homo sapiens
agttgtgagcagcagcatgactcagcgccagtgtctgcctagctgtggtgacagagaggacaggtgtttgtccatgctgaacgcagccctgctgcagttcycctctgtcacctggaaggtgaatcaagcagcaaaatggacagtagcacctgttctgaggtcccagaactgctgcccaccctggcagagcaaaaagcacaa

SEQ ID NO: 329095 - DNA, 201 bp, Homo sapiens
gctgtgatgaattaacacataaagcaaattaaaaacagcttatcgcttgttaaattaggtgatggggcactgtagcatttttcccagatgtgaggatccaytaatatccaaaggagccagaagctgctgaaatgtgtcagctgcttggttttagggacctgacaagtctgaataaatgtaatcctagaggggcagattgtc

SEQ ID NO: 329096 - DNA, 201 bp, Homo sapiens
caatctaatgagctgtcacatgaaggaaaagtagtaatgaaataacaaattcagataggtcaaatggcatgctgagaggaacgaataaacaatagcgcatyataatcagtatctctttaaagacaatctcaggaaattttcgtggttttcttgtttttaaagcaaattgctaatacttttgctgatgtctcaaagcagtgg

SEQ ID NO: 329097 - DNA, 201 bp, Homo sapiens
tcttcctttctcaccctccatgccactaacactgaagtaaaacaaacagtaactagcataaagccagagtcttcttcagccaccaacaatgacatcaaacyaaaattttccagctgccttatcccacatgccatatcattacaagcttatagttgaggatgaaatgtttattgtttgaacactctcaatcctaaaattcca

SEQ ID NO: 329098 - DNA, 201 bp, Homo sapiens
cgctgccgccttgcagtttgatctcagactcctgtgctaggcgactccgtgggcttaggagcctctgagccaggtgtgggatataatctcgtggtgcgccrttttttaagcccatgggaaaagctcagtattcaggtgggagtgacctgattttccaggtgccgtccgtcacccctttccttgactcagaaagggaactcc

SEQ ID NO: 329099 - DNA, 201 bp, Homo sapiens
cctaagtttttttttaaatgaatataatgtgacaagtcattaagaaagatattatggggtgcatacaattctttggagcttctcagctaattggccaactmtttcatgtcattctctgcctctgattttgacctgtagtaggactattttgaacaactttgtaatcacatgctccacaatatcagcatggatgggcaagca

SEQ ID NO: 329100 - DNA, 201 bp, Homo sapiens
tggcgggcgcccctcccctagcctcgctgccgccttgcagtttgatctcagactcctgtgctaggcgactccgtgggcttaggagcctctgagccaggtgygggatataatctcgtggtgcgccgttttttaagcccatgggaaaagctcagtattcaggtgggagtgacctgattttccaggtgccgtccgtcacccctt

SEQ ID NO: 329101 - DNA, 201 bp, Homo sapiens
gcaaatggctgtagactcagacgaagtcatcaagagccttggattttcaaactgacctggaaggcaaatagatgattgtactggggagaaaggaaagtacygatgagggactatgtatgatttaaagaaggctgtgatagtttgggaaagagatggactttagtacaaggagaaaagggaaggaaattcgcatgtattgag

SEQ ID NO: 329102 - DNA, 201 bp, Homo sapiens
gttcgagcttcccagctgctttgtttacctaatcaagcctgggcaatggcgggcgcccctcccctagcctcgctgccgccttgcagtttgatctcagactsctgtgctaggcgactccgtgggcttaggagcctctgagccaggtgtgggatataatctcgtggtgcgccgttttttaagcccatgggaaaagctcagtat

SEQ ID NO: 329103 - DNA, 201 bp, Homo sapiens
gcaatagtttgttcccagaaagaatgcttaataaatggtgtctgtggattttgcattgtgattcttaacaccctgtgattctaggaaaattagcaggtgcrtgcaatgacatccatagttcttctacccatagagaaaggtcatctgttcttactaataagaatcacatttccagaacaagttctgatatgtgacaatacc

SEQ ID NO: 329104 - DNA, 201 bp, Homo sapiens
tgaactgcttccagtttagctaccaactttttacacaattttttgtatgtggtttggaaccaactctaacctaaaacagaatgctttaaataaaataatcctataaatatttagcaggtacaaacctcctatagcccacactggccattttgagatgatacttctaccagtttctttgtttgtcactatcctaagaagtca

SEQ ID NO: 329105 - DNA, 201 bp, Homo sapiens
gtttcaccatgttggccaggctggtctcgaactcctgacctcaagtgatctgcctgcctcagcctccgaaagtgctgggattacaggcgtgagccgtcgcrcccagccattgagtcaatttctaaatacttctgagtgttcactactgtgcagaaagtggttcagttatggagaagcagatgtcctcagaaggtgagctat

SEQ ID NO: 329106 - DNA, 201 bp, Homo sapiens
tacatgcatgagccaccatacccagtctaatttatttggagtagataactagaagtagaatttctggatccttagataggtgttatgtttaactgttatargaagatactaatctttaatcagaacctgcccaacattttggtacagtggttgttctagtctacatttgcaccagcagtgtataagggagccagttcctct

SEQ ID NO: 329107 - DNA, 201 bp, Homo sapiens
cctaataaggtccacttcccttccttagctttagatttgaatgaaagatgtccaccccaccattaaatgttgtatttagagtcatttgcagaataacttayaatattatccttagtggcaatgaacgtccaaacatcagaatttaaacctttaactttgcctgttaagcagttgataaataagaaatatatactttacaga

SEQ ID NO: 329108 - DNA, 201 bp, Homo sapiens
agggtttcaccatgtttcccaggctggtcttgaactcctgacctcagatgttcttcccgcctctgcctcccaaagtgctgggattacatgcatgagccacyatacccagtctaatttatttggagtagataactagaagtagaatttctggatccttagataggtgttatgtttaactgttataagaagatactaatcttt

SEQ ID NO: 329109 - DNA, 201 bp, Homo sapiens
aggcagaggttgcagtgacccgagtttgcaccactgcacactccagcatgggcgacagaggaacacttcatctcaaaaaaaaaaaaaaaaaaaaaaaaaaagaaagaaagaaaatacaggatacagcacgcataatgtgtaaacgtagatgttgataagtgaagcctttttgtattgaatatagcatactctcaaaaggca

SEQ ID NO: 329110 - DNA, 201 bp, Homo sapiens
gaaaactggctttctgtgcatgaaagagaatgtcatgtaaaaggcaaacaacacaaaaaaaggcttcatagtttggtttacttaagaaagaatttttttttcttcatcccttatagtttcaaaaatcttgcctagatgtatataaagataaatcttgaattttctgattaaagaaagattttgttctagatttttcataaa

SEQ ID NO: 329111 - DNA, 201 bp, Homo sapiens
atccagttttctgaaaaatcataggcaaaataacaaactcagtattggggcaggcaaagtgattgcccaactgtctgatattgtggtgtgtaaatgtcatyacttaccctgatgagctgctatgatggtactaaggatttggaggagtcatttcagatgctcttgaatgtctttctcccgtttttcatatactcatgagta

SEQ ID NO: 329112 - DNA, 201 bp, Homo sapiens
tttagtagagatagggtttcaccatgtttcccaggctggtcttgaactcctgacctcagatgttcttcccgcctctgcctcccaaagtgctgggattacakgcatgagccaccatacccagtctaatttatttggagtagataactagaagtagaatttctggatccttagataggtgttatgtttaactgttataagaag

SEQ ID NO: 329113 - DNA, 201 bp, Homo sapiens
ctcccaggttcaagcaattctcctgcctcagcctcctgagtagctgggattacaggcatgtaccaccatgaccatataatttttgtatttttagtagagayagggtttcaccatgtttcccaggctggtcttgaactcctgacctcagatgttcttcccgcctctgcctcccaaagtgctgggattacatgcatgagccac

SEQ ID NO: 329114 - DNA, 201 bp, Homo sapiens
tttccccattggttcccccagagctacttgaatatcttttgcagttaggtttgatatatagatcaagaaaccaaaattgctattctttactccaagtaaarcccaccaaaaaagttatcttgaaaagtataattgcttctttagtaaagtagtgatgcaatatttagattttgtaaaaatttctgacagaagttgtgtata

SEQ ID NO: 329115 - DNA, 201 bp, Homo sapiens
caatctcgttttactagaatgtaaaatccatgaaggcaggaatttttatctgtttttattcactgatagatcccaagctcctagaaccatcactgacatayagtaaatgctcaaaagtatttgctgaatgaaaatgagtgagtggccaaatgaatgtaccttcttacccatattcccaaccaaacatcaagctgtacaact

SEQ ID NO: 329116 - DNA, 201 bp, Homo sapiens
ctacttatgagtgagaacatgtggtgtttggttttttcttcttgtgttagtttgctgagaatgatggtttccatcttcatccatgtccctgcaaaagatgwgaactcatccttttatatggctgcatagtattccatggtgtatatgtgccacattttctttatccagtctatcactgatgggcatttggattagttctaa

SEQ ID NO: 329117 - DNA, 201 bp, Homo sapiens
atgacaccttctccttctatatgaaatagacgaataaagtatttgtgtgtgtgtgtgtgtgtgtgtgtgtgtgtgtgtgtgtctaagagagagaaaaatakggagggagagaaggagagaggtagaagtaaggaagagagaagaaaggagagatggagggaggaagaggtaaagaaggagagagagatagaaacagagact

SEQ ID NO: 329118 - DNA, 201 bp, Homo sapiens
ttcagtactgatgttctctgcctaagaaactctctctccctctgtgtgttcctgaaacaagcacgctctgaaatgctaaagaggatctggggcctatgcaktgttagggacaagtctcatctccacatctcagtgctattatttcaccttgtccccaaaagtgaaacagcttaaatcagaaatcttatgaaacctttcacc

SEQ ID NO: 329119 - DNA, 201 bp, Homo sapiens
agtccttaataaattattgctgaataaaaaatatggcgttatattcctaaattttgtctcttatagagagcaagagatgttcttcattttcatttatttawtttttttgagacagagtctcagactgtcacccaggctggaatgcagtgccgcgatctcggctcactgcaaccttcacctcccaggttcaagcgattcttc

SEQ ID NO: 329120 - DNA, 201 bp, Homo sapiens
tgcctcctctgcctgggcacccactttggcggcacttgaggagcccttcagcccgccgctgcactgtgggagccgctttctgggctggccaaggccggagscggctccctcagcttgcagagaggtgtggagggagaggcgcgggcgggaactggggctgcgcgccatgcttgtgggccagcgtgagttccgggtgagcgt

SEQ ID NO: 329121 - DNA, 201 bp, Homo sapiens
tatcttctgcctttgtttatgcctcctctttccttgggaagatcattaattatttcttaaaacccaattgaaataccacttctaaactagtagttcatttkactccgtgctttctgctgttctttcatatcagcagattcaggtggagacatgatggttttatcatgagacatatagataaggagagatagaggactggaa

SEQ ID NO: 329122 - DNA, 201 bp, Homo sapiens
gtcacctttgctccatttcccaacaagtttctcatttccatctgagaccacctcagcctggactttcttgtccatatcactatcagcatttttgtcaaagycattcaaccagtctctagggagttccaaactttcccacatttccctatcttcttctgagccctccaaactgttccagcctctgcctattaccaagttcca

SEQ ID NO: 329123 - DNA, 201 bp, Homo sapiens
tgcctctctggccttcccggtgaagggagggaggaattgtgctacgtttataacatacaaatgaaccattttcagataatcagaaaaaaatagataattgmactaaaactaaattaaacatattgatctggaatgattcagaaagaaatttggagacatggttacaatgcttgccctgataaggtggtaggaagaaaaaaa

SEQ ID NO: 329124 - DNA, 201 bp, Homo sapiens
gctgcctgcaattgactgaaacccagctgcttgtgagtatctgaaacgctactctgtgtaacacttctaagttaggtttcagattgttatgtgggaactcrgagtatggagacagcgttaacctaagggcctcctgcttatttaatttagcataactacaatcagattattacaagcggtagtgttggaagcaaatatgac

SEQ ID NO: 329125 - DNA, 201 bp, Homo sapiens
gtcagggctacctgtgcaatcacagatgtgcttgcttccatgaagctcttgctagtccaacttggtaggaagaagtcacttctgcaataatttcattgcayttttatctatataatttctaccttgaattataattatttgtgcacatagccataacccccgattgactttaagctcatcaagatgaagacgttgtttaat

SEQ ID NO: 329126 - DNA, 201 bp, Homo sapiens
gtaaagaaattattctaagtctgaaagttggacacaattctgtgttagtattccaaagcctatatatgataaataacaaaaaagacctcctcttttcatartagcctgagttggagagagaggaaagcaagaaaaatagaattcagcgttccacaaggtagttccaattcagtctaaacagagatcccaattgtaatgttc

SEQ ID NO: 329127 - DNA, 201 bp, Homo sapiens
aagaatactacagctgcaaggcagtccttgtattactaaattgaaaattgctaacataaaacagataaatattttgatctctttttgtaattgaaagataktgaaacaattgtttcttttttcctgcaaggactgttttcattcattttgtcctttgcctgtccctatttatgaattattctcccccctcttccttattac

SEQ ID NO: 329128 - DNA, 201 bp, Homo sapiens
tggctattattaaaaagtcaaaaaagtccttgcccatgcctatgtcctgaatggtaatgcctaggttttcttctagggtttttatggttttaggtctaacrtttaagtctttaatccatcttgaattaatttttgtataaggtgtaaggaagggatccagtttcagctttctacatatggctagccagttttcccagcacc

SEQ ID NO: 329129 - DNA, 201 bp, Homo sapiens
tctcacgtcaatgttcaactgagttggcgatagggctgttgaccacatagtcatgcagaaacctctgctccttccatttttgtcactaccactttcatcarttgacttctaagattgccaaaaaatagagagagagcatggagaattgcacaagtggtttcatgaggaggcctggacatggcccgcgtcatctctactggc

SEQ ID NO: 329130 - DNA, 201 bp, Homo sapiens
tcttggaagttgtttttttctccccagtttgcagcactttaataatgtgaagtgattcagtttggagaagcactgaagcaaagaaaagcctcatggagccrtactgagggaatgaaaatgtatctcgttaattcagccttcccctattgtcctcttcctatccatcaaagaaaattattttaaaaatcattcatatggaaa

SEQ ID NO: 329131 - DNA, 201 bp, Homo sapiens
tttggactatagtaggtcttattcattctttctatttatttgtacatattaaccatccctacttcccccaccaagctccctgctacccttctcagcctctrgtaaccatcctttactttctattgtatgtccatgagttcaattgatttggtttttagatcctacaactaagtgagaacatgagatgtttgtctttctgtc

SEQ ID NO: 329132 - DNA, 201 bp, Homo sapiens
cagagagggcagtgtatatctcaatatatattgagaaaataactgtcatgctataacttttgtctttaaaaatgaaggctaaataaagatattttcagggraaaaaaaaaaaactgaaagactttggcaccagcagaacttctctaaagaatgttctaaaaaaatgccccataggcagaaggaaagtgatcctagagtgcc

SEQ ID NO: 329133 - DNA, 201 bp, Homo sapiens
ataagattggagacagccaaacttatcactttccgacattctcatttgagagtgatggcattggcatattgcatcaaatcctactgtacagccatgcatcrtggttataccagaaaagcctaaagttctctagggttttcttcgacccaacagttctttcaggtataatctattgatctaaaataaaaaggggggagggag

SEQ ID NO: 329134 - DNA, 201 bp, Homo sapiens
ttgaaatataaattaaaacagacatttagccaggtaaagaatggggtctcgagagcatcccagatagaagtagaggcatgtgagtgtgatggctatagtgyaggaaaagatcttgataacttctaggagtctaataatatgaaaattaattacatgaaatgatatggctgagatgagcaagggccagatcatgcttagctt

SEQ ID NO: 329135 - DNA, 201 bp, Homo sapiens
gctggcaaaatttaaaatccactgtgagccaaattctagcatactaaactgcaaacagctgctttggcttttttttttttttaacattaacagaaaatccyaagctaaatttaaatttggtttttaggaagaaacaattcgagggaaaataatcagcatctagttttgtttgctttccattaagaagtctcggaatacaat

SEQ ID NO: 329136 - DNA, 201 bp, Homo sapiens
actgttggtggcagtgtaaactagttcaaccattgtggaagacaatgtggtgattcctcagggaactagaactagaaataccatttgacccagcgatcccrttactgggtatatacccaaaggattataaatcatgctactataaagacacatgcacacgtatgtttattgcggcactattcacaatagcaaagacttgga

SEQ ID NO: 329137 - DNA, 201 bp, Homo sapiens
gagccggtcttggaatggccagagccaggcaaagatctcaaatgtccagaggtgatctacagatccatggaggagaggtggaaggagagccatactgctgmactccagggggcatcaggaaggcaggctttgccctcaaggtgaataaactcagaagaggctactctttgatgtctttgttattacttttcttattccaag

SEQ ID NO: 329138 - DNA, 201 bp, Homo sapiens
tttgtttgtttgtttgtttgttttcaggcagatctgatgtctctcagggtctgcaataactgacttgctgtcaagattagcttccacttgtggctgacctrtttggcaatggtcaaatacctgtgtctaacagagagatggtctacaggtctacacttgtgcagcccttatcttttggggggatttgattgaatacctgcc

SEQ ID NO: 329139 - DNA, 201 bp, Homo sapiens
  misc_feature (1)...(201): n = A,T,C or G
tcaaggtatatacaatcttttcagtttaataagtaggcaggttaggttgattatttgatcagtatcactcaaatgtctattatgagctaggcactattccnggccctggagatacaatgtttactacaacagggtcctggttctctagaattggaatctactattaataattccccaaaggaggcaccaccttatgcatac

SEQ ID NO: 329140 - DNA, 201 bp, Homo sapiens
aacacgttttcagtgcagaaaaggagattccagcttgaattagggggcgttgaaggattaggaaaatagggactggggttaggagtaagatacagaataastatgaaataaaacatggttcactttcattacagggaacaatttgtgaaggagaatgaaaagaatcagaactggaaagttagactcaagtcagttttgatg

SEQ ID NO: 329141 - DNA, 201 bp, Homo sapiens
agctgatttgggtagcagtagaccgtgctgggaaatagtgccttgttaaaccgaactgcagtgataatattgagagggaaagtgaaaatgtctgagctccrcttaatcaaatgaccaaccattaaaacatgaatatcaacatctgtgctttggcttcaaatgcatatatagcacacatcaaaacaaaagtccttaagcgta

SEQ ID NO: 329142 - DNA, 201 bp, Homo sapiens
gtttctcttttatgtattctatttctcagggatttgttgcagaacggaattcagtaattgaaccatattcttgatgtattcatggaggagaatttagggcwttcagcatgcagtcacattaactagtgcagtcgcctcctcaggcattctttctgcagaaggaaagctagaaatgcttctcttattatttgtttcagtgat

SEQ ID NO: 329143 - DNA, 201 bp, Homo sapiens
ttcatttatcagttgatggacatttcaattgtttccaatttttagttattatggataatgctgctgtgagcatttgtgtacaaacttttctgtgacatatrtttttatttccattggctgtatgcctaggagtgagattgttgggtcatatagtaactctatgcttaacattttgaggaactgacaggctgttttccaaag

SEQ ID NO: 329144 - DNA, 201 bp, Homo sapiens
taagaaaagctttaactaacaaagtcttgatgttggcattacaagttttcctggttcaaattaaatgaagacaaagattaatttctgagattgagaggacmttatttcttgacttggttttgccacgcaaaaaggtgaaattagtgaaagtccgcctccataaaccttccctttttgaattttcttcccacctaagggacg

SEQ ID NO: 329145 - DNA, 201 bp, Homo sapiens
ctggatttccaaattagaatttaaattgcattgttgatttaaaaagagtaaaaatgagtcacagctgacatgggtatttcaaaaattttcaggttatcttyatgtttagaaacgtgcagaggggaaggacttgatttgccaggactctattttcaagttaattaaacagaatatgagcactatacagactattctccatct

SEQ ID NO: 329146 - DNA, 201 bp, Homo sapiens
ttggcctcccaaagtgctgagattacaggcgtgagccactatttctggccccccaagataatgcttctttggtaaaacccacagcattgcacccagcacaractaatactcactcaatgtcagctgttgttattatgatgcaggaatctgactatggagctaggcagttggcctccttcgactaaattcacctcatttgtt

SEQ ID NO: 329147 - DNA, 201 bp, Homo sapiens
aaatgtaatattttatgctttttttttaaaaaaaaaaaaaaaaggagctccagattgtaaaacttccagaccacataaaacctgcatctgcccttgcaaarcacatgctatgctgagagaagtaattcacaaagcaaataattctggccatgttttcctgtgtaattaaagtgtgatctccttcagcaaaccttccataga

SEQ ID NO: 329148 - DNA, 201 bp, Homo sapiens
cttgctaagaattcattgcagtcatgcttttagaatattttttctttgtcccccagctccttgcttgatacatggtaggcagtcactaagtgtttaatgartaaatgaggtagcaggaaaacaatgaatctgcagagatgacagaaggacattggggaaaaggaaagctcaagattatatataacatgtttggttaaaaag

SEQ ID NO: 329149 - DNA, 201 bp, Homo sapiens
tttttatgaagggtgcagtagctccacctcatatatataatatatattatatacatataatgtatagctgtaaatacatttctgccaaattttctttttargattttaattattttcaaaatagttacttttattcctttaagtatttgtaaaagtaataccttttattgtagaaaggtgggaacatttagaaaaacataa

SEQ ID NO: 329150 - DNA, 201 bp, Homo sapiens
aatgcctaaagatcaggctgcttagtaggtaggggtgggcagatgtgctaccacccctctgctagtaaatctggatgaatcatctccccattcaccaactyctttatgagcacctgatgaggcttcctaggagctctacaatcccagagcagcaccctatactaattcctaacatagcacatatgagactcaactgtaact

SEQ ID NO: 329151 - DNA, 201 bp, Homo sapiens
tgaacagtcactgaggaaagagtactaaaagtgtttgcaaaaatgtgtacaagaagagaagagaatgatgaggtgattccaagtgacttacaatatgtaayagcacaacagcagcagcagcaaacacacacacacacacacacacacacacacacacacacggtgcttacttcttactttgtgccaggtactgatctgagg

SEQ ID NO: 329152 - DNA, 201 bp, Homo sapiens
ggaaaaactggttgttcagcaattcacttaaactccctgacctgattgttttcacaattaggtaaagaactagtagcccccttgagagtttatttatttamtcattcaacaaagtctcattaagcatctactatgtacccagctcatgtcaacccctggattatagctattataggtgaagtgcttagcacagtttctaaa

SEQ ID NO: 329153 - DNA, 201 bp, Homo sapiens
taaatagacattgttgagcataattatgtgccaggtaatgtgctaagtacttcacagaaatgagcttatgttattttcacaacaattctatgagattggtktgaaagcttattttataaatgaggaaacagaggcacagagaggttaagtgacttgcccaagttcatagctaataatggtcagagttggtttgggaaccca

SEQ ID NO: 329154 - DNA, 201 bp, Homo sapiens
tgactcagagattaatatttaaagtacttacatcaccaaaagaaaggtagaagtttcatttgtattacttttatttatttatttattttatttattttttwtttttgagataagtaacatggtgaagtgggaagcatcaggatttggaatctgactgacctaaatttgaattgcagctttgctatttaatagctgcatgac

SEQ ID NO: 329155 - DNA, 201 bp, Homo sapiens
ctccatcaagtttgactcagagattaatatttaaagtacttacatcaccaaaagaaaggtagaagtttcatttgtattacttttatttatttatttattttatttattttttttttttgagataagtaacatggtgaagtgggaagcatcaggatttggaatctgactgacctaaatttgaattgcagctttgctatttaa

SEQ ID NO: 329156 - DNA, 201 bp, Homo sapiens
ttgcatcccttaaaagttgagttgaaacataggtttctgtgctgatacatattattattgcaattttttcatgtatctgtataccagcctccctgatatakgagttttacatatgttacctcaatgaattcaaacaatatctattcaggcaggattagtctttaatttacagagtaggaaacagaatttaagaaccttatc

SEQ ID NO: 329157 - DNA, 201 bp, Homo sapiens
ccggggttacagtgagccgagattgtgccactgcactccagcctgagcaacagagcgagactgtctcaaaaaaaaaaaaaaaaaaaaaagccaggcgcggkggctcacacctgtaatcccagcactttgggaggctgaggcggttggatcacgaggtcaggagatggagaccatcctggctaacacggtgaaaccccgtct

SEQ ID NO: 329158 - DNA, 201 bp, Homo sapiens
tgattgttagtgatactcagagctcttcagggtgctgcctccagagtgagcagtctcctgggtgagcttcaaataacagaacagccagatgacccatcacmaacgcaccaggcctctggcccaagggtgcttatagaaaagtaccctaaataaaattaaaaaaaaaaagaaaagtccaggttaggacattgtatatgttag

SEQ ID NO: 329159 - DNA, 201 bp, Homo sapiens
aattgacaaatctgttgcctttaataggtggaaaagacaagtttctcaatgtctggttgcacttcactgagctttcaaccatctccatcaagaagtaaatrtgagagctctgagttggttctactttctccagttttcttccattagaagaggtgtaggtttaagggtagtcatgagagttaacaacaataatagtagata

SEQ ID NO: 329160 - DNA, 201 bp, Homo sapiens
tatgtgtaagcagtcccagtcaaagtggactggagtttaggatgggaactgaccagtagtatggtcaaaagtggttaggaagaaggctaagaggcttgagkagtttgacattttttagatttccttcatttgaagcatccttccaaatttaaatattttaaaattttttagattctttactttcccacttcttaaggtcag

SEQ ID NO: 329161 - DNA, 201 bp, Homo sapiens
tgtgacagaatacttaaaggtcaacaaagaaaagtgtccagagagagagaaattctgtctctgagacttctagagatagaattggtgcataaaattcagartccagaacgccttaatccgactagctatcacaacttgagtatgcatgacccctttcaaactcctggatcaagtctgagaaacactaatagatatgtagaa

SEQ ID NO: 329162 - DNA, 201 bp, Homo sapiens
acttctaaaggcaacacttctaaggagtcagtgagagcaattttctatagtttatctactttaataagaaatattcatatttttagcaaatagcatttttytcatccctgacaacaaagttattctgccaggaggaaaatgttttgagaaaaaaaggtgcaatttccttctcaaaattaggaaattaaagctgaacatagt

SEQ ID NO: 329163 - DNA, 201 bp, Homo sapiens
cttggagaacttttatgtctagctaaaggtttgtaaatacaccaatcagcactctgtgtctagctcagggattgtaaatgcaccaatcagtaccctgtcaraatggaccaatcagctctctgtaaaatggaccaatcagcaggatgtgggtgggccagataagggaataaaagcagactgcccaagccaacagcgcaagcc

SEQ ID NO: 329164 - DNA, 201 bp, Homo sapiens
agtaacataataatttccagcagggtgtttgactggatgcttcctgttaaatgaagtcaacacattttcctcaggtatttcaaagaaccaaggcagtggggaagtggagtctaagaaagcattacttctgcaaggtacacagcatgcagtagtaatatgaaaacaatgatttttgactggaatcatggcattaaagaattc

SEQ ID NO: 329165 - DNA, 201 bp, Homo sapiens
cttactagacttccccagttggcaaggggccaccacacattgaaattcaggaggggtaggagggatgggagagttgttacattattcatgtccaattctayttgtctaatggccttgctaaaagcaccctggatggaaagtgtgagtcttaatggcattttataaaagttgctgtgatgaattaacacataaagcaaatta

SEQ ID NO: 329166 - DNA, 201 bp, Homo sapiens
agaattgttgtcagaaataataacaaagaggaactcacctgtgttgggtactttacatgtgtcatcccattgtcgtatctccgcagcacccttttgcgttwgtgccattactatctgaatttcctaaataagagaatggccatctatggtaaagtggttatctaagaggttaagtaacatgcccaaattatacagttaaga

SEQ ID NO: 329167 - DNA, 201 bp, Homo sapiens
cacgtgccataaatagctactgaattctgttgagtggctgtggttactcctgtgaggactaatcacagtttcatcctgcagagttcctgtaattagagttygggacaccctggtgttactctagtaatctcaaggagacttgttatatttgctaaaaatgctccaaggagaattgccatcaagctttcattttggaaacaa

SEQ ID NO: 329168 - DNA, 201 bp, Homo sapiens
caaatagaaatctctctttctttttttcttctcagtagaaatgtttccctgcctgtcaaattgccctcagtccatacgcatgtttcgctggatgtgctatkgacttcctcctgggaactttctcttgttctctatgaatgtgtcaaacttcgaacgagatttctcttcttccaaggaaccaccttctgcttattaatataa

SEQ ID NO: 329169 - DNA, 201 bp, Homo sapiens
agaatgccatgttcaagaagagtttggctaacctctgctctaagggcaggagtctgggtagaaagggaaagtaggtcagtaagatcaatgaaatttctcarttgagaaagcaaggatgggaagcaatgctcttcctcttttttcctgataaagaaaagaaggaattagaaaactcatcagggctgaactaattgttatgta

SEQ ID NO: 329170 - DNA, 201 bp, Homo sapiens
aaccatctgctttatggtaataatcctagccacagtggagccctccaggagtatagtagaccctcaacagatacttgttaaatggataaaaagatagagtrtgataattaggataatcacaatatgaatttggtgcaatagaatcctagaggaactagtgttagggagagctgaggagaccaaatgttgttcaactattca

SEQ ID NO: 329171 - DNA, 201 bp, Homo sapiens
caataaagacagacctgtctcctgaataagaaagttctgggtaagaaagctttggttgagagtcccaaccttattaatgctgccaggtcacctgctaaaawcatcttaactgtttggaaggactcaaaaagtttgcaggccttccttccatccctgggtgggggagatagatcttcagagtttaaaaacgaggggattcat

SEQ ID NO: 329172 - DNA, 201 bp, Homo sapiens
attaaaaaaagatttaaaaataatttgtttttatttgccttggaaaataaatatttttcttactttcactagtaataatttgaaaaataatacttatatttagaaaagaaacaacaggtagtcaagaatagtgggtctttgttgttactgtgtgaaattcagtttttaatttactcatgttattaccatatttgttcacag

SEQ ID NO: 329173 - DNA, 201 bp, Homo sapiens
cagactgtttttattttaataaaataaaaactgtccatatgtttacatatgttaaaaacatatgttctattttaataaaataaaaaagtccagcttatcarttctttctttcatgaatcatgcctttggtgttgtatccaaacagtcatctcaaaacccaaggtcatctagattttctcctacagtatctccaaggagttt

SEQ ID NO: 329174 - DNA, 201 bp, Homo sapiens
ttcattaaaaaaagatttaaaaataatttgtttttatttgccttggaaaataaatatttttcttactttcactagtaataatttgaaaaataatacttatatttagaaaagaaacaacaggtagtcaagaatagtgggtctttgttgttactgtgtgaaattcagtttttaatttactcatgttattaccatatttgttca

SEQ ID NO: 329175 - DNA, 201 bp, Homo sapiens
gagttgtttgtcagttttagattttgtttgtttgttgagttttaggagttctttgtatatttttaataatagttctttatctgacatgtcttttgtaatcattttctctcagtatttagcttgtcatttcattctcttgacgttgtctttcacagagcagactgtttttattttaataaaataaaaactgtccatatgttt

SEQ ID NO: 329176 - DNA, 201 bp, Homo sapiens
gccttcattaaaaaaagatttaaaaataatttgtttttatttgccttggaaaataaatatttttcttactttcactagtaataatttgaaaaataatacttatatttagaaaagaaacaacaggtagtcaagaatagtgggtctttgttgttactgtgtgaaattcagtttttaatttactcatgttattaccatatttgt

SEQ ID NO: 329177 - DNA, 201 bp, Homo sapiens
accccatcaaaaagtgggcgaaggacatgaacagacacttctcaaaagaagacatttatgcagccaaaaaacacatgaaaaaatcctcaccatcactggcyatcagagaaatgcaaatcaaaaccacaatgagatatcatatcacaccagttagaatggcgatcattaaaaagtcaggaaacaacaggtgctggagaggat

SEQ ID NO: 329178 - DNA, 201 bp, Homo sapiens
tcatccctgggatgcaaggctccttcaatatacacaaatcaataaatgtaatccagcatataaacggaaccaaagacaaaaaccacatgattatctcaatmgatgcagaaaaggcctttgacaaaattcaacaacgcttcatgctaaaaactctcaataaatttggtattgatgggacgtatctcaaaataataagaggta

SEQ ID NO: 329179 - DNA, 201 bp, Homo sapiens
tttttttttaagctgttagttgctagggtcgctggtcgaaaatctgagcctttgcttatcacagatatttaagtgactctatcaaaacagagaagcaagtkgggtaaagggcaaaggatttttgtctatttttagaatgtattaaaataatattcattttattttatgtgtatgtttatatgtgtatttatgtatatgtat

SEQ ID NO: 329180 - DNA, 201 bp, Homo sapiens
aaccaggaagaagttgaatctctgaatagaccaataaaaggatctgaaattgtggcaataatcaatagcttaccaaccaaaaagagtccaggaccagatgrattcacagccgaattctaccagaggtacaaggagaaactggtaccattccttctgaaactattccaatcaatagaaaaagagggaatcctccctaactca

SEQ ID NO: 329181 - DNA, 201 bp, Homo sapiens
gattaatatactgaattatggaagtgctctttgaaacttggaagagattttttttttaagctgttagttgctagggtcgctggtcgaaaatctgagccttkgcttatcacagatatttaagtgactctatcaaaacagagaagcaagttgggtaaagggcaaaggatttttgtctatttttagaatgtattaaaataatat

SEQ ID NO: 329182 - DNA, 201 bp, Homo sapiens
tacatggaaactgaacaacctgctcctgaatgactactgggtacataacgaaaggaaggcagaaataaagatgttctttgaaaccaaagagaacaaagacwcaacataccagaatctctgggacacactcaaagcagtgtgtagagggaaatttatagcactcaatgcccacaagagaaagcaggaaagatccaaaattga

SEQ ID NO: 329183 - DNA, 201 bp, Homo sapiens
ggatcccctgagcctgggtggttgaggctgcagtaaaccatggttgtgccactgttgtaccctagcctgggtgacagaggctatcaaaaaaaaaaaaaaaagattttgtatactacatgtattttttttcttttggtttataaagagatttgtgttatctgacttcttatttataaatagtgaaatagtgccatattaaaa

SEQ ID NO: 329184 - DNA, 201 bp, Homo sapiens
caaagcagaggtagagatgttgttttaggtagcaaggatctagcctcaataacaatcagtattaaaatatggccagctaacactgtaattaaaaaaaaaaatattccagttgctcttccaaaggcaacctttaggttaatactaaaacggataaagtcagatgatcaaaattttaatattcagtctatctgtagacaaaaa

SEQ ID NO: 329185 - DNA, 201 bp, Homo sapiens
tgaacccgggaggcggagcttgcagtgagccgagattgcgccactgcactccagcctgggcgacagagcaagactccgtctcaaaaaaaaaaaaaaaaaaraacacccccagtggatgcatgaaactgcagatagtaccaaatcctatttatactatgttttttcttatgttttcataagtatgttatcacataattaaat

SEQ ID NO: 329186 - DNA, 201 bp, Homo sapiens
aatgtaagttagaatcctataaaaagtatggctttatagttaaaatgtagtccttctggctgattcctaaattccaatgatgttgccaagacacgtatcaraaataagaaacaaccgatttgagaattttcttgcttagaggttttgcctggttgagaagaattctgagatagatgaaaatgagaaaggaatatttgttag

SEQ ID NO: 329187 - DNA, 201 bp, Homo sapiens
gtaagaaaattaattgaaatcagaaagcagaaagactcgctcatttccagaagtgatatttgaaatccagaaacatgtggttcattcatttcctctgtccrtgatttattcccactgcagcacattactctcttggttgctttgcaaaagtgctcaatcttcatccttcttcctgaggaagaggggtctgtggcaaagtgc

SEQ ID NO: 329188 - DNA, 201 bp, Homo sapiens
acttccaaccaccctttctttgttgtaactctccacaagaataagaagttcatattttcacaatattaggtgccatccactgccggcatggtgctgtaatytgctggaaaataatgactcagatgactaatctgtatgaacgcacatgcattttgcaaagtgttgtgtcagagcacgggtcaaatcaattaagtgttttgt

SEQ ID NO: 329189 - DNA, 201 bp, Homo sapiens
ccacagccccatatacaattttgtatttaactttattcaacattataaaataaagcattttcctgtctcattaaaatgttttatgaatattaactttaatsgttaaacaataaaccgtcatgtgaatgtgtcttatattccatacccttcttttgctggacattttgattgttttgttttattctgttttgctgttataac

SEQ ID NO: 329190 - DNA, 201 bp, Homo sapiens
accactatgaggcaggtaagaatgtatccaaatttacacagaggtgtgctgtgaatcaaaacagctaaaaaaaaattttgtccagttctaagactgaaacrtggccaaggagctgctctgaaattcagattcagtctgccgggcccaggccccattctctccattctgccccaatctctttcttggtttaacgttttctcc

SEQ ID NO: 329191 - DNA, 201 bp, Homo sapiens
tgtatttttagtagagacggggtttcaccatatttgccaggctggtctcaaacgcctgaccttgtgatctgcccgccccagcctcccaaagtgctgggatyacaggtgtgagccactatgcccagcccaaactcaccaatttttaaaaataaaagtatcaggtacatattggaccgtcaataagtactagttaaatataca

SEQ ID NO: 329192 - DNA, 201 bp, Homo sapiens
attagctggcagtttggcgcacacctgtggtcccagctacgcaggaggctgagatgggaggatcacttgaacccgggaggtggaggttgcagtgagtcackatcgcgccactgcactccagcctgggtgacagagtgaaaccccatctcaaaaaaaaaaaaagaaagaaaaaggacaaaactgaaaatatgtatatatcaa

SEQ ID NO: 329193 - DNA, 201 bp, Homo sapiens
aggaaaataataagaatgctctttaaaatgtgatcatattgcctcagtttgttctataaataggtgagactgaattataaataagtaaaattggaataaamaatgataaactaattttgtcagcaatatcacatccttgtcaccatttcctgagcacttactatattcaggttctctcttcattttttctgttcttcacta

SEQ ID NO: 329194 - DNA, 201 bp, Homo sapiens
gctcctcctccatacttcctcaacttagtaaatggcacacacatctaccgcattgttcaagccaaaaacttgagagtcatccttactatgttttccctcayatctgccattcaattcatcttcaagtcctgttgattctacctccaaaatatctcagatttattcacttttctttacttctatttccaccactttaatcca

SEQ ID NO: 329195 - DNA, 201 bp, Homo sapiens
agtttaattagcttttcagcactttctgcaagcttgagcaaagatatgcatgaatatatttctgctaaaccacagtaatgaattatttattttgaaatctrtctatatttttagctactcataccagcagtttagagaaataaaaacctttgggatcttatatctgacttttctgaggtgaaatgtgacatgaattgaaaa

SEQ ID NO: 329196 - DNA, 201 bp, Homo sapiens
atgagtagataataggaaaatgaaccatgctaagacaacagctttgctgaaatgtagacaagtgaaagagtattgagaaggtaagtcggggtcagatcacmaagggccttcttttgtgaattaaggagtatgccaaaagccaagggaaaaatggatgaataccaggcaggaagcaccatggtcagagtttcatggtacaaa

SEQ ID NO: 329197 - DNA, 201 bp, Homo sapiens
ctcctccatacttcctcaacttagtaaatggcacacacatctaccgcattgttcaagccaaaaacttgagagtcatccttactatgttttccctcatatcygccattcaattcatcttcaagtcctgttgattctacctccaaaatatctcagatttattcacttttctttacttctatttccaccactttaatccaagcc

SEQ ID NO: 329198 - DNA, 201 bp, Homo sapiens
ggagcatcacttgagtctaaaagttctagactagcctgggcaacatggcaaaactccatctctacaaaaaagacaaaaattagctggcagtttggcgcacrcctgtggtcccagctacgcaggaggctgagatgggaggatcacttgaacccgggaggtggaggttgcagtgagtcactatcgcgccactgcactccagcc

SEQ ID NO: 329199 - DNA, 201 bp, Homo sapiens
gatttgctctggcctgttgggcctagtgcaggagcttagtccaaacaatagcctcccataaatttcatttaacaccctttgaatttaaaacaaaattttamattagtttttgtcttatagattttctttttttaaagcagttttaggttcacagcaaaattgagaggaaggtacagagatttccatataccctgcccccac

SEQ ID NO: 329200 - DNA, 201 bp, Homo sapiens
aagtaaaggatttttttaaattttaaattacaaatgggaaaagcaataagtaaataagttctaacatcacatagtagaatgtcagtggcctaaaagaacastcaaaactcctaatttccaggtcaaaatctaagagcaggctaccttttattagacttcttattgtttgatgcctcgtaatgtttctataaacataatagg

SEQ ID NO: 329201 - DNA, 201 bp, Homo sapiens
atatatatctgctaaaaggcctcagtttctcaaatgtacctaatctctaggtagctgttaaaataacaaatttaaagaaattaaacttaacagagtttatytgagcaaagaacaattcatgaatcaggcagcactcagaaccagaagaggtttagagagctccactgagcagtttgagaagcaaccttttatagcctgtac

SEQ ID NO: 329202 - DNA, 201 bp, Homo sapiens
aagcaaaattgttttttctgatttcaaagatgatgagaaatactagtggagatgttaaaggctttcagtacctctgatgcatctttcactatgataagatkgtttttagcttctggctgcacccatctaaggtttcctcactcttaataaaacaataaatgcctacggatttagatacatagatacagattagctaattgt

SEQ ID NO: 329203 - DNA, 201 bp, Homo sapiens
tgctgggtccagtgtacttttgtcttctgccagaagtgagctccatagatatttacattgagtactaaaatattaattaaatgtactaaagaaatcctcartgaagctgctttgacaatagggccaaaggagagttatttatttaatgggtatttatagagtgcctaccacgttaggcactctgctaacccctgggcaaac

SEQ ID NO: 329204 - DNA, 201 bp, Homo sapiens
gctgagaccttctatcattcttagcagccatccttcttgtcatcataatcaatgtcacatatttttccttttattattacgtttataggctccctgtaaayggcagcatgtgtctaatcccatatgtgattttatacttatatgagatacttttctatctactcatagtggtatttctgtcttacatgtttcttctcagga

SEQ ID NO: 329205 - DNA, 201 bp, Homo sapiens
gaggtcaactccgtgaagaccctgacaactgtatgggctgacgttcctaaagggaagcaaaattgttttttctgatttcaaagatgatgagaaatactagkggagatgttaaaggctttcagtacctctgatgcatctttcactatgataagattgtttttagcttctggctgcacccatctaaggtttcctcactcttaa

SEQ ID NO: 329206 - DNA, 201 bp, Homo sapiens
ttctacataaaagacaataagtaacaatattttaataacattaacataagatccataagctcttaaaaatttattaacttggctgggtgcggtggctcatrcctgtaattccagcagtttgggaggctgaagcaggtggatcacctgagatcagcagatcgagaccaggctggccaacatggtgaaagcccatctctacta

SEQ ID NO: 329207 - DNA, 201 bp, Homo sapiens
ttttaattaaaaccaagagactgagccctctgagaatgactcacaaggcatagcccctttctaagtttatgtagtagcttatttttcaaacgctgtcactsccctttttgaagtaggtgatcactaaacccaatatgaattaaggaaaataaggagagattaattgactcccagagtgacagaggccactcttgctacatt

SEQ ID NO: 329208 - DNA, 201 bp, Homo sapiens
attttaatttcaaagtaagcacaagtttgagttaattaagcaccagtgatcttacacaagcccaccaaattgagtaatatataatatctctctctctctctgcctgtctccctattcctcccctcttttttctccctctcgccttctcttttctgtattttttcatatattcacaaaactttgagttgtgtctaccaagca

SEQ ID NO: 329209 - DNA, 201 bp, Homo sapiens
gattttaatttcaaagtaagcacaagtttgagttaattaagcaccagtgatcttacacaagcccaccaaattgagtaatatataatatctctctctctctctgcctgtctccctattcctcccctcttttttctccctctcgccttctcttttctgtattttttcatatattcacaaaactttgagttgtgtctaccaagc

SEQ ID NO: 329210 - DNA, 201 bp, Homo sapiens
atcaaccctttaatttggttctgtagaccttcagctcatatgaggtttaaaggatctcttgaagagggcttttaaagtcagtaggtgtgtgtgttccaaaytgaatactaaaacttaagatcactctatgccagaggaaatgaataccttagagggtaaagaggaattttatggcttgcttttaaaaggagagggtacact

SEQ ID NO: 329211 - DNA, 201 bp, Homo sapiens
acatttgctggcagtaggaccaaggaaagagaattatgtcctggtgatcttagtagaatataaggggcaccaggtttcaggcaaggatttagagggaggggattaaattagccttgctctttgctatccagcctgaagtcagtcacttggtttctctggcctcagttttctcatctgtcaaatagaagtaacatttatgct

SEQ ID NO: 329212 - DNA, 201 bp, Homo sapiens
ttcgacaagttcctcctgcctttccatccaaattccctcttttaatgacaaggagaagagttatctcctttgagtttgctctagagaggaatgcaatagartgggaacttgagggtagagtttgttttttgtaacagtgtttatatgttgatggaaatgattcagtagagagaaggaaattggtgatttatttagcaattc

SEQ ID NO: 329213 - DNA, 201 bp, Homo sapiens
tagcatacaagactgttgtcacctgatttccatttgagtagtaacatgataatgcagagtgcaagaggaactaggttttaggtgacagacacatcatttamtatctgctttttgtttctataggggaattctggcctgggattcagtattgctggggggacagataatccccacattggagatgaccctggcatatttatt

SEQ ID NO: 329214 - DNA, 201 bp, Homo sapiens
agctagttatctgtctaactaaccttcagcagtgtagtgcctctactgagcagagtggtcatagcatctatacaccctatcccatgtgattgtccctttamacagcttatcagtgacattttggcctttgctgagttgtcatcttctttatctagttctctttgtgtgcacaaggcaagaaggaatgtgtatctgattttg

SEQ ID NO: 329215 - DNA, 201 bp, Homo sapiens
aaggcttcctgtaaaccctaataaaaagacaggcaatggaaacacccacacacttagactggagtctagacatgatacttgcacagtgaccctcatcttartgttcaattatgtttttctgcctgtaacttttcttacaactgtgaaagctggctagctgggtagttaccttggtcacacatagatattagtcagcctgag

SEQ ID NO: 329216 - DNA, 201 bp, Homo sapiens
ctgcaacctcaccaagatccggtttttttgtttgtttgtttgttttttgctttttgactttttaataacagctattctgactggcatgagatagtatctcrttgtggttttgatttgcatttctctaataatttgatgttgagcttagtaaaaaataaattctttaaaagaatatgtacatgcttcaccaagtagagtcta

SEQ ID NO: 329217 - DNA, 201 bp, Homo sapiens
catgatctcagctcactgcaacctctgccccacaggttcaagtaattctcccacctcagcctcccgagtagctgggattacaggcatgcaacaccacaccrggctaattttttgtatttttaatagagaggggatttcaccatgttggttaggctggtctcaaactcctgacctcaggtgatccacccgcctcagcctccc

SEQ ID NO: 329218 - DNA, 201 bp, Homo sapiens
attacataggtaaacttgtgccacggtgatttgctgcacagatcatcccatcacctaggtattaagcctagcatccattagctattcttcctgatgctctmcgtgcccctgtccccactgacagcccccagtgtgtgttgtttcccactgtgtgtccatgtattctcatcattcagctcccacttataagtgagaacattc

SEQ ID NO: 329219 - DNA, 201 bp, Homo sapiens
tggacatcagtaattttgaaaagttaaacatttatttattttataacaatccgtagtttctctgccttcttactttttactgccacattatatgaccttayggcttttcccaaacttactctgctttcttgctattcaccagagtggatgtaagtgaggtctttgacagtggcttccattgtcagttgcagtgctaccagt

SEQ ID NO: 329220 - DNA, 201 bp, Homo sapiens
cagtggctcatgcctgtaatcccagcactttgggaggctgagacaggagcatcacttgagtctaaaagttctagactagcctgggcaacatggcaaaactscatctctacaaaaaagacaaaaattagctggcagtttggcgcacacctgtggtcccagctacgcaggaggctgagatgggaggatcacttgaacccggga

SEQ ID NO: 329221 - DNA, 201 bp, Homo sapiens
ttgttttgggtatatccaggagtgaaattgttgggttataatcaaatactttaaataaattgctaaaccatttgctaatagtagttgtaggaaatgtagtragtgtccatgtgccttgctaagactctgtcgtggatggacgggaggagtcctgttactaaaagagaacagcggggacagtgggtactgggagacaactaa

SEQ ID NO: 329222 - DNA, 201 bp, Homo sapiens
tttttttttattttctttctttttttttcaacttttattttaagttccggggtacatgggcaggatgcgcaggtttattacataggtaaacttgtgccacrgtgatttgctgcacagatcatcccatcacctaggtattaagcctagcatccattagctattcttcctgatgctctccgtgcccctgtccccactgacagc

SEQ ID NO: 329223 - DNA, 201 bp, Homo sapiens
ctacttttgttaatgtagcagtttttatatccatataacaatcttgattcattcaatcttgattcaaatgaaccctctaaacttttattttccaatgaagrctagtaatctgtggtgggtactacagaatcaagtacagcaagaaataggagataggggagggatattccagaacaaggggagccatatataaatgcctag

SEQ ID NO: 329224 - DNA, 201 bp, Homo sapiens
tgttgctggtttgaagcaccactggccaggggtcagttagacagcctgaatgccttttacctctggttccttgtctagtcatcttccccgcatcatcccarcttgccttccactggatgctgacttttgtagcaataattaatgtggctgagtttctcatgcttttctgcccaatttatacacttctatcagagctgactg

SEQ ID NO: 329225 - DNA, 201 bp, Homo sapiens
gtcctgatttatttatctgaagtataattatggattgctcctgatttatgatggcttgacataggatttttcaacttttcaatagtgcaaaaatgatacaygtttaccagaaattgtagtttaagtactcataaaaccattctgtttttcactttcagtacagtattcaacaaattacatgagataatcaacattttacag

SEQ ID NO: 329226 - DNA, 201 bp, Homo sapiens
atttattcatccctcattttaaaagcatattttccattgcatattaaaatctacaataaaagcttaatgaaccaaactggaataatttatcttctggaaayatattccttatgtcactctttccctgagtttccaagtagcccaactctctgccctatagctttcaaggccttccatgatctggttttcatcgtcatctca

SEQ ID NO: 329227 - DNA, 201 bp, Homo sapiens
gtgcagcaccatggacctagctttgagttgtggtgcccctcttgttagctgggcagccttgtgccaattacttccatttccggcttttagatgtttttcaygtaaaccacatagataggaagaggtaaactctgggatcccttcctgtccgacatccactgactctcacgctcggttttagtcatggtcttggggacgctg

SEQ ID NO: 329228 - DNA, 201 bp, Homo sapiens
tcccacactgatacagattcgtgcagcaccatggacctagctttgagttgtggtgcccctcttgttagctgggcagccttgtgccaattacttccatttcyggcttttagatgtttttcatgtaaaccacatagataggaagaggtaaactctgggatcccttcctgtccgacatccactgactctcacgctcggttttag

SEQ ID NO: 329229 - DNA, 201 bp, Homo sapiens
acttaattgtgaaagatcatattttagcatttggggagatatatctttacaatggacaatgattgtgatttttagtaccctctataaattctgggcttttytttttttttttttttttttcagtaggtgacagtttatttcttcacactctaataaaacaacctgaactcaccatagcccttcacttctattttaacactg

SEQ ID NO: 329230 - DNA, 201 bp, Homo sapiens
agttaattcatgtatgctgggtaaatggaaattaacatgaaagtagaagctttaattagtcagtcaacctctgagggctaatgatgtgatcctcctctctrggagaaaagatgccctccagaggtagagatacagtggcaagtccagacacatatcacaaacagatctgggttgaattcctaactttcccacttacatgct

SEQ ID NO: 329231 - DNA, 201 bp, Homo sapiens
gcattaaattgcttgacacacttctaggcagattgaatgtgcttaataaatattacctccattatggttaccacagatctgttaccctgtaactgttcgayagttggttgctatactgccagtccctaaagttcccttcttttccctctttgctttgtttacttctcgtcaaatcacagggttccacagatgtttaattag

SEQ ID NO: 329232 - DNA, 201 bp, Homo sapiens
ttcacagagacttaagattcctttaaattacataggatgaaagcaattgagcagctgcagtttatgcttgttcagagagctctctagtaaacttgttgctrtactgcattatttttattattgtgatctttggttctgaagtgggcgttataaatacctgagcctttctctagtacatgtgttacagtgtgtgtcctagga

SEQ ID NO: 329233 - DNA, 201 bp, Homo sapiens
tgagccaattaattctcttttcttaataaattacccagtctcagatatttccttatagcaatgtgagaatggactaatacacagggggaaaaatgatttamggaggacttattcttaagtatagttacaatcgaggaccctgttttattggtgggaaatagttttttccccctcttgactttaccttccctgtggaagaaa

SEQ ID NO: 329234 - DNA, 201 bp, Homo sapiens
ttaagcctcagttttctcatacctgaaatggaaatgatggtacctaatatgcctactatttatcagatgctgactatgttttaggcattttctcatttaaycttatttaatccctacaccaattcggtgagagataaaacattattgacctatttttacaattaggaaaatatggctcagagttgagaagcctgttctaaa

SEQ ID NO: 329235 - DNA, 201 bp, Homo sapiens
gatcagcctggccaacataatggaaccctgtctctactaaaaatacaaaaattagctcggcgtggtggcacgtgcctgtaatcccagctattcgggaggckgaggcaggagaatcgcttcaacctgggaagcggaggttgcagtgagccgagattgccattgcattccaatctggacgacaagagtgaaactctgtctcaa

SEQ ID NO: 329236 - DNA, 201 bp, Homo sapiens
cttagctcgaggtaagaagcacctgtagagctcttcaaaaccttgatgtctcaccccagcccagacctactctaaatcagaatctctgggagtgggtcccyaggcattagtgtttttaaagctttgctagtgatcccagtatgcagcaaatctgagaaccactattttatcttttctttctttttttggtttcttttcttt

SEQ ID NO: 329237 - DNA, 201 bp, Homo sapiens
ttataaagttagcataacttttccaaggtcacaataatgatggtggtggtctgtcttacagcgtagtttagctaattaactattataatatggtgacttttgactaacattttaattagttgatttccccaaatctcttgcaggaaacacttaacaataaatcttatacatgttgttaccacacatacttattaaactcta

SEQ ID NO: 329238 - DNA, 201 bp, Homo sapiens
ttgtccaagatcacacagataatcagtaatgatggtggtatttggaatactgttgcttctgatttcaaagctatgctctttctgcgatgcaggccttcacmaaagaattgaatttggcagtttacttatgtctgaggcagtccatactcaaagtctagttaatgaaaaaagcataaatgcctaaaaaaagagcatttaaaa

SEQ ID NO: 329239 - DNA, 201 bp, Homo sapiens
acaggcatttcttaaaagaggatatgtaaaacggtcaattcacatgaaatggtggtactcccagaatggctaaaattaaagactgttcataccaagtgttkgtgaacatgtagagagtctcaaacattgctcatgggaagtaaaccaccacattggaagattttttgtcagtatctatcagagccaaacatataccctatg

SEQ ID NO: 329240 - DNA, 201 bp, Homo sapiens
tttataaagttagcataacttttccaaggtcacaataatgatggtggtggtctgtcttacagcgtagtttagctaattaactattataatatggtgacttttgactaacattttaattagttgatttccccaaatctcttgcaggaaacacttaacaataaatcttatacatgttgttaccacacatacttattaaactct

SEQ ID NO: 329241 - DNA, 201 bp, Homo sapiens
tagtaggttccaaaagcaaagctgtatttttgttgttgttgttatctttggcagtatatttcccctccataggaggtatacactaccatagaatgaaatgwtaagtcctgtagaattctaactcaatcagccatgcatttatgagttcacagcagagtagagtaggccaaaagcttgggttctggagtcagaaatacctgg

SEQ ID NO: 329242 - DNA, 201 bp, Homo sapiens
ggtatattgcgtgatgctgaggtttggattacagatcagttatacacattctgttccctatgttatttcttctttcaagcatgaattaaataactcttttytttttttggaacacttattatgcaccaggcatgttgttaggcacggaggctacaatgatgaataaacaggcatggcctctgctttcatggaatgccctac

SEQ ID NO: 329243 - DNA, 201 bp, Homo sapiens
tccaggcttcacgtgctctttcctgtctgttgactcacctgctccctccattggactgtgagtatctcgaaggtggagatttcatctccttaaattctgcwtccggacagtctggcatatagtaactgctgaatcaattaaaatgaatggattacagatgtcaccaaattggagagagtttaactgtatttaatattttac

SEQ ID NO: 329244 - DNA, 201 bp, Homo sapiens
tcctattatatattaattaacattacaaagatacaacaattaaaatggtatactgctggtgcaagaactggctgacagaccaatagaatggctacgtgtggaatagagcttagtatgtatggtaatgtcatatatgatgaaggaagaaatgcgaatcaaagaggaaactgatagattattcaaaacatagtgttcataaaa

SEQ ID NO: 329245 - DNA, 201 bp, Homo sapiens
acaggagaatcgcttgaacccgggaggtgagatcatgcgattgcactccagcctgagcagcagagtgagaccccatctcaaaaaaaaaaaaaaaaagaaamcccccaagaaacaaaaaccaaacaagcaaacaaacaaacaaaaaacgaatactgatgggccaaagagactagataaatatttcagtctcacagtaagaag

SEQ ID NO: 329246 - DNA, 201 bp, Homo sapiens
acctttgtgttccatgtgtaatagaacaatttcaattcagatgctcaaaaatttcttaattaagcacagcaatgggaatacatctttcagcaccattcaartttcattttttaggcaacagtttggagtcttttacttggaaaaaatcagagagttcttggaaaggaaactctattgtgcacttcctcaattttatttaat

SEQ ID NO: 329247 - DNA, 201 bp, Homo sapiens
atagaccagtcacagagctttgatttcaactttttataaaacaatatggtttgtctcagaggagcaagcacttttttcccttgaaaatggggatgaaaccyagttcttgatgctattgcagaatttaaaagcaagaagtcatgggggccttacagatagatggaattcaatccatggtattcatcattcaaaaagacattg

SEQ ID NO: 329248 - DNA, 201 bp, Homo sapiens
agtgggtttctcagataagaagacttcaagtattcactggactgtattcattttcatgtgaacattatagatgagattttagcccttattattgatttagkattgttcctatctgcataaagtgccttttttctcttcttgcataaagttattctagcctcagggtaatgaggacatttctctccaggaggtagaatatga

SEQ ID NO: 329249 - DNA, 201 bp, Homo sapiens
tgcacattcgcaagtactctggcaaatactgtatgcctcagtcagaaaacagtgaagtcaggtctcctgaaatgcagccagcagttgacgaagcaggtgcrgaattacagatggtgcaattgccacagtgcagtagtgtgaagagagttttctaaagtactttttggaatttattcatccctcattttaaaagcatatttt

SEQ ID NO: 329250 - DNA, 201 bp, Homo sapiens
agaaagaaaaaacaaacaaaaaaacacgtgcttccctgacctttggagttaggactctcatggagttttaaatgtactaagcagatctttattgagcactkgctatgttatgtgccaggcatggtgggcattggaggacaaatcaaacatgacctccatcctcacagagcttagaatccagtttgggggcaatcaaaatgc

SEQ ID NO: 329251 - DNA, 201 bp, Homo sapiens
tagatttattgatatgtggttttcttctgcggaaaatcaaaataaaccaaaaagaaagaaaaaacaaacaaaaaaacacgtgcttccctgacctttggagwtaggactctcatggagttttaaatgtactaagcagatctttattgagcacttgctatgttatgtgccaggcatggtgggcattggaggacaaatcaaaca

SEQ ID NO: 329252 - DNA, 201 bp, Homo sapiens
aactaggctggtactagagtctgtgtttttaaatgtgcttaataaatattgactgaatattatagtagtaattcttcaagtattgaattctgcttcagagraaagtacaccccattaaacaatagtcacatctttttagtagataggtgatatatcaacagatgactgattgatatatgaagatagatagatagacagaca

SEQ ID NO: 329253 - DNA, 201 bp, Homo sapiens
aactcaccctgttttaaaagctcttatttactctgcacaacaacccaggcaggtagagtcaggaggcttcatgagggtcaaataccttgagataacagagytgggaagtgaaaccagattggttttactccagaattcctattctgtgacgttcaaataactccgtgataaagcaatctaaatttaattgattagcttttt

SEQ ID NO: 329254 - DNA, 201 bp, Homo sapiens
cgagaagatattctttcattaagaattcaataattgttttaaaagcacagttaacattttgtaatgtaaaggacaacagaaaacaaggaactcaccctgtyttaaaagctcttatttactctgcacaacaacccaggcaggtagagtcaggaggcttcatgagggtcaaataccttgagataacagagttgggaagtgaaa

SEQ ID NO: 329255 - DNA, 201 bp, Homo sapiens
ttttaaagctttgctagtgatcccagtatgcagcaaatctgagaaccactattttatcttttctttctttttttggtttcttttctttttaaaaaaattayctttacttcctcagctcatgtttaagctgaaaataatcatttctttaaagtctcagatttcttgcatggaagtctagtgcaaacctgcagctagctaatg

SEQ ID NO: 329256 - DNA, 201 bp, Homo sapiens
ctgtggaccacacacagaacagctctcctccaggcttcacgtgctctttcctgtctgttgactcacctgctccctccattggactgtgagtatctcgaagrtggagatttcatctccttaaattctgcatccggacagtctggcatatagtaactgctgaatcaattaaaatgaatggattacagatgtcaccaaattgga

SEQ ID NO: 329257 - DNA, 201 bp, Homo sapiens
tctatttcttttttcaggccagtcctgctcctataattgtcaacacagatactttggacacaattccttatgtaagtaactttttcattactaccttcttytaaaactgtggtagaacttaattggctgaatttaaattcaattcacatttagtttcacccaaactaaataatcttatggaatgacatgtagttttgtaaa

SEQ ID NO: 329258 - DNA, 201 bp, Homo sapiens
gagcaggcactaaatagctcaccactaacccctctgagtcctggatgggtgggttttgtcctccaaatagcctctgctagaacaaaaaaggggtattcatrtatggtgtcagatgcagagtgatatggtttggctctatgtccccacccaaatctcatgttgaattggaacccccaatgttggaggtggggcccggtagga

SEQ ID NO: 329259 - DNA, 201 bp, Homo sapiens
ctctccactaatcccatggtaatcatatttccagaaatctctcatctccgcaggaggtactttgcctcataacccaaaatgactactttctagaacaaacyagacagctctagctaaaaaggagaacagaatagtaaaaagtaagacacagaatgctcacaggaggataggtgagaggggagggcatgaaaaaattgaggg

SEQ ID NO: 329260 - DNA, 201 bp, Homo sapiens
tctgccattaaggagcccacagatcattcctacaacctagattctgcttacctctccactaatcccatggtaatcatatttccagaaatctctcatctccrcaggaggtactttgcctcataacccaaaatgactactttctagaacaaaccagacagctctagctaaaaaggagaacagaatagtaaaaagtaagacaca

SEQ ID NO: 329261 - DNA, 201 bp, Homo sapiens
cagagtctcagtgaactaagtgcctgtactaggatcatcaccatctaacaactccccagggtggtcaggggtaaatggtacccccccacccagggcatcasagggtcagttatgacatttatgcgaatcaaaatgttgcaaggggtgagtctcagtgcaccacagatgctcccttagtgtcatgttcaattaatgtaaagc

SEQ ID NO: 329262 - DNA, 201 bp, Homo sapiens
aatatcaaagtaatcagttgtatttccatataacaatactaaacaataagaaaactaaacatatcattgacagtaggagtgaaaaacattaaagtcatagraatagaactgacaaaagagcaccactatacaaaaaagccacaaatgttattaaaggaagatgcataaatgtggggtataccttattcatgaataggaaga

SEQ ID NO: 329263 - DNA, 201 bp, Homo sapiens
aaaggggagttccttttattgcttcaagtacttagagcctgcctcctaaactggtgccttctttaaagcagaatagattttgattcttcatttatattttsagacccattagcataatgcttactctttcagggatttgcatttttagttgtatccttaattgtggaataaaaggctttgtctttaggcagctaattttat

SEQ ID NO: 329264 - DNA, 201 bp, Homo sapiens
acttgttaggcaaaggggagttccttttattgcttcaagtacttagagcctgcctcctaaactggtgccttctttaaagcagaatagattttgattcttcrtttatattttgagacccattagcataatgcttactctttcagggatttgcatttttagttgtatccttaattgtggaataaaaggctttgtctttaggca

SEQ ID NO: 329265 - DNA, 201 bp, Homo sapiens
gttcatatgtttcttatccttctcaggcaattctcattgcttttaccaaaacacatttagatctaattattaaatctgtcgggttttttttttttttttttgctcatatatgtgtgtgtgtgtattcctgttgaccaacagctagttgttattctgcttgtttctgtcaagacatcaatagcctatttccagggaccaaaa

SEQ ID NO: 329266 - DNA, 201 bp, Homo sapiens
aaccattatgtatcaattttaactttatttaattcagagggaaaactttctcaaaattttagggcaaacaaaatctttaaaaaatttttgtttcctttttkgtttccttggggctctgtaaacttctaggctagggtgaaatctcctctgttctaatagtgttcagtctatttttgcttctctttcttttcttctttcttc

SEQ ID NO: 329267 - DNA, 201 bp, Homo sapiens
tggcctctttgtccatctttaaaaccagaagcatagcatctttaaatttctctccgaagcatagcatccttaaatttctctccgactgtgcttccgtcctyacatatcttttactgactcttttaagaactgagggccgggcgcggtggctcacgcctgtaatcccagcactttgggaggccgaggcgggcggatcacgag

SEQ ID NO: 329268 - DNA, 201 bp, Homo sapiens
caggtgtctgagacaaaattcatactcagtctgtttgactccaaaatccatattcttctcactacagcacatggctgcaattgcaattatctgcagataaataactgaacatatatttaagaatctatgaacacaaagccctgccaacatctcatgtcatagtattaaaaattaaaagcacaaatacatcaaagtgacacc

SEQ ID NO: 329269 - DNA, 201 bp, Homo sapiens
gaacccgggagacggaggttgcagtgagctgagattgcgccactgcactccagcctggcaacagcgagactctgtctaaaaaagagaaaaaaaaaaaaaaaggtaaagaaagaaaagatagcatttgagcaaaggcttaaaaatgtgttaatcatgcacaatatattggagagagaatataccaatgaaagacaacaggta

SEQ ID NO: 329270 - DNA, 201 bp, Homo sapiens
ttcacacagcatatccgtttttatgtataacatttgcaaatacagatgatgaggaaaatattatctgcttttttcagttgagaaagaagagggaacatttytccttagtatatcaaaatgtatttcacctgtagctagctagaaaatggctagcttctggaaaccatcattctcagcaaactatcgcaaggacagaaaacg

SEQ ID NO: 329271 - DNA, 201 bp, Homo sapiens
gaattatagtcgtcttagatattataattcacagaatataacaacaatctttgaagttcacacagcatatccgtttttatgtataacatttgcaaatacakatgatgaggaaaatattatctgcttttttcagttgagaaagaagagggaacatttttccttagtatatcaaaatgtatttcacctgtagctagctagaaa

SEQ ID NO: 329272 - DNA, 201 bp, Homo sapiens
tgaacccgggagacggaggttgcagtgagctgagattgcgccactgcactccagcctggcaacagcgagactctgtctaaaaaagagaaaaaaaaaaaaaaaggtaaagaaagaaaagatagcatttgagcaaaggcttaaaaatgtgttaatcatgcacaatatattggagagagaatataccaatgaaagacaacaggt

SEQ ID NO: 329273 - DNA, 201 bp, Homo sapiens
ctttcactgaggtgactgaacatgtgctcaggctttaggaaaggtaggagttttcagagatagtcattgcttctgagattggtgtgtgggcagtaatgcascccagggcagaggccccagtctgcacatctctctgtacaggagggccgtgtatttgctattgctagactaagaacatggatgacttttggcactcagaca

SEQ ID NO: 329274 - DNA, 201 bp, Homo sapiens
gcaatgcttccctcaataccagaacagacattgtttatcattgcactcggcattcttcccactgagtccagagacaacttcagaagctttctcaacagcckctatcacaccatctgctttggcatgtgaggcaaagtctgtttgcagcctctgttatagcccatgtttgacaagactaaactaatacccttcctccctcct

SEQ ID NO: 329275 - DNA, 201 bp, Homo sapiens
tttagtctatgtgtgttcttacaattacttaaagtggggtttcgtaggctgcatatatttggggtgtgtgtgtgtgtgtgtgtgtgtgtgtgtgtgtgtgtatttaagttcattcagccaatctacgtaatttggttggataatttaatctatttatatttaagtaataactggtagataaggactcctcactgccattgt

SEQ ID NO: 329276 - DNA, 201 bp, Homo sapiens
cagacatagccattgcttccatgaacatcagcctgagtgccctcattttgtttgtttggtttctttgtttttgtttctgctttttttttttttttttttttacttcatttccccagaaaattgcaaagtgactggcagccaggggccgtcatttccctcttcctttaatttctttttttttttttttttttttttgagacg

SEQ ID NO: 329277 - DNA, 201 bp, Homo sapiens
ttttagtctatgtgtgttcttacaattacttaaagtggggtttcgtaggctgcatatatttggggtgtgtgtgtgtgtgtgtgtgtgtgtgtgtgtgtgtgtatttaagttcattcagccaatctacgtaatttggttggataatttaatctatttatatttaagtaataactggtagataaggactcctcactgccattg

SEQ ID NO: 329278 - DNA, 201 bp, Homo sapiens
ctagactcttcatagaaatatcagtcataaaatgtgcactgggtatttattttttcatcagggtcacagaaatgcacctgaactgaattcttcttcttgtstctgtaccgttaaggtattgacaggttcagaattgctgggtttgaaattttaagagtagctaactcataacatttcactttctgctccagggcagggtga

SEQ ID NO: 329279 - DNA, 201 bp, Homo sapiens
cctcaggtgatccacccgcctcagcctcccaaagtgctgggattacaggcatgagccatcaagcatggtctacatgtcacagtttaaatggtgttcaggtscttgatgcttgttgcacttacttccctcaaataaaggcgaaggtgctaatgttttcttctagatgttctgagacacatttgcatccaacagaacgttgag

SEQ ID NO: 329280 - DNA, 201 bp, Homo sapiens
cctaaccacctctcttatatttaatatgctgtgagtttttaaaagcagcagagtggagcatcactggaagccactgtaaagtctgagcttttcagcccttkatatagagctaggtgtatatttctgtgcatggactacaaggacaacacgtgataaagaacttggaagagaaaggagatgaagtaatctgagaaggttaaa

SEQ ID NO: 329281 - DNA, 201 bp, Homo sapiens
gcaccttaattacaaaggaaagtggatgagagcatcacgacttctggtgcatgtcacaattttgtttgtttttgtttttgtttcctttgagacagaatctygctctgtctgttgcccaggctggagtgcagtggcaggatctcagctcactgcaacctctgcctcccgggttgaggtgattctcctgcctcagcctcctga

SEQ ID NO: 329282 - DNA, 201 bp, Homo sapiens
ggcgtgagccactgcacccagctaggactcttttactgaatcacaaactctatcctcttcccctccccacacataatttctccctcattagaggtgatcgmtaagcacctcatatattttcttctatcttaatagcggtaacaggcctttcactttcacttagtttgtgaatcctcccagttctgtgaacgtcttaagggc

SEQ ID NO: 329283 - DNA, 201 bp, Homo sapiens
gagtagagtaggccaaaagcttgggttctggagtcagaaatacctggccttaaatcctggcttggccacttagtacctttcttatgacctcagtaacatamttcttctccctctaggcctccgctttttccataaaatgggtataatagaaatactcatttaaagtttatgaggaataacgtttgtaaatcacctagcgtc

SEQ ID NO: 329284 - DNA, 201 bp, Homo sapiens
cgcggtggctcacgtctgttatcccagcactttgggaggctgaggcgggcggatcacgaggtcaggagatcaagaccatcgtggctaactcagtgaaaccmtctctactaaaaatacaaaaaattagccgggcgtggtggcatgcgcctgtagtcccagctactcgggaggctgagacaggagaatggcgtgaacctggga

SEQ ID NO: 329285 - DNA, 201 bp, Homo sapiens
atttttgttgttgttgttatctttggcagtatatttcccctccataggaggtatacactaccatagaatgaaatgttaagtcctgtagaattctaactcartcagccatgcatttatgagttcacagcagagtagagtaggccaaaagcttgggttctggagtcagaaatacctggccttaaatcctggcttggccactta

SEQ ID NO: 329286 - DNA, 201 bp, Homo sapiens
agaaataccccttgattttatattaatgcattgtctcaatagataatttcttaaatttacagcattcattgttgtccctcactattttttgatactagcgrgaagatattctttcattaagaattcaataattgttttaaaagcacagttaacattttgtaatgtaaaggacaacagaaaacaaggaactcaccctgtttt

SEQ ID NO: 329287 - DNA, 201 bp, Homo sapiens
tgttaaagcaagttctataagttttgggaaatatagtcatctaatatatagtgcaactccctcagtaataaatgaggacgttaaagatggtcagtgagtasatctttgacatgaagttatactagttcagatgtaaaccatgggatgcattcgttgatgatgcatccttagcaaagaggcatgaggtttcctgctacagga

SEQ ID NO: 329288 - DNA, 201 bp, Homo sapiens
acccaatatgaattaaggaaaataaggagagattaattgactcccagagtgacagaggccactcttgctacatttggttttatagcctatttcctctgcartgcaatctgtgaaagggtttacatggaaagaaataccccttgattttatattaatgcattgtctcaatagataatttcttaaatttacagcattcattgt

SEQ ID NO: 329289 - DNA, 201 bp, Homo sapiens
ctagcaattggaggaatctgggctgtacccaaggcattctcacatccaagctcatcttctcacagagccttaatcacgttcactctgtacactgtagcttytcactctgttccccacttcccacatccactctgccacgaatctgtagattctgaaaggaaatttgagccttgttcacacgattcaatctgggaaacagca

SEQ ID NO: 329290 - DNA, 201 bp, Homo sapiens
gctggtgctggtaatcccagcactttgggaggccgaggtgtgtgtgtgtgtgtgtgtgtgtgtgtgtgtgtgtgtgtgtgtgtgtgtgtgtctgtgtgtgwgagagagagagagagagagagagagacatctactatagcaatcttccagttagcaagctggaaactggaatttactcctaacaaaacagaactattcaca

SEQ ID NO: 329291 - DNA, 201 bp, Homo sapiens
tctttattcttctcattattcaaataaaagccttaataatgattatcaattatagccttgtatttctatctcagagttctttccagagtctcagtgaactragtgcctgtactaggatcatcaccatctaacaactccccagggtggtcaggggtaaatggtacccccccacccagggcatcagagggtcagttatgacat

SEQ ID NO: 329292 - DNA, 201 bp, Homo sapiens
tgttttcgaatttacttctgcaacttttagaatatagagagcaggtaaggtgaagcatgagcttccaaaaccctcacctgcagctatgttaacacttccartgacttttctttattaagaaaccatgtcagaaccatcccaaagtcctgtggattttatttacaagacccttcactacttcagtaaggggatgatcaaaga

SEQ ID NO: 329293 - DNA, 201 bp, Homo sapiens
tttacagaaagttgtgttttcgaatttacttctgcaacttttagaatatagagagcaggtaaggtgaagcatgagcttccaaaaccctcacctgcagctaygttaacacttccaatgacttttctttattaagaaaccatgtcagaaccatcccaaagtcctgtggattttatttacaagacccttcactacttcagtaag

SEQ ID NO: 329294 - DNA, 201 bp, Homo sapiens
caaggggaaggagaaaaaggtcacaggaaagaatgtaaaagaaaaactcagccctgttcacttgttaataaaacgtatcgattttcagagttcaagcaaayaacctctgagttttgaatgtggatttaagaaacagttgctgtgatttattcagaccttcatcaaacattttttgagtgtatattatgtgccaggacctat

SEQ ID NO: 329295 - DNA, 201 bp, Homo sapiens
gattttctggtttcaggactggtgctttagagattttctagtttcactgcttcatattacatgtgaataaattttttcttttcttttctttttttttttttgtttgttcgtttttgagacagagtctcgctctgtcgcccaggctggagtgcagtggcatgatctctgctcactgcagtctctgcctcctggattcaagtg

SEQ ID NO: 329296 - DNA, 201 bp, Homo sapiens
ctacattctgcagtttaaatattagattggtgcaaaagtaatcacggtttttatcattttttttaaaaaaatggaaaaaaccactattacttttgcaccawcttaatagatatcagaagaaaaatgtaagcacatacaagcaaagataactaagaaccttgaaactatctcataaagaaagaatcaaaagtgttatgaatg

SEQ ID NO: 329297 - DNA, 201 bp, Homo sapiens
ccctgatctgaacacatctggaactatgagttcatttctacattctgcagtttaaatattagattggtgcaaaagtaatcacggtttttatcattttttttaaaaaaatggaaaaaaccactattacttttgcaccaacttaatagatatcagaagaaaaatgtaagcacatacaagcaaagataactaagaaccttgaaa

SEQ ID NO: 329298 - DNA, 201 bp, Homo sapiens
cttcatcaggttatttattttactcataatttcattataaacatttttcaaacataaggaaaagtttaaaaatgttacaatgaacatccgtgtacttgtcrcctagattccactattaacattttcctatactttctctatcacatacctacccatctatccaatcatcaatctattttgctttctgttcctgttttaaag

SEQ ID NO: 329299 - DNA, 201 bp, Homo sapiens
tgctcaataaatacttattgaattaaattgataactgaatgttagcttaacaaacttaaaatctagatcaaaatcggtaccattaaatttaacatgtggtmactatattgggtcccaaaatccaatgtgtaagtacatgatagatttgatttttaatcatttgaggtcacaaatatataagaggttcagtggactctaagc

SEQ ID NO: 329300 - DNA, 201 bp, Homo sapiens
cctaatgatttcttcatcaggttatttattttactcataatttcattataaacatttttcaaacataaggaaaagtttaaaaatgttacaatgaacatccrtgtacttgtcacctagattccactattaacattttcctatactttctctatcacatacctacccatctatccaatcatcaatctattttgctttctgttc

SEQ ID NO: 329301 - DNA, 201 bp, Homo sapiens
cttctcatcctgctttgcccatttgtgttttgtgatctatatctctggaatttagattttgacatacctggttaaaatctaggaagagggaaagacattcrtgtaattaattataatatgaaatggagaccttaatcactgtgggagtttatccattcatttaatacctatttcctgagtttctgctacctgccaggcatc

SEQ ID NO: 329302 - DNA, 201 bp, Homo sapiens
gtcaaagtggactggagtttaggatgggaactgaccagtagtatggtcaaaagtggttaggaagaaggctaagaggcttgagtagtttgacattttttagrtttccttcatttgaagcatccttccaaatttaaatattttaaaattttttagattctttactttcccacttcttaaggtcagataaacataataatattc

SEQ ID NO: 329303 - DNA, 201 bp, Homo sapiens
gtcccgtttgtcaaattttgtttttgtcagaattgtgtttgacatcttcatcatgaaatctttaccaggttctttccagaatagtatttcctaagttatckttctgggtgtttatagttttaggttttgtatttaagtctttaatccatcttgagttgatttttttgtacgtggtataaggaaggggttcagtttcaatct

SEQ ID NO: 329304 - DNA, 201 bp, Homo sapiens
gaaaatttctagaagattacaatccctgagctaatttcagaatgagaaatgagagatagaattttgttccactgtcaatgtataatgatgtataataatgrttagtaacagagccttcagcaatatgaattctggatgatgaataaaataggaaatcagagtccccaaatcattctagtataaaaagtatttgagttattt

SEQ ID NO: 329305 - DNA, 201 bp, Homo sapiens
aatgttgagaacaaaagtaattcagggctgggtgcggtggctcacgcctgtaatcctagcactttgggaggctgaggtggacggatcacctgcggtaagarttcgagaccagcctggctaagatggtgaaaccccggctctactaaaaataaaaaaaatagccaggcgtggtggtgcccgcctgtagtcccagctactcgg

SEQ ID NO: 329306 - DNA, 201 bp, Homo sapiens
ccagtgatgatgagcattttttcatgtgtctgttggctgcataaatgtcttcttttgagaagtgtctgttcatatcctttgcccactttttgatggggttkttttttttttttcttgtaaatttgtttaagttctttgtggattctggatattagccctttgtcagatgggtagattgtaaaaattttctcccattctgta

SEQ ID NO: 329307 - DNA, 201 bp, Homo sapiens
ctatgaatcaataaacctttccaaaggcaaggactatgagaaaatatcatgtggtttaggcacaaagatggatactatttacctcaagaaatttgtttaakatcccatctgaatctagcaatcctaatatttcagcccaggaatcttcttggccaagagctgtcattcttgagagctatgactatattttaattactatat

SEQ ID NO: 329308 - DNA, 201 bp, Homo sapiens
gagcaaatgaattttcatccaggcactagccacattagtcattattaattgttcccatatgtgtattctattttaaagccttgaactcatgtatattgatktttgttgctatcacaaatcaggtagaaaatgtttatcagttcaggcaaatcccctgaggtcataagaaagctgtttgggctgagaccttctatcattctt

SEQ ID NO: 329309 - DNA, 201 bp, Homo sapiens
gattcttgaattctctcttgagaactcgagataatgcctgtgaagtacttagcagaggacccagcacctagtagttgctatataaaagtagcttttaacaygattgtactcttcagtcccatcattaagttttacagaaagttgtgttttcgaatttacttctgcaacttttagaatatagagagcaggtaaggtgaagca

SEQ ID NO: 329310 - DNA, 201 bp, Homo sapiens
catgcatgatgccctttgtggctttatttttacagctaagacaggaatctaattccacttttgagataaatctcagagagaggaagtagttgtgtaggcasgttgggatatttttaaaaaactgcattggtatgaattacttttgtcaccgctttctatttatactgtacaattcagtttaccaaacatttttatctgttt

SEQ ID NO: 329311 - DNA, 201 bp, Homo sapiens
gcacacaatgccttctgggactaccagactacctgtgtggctgagggctattgggtgggtgataaggttggagaaaaaggcagctgtgtatcatagaagaycttacttaccaagctgaggattttgtactttatcctataggcagtggggagctgttgaagagttttaaagctgagcaaagacacaagctgctttgcattt

SEQ ID NO: 329312 - DNA, 201 bp, Homo sapiens
gagacaaggcttttttgtacacatttcatttttgcaacatttaattatgtaattataaaaacaaatgcaataagaataaacagatttaagaataattacarttgattctttgttagtatgcaaatcacctgaaaggaatggaaatttatgggacataaacattctgcttgctgtggacattggtctgcctgtcactgacag

SEQ ID NO: 329313 - DNA, 201 bp, Homo sapiens
aaatcaaaacaatggataatatcactgtcagttttctctcagacagaagtatttcaagaacccaaatgctacgaagacagtgaagtgcttgagactaataygaaagagacattgaaataagatgaacataatttaaacagcaaccctataccatgccaaacatttggtaaataaatacagtttcatttagtcctcacaatg

SEQ ID NO: 329314 - DNA, 201 bp, Homo sapiens
tttactctctcatgcatgatgccctttgtggctttatttttacagctaagacaggaatctaattccacttttgagataaatctcagagagaggaagtagtygtgtaggcaggttgggatatttttaaaaaactgcattggtatgaattacttttgtcaccgctttctatttatactgtacaattcagtttaccaaacattt

SEQ ID NO: 329315 - DNA, 201 bp, Homo sapiens
tttaaaatttccctctgcaaagaatggctaaaaaaaaaaaaattatctattcattcaaacatttaccaaatacctactatgtgccatttctgtgttcagtytgtagcctatgttgtactttctgtatactgtactgtgctctagtacataatatacatactatatgatagaatatatgacagaatcctagcgctgtaataa

SEQ ID NO: 329316 - DNA, 201 bp, Homo sapiens
tgtgaagaatggtctgtggggaaagggtttttttttttttgtatacatgttcatacattactaagtgccttattgctttctgagatgcagcttttatactmcaaaagcctagaagaatgatgtatagctagccacccaaaacaaaatgagtaaaggcaggaatatgcccgctgtgttaaaacactatattttgctcctggt

SEQ ID NO: 329317 - DNA, 201 bp, Homo sapiens
agatggaatggttttatttaatccttgttgcaagattatcaatcttctctaaacaagtagataacccaccaataataaatgcaaacaatcattcactcatrtaactttcttaaaagaattttatcagtggatggagggttagatccctcagtaaaccccaaaaacatagatgccagaattttttcctttgcatccccatat

SEQ ID NO: 329318 - DNA, 201 bp, Homo sapiens
aaatcacaccaattaaactacaatttgtgcatccacactctggcactttcactcaacctgccaataaaatcttgagagaatcaccattggcagctaggccmtaataatatctgaagtttccattttcccccacagagtttcacatttactctctcatgcatgatgccctttgtggctttatttttacagctaagacaggaa

SEQ ID NO: 329319 - DNA, 201 bp, Homo sapiens
attttattattagttattgttgttaatatcttactgtgtctaatttataaatcaagttttatcatagatatgtatgcataggaaaaaacacagtatttgtrgggtccattaccacctgcagtttcaggcatccaatcttggcacatttccactgaagataagaagggactactgcatatcaataatataatccacaataat

SEQ ID NO: 329320 - DNA, 201 bp, Homo sapiens
gcttcaaattctctcttcgacctgccaatcattcccacccaaccaatgtttcctctttggaaagactgaacaagattgaacctgaggcatcagacatggaygatggtgggggtaaaatgctgcacagagaacacatatataaaagaaggtatttagtgaattgtgagacatacccccgcccccacccttgtctaagcccca

SEQ ID NO: 329321 - DNA, 201 bp, Homo sapiens
gatatatgaacaaaactttggaagctggaatgctgatgattgattagaaaatgacacatcagagctgagaaagcagaaacccaagtacttacgggaatatraagctaatgagatgtgcagaatcctggaaggacttgggtattaaaggccttgggtatctgaagacatgggtgtgaggaaggcctgaaaaaacaaagatga

SEQ ID NO: 329322 - DNA, 201 bp, Homo sapiens
aattaacataaattgtgataagtgctgcaaaggaaaagaccagagttccttgaggaaataagactagagggaaggtcaaaggaaggtttttgtaaggaagytccatttaatggagccccagaggatgggtaagaatcagatcaaaagtgagagaaactgcttaacagttggactaatatgtatcatgacccttatttcttc

SEQ ID NO: 329323 - DNA, 201 bp, Homo sapiens
ttagttgcttaaactatcaaaaagattttatctgtcccaaactttctaactgtagccccagcaccaacctcttcttgacatttgcaccattacctctcttygaatactgtccttttttaacttgattctgtttatgatgatgccaaccaataaattcaattaggaatataatgatgagcaaagcagacattgactctgtcc

SEQ ID NO: 329324 - DNA, 201 bp, Homo sapiens
cgaatggggaggcattataagacattatgagagatggaatggttttatttaatccttgttgcaagattatcaatcttctctaaacaagtagataacccacyaataataaatgcaaacaatcattcactcatataactttcttaaaagaattttatcagtggatggagggttagatccctcagtaaaccccaaaaacataga

SEQ ID NO: 329325 - DNA, 201 bp, Homo sapiens
tgtaatcacctcccagttcatcccaccatactgatattcctgcaagaacatggaaaggtcagtatcttgccatctctatattgctcattcctctttattahattctcatgcccccacacctcccacctttgtattattacatttatgtttgcttacacacatttgaattcccacaaaacttgccatgtctccttgcaagtc

SEQ ID NO: 329326 - DNA, 201 bp, Homo sapiens
tgtactgtagtttcaagctttatattttgccctagactgatttattatacataatttcacatcatatatttacatacaataaacttcacccatttctagtrtataattcaataatgcttagtaactttacccagtgttacatccatcaccataaatcagtggtaaaccactttcatgcccccagtaaatccctcatgccca

SEQ ID NO: 329327 - DNA, 201 bp, Homo sapiens
tctagtgagagatgggcaacaagcaaacaaacaaacacaattaatttactgtaagataagtgtccttacaagatgccgtgattaaaaaaaaaaaaaaaaaaggtgtgggggactagtttagatggagtggtcacagagcacaatttaaactgagacctagagagacaaaggacccctccaagaaagagctagaggaaagga

SEQ ID NO: 329328 - DNA, 201 bp, Homo sapiens
ttttaaaatttccctctgcaaagaatggctaaaaaaaaaaaaattatctattcattcaaacatttaccaaatacctactatgtgccatttctgtgttcagwttgtagcctatgttgtactttctgtatactgtactgtgctctagtacataatatacatactatatgatagaatatatgacagaatcctagcgctgtaata

SEQ ID NO: 329329 - DNA, 201 bp, Homo sapiens
tcttatacttttccaaatccttggcccaataaacagtgtattatttgtaaagaggagcatgaggcacccttttaaagttacaatcctttttcctcaaatgrtatctggcaatatattagatacttaggcatctgagcccttgacgtcccagctgctataattaatgcagtttggttctatattctgcaaatacagggcatg

SEQ ID NO: 329330 - DNA, 201 bp, Homo sapiens
aggttatgcatccttgtgagctcgagtgtctaagagtgataatcaagataataataatggctcctttttggtgagctctgagtaagtgccacggactgaaytaagtgctttatgcacattgttcctatttctcacaatcatctttaggctgatattactattcccactttccagatgaggatgttaagaaatagcataagg

SEQ ID NO: 329331 - DNA, 201 bp, Homo sapiens
tttgtttgctgagtgaacagtttgagatgtgagttaaggatgcagatatccacccttctgggagcttcagattgcagttggaactgattctccagcacaayggtcatattataatctcagtactcagtaacagagtactgaggtggcctttggatttgtagtcttaaagtcaaattatagaaatacaattatcttatcatg

SEQ ID NO: 329332 - DNA, 201 bp, Homo sapiens
caagacatactctgggaaaaatttcactgtgtactctgcactgaatagaaatttctggcagttctgagaaaattcagtttgctttcaaatatgatttgtargttgcctctaccatgttctcaattcaagttactgacgttttaaaactgcacaagggcttaataaagatactgttatattatcctggctgcctttttctct

SEQ ID NO: 329333 - DNA, 201 bp, Homo sapiens
gaagagttggtagtagggatggtgcaaagaggtaacaaacaaacaaaagcaagacaaagcatgcctttagtggtagtatctccattttatttttagtttcytctttatgttttatttatcatttgaacttttaataaacatgaatcattcatatgattataagaaaagggaaaacacacttttaggaaattaggggagaaa

SEQ ID NO: 329334 - DNA, 201 bp, Homo sapiens
aagataagcttgtcttctctttgagtctaatacaaataatgtgggtgacaaaattttttcctcatttcaaaaggaacttaaatcactcacaaattctgaargaaaattaagttttctaaatgggatatattggaattctgttttcttcttgctcagtactttttttcttctccatccataacctagaatttttaacacata

SEQ ID NO: 329335 - DNA, 201 bp, Homo sapiens
agtgtgaaaatgtgattgggattagatgggcagaattcgggaattcagtgggagcacaggcttcaggacaggcacccacagatagaacataaagttgctgrcctattaggaaaatggatctcattcctctatgtccagtatctatcatcatcactgggcctgtggtttttccaccagctgctcccgtgtaataactgagca

SEQ ID NO: 329336 - DNA, 201 bp, Homo sapiens
ttaaatactatatataaatgtgtggtaggtgtatttaaatctttacaggaactctatgaggttttctaggtggtcaagtgtaggcagagccagaatttaartctagcctacttggctcttccaattccatcacatgatatttagaccaaatgagatcacaaaggaatgcagagggcaggggaaaaggaatgaaattgctgg

SEQ ID NO: 329337 - DNA, 201 bp, Homo sapiens
agttcagacagtttgtgttctgaatttagttcagttcagtttagcctggttttgtgagcaccttttcctctttgcaaggggcacagagataagtaagactycacctaactctcatgagtcaagaagtctagaaggaaagatacacctacagataaatcaactgaaatgtagcctgctaagcataagaataagaccacatac

SEQ ID NO: 329338 - DNA, 201 bp, Homo sapiens
gaaagaaaataacatttcattggcaactgttcatcttttctcattttgttctaagacattcttgtttttaaatcatttctaattctcagagtcatggatcratctggtatgtgttggattttgattctctacattttgtagtctttcatccactgtattcaggttcctaagtaaaagctccatctttatttctaagtgggc

SEQ ID NO: 329339 - DNA, 201 bp, Homo sapiens
cactaaaataaatttgtgtactttctagtgatcataatagcacttactagttgtttaggcactgttttcagaaatttgcatacagtattttatttactctyatataagctttatcataaaataaattgcaaacacctactgtgagatgttctgctactgtgaggcatttaacagattgtttttgaatgaaagaatgtttct

SEQ ID NO: 329340 - DNA, 201 bp, Homo sapiens
agaagaatctgtcaaaaaccaggcctaattgtaaaagtcatgcaaaaagaaaagtctatgttaaagaaactgattattcatttaaaaacttaaaaaaaaaatctagaatgttgagtaatcacaaatatttgcattccccaaatattcagatttcccattcaggtatcataaactttaaaaagtaaatgcagtggttatttt

SEQ ID NO: 329341 - DNA, 201 bp, Homo sapiens
ccaatcagaaaccaccaccctctttcctatgtctacatgagccttcccttaaattcctcttatatctaggtaccccaaatcaggaatgtataacttgccarcaagtggggctttatacaaatgtatcttgaagttgtactttagctatcactattctgaagttgtcaggtaggtcatgtcctagggtcatattgccacagc

SEQ ID NO: 329342 - DNA, 201 bp, Homo sapiens
gagagggaaagaaggagaaagagaaaactggcaacttccaattcccatgttataactgtcccaaggacccaatcagaaaccaccaccctctttcctatgtmtacatgagccttcccttaaattcctcttatatctaggtaccccaaatcaggaatgtataacttgccaacaagtggggctttatacaaatgtatcttgaag

SEQ ID NO: 329343 - DNA, 201 bp, Homo sapiens
aatcatcctaccaaaaagacacatgctcctatatatttatcacagcactattcacaatagcaaagacatggaatcaacccaggtgcccattagtggtggaytgggtaaagaaaatatacatacatttacatggaatactacacagccataaaaaaaccatatcctttgtggcaacatggatgcaggtggaggccatcatcc

SEQ ID NO: 329344 - DNA, 201 bp, Homo sapiens
gaatgggagaaaaatctgcaaactatacatctacaaaggtctaatattcagaatctacaaggaatttaaacaaataaacaggccaaaagacaaataactcyactaaaatgtgggcaaagtatatgaacagatacttctcaagagaagtcatacaagtagccgaaaaacatatgaaagatttctcatcatcactaatcatca

SEQ ID NO: 329345 - DNA, 201 bp, Homo sapiens
gaaagcccaagaaatacccttctcaacattggcattggcaaagaatttatggcaaaatcctcaaaaggaatcgcaacaaaaacaaaaattgacaaacgggwcctaattaaagtaaggagcttctgcacaccagagaaactatcaagggaataaacaaccaacttacagaatgggagaaaaatctgcaaactatacatctac

SEQ ID NO: 329346 - DNA, 201 bp, Homo sapiens
cccgcccagccctggctgtctccttataaggagacccgtcagattggataagggactcattctactccactgtgacctcttcttaacatctaacatctgcmacaatcctttcctaacatgtcacattctggggtattgggacagttaggacttcaaaaattctttttttttttttttgagacggagtctcactctgtcacc

SEQ ID NO: 329347 - DNA, 201 bp, Homo sapiens
tttttagtagagaagaggtttcaccatgttggccaagctagtctcgaactcccgacctcaggtgattcacctgccttggactcccaaagtgctgggattayaggcatgagccaccccgcccagccctggctgtctccttataaggagacccgtcagattggataagggactcattctactccactgtgacctcttcttaac

SEQ ID NO: 329348 - DNA, 201 bp, Homo sapiens
agaaagaatcagtgcataaactctggcaattcaaaaattcagagtgtctccttacctccaaataattgcaacagcttcccaacaatagttcctaatgagaytgtaatggctgaaatgacagacacagaattcaaagcctggatgacaaggaaacacaacaagattcaggagaaatccaaggaagccagtaaaactatccat

SEQ ID NO: 329349 - DNA, 201 bp, Homo sapiens
attaatggctgggtgcagtggctcacgcctgtaatcccagcactttgggaggctgaggtgggtggatcacttgaggtcagtattttgagaccagcctggcmaacatggtgaaaccccatctgtattaaaaatacaaaaattagctgggcatgttggcgtgtgcctgtagtcccagctacttgggaggcggagacatgagaa

SEQ ID NO: 329350 - DNA, 201 bp, Homo sapiens
ctagaacttaaagtattaaaagtatctatctgtatgtaaatgtgcatttgcatctgtttgaaagaacaaggggaaaatgtggaaagtctacagcaggtgtkagtattggcagctcaaggggatggggttgaagatgaggctaaaggagatgatttgctttcactttatgtatctttatatgatttcaattgttagaataag

SEQ ID NO: 329351 - DNA, 201 bp, Homo sapiens
aggttgtcacttttgccatatggtagatgtttcttctgggagagaaggagctgcatgcacaaaaactttgagggaaacattattgtataatttgcttgagrtcgaagccaatactctggaggttggtctatcatttattgtaatgtggcagatattagagggcttataaacacgttttgcttttgaagtgtattcacaaag

SEQ ID NO: 329352 - DNA, 201 bp, Homo sapiens
tctccccacattgggaggatgaggcaggcagatttcttgagctcaggagtttaagaccagcctgggcaacatagtgaaatgccatctctacagaaaatgcmaaaattagctgggtgtgttggcatgcacctgtagtctcagctacttgggggactgaggtgggaggatcccttaaacccaggaagtcgaaattgtagtgtg

SEQ ID NO: 329353 - DNA, 201 bp, Homo sapiens
cagactgtggtatctaaactattattaataacaaattacttatgacccaacaatctgatgtgataccacagctgtgaaccatacgggaaagcaaaccattwtaaagatccaggtacaaatcgggcgttagagttggggctgctatattgttagaggcagtgaaaataattgagaagtacagagaaagtggtcatcaacctc

SEQ ID NO: 329354 - DNA, 201 bp, Homo sapiens
attcgtatttttggttgctttcgctaattgctgatgacaggtatgagtattgcagcatcctaagaagacagctggcttggagccacgctggattaaactgstaagtatggaaagtgaattatttttccctcaacatgaaaggttctggaaattaatcattttacttcataacaaaatctgatgactacagggcaggtctgg

SEQ ID NO: 329355 - DNA, 201 bp, Homo sapiens
ttccttagcctttttctgtctgtgtaggggggactgtggtagaaaatgagtatgagtataactgcgtgcaagctcagctgggagggctttctgattatgcrgatcatgttattgctcagataattacagtttaattcagttaaacttacatttactgatctctttttatgtgtcatttgtcggttgggcattggagattca

SEQ ID NO: 329356 - DNA, 201 bp, Homo sapiens
attcaaatccatgtctcaacggccttgatctggccataatattgaccctgtgactcttagactatatttgtttaaacatctttcagaaagccacaaaaatwctactatagctggacaccctcacccaataccaaaaacagagatccctctcccttttgttacaatcaccattgtcaaggtcattaatattcaacttcttat

SEQ ID NO: 329357 - DNA, 201 bp, Homo sapiens
agaacacaaccaacaaaatttgttttcacagcatttggccaggtttttattctacagaatgcatcacaaacactgagaatatatgaggggtttaaatcctrtaaaaagaacctcaggatgagcagatgagttgatcgcgatgcatgggaaccaatcatgagtgtcagtatccagagtttgagaactgagattcgtattttt

SEQ ID NO: 329358 - DNA, 201 bp, Homo sapiens
gtctcataaaaaaaaaagtaattcagaagtaatgggggttcagcatatatagtagggttatggcagtgtaagaaagcttgtattctgtcctgtgggcagtktgagccattggaagttttcaaggaggactttatcagcatgtgattcacaaagtcccctggatcagtgtagagaatttatgggaaacgggcaaccccacag

SEQ ID NO: 329359 - DNA, 201 bp, Homo sapiens
cacctcggcctcccaaagtgctgggattacaggcatgagccaccgcgcccggctggtttcaaatttttatgtagtcaaatctctcatcttttatgtgattyctcctatttatttcatgcttaattttttttccatcacgattcttagtaactactaacctgacattttgtagatctatatttatcctatgagttcaattaa

SEQ ID NO: 329360 - DNA, 201 bp, Homo sapiens
agtagagaaccatatacaaactaagcactcggtgaataggacaggtgataactattatcctcataggcacacttgccacatatgcatattgtgtatgtttstttaatatacaatatatgacatgtatttctatattagtgctttatgtatctgtaatacctaagacacaatgtgacacatagtatatgctcaataaatatt

SEQ ID NO: 329361 - DNA, 201 bp, Homo sapiens
atagatggtagtgcctttatgagagaatcaaaaatgtggagcagacgtgggagttaatgggttgaaagccagagaaactaaaatgggcgcaagtgtgacaytattccactcataatgggcgtaactgatcaaaagtgaatgttaaatttgatccatgtttctgaggcagattacattcccaaattattcataaggttagat

SEQ ID NO: 329362 - DNA, 201 bp, Homo sapiens
aagttccaagtttgtttaaatacacgaagagctggatgaactttgatgaactttacttttggtgacaaagtatagtttcctcttcatgaacagcattaatrgaaatgcattttgattatcctaatttctaccaagtgccctaaatgatgttttgcccccaagtattttattttggaaactcagtagcataaaactgaaaca

SEQ ID NO: 329363 - DNA, 201 bp, Homo sapiens
actaagcagccaattcagttttcagacttggacttcatctctttatggggtagaggagaggctgatgataactgaaagaggattcagactgcaatgatctsgatagggtcttggcgcttatgcccgtcagttaaggtgactcttgacaagtaccttaacttcttggagtgttagttttctcataggtaaaatggccaagaa

SEQ ID NO: 329364 - DNA, 201 bp, Homo sapiens
ttgtcttcaggatttttcattaaaatcgttcctgccactgtgtgttcttgatgcagtcccccagtcaccctcttgaaatcagctagcactcttttcacggkgccattttttgtacactcatgcacaacatttggtagacactgtgtttgaacatctgattagttttggctgtggacactattttcaaaagcccttggatct

SEQ ID NO: 329365 - DNA, 201 bp, Homo sapiens
aatggacctacagtcagccaagtaaaatcacactaacgaattatacaaagtgaatgctcaagaaaaagaagagaacttggatccaaaatcttaaagtctasgtactcaaatgtactcagagaatactaaaccagaccaaacgaagacaaacaaaagctctgacctagaggagagcgtcaagaaggcattccacgggaataa

SEQ ID NO: 329366 - DNA, 201 bp, Homo sapiens
cttgagataatacgtggaaagtctgtagtacttggcgcctagtagttgctcagtaaatggtaattatttcacattaaaaaaatagaaagtgtgtatgtatytaagaacaaatctaaatttaagattagttaactctttgagctctcagtaatgattggaaattgttaaatcctcatccttgatgtccttcagagaatagtt

SEQ ID NO: 329367 - DNA, 201 bp, Homo sapiens
gataatctcttattctcctcttagcttcctcacatttatcatgttcccattgctaaaagtaatttactttattactaaagaattgctggcacattggtaamattaagcaatggcaggacaacattcattcattcaatctttattcagctaatatttattaaattattccagtgagtgacatgctgccttgcactctggaga

SEQ ID NO: 329368 - DNA, 201 bp, Homo sapiens
gcataaagaaatggctttcttttgaggctagtgatggaagatattggaacatatgcataacctttaaagataatcaggatgtgcaaggatcatttagtggwcagaagctatacagcaaaacacttatttcatcttgtttaataagtataaaaatagtccagaaggcaatttttaaatgcctctattggtatatacaaagga

SEQ ID NO: 329369 - DNA, 201 bp, Homo sapiens
gttatcatttgttggcttgaattttaccatctacgcttaaagaaccccttcttccacactcaaattcctgtgtggctacctccacctcaacttctatttcyctagtccctattttccattccaccctctttttctcattcccactttctagaatggtcaatggaaaagtaagagaaacacatgataaagaaaaaggagctg

SEQ ID NO: 329370 - DNA, 201 bp, Homo sapiens
ttcacatggctgtcttttttttttttttttttaagagacggagtctcgctctgtcacccaggctggagttcagtggcacgatcttggctgactgcaatctmcgcctcctgggttcaagcaattctctgcctcagcctcctgagtagctgggattacaggtgcccgccaccatgcccggctaatttttgtttttttagcaga

SEQ ID NO: 329371 - DNA, 201 bp, Homo sapiens
ttttctaggtgactaacattcagctcctcattacttatgcaaatttctgcagctggcttaaatttctcctcagaaaatgagattttcttttctatcccatkgtcaaactgcaaattttccaaacttttatgctctgccttttaaaactgaatgcctttaacagcacccaagtcacctcttgaatgctttgctgcttagaaa

SEQ ID NO: 329372 - DNA, 201 bp, Homo sapiens
aaaactgtaatcatgcgtgctggtcagggttataaaagcatcataaatctattatccatgctcggtcaactaactactcttgatacaaatcatgttggggktatataagctattaatttcatacatggaaaatgtataaattactcagagtacgcaaagacatggacttgacttagctgcatttgctaatgtcataagaat

SEQ ID NO: 329373 - DNA, 201 bp, Homo sapiens
ccctagactgcacacggaagagggaccctgggcctggccgacaaaaccattttttccccctaaacctccagtgctgtgaagggaggggctgccataaagakctaggtctctgagatgccctggagacattttccacattttctaggtgactaacattcagctcctcattacttatgcaaatttctgcagctggcttaaatt

SEQ ID NO: 329374 - DNA, 201 bp, Homo sapiens
tcactattattaaaaatagctaaagagacctagaaaaaatgaggaatttagaaattcaaaagctttatattatttgaagtaacagatccttaattctattwgaaattaggaattttcaaaaagatcaacaatgtgagataaaagaatttggtctaaataaatcagatatctaatgattttctagttattttgatatctgga

SEQ ID NO: 329375 - DNA, 201 bp, Homo sapiens
gggaggccaagctgggcggatcacgaggtcaggagatcgagaccatcctggctaacacggtgaaaccccatctctactaaaaatacaaaaatttagctggrcgtcgtggcaggcacctgtagtcccagctactcaggaggctgaggcaggagaatggcatgaacctgggaggcagagcttgcagtgagccaagatggtgcc

SEQ ID NO: 329376 - DNA, 201 bp, Homo sapiens
tcagccctatgtccaacagatattagaatctgagcttattaccactgaattagactgctgtcaaaattaagcttaaatatcatttcctccaaacagatttycttgactttcactcttgggcaatatgcctctttgaaaacaacaacaataggccaggggcggtggctcatgcctgtaatcccagccctttgggaggccaag

SEQ ID NO: 329377 - DNA, 201 bp, Homo sapiens
ttaggattcagccctatgtccaacagatattagaatctgagcttattaccactgaattagactgctgtcaaaattaagcttaaatatcatttcctccaaamagattttcttgactttcactcttgggcaatatgcctctttgaaaacaacaacaataggccaggggcggtggctcatgcctgtaatcccagccctttggga

SEQ ID NO: 329378 - DNA, 201 bp, Homo sapiens
tctcttctcacagctccactaggtggtgccccagtatggactctgtatgggggcttcaaccccacatttcccttctacactgccctagcagaggttttccrtgaggactgtacccctgcagcaaacttctcctgggcttccaggcatttccatacatcttctaaaatctatgcagaggttcccaaacctcaattcttgact

SEQ ID NO: 329379 - DNA, 201 bp, Homo sapiens
aataagttatggtatttgccacgtgcatttacagcttatacttttgctatgtttaacctctgtaacgtttaatttaagtaataatcacatttagtaacacwcctatgaggtagatgttgctaactccattttacatattaggatactgaggctcaaagattaaatcacttgccaaaaatcatagctttataagagatagag

SEQ ID NO: 329380 - DNA, 201 bp, Homo sapiens
atagccattttgactggggtgaaatgatatctcattgtagttttgatttgcacttctctgatgctcagtgatgttaagcaccttttcatatacctgatacygatttcattgttaattcatggcatatattagtgaatttttattagtccattttcacactgctgataaagacatacctgagactgggcagaaaaagaggtt

SEQ ID NO: 329381 - DNA, 201 bp, Homo sapiens
aaaatcaaactgcagctggcattgagaaatctcatttctatttcatagattcttagaactttccatatggccattgacttaatttacaaatgaagaaactsagactcatttctctaggacacacaaagagctggtagcagagcctactattgtgtcacttatcaaaaaatcaatgtgacagtcagtatttcgttagcaaga

SEQ ID NO: 329382 - DNA, 201 bp, Homo sapiens
agtattagttattgtaaacactcaatgatgaccctatatatcgatttttatttactctttgcagtgatctttttctgactttagaaatccagcatcccctrccttcctctaaaacctacatacattagtttccttttgttggattatggccatgcttcctatattaacttcatatttttcttctctttctaccagggcaaa

SEQ ID NO: 329383 - DNA, 201 bp, Homo sapiens
tccgttcatccattgatgaacatttaggttgattccatattttggctattttgaataaggctgcaacatacatgggagtgcagctatatcttcaacatacygactttatttactctggctatatacccaatagttgaattactgaattatatgatatagttctattttcagttttttgaagaagctctatatactcttttt

SEQ ID NO: 329384 - DNA, 201 bp, Homo sapiens
taaatcagtcactcattaatactggaaaaagccaaataaatccttgtgctagagacattttgacaacaaggagacctcttagattcacatctatcattagyaacacccagatcaaatgcatggaaataaagggttctaatactactcttgactctacaagtattacaaaatgaacacagatcttcactagataatccttca

SEQ ID NO: 329385 - DNA, 201 bp, Homo sapiens
gcaagtttctgttgggggaagggtatatttgaacttatttgcaaatagatgattcagtcaaagagccatcaagttttagagtcaatatatagatgttgctkctaaaacatggagtcaacacattgactttttatcagctaaaggtcaaactgtcagcttccattgtctatatataatcctctgggtcattacttgtatttc

SEQ ID NO: 329386 - DNA, 201 bp, Homo sapiens
aatttgtgttatttttattcctagtgaggttatttatatgtgtgtgtgtatttgtcatttgtattttctcttgtgattggatactaattgtctttgttttytactaaaatgttattgcatttcttattgagttgtaggagcatctttaaaatattgataaatatatttgagcaaatgttttccccagcttattgcttgttt

SEQ ID NO: 329387 - DNA, 201 bp, Homo sapiens
gaagcattcattctgtggttcagtggaatcaacatgttcctctgacattgtgcccgtttaccgcccttcatttattcttcaaacatacgtggatcacctaytgtgtaccacatttgcttcagtgagcaaagctgaatccatgacttcacagagcttggagaatagtagggaggccacataattagaggtcatttctgccca

SEQ ID NO: 329388 - DNA, 201 bp, Homo sapiens
gtgaaatgattaccactaccaagctaattaacatattcattacctcacatagttaccttttttgtgtatgtggtgataacattcaagatctatccccttayggggtacaaaaaatatttttaaaaaattaatttaaaatacaaaaaaaaatttaaggaaatcaaaagtacccataatcccgccattcagagaaagcactat

SEQ ID NO: 329389 - DNA, 201 bp, Homo sapiens
ggaagttgcagtacgacattttactggctctcaaagttgttgcagtttcatgggggaaagagaaacataagcaattttgatagaatgcagaaaatgctatrtttgacttattgggtgttttgggagcagagggcacagagctagaaacaaagccagagttggaagggtggactgaggtttagggatagtttggagaaaaat

SEQ ID NO: 329390 - DNA, 201 bp, Homo sapiens
ttggttggggacacagccaaaccatatcacattgtgaaatgattaccactaccaagctaattaacatattcattacctcacatagttaccttttttgtgtrtgtggtgataacattcaagatctatccccttacggggtacaaaaaatatttttaaaaaattaatttaaaatacaaaaaaaaatttaaggaaatcaaaagt

SEQ ID NO: 329391 - DNA, 201 bp, Homo sapiens
gggtggactgaggtttagggatagtttggagaaaaatgagagaaggctttttagtagaagccacttctgaagacattgtgggtaaaaatgatgttgactaycatccactgggtaattatatgtgtgatactacgtatggcccttcacatgaattacctcatataattctcttcagtgttctgtgagataagtactactatt

SEQ ID NO: 329392 - DNA, 201 bp, Homo sapiens
tctcttcagtgttctgtgagataagtactactattttctcattttacaggtgataaggccaagcaagacaagagaggaaatagcaacatttacctcagatrgcctctgatagaactctgggcaagaggcctctgggtaaaagaagactcagcagaagagatctaatgatgcagagttgaaagataatcagggataaagcaa

SEQ ID NO: 329393 - DNA, 201 bp, Homo sapiens
gtagtataaagaaagaagcagcaggagaaagacaatagtgacagagaaatatatagtgggcaagaaagccatgctaataaggtgatatttgaacaaagatytaaaagaaatgagggagtaagctatgcaggcatctgaaggaagaaatgaattattctagagttttgttctactaaatgttgtctacagaccaaaagcata

SEQ ID NO: 329394 - DNA, 201 bp, Homo sapiens
aatacaaaaatcaaccaggcatagtggcgtatgcctgtagtcccagctactcaggaggctgagacaggagaatcgcttgaacccgggaggtgagatcatgygattgcactccagcctgagcagcagagtgagaccccatctcaaaaaaaaaaaaaaaaagaaaacccccaagaaacaaaaaccaaacaagcaaacaaacaa

SEQ ID NO: 329395 - DNA, 201 bp, Homo sapiens
atgattttattggcatacttttagtatggtcaagaattagactttcagtgaatacatttttcagtcataatcaaatgctttatcaaaaatttcctaaatgyatctgtcagtattatcagatgctcacaaaaatctgcccctaaccttaagtaataagcatagtctttgtcttcaaggatttttttaatctagttgaggaaa

SEQ ID NO: 329396 - DNA, 201 bp, Homo sapiens
gccatgttagccaggatggtctcaatctcctgaccttatgatctgcccacctcggcctcccaaagtgctgggattacaggcgtgagcaccgcgcctggccrgaatataaatattttaatgatccaataaaagtcatatacataaagaggtagcaataaatgaaattgttctagcttgacaatgccttttgctttagcccta

SEQ ID NO: 329397 - DNA, 201 bp, Homo sapiens
cctctcatgagcctcagaaagtcactcactcgtttgcctttttagataaggcaaaacagtataatgatggctaacgactcatgggtaaaggaaacaacttmaagattttggggttctcaagattaaaagaaattaaaataatagatttccatattgttttcaggttgctaaggagtgtaatgaaggcctatttaaaatcac

SEQ ID NO: 329398 - DNA, 201 bp, Homo sapiens
actgcaaaaatgaaagaattatttccaagaacaatccaagttttatagtgttcctaaaatattgatgaagggcaaagagtaatgggtgtttaaatgatgtrtgaggcttagaaatatatgtcatcattattaaagaagtcacttttcctctgttatgagcaaacagtacagtgaagattttccagcaagattgtcatttta

SEQ ID NO: 329399 - DNA, 201 bp, Homo sapiens
ctcgttatgagaattattgagctgccctgtttagtggactcacatactgcgggctgctcaatgccagtagtattgaccttgtagggctgccacagaatccrctgggcaattgaagttagggatgtttattttttaaatactccctattttctggacatagttgagtttcagcatgattacttatcataccgtgtatatctt

SEQ ID NO: 329400 - DNA, 201 bp, Homo sapiens
tcttcaacttcaaatgtcaactacatacttgctctgtttgttgaacttacccgtttttatggtggtaatttatttctacagctcttcttgtagctaagacygtggcatttactgctggcatagtggatgtaaattggagtctctgaatttgttttagccttctcttttcagagtttggaataacctctgtacttttataaa

SEQ ID NO: 329401 - DNA, 201 bp, Homo sapiens
taatgattccactcaccttgaaatgtaccgaattagaaaaaatggaggaataatatctccaaactgtaggcttctggtttgcccagcaggactaggaagamgccgggaagtcacaggtcaggagtctcgttatgagaattattgagctgccctgtttagtggactcacatactgcgggctgctcaatgccagtagtattga

SEQ ID NO: 329402 - DNA, 201 bp, Homo sapiens
cagttgccacatctgaaaatgaggctaaactgtttataattaccccataaggccgttgtgatgaatacatgagttaacgtaaaggtttagagcagcatatrtaattattcttaatattttctttggttaacatggtagttctcacaagaattatttataaatataattgaggaagttattaaagacatagcattccactct

SEQ ID NO: 329403 - DNA, 201 bp, Homo sapiens
gatgagcttgtacagcactttgttcttaatggttttattattagtgttttggctatacattatttagatatgttacaagatgttttcatttgtgtgatatygatactatcatcataattatagttaccatgtgtttcttacttagtttaaaaaacaagtggtgcattttaaaactactcccataggaaaaaacacagcaac

SEQ ID NO: 329404 - DNA, 201 bp, Homo sapiens
tgtgttttataacctggaagtttcccacaggactcacaatgagaatattaatgaaatgctcacagtagaaagcattgagacagcagaccaaataactgaaygtttagtatgtaaatttcattgccaggatttggagaaatgaatggaaaagagaaatgtttgatgagcttgtacagcactttgttcttaatggttttatta

SEQ ID NO: 329405 - DNA, 201 bp, Homo sapiens
ttctgttgccatctgcttttcaaataacaactgtgtaaaaataaataaatacataaacaaaccattgattcttgtttagaacagacagaagtttccaaacktggaatttcaaggactaacaaaatagcaaaaatattttgcaagatgacatagaaaatctagattttctaggtaaatacttgtatagacgttatccactat

SEQ ID NO: 329406 - DNA, 201 bp, Homo sapiens
gtcttactttgctcatttcttactgctactgaggtacataggtatggttatatggtccagggctttccaataaagataataaaaggatgatggggatgatktacctgagcttgagccactaaagaaaaggtatttctcagatgatgcagtcattttcatgctatttttctattcaaaaatggaacaatgttgttctgccat

SEQ ID NO: 329407 - DNA, 201 bp, Homo sapiens
cccagatctaacatttcttactgtgtgattttggcaagatgtctgttatctcatatacgaagtgatcaggttgagttaaataaacaaggtattagatgccytccaaatctaacattttggagacaaaattttggcttatggacttctaggaatattcctagttatggagcgtaaacttttaagggaccgttggactttagg

SEQ ID NO: 329408 - DNA, 201 bp, Homo sapiens
tcaccaattagctcacgtaattagaaaatcaaaaacatgctgtgagtgggtggtggacacacctaagtaaagtccattgtcattgtcattctatatgttcrctgattataactataattacacctttaggtgatgatactacattcaattttttgttacaaaagagaatccacaaatatctatgtttataaattacacaag

SEQ ID NO: 329409 - DNA, 201 bp, Homo sapiens
atcactgtttatcatcttgttacctacccagcagaactttatacaaattaactcattaatctccacagcaacccagggaggtatgtgttattattatcccrttttgcaggtgatgaaacagttagctaacctttctaaggtagaatttgaacctaactaggctggtactagagtctgtgtttttaaatgtgcttaataaat

SEQ ID NO: 329410 - DNA, 201 bp, Homo sapiens
agtttgattttctggccaccagagaaatctaccagctgtcaccacagaaccataaagttcagaaaaatcaagtatcttaaacatgcacacacatttttcaracactgaaaagtttaatctatttgactgactctccaagtctatgaaaatgtcaatcctctgatttttctagttctcaaagtagagaggaggctgtgacag

SEQ ID NO: 329411 - DNA, 201 bp, Homo sapiens
tttgggagcaatctttgtatttactttagtaaccatcaaattattgggtagcaataagaaaacagagaataagcacagcttcaaaagcattcctttgtgarggaaactacctatgagaaaattctatgcaaaaatcaccatggcaacaaattgtaggactcagaatcaagatagtaacgttaaaccataacacccattgcg

SEQ ID NO: 329412 - DNA, 201 bp, Homo sapiens
acaattggtttacagtaacagactcacccggtgatcactagtgtctagtacagaaataagaatgaacctgctgggctatgaattcagcatagatagaaaaraatgtgtgtgtgtgtgtgtgtgtgtgtgtctgtgtgtgtgtgtttgagcaagtgagaggaagacagagagggttttttttttttttctcaaaacgtagta

SEQ ID NO: 329413 - DNA, 201 bp, Homo sapiens
ccatgatttttatataaaagaacaagacaaattcagcgaagatttaatatttgagtttgccaaggaaggttttcttacctagtggatgcagtcttaggtaytatgccttaaattagaaggcacagttcctagttcctccttctgatgcaccattagctataaatcacaccaattaaactacaatttgtgcatccacactct

SEQ ID NO: 329414 - DNA, 201 bp, Homo sapiens
gggaagggggtggaatgggtggagagagtttatgggtgactaggaggagagttgccaaacacaccaattacaaaacccaccactacttatatttagataarcagagactgatcattgtctttgttctgcttagcaaaactaatttcactgcttggtgatggcaaattattttcaagcaggtggtaaaatttatcaagaatc

SEQ ID NO: 329415 - DNA, 201 bp, Homo sapiens
gcagctaggccctaataatatctgaagtttccattttcccccacagagtttcacatttactctctcatgcatgatgccctttgtggctttatttttacagmtaagacaggaatctaattccacttttgagataaatctcagagagaggaagtagttgtgtaggcaggttgggatatttttaaaaaactgcattggtatgaa

SEQ ID NO: 329416 - DNA, 201 bp, Homo sapiens
tgctgtttctgacaaattcctggaatctgacagaagggcatctgtggatataatggtggtaacacttgaaagtatttttcatctgtaatggtgcctgcatygaaggttgcttctttcctgatgtgttcagtaagaagcggttgttttgtccaggtggggtgactcacacctgtaatcccagcactttgggaagccgaggcg

SEQ ID NO: 329417 - DNA, 201 bp, Homo sapiens
atttttctgactactacagtatccaaggacctgagcaatgtgtgatgcataaaaatgctcccaaaataggagctattattatgattcaggcaggggctggytggagaggatgggaagggggtggaatgggtggagagagtttatgggtgactaggaggagagttgccaaacacaccaattacaaaacccaccactacttat

SEQ ID NO: 329418 - DNA, 201 bp, Homo sapiens
tttctttgttttctttggagaagagaatgaagaagaggtttttcctctcctgctagcagctgagtccttttgtttggctggcccagtgaggcttttgtttmtatagaagagagccctgttatttctcaaaagcttttgtgtgcaacacttcctcctgtgtttctgctcacccagcacattttgcaggagtaaatgtcaaaa

SEQ ID NO: 329419 - DNA, 201 bp, Homo sapiens
tcccaaactcatgacatgagaattctaatttgtattatgtgagccatgcagaggacaaataagcttataattttgcttgaattaatatttcagaggtttcygcagggatctcctttggaggtaacagtatgttcccaggagagtctaatggccttatgaatctctaatcctcatcccctatctctcttagaaaaaagattg

SEQ ID NO: 329420 - DNA, 201 bp, Homo sapiens
cctacagcttttgtagttggctattctttgtgcctgtaacacacttttcatgtggctttctctctttattaagggctttatttttcctcatagtatgtatmacaaccaaacattgtattataaatatatgtatttgtgtacactagaatataagctctaggagggtagaaaactttgttttgttcactgctatgcccccaa

SEQ ID NO: 329421 - DNA, 201 bp, Homo sapiens
  misc_feature (1)...(201): n = A,T,C or G
ataaggcagatgttggcatccttattttgcaaattaggaacctgatgttgttgagagacatttaaacacttgctcaaagccatttaactagtaaattatanaactggaattaaaattaagtgtctctcattcaatacttgcagtgatttttactaggtctgtagtcccaaatatattacttaaccttgttaagtctcagat

SEQ ID NO: 329422 - DNA, 201 bp, Homo sapiens
tgtgcaaggatcatttagtggacagaagctatacagcaaaacacttatttcatcttgtttaataagtataaaaatagtccagaaggcaatttttaaatgcstctattggtatatacaaaggaaacttatgtaatcttatataagacagaatgttgtacaagaaaacatggtagagaaggttgaattgattttctccaactc

SEQ ID NO: 329423 - DNA, 201 bp, Homo sapiens
cctgattctactgtttactggccaggtgtccttgagatattactcgagatctttgagcctgtgcccttactggtaaaactgatctgtaaaatggatcagartacctacttttctggagatatatgcattaagttttctggtatatggcctgattcatagactctaggtaagtatgtagtatcttttttctctctttctgac

SEQ ID NO: 329424 - DNA, 201 bp, Homo sapiens
gaaatattaccactctccacaaagtataacagcctccaggaggggaagggaacttaattagaaatttccacttcaaatacaatttatagttcactcactcygaaacatgctggagggtatttgaaaaatttaatgcataatgatctgtttgtctcaagttgtcaacaaaatacattttgagcatagaatatatttgtttat

SEQ ID NO: 329425 - DNA, 201 bp, Homo sapiens
tgacactttgtgttgaaaaaaatatacatagttatataactgtgttttaaagaccattctttctagtcccggcattaactctggttctgtaagattttgartagatcatttactctacagggtttccttctgttatcaaaattagattattatcttctcatccagaagttctactctcagggatttatccaaaggtaaact

SEQ ID NO: 329426 - DNA, 201 bp, Homo sapiens
actatagacaaaggataacaatgtgtatttttatactattttcttactagagttgccagagcacaatcataggaaagtatgttttagccaaaagtacaatraaaaccctcttcctacataaagcctttcctgttaactcttggccaaccccgactggtcataagatcctatggcacaaggagttagtgcatcccacatagt

SEQ ID NO: 329427 - DNA, 201 bp, Homo sapiens
acccatattctgtcaaaagaggggaaataaatggcaatagtttaaaaaataagctcagctttgaaccatagctccttccaacaggggccctagattacacycctgctgtattagtacttactttttaaatgtaggtgggcattcctttctggtgctggtaaattggagaaacaagtgggtggaattcacatttctccccag

SEQ ID NO: 329428 - DNA, 201 bp, Homo sapiens
cactttgcctctgctccagaaggattctagtcttgagctgtaatgcatatactgtcagaaatattaccactctccacaaagtataacagcctccaggaggrgaagggaacttaattagaaatttccacttcaaatacaatttatagttcactcactctgaaacatgctggagggtatttgaaaaatttaatgcataatgat

SEQ ID NO: 329429 - DNA, 201 bp, Homo sapiens
ttactagctgatgggttcttggccctcagtgaagagaaatagaccaagagtttgagatggtcttgagaaaggcagtttattggggattttagctcaagcaraaagggaaacacagtgtataagtcagcacagtgtataagaaaaatagggagggctccctgtcctgatttccctgtctgtcttagtgccaggaatgcccat

SEQ ID NO: 329430 - DNA, 201 bp, Homo sapiens
attgctggataacagtttaaatgtcacattgagtgggctctgaatcattagctgaataatctcactgtcacaggtttgagtatcattttctccatcgtcgygtattacttgaagccttggttctaagattcatctgtctttggtgcacaccagctgcctaagtgataggatgggctttcttagcctgttttcattagagtg

SEQ ID NO: 329431 - DNA, 201 bp, Homo sapiens
  misc_feature (1)...(201): n = A,T,C or G
ataagtcaaagaaatactaagatgtaattatgggcaacagccagatgccaagatacacataagcccaaacacaaaagaatgtcatcaacttgaggaactangatgaaaaaaacatcagatgagtcccacatgcagcagccagagtttgagttttgcattaacagattttgaccaagattaattccattaatatattattcc

SEQ ID NO: 329432 - DNA, 201 bp, Homo sapiens
aaaatacatatattaatacattctacattgtttgtctaattgtctgttcttagaaactttgcccagtacttacagaataaaatacaaaatcaccaacatascacaaaatgttctttccaatttgccctccataaagttactcatctacctttttttatcacttctttgtacacactcgagccatctcaaacttcctttatc

SEQ ID NO: 329433 - DNA, 201 bp, Homo sapiens
tgaaggtcagtcagaactcaaactaataatgttctgatatgtctctgtgtggatctgtaccctcattactaataatttttattaactagagtcaccatcaytggtgttttgtaaacctacctatagtgaaaaattgatggttcatgtccaaagaacgtgaaccgtggctttgttacctctaatcttccaggaaaatatcaa

SEQ ID NO: 329434 - DNA, 201 bp, Homo sapiens
agaaatttgcacataatttacaagcagttaggaacacagatgaatatgagcatctgtggcatgtataaaatgtgaaaggcagtatttaaagaaaagtagartggttgtgatatacaagatgactatcaaggtattgagagtagacaaaagggagagggaggatgggagagagacagagattagaggaaaagctaacatcaa

SEQ ID NO: 329435 - DNA, 201 bp, Homo sapiens
aatccattctatcctcacctcttctttgaaatccatcttggcttatccttaccaattctatcaccttcttttctagtatttccattttcctcttatctttsctgatttagattcaactatgtttaccaacacttgtgctttatacagtcatgtaccacataacaacatttcagtcaacaatgattgatcacatatatgaca

SEQ ID NO: 329436 - DNA, 201 bp, Homo sapiens
gaatccactctaacgttccctcatatcagagaagtatctggtcttaaaaagactagagagggttgtggtaaaagctgcattgtgaaagggcttaaatatarggctaagaaatttgcacataatttacaagcagttaggaacacagatgaatatgagcatctgtggcatgtataaaatgtgaaaggcagtatttaaagaaaa

SEQ ID NO: 329437 - DNA, 201 bp, Homo sapiens
ttcagcaacccatgactctatttcatttgatttttatgaggctgtatttcctatattttttgtctttccatagagttctacccatgtgactatttaataargctgcaaatatttcaatattaatgttatttgttgtgtgttcatgcctctttatattcatattatctattttgtctataattagataggaagataagttag

SEQ ID NO: 329438 - DNA, 201 bp, Homo sapiens
cttctagaaaaaaattgaaattgtacatgctatttacattaaaaagtagaaattaaaattttcttttagtgatattaataatgttattaggctgaaccatrtgaagttgccatttctgtaggtcaagttgaatattgtcaattttgtgtggttcaacctaatacagactcttgcatagaggttacagccatagattatact

SEQ ID NO: 329439 - DNA, 201 bp, Homo sapiens
taatgttatttgttgtgtgttcatgcctctttatattcatattatctattttgtctataattagataggaagataagttagaaaatcattttgctacagcmatctagcagaagtactggataaatatttaatgatagtaatgttgatttactacaatatacagaatgagaacaaagaagttgccaccaatatgtgatgcaa

SEQ ID NO: 329440 - DNA, 201 bp, Homo sapiens
aattcagattaaccccttccccatcaacactcacccaaatccaactatgctagttacaattcgggacattttaaaagttttttctaccttctattaaatcstctgttttggttaaatctttgcatcaattaagcatgttttcttccacactaaattcctgcttgtttttgtctcacaaaagttatgactaaattagtttaa

SEQ ID NO: 329441 - DNA, 201 bp, Homo sapiens
gataggaagataagttagaaaatcattttgctacagcaatctagcagaagtactggataaatatttaatgatagtaatgttgatttactacaatatacagwatgagaacaaagaagttgccaccaatatgtgatgcaaatgtctactgcaaggatttgttgctactgaaatagctctcctaccatgtcttactttttgctg

SEQ ID NO: 329442 - DNA, 201 bp, Homo sapiens
ttttgctacagcaatctagcagaagtactggataaatatttaatgatagtaatgttgatttactacaatatacagaatgagaacaaagaagttgccaccawtatgtgatgcaaatgtctactgcaaggatttgttgctactgaaatagctctcctaccatgtcttactttttgctgaggctttaaaggtttaaatgatttc

SEQ ID NO: 329443 - DNA, 201 bp, Homo sapiens
gagagcgcattcagtttccacataattaagggcctctatggaatgaatgatgtattcttcagtgttcctcgtatctgagagagaatggtcttgcagacctyacacaggtaaagctgacccttgaagatgtggcccatttgtaaaggagcacagaaacactttgggaattcagaagaagctcaagctttaaagttgtgtaaa

SEQ ID NO: 329444 - DNA, 201 bp, Homo sapiens
gttcttgtgttttctttccttaaagggaagtagtaagtgacaggaaaagtaacagagacattgaagtcgagcggaaagacactggactcagatgagaaagstggatttcagtcacaggcacctagcactgattctacctaatctgtcttgggcaagtcacatccatctttggtcttctattttggcctctgtaccatagta

SEQ ID NO: 329445 - DNA, 201 bp, Homo sapiens
gtggtttctgtgattatgggtttagtagttataattacctttctagtgtggaattcaaacctagattctctgtgataataacatcaccttacactgcatgyattatctcatatgaacctcctgtagcactaccagggaatatactattttcccattttccagtgaaaaaaaactgaggttcagaggcattaagctagtaag

SEQ ID NO: 329446 - DNA, 201 bp, Homo sapiens
acttgaaatgtgtagtaatagaatgcctgaattgagcataaaaggtttttaaatgtatagtcagaaataaggcagtaagtctgataatagtttttcacccytttaagtatttttattttttatttttttttttacttttagtttttgtgagtacatagtagttatatatatttacggggtacatgagatattttgatacag

SEQ ID NO: 329447 - DNA, 201 bp, Homo sapiens
gaggtactgatctagttttgtcctttttgaaatagctatacagttgtctcaatattatttatttaaaaattcctttttttataactgatttgagatgtcarctttatcatacactaaattccatatatatctgggtctttttctcaaccttatttctgtattcaatctgagtagtatggcaacatcaaattattttaatta

SEQ ID NO: 329448 - DNA, 201 bp, Homo sapiens
ttttctttccttaaagggaagtagtaagtgacaggaaaagtaacagagacattgaagtcgagcggaaagacactggactcagatgagaaagctggatttcrgtcacaggcacctagcactgattctacctaatctgtcttgggcaagtcacatccatctttggtcttctattttggcctctgtaccatagtagcattatat

SEQ ID NO: 329449 - DNA, 201 bp, Homo sapiens
attgaagtcgagcggaaagacactggactcagatgagaaagctggatttcagtcacaggcacctagcactgattctacctaatctgtcttgggcaagtcayatccatctttggtcttctattttggcctctgtaccatagtagcattatattagattggtatttccaaaagtatgctttaaaatattgttctcttttctgt

SEQ ID NO: 329450 - DNA, 201 bp, Homo sapiens
acattttggctaccacctttgaaaacctgcttgtttaatatactttaacccctagatgtattttttaaaagcatgttttgcagtctacttcccaccacccyactccccccaaaaaaagtttctgatgtttcttcctccatttttctactttttcattttccaaaatattatctcaaaaagaaccgttctttcagtattaaa

SEQ ID NO: 329451 - DNA, 201 bp, Homo sapiens
acctaatctgtcttgggcaagtcacatccatctttggtcttctattttggcctctgtaccatagtagcattatattagattggtatttccaaaagtatgckttaaaatattgttctcttttctgtgtcacgtgaatagactctgaccaaatacgtttgctaaattctgcaacttgtatcccaattctcttgaagattctca

SEQ ID NO: 329452 - DNA, 201 bp, Homo sapiens
agagattttttgttgctgttattgtaaaagcatagttttacaatgaggtcttctattttggtttgctctctctagaatacagtgataggtgttttgttttktttttttttaatctggacaagtaaacagaactaataagaaaatacattggttatacttttccacttgggaatgaattacagaatcagaatgttgtcactg

SEQ ID NO: 329453 - DNA, 201 bp, Homo sapiens
ttgcttgctctctttctttatatggagtaaaaggttaagaaatgaattaatgattaatgaaggaagaatagaatcacaatgatggagctttgactgtgtaycttataaactaatatgatctggtgctaagattctgtaccagcttttcatccttatatcctgtgcctggcacagagtgggtatccaataaatgtgtattgt

SEQ ID NO: 329454 - DNA, 201 bp, Homo sapiens
ccaacacccttgccagctattgctcaggcacaaaatgtgatgagaacacaaaatagccagacctccactcccactgtaacttggtgtgggaaaacaaaatrattctaggcacaaaggacaaaggtaaaccagtcacatgcgttatatcagagcaaatagaatgtccaattgagctgcccaatcatgagcaggatgaaagaa

SEQ ID NO: 329455 - DNA, 201 bp, Homo sapiens
atgatggagctttgactgtgtaccttataaactaatatgatctggtgctaagattctgtaccagcttttcatccttatatcctgtgcctggcacagagtgrgtatccaataaatgtgtattgttgcttgaatgaccttcattcttattgctttactctctgactcaacacaaatgtaaaatagaatgcaacacaaatgctt

SEQ ID NO: 329456 - DNA, 201 bp, Homo sapiens
tctaccgagatctcttccaacacccttgccagctattgctcaggcacaaaatgtgatgagaacacaaaatagccagacctccactcccactgtaacttggygtgggaaaacaaaatgattctaggcacaaaggacaaaggtaaaccagtcacatgcgttatatcagagcaaatagaatgtccaattgagctgcccaatcat

SEQ ID NO: 329457 - DNA, 201 bp, Homo sapiens
atctggtgctaagattctgtaccagcttttcatccttatatcctgtgcctggcacagagtgggtatccaataaatgtgtattgttgcttgaatgaccttcwttcttattgctttactctctgactcaacacaaatgtaaaatagaatgcaacacaaatgcttcattctttctataaaatagggaattttgattgcttttcc

SEQ ID NO: 329458 - DNA, 201 bp, Homo sapiens
cttcactgaaaatactatgtatggattcagcaagcatgctaaaatttaacacaaaaatcctctttggaaggcaattgctttaagttagaaaaaattagctyatttttcagtgaaagaatttgaaaattctgtctttggaaaccaaaatactgtatggcagagttggatgcatctttcactttaaaacgcagactctatttg

SEQ ID NO: 329459 - DNA, 201 bp, Homo sapiens
cttttcatccttatatcctgtgcctggcacagagtgggtatccaataaatgtgtattgttgcttgaatgaccttcattcttattgctttactctctgactsaacacaaatgtaaaatagaatgcaacacaaatgcttcattctttctataaaatagggaattttgattgcttttcctttggtgttctgcgatcattttttt

SEQ ID NO: 329460 - DNA, 201 bp, Homo sapiens
gcagttgggctccaaaatccatatctttatgctattaacatgcagttggtatataacaaggtcaagaatcagaccaactcaagtatggcttttttttttttccagtactacataggtagcattattaactttaagatttctagaattttctctctgtttcaagctagtcttggtttttcttttacttagaaaggtagaact

SEQ ID NO: 329461 - DNA, 201 bp, Homo sapiens
atgccacatattctcacttataaatgggagctaaataatatatacacatggacattggagactcaatagagtgaaatacttcgaggaggttggacggtgcraaattacttggtgggtaaaatgtacattattctgttgatggatacactaaaagcacaggcttcaccactgtggaatatggccatgtgacaaaattgcact

SEQ ID NO: 329462 - DNA, 201 bp, Homo sapiens
ttatctggaaaaagattctgtatcaagttttagtgcagtacaatatatttatccatttttgctattttttattaaatcaagctaggatattagtcttaaaygcttgctttgaaactagtgattgttctatgaagccagtgccaggtcaaagagagttcaataagttatatctcatctaggcattgctctgtgcaccatctg

SEQ ID NO: 329463 - DNA, 201 bp, Homo sapiens
aaatagggaattttgattgcttttcctttggtgttctgcgatcatttttttaaaacttagcttaatacctcaacacttattaagtgccaactatttatatygcatcagctaggggaatagagatgaatatgatctaatcagttgcccttgagaagatcattcttggaggtgggaagaggcactgtaggaataagtgtttca

SEQ ID NO: 329464 - DNA, 201 bp, Homo sapiens
gacgaatgccacatattctcacttataaatgggagctaaataatatatacacatggacattggagactcaatagagtgaaatacttcgaggaggttggacrgtgcgaaattacttggtgggtaaaatgtacattattctgttgatggatacactaaaagcacaggcttcaccactgtggaatatggccatgtgacaaaatt

SEQ ID NO: 329465 - DNA, 201 bp, Homo sapiens
aaaggcatgggcccagtaggcatggcatccccattagcaaccaaggtcttctttgagtgcatcaggtttaacccatccaaaaacttcatttgttgattcaytgatttatctacttactcactcacatagtcatcattgctagccactgtaatatatgctgcatctgtggatgaagcaaagtggcattgccccaccttactc

SEQ ID NO: 329466 - DNA, 201 bp, Homo sapiens
aatacagagaggaacgtttataatgtcaaaagctgaagagaggccaagttggagaggacctaacaatagagccatttctgttctctccactttcttgaagrtgagtactaaatatttattaaatcatcaagtggaattgtggttttagaaatgggaacgccccacttctgattttcattaagcaagcatgtgaaatgctag

SEQ ID NO: 329467 - DNA, 201 bp, Homo sapiens
ctaatcagttgcccttgagaagatcattcttggaggtgggaagaggcactgtaggaataagtgtttcacaatatagggattgataatttctacataaagakccctgaacagcagcaggatcaacaaagcatgatgtctgattatggctgtttgatttctattcgtatgctactttatatcatacagagtcttttcaacttc

SEQ ID NO: 329468 - DNA, 201 bp, Homo sapiens
gtgtgataattcatataaattacctaatgtaatcattgcaataaccatacgaggaagaactatttttagtactattcttcacataaagaaattgaggtttwaagagattaaggaacttacccaaactcgcactcatcaaaaatgttggaaagaagattcaaatctgtcttttcttactctggaagccatgtttttgcctac

SEQ ID NO: 329469 - DNA, 201 bp, Homo sapiens
aatttgtgctatacatgcccagctggttgtcagatgaagagataacgtggcacatagtgggaaagttatttttcatcttacataggccaatgggtctttarcaggtttcccattaaagtgttatactgctcagtgtaggcaatcaactgaaattgcaaatcccattatttgaaaactctccttcctaatgcttttgtgaaa

SEQ ID NO: 329470 - DNA, 201 bp, Homo sapiens
tctattcacaatagcaaagatgtggaattaacctcagtgtccatcagtgggtgattggataaagaaaatttggtatatgtatacaatggaatactattcasccataaaaaagaatgaagtcttttgcagcagtaaggataaaactggaggccattatcttaagtaaaataactcagaaacagagtcaaaataccacatatt

SEQ ID NO: 329471 - DNA, 201 bp, Homo sapiens
agtacctataatagggcatctgactttgtcggggtggtcagggaggtcatggaaggctcttatctgaatgaccaatagaccttgactaggcaaagaaaagstcattatcaatggctgcacaatgattacaaatctgtctgagtgtatgactgagcagagcacagatgagaacaacatgaactcagtagtgctttccattta

SEQ ID NO: 329472 - DNA, 201 bp, Homo sapiens
agttaaaaaactgcaaacctaggcagtctggctccagagcctgcctccttggctactacttgttagcctttctgatggtttctctacctcaactccccatrgtttacatccagaaggagcctggagtcaggccagcagttcaaggactttggggataagaaatacttggacaaggactgagcagtaagggagtttcaggaa

SEQ ID NO: 329473 - DNA, 201 bp, Homo sapiens
aggctccttaacttcctgagcctccttccctcatctataaagtggggatactaatttttacctttagggttgctgtgacatcaaataagacgatgactatsaagtgccagaccacctaataagggcgtaagtagtagtagccatcatggttatcatcttcaacaccttatcatcaccacctcccaggatgaatgagggggc

SEQ ID NO: 329474 - DNA, 201 bp, Homo sapiens
aaaatatatttggagtcgatggccacataactttaaactacctggaaaggtttatggaaatgtcaaattattcctttccatgtgaaaatgaaaaaaaaaaagaggaaagtttgatgtagaatttgttgtggttcttaattttcaaagtaagcacctaggaacaggattatctgaggttctccttgaactttgtaaatctga

SEQ ID NO: 329475 - DNA, 201 bp, Homo sapiens
agggactggatttctgttgccatctgcttttcaaataacaactgtgtaaaaataaataaatacataaacaaaccattgattcttgtttagaacagacagargtttccaaacgtggaatttcaaggactaacaaaatagcaaaaatattttgcaagatgacatagaaaatctagattttctaggtaaatacttgtatagacg

SEQ ID NO: 329476 - DNA, 201 bp, Homo sapiens
aaaatctcaactaggtagtaaagtacctttcttatcttctattatcaccttctaacatctgatggtctccaagaaaagaagcagatctcagtttgggggaatctataggccacccctgtaacctccaagaagaagcaagaactaactttagtgtgttgccaaagcagtgagagtgtggactgtgatccagggaatcattcc

SEQ ID NO: 329477 - DNA, 201 bp, Homo sapiens
ctagtctgtttcacattatgaagctaagacagtagtcatagaaacatggattatctaatgaatacacggattgttgtgacagacatagaagagaattaatractaaaatttagccatcaaaattagaatatttactcacatatacatgtgtacatgtttttaaaataatagctttataagataaaatttgcatacaatgta

SEQ ID NO: 329478 - DNA, 201 bp, Homo sapiens
aggcccattgtgattacaactgagtcacctttccatctgcatctcccatgacccccacctcatacctgctgcaatacactcagatgtggttcatcattatratcctagtgccctaatacttgactgagcgtaaacactagacaaatatgaatgaatgaatgaatgaaattctatagggtgaaagaaacaccaaaacttcct

SEQ ID NO: 329479 - DNA, 201 bp, Homo sapiens
ctgcctatgagtgaaatggcaatattaattgcaacagtgtttccagtggcaaaaatcgaaccaaaaaaatctaaatgacaaaagaatagctacaataattktattgcatccatatagtatactgtaatgccattcagctttttaaaaatgaggagctgacagcccaaaatctccttaagctgataagcaacttcagcaaag

SEQ ID NO: 329480 - DNA, 201 bp, Homo sapiens
ataaatgtttattttaaaaatgaaagcgtacaactataaaggaaattgggtaaattgacctatattaaaattaggaaattctattcattaaatgatgtcaytgacagagtaaaacaggaagacatagagtggagaaaatattcccagtaaatttatcatacatttatataatgttcagccttattcataataaaataattg

SEQ ID NO: 329481 - DNA, 201 bp, Homo sapiens
catacaaaaaacatttctatatttaaatataaatgtttattttaaaaatgaaagcgtacaactataaaggaaattgggtaaattgacctatattaaaattmggaaattctattcattaaatgatgtcactgacagagtaaaacaggaagacatagagtggagaaaatattcccagtaaatttatcatacatttatataatg

SEQ ID NO: 329482 - DNA, 201 bp, Homo sapiens
actttcctcacagaattacaaagtttcttttactcaagtccccttcaacagaccaagctgaggagagaaaaagaagaaagcacagactgcaatacagaggscttctgccaatggccctcattttgtaggcaatagagaaatcctcaaaggtgcccagaatgacattagtacctaccagacaagccttggaatgaaaagttt

SEQ ID NO: 329483 - DNA, 201 bp, Homo sapiens
aatgaatgaatgaagctagattactattttaagtcagtagattctgagtaaagatctagtaaaataaatgcatggccaactgcatgggcagtatacacctrtattgcgcaggacacaatgttaggtactgtccctataggctgattatttaaaggtttccagctgacaggaatgtgtgtaacctaaccaaacttgaagaat

SEQ ID NO: 329484 - DNA, 201 bp, Homo sapiens
ttttgtaccataaaaatgattattttgttaaaagtgttatttcctaatacatgaattttcctatgtactataattccaaaaattcttgaataaccctttayagaagcgagatttcacatgcataaatattattagagtataaatggcaaactttaaactgatttaagccataatgaagcttgaggatggggaaagtctcta

SEQ ID NO: 329485 - DNA, 201 bp, Homo sapiens
agaacagtatttgaacccagatcttctagcccaaaagcttgcgctctttccaccatgttcatagcctcccaatgtgttttctaagggcagtaaatatgttragtgaatagatgcaccagtaaaaaagactatacttgctgtaaatttgctttaattttgtgtcatcttttctataaaatggctgtagctagcacataattt

SEQ ID NO: 329486 - DNA, 201 bp, Homo sapiens
ctggcagaagccatctggtcctggcaactttcccggttaaacacttttaattgcttctgtgatcttggtgggttggcatgccatggtttccagggatttargagaattgacctttatgaagtaatcacagttcgttgcacaaaagaactctgagttaccaaagcaggcagcatgtcctgctgtggagccatgataatggaa

SEQ ID NO: 329487 - DNA, 201 bp, Homo sapiens
gagattgagatatagggatattaattctctgtgctctatcacataactagattcttacaaagctagggttagtactcatgtttactgtctggcaaaccacsacactgagaagcttaagtctgaagctgaatgtacccagcatcatttgttgcctcctctttatccctgtagttgtttgttcatacctctgttgtagcagct

SEQ ID NO: 329488 - DNA, 201 bp, Homo sapiens
taaaaaaggaaatattcccttcctcagttgtcaggcccacagtattttctgccccaggaacaactatctccagggaatattttcatttgaaacatccattytcttgccctgaaagccataaaagatgagacaaatcactctgaaagcaggtaccaaggtctggacttttcagcctgaaccatagtttaccttgttacatat

SEQ ID NO: 329489 - DNA, 201 bp, Homo sapiens
ataaattgtgactttacagccctgtgaaacatgaagggtttgtttcttaacataggttcatttcttagtttttggacaagtattttagtagtagaggctgrgcaatgtttcttctaccaagaaaactagatttatgtacatgcttaaaagcacagtggtcactgtgtttatcaattaatttcagttattttatatgtttat

SEQ ID NO: 329490 - DNA, 201 bp, Homo sapiens
ggagaagagttatctcctttgagtttgctctagagaggaatgcaatagaatgggaacttgagggtagagtttgttttttgtaacagtgtttatatgttgayggaaatgattcagtagagagaaggaaattggtgatttatttagcaattcatatacatgtatattaagtggaagaagtggaaaacactttggctgtatggc

SEQ ID NO: 329491 - DNA, 201 bp, Homo sapiens
gaacgaatgaatgaatgaatgaatgaatgaatgactcatctttgcccacttctctgaaggcagttggaaatcctaggacccctctcagttttattcatctygcgctctggccaattaatcccttctgtcctgaagattcagaatacattaaagcttttagatttctggccaatggaatatatttccaattcagacagatca

SEQ ID NO: 329492 - DNA, 201 bp, Homo sapiens
catgtagctattcctttgctttgctttttaatatacattagcactaattattgcactttttccagctaatatttattagtgagtttatatcatataaataycgaaaatcagtaattttatccctgagcatcatacatttgtaacaaggccattcttcactgaaatttctttctttctttctttctttctttcttttttttt

SEQ ID NO: 329493 - DNA, 201 bp, Homo sapiens
tttacattttaatgtaagaggcaggcaagcaatttgtgtctccaagtcaaaccaaaagttttgcatatactaaagagggaatacatcattccagtctaaaratagagaatattccaaggaaaatatggaaaattaactgattataaagaagaaaaaggattttgataggcagaagagggtaggacagcattccagggtgag

SEQ ID NO: 329494 - DNA, 201 bp, Homo sapiens
gtttcacaatatagggattgataatttctacataaagagccctgaacagcagcaggatcaacaaagcatgatgtctgattatggctgtttgatttctattygtatgctactttatatcatacagagtcttttcaacttcatggtattattcttttctcataaacacaaatctacaaataagtataattcccattttacatg

SEQ ID NO: 329495 - DNA, 201 bp, Homo sapiens
ctccaagtatattaaaacttagccttatgatatctccttagcaccaggttccatcactcgcccctcacccatatgacctactcctgcttttgacctctccrtttattcaaacgattgtcttagtcacccacagtaaaaggccttggacgtcctttttttccttttggttctctcttctttgctgctttaataaatcaggca

SEQ ID NO: 329496 - DNA, 201 bp, Homo sapiens
cctctttcttcagctggtttgccttcctttgtctgcatcatgttcaaattcagtgctccctcttctgtttgagagaatgagtcatctcacctccagcctcyctttcttggcctcagtcctctttcctattagcaaacacacagccaggctgcacatatgtccccgtctgtgtggtgcaccccacagagagcacttcaatca

SEQ ID NO: 329497 - DNA, 201 bp, Homo sapiens
cagctaggaagcaccagggtctaagcttcagtatgcgtgactcaaaagcatgtgcttttaatcactacattctgttgccagtatcataataccacctgttytgtgactgaaatctatgtaaatttttcaatatttcagtcaccaaatagaaactgagtgaactaccactattttaaaccactattattattctccccagta

SEQ ID NO: 329498 - DNA, 201 bp, Homo sapiens
ccacctgttctgtgactgaaatctatgtaaatttttcaatatttcagtcaccaaatagaaactgagtgaactaccactattttaaaccactattattattstccccagtatcctctttccccatttctcaccactacctttccctcaacttctgctttatggtctaaaaattttcctcgtggtctgaagactctgttagca

SEQ ID NO: 329499 - DNA, 201 bp, Homo sapiens
cctgttctgtgactgaaatctatgtaaatttttcaatatttcagtcaccaaatagaaactgagtgaactaccactattttaaaccactattattattctcyccagtatcctctttccccatttctcaccactacctttccctcaacttctgctttatggtctaaaaattttcctcgtggtctgaagactctgttagcaaag

SEQ ID NO: 329500 - DNA, 201 bp, Homo sapiens
attttaaaccactattattattctccccagtatcctctttccccatttctcaccactacctttccctcaacttctgctttatggtctaaaaattttcctcrtggtctgaagactctgttagcaaagtcactctatgaaaatgttgttgaaggtaatattttctggatcatttcactgcccaccttaaaaatggcaaaaggt

SEQ ID NO: 329501 - DNA, 201 bp, Homo sapiens
ttgtttagaacagacagaagtttccaaacgtggaatttcaaggactaacaaaatagcaaaaatattttgcaagatgacatagaaaatctagattttctagrtaaatacttgtatagacgttatccactatcatcattattgttccataaaagaaagccttccttaaaatgaagaaaaataaacataaatcgaagaatacag

SEQ ID NO: 329502 - DNA, 201 bp, Homo sapiens
tgcccaccttaaaaatggcaaaaggtgcaatttaataagcactgaccacatttctctttcactgataatctaatgagctgtgtagtttccatactctgagragagagacaatgagcccttgtcagaaacagagctttgctgtcacttataatctaatccagttagtttctagcctttggtttttatttttaattattattg

SEQ ID NO: 329503 - DNA, 201 bp, Homo sapiens
cttgtatagacgttatccactatcatcattattgttccataaaagaaagccttccttaaaatgaagaaaaataaacataaatcgaagaatacagagtactstatcattaaagcaggtattgaaaacacacagactctaaagttcaaaaagaatattttttctatatttaagggctaaaaatataacattaaatattgtata

SEQ ID NO: 329504 - DNA, 201 bp, Homo sapiens
tatttagaattattcaaccatcaccacaatcaattttagagcatttcatcactccataaagaaaccctatatgcattgacagtcacctcccatttccccaycctcccaccccaacataggcaaccactaatctactttttgtccctatggatttgcctatcctggttattttatataaatgaaattatacaccatgtggtc

SEQ ID NO: 329505 - DNA, 201 bp, Homo sapiens
ttcaagccctaaaggaagaatagaataagaggtgagggaaagtctgagagcaaagttgcaaggcttatcaggaccatatatttacaaagtaaagtgaatastggggtttgattaggtgacgcttaagtggaaaaccacagtgagaaataggcgttggaaagcaaagtgcaacataataacaaagtgccataaatgttatgc

SEQ ID NO: 329506 - DNA, 201 bp, Homo sapiens
ctgtgacccacagatgctaaggcagaaattggtgttgtcttttgtttgaatgagtattgtattaattgaaaactagaattgtttgaggttttcccccccccgttatagcatggtactttacaaaaccatgcctttttgaggtggaaggccaaacagtggtacaacacataatttggatttttaagaaaggctttggaaaat

SEQ ID NO: 329507 - DNA, 201 bp, Homo sapiens
gcttggggctaaattattgttaattattgttaaaaatctcttttgaataaaaatgttgtattctaatgattatatattcatgtgtcagtctgtaattataycataaatctacatacttctttgtgcagttttaatttaattaaaactaaacagaagtaactcaaattcaaattattttaaaagacatcaagacactaagaa

SEQ ID NO: 329508 - DNA, 201 bp, Homo sapiens
atttacagaaacacatagtgggctggattggttcatgggccacaggtcactgacctctggtgtagatgatgttacgatatttgaagtgtgattgaagtaadttcagaagggaagagaagaagggataactttggaggagttttgctgtaaggagaagcagaaagatctgagtggtggctggagaagggtgcaagatgagag

SEQ ID NO: 329509 - DNA, 201 bp, Homo sapiens
tctaaggcaccagagagatggcagtggatgaaaacacatttcttattttcagggagtttacatttccatggggaaaacagaaaataaacaaatgtgtatgyaggcagatggtgataaatgttgaaagagagagaaaggaaggaaggaaggaaggaaggaaggaaagaaagaaaagacaaaggaaggcaaatagtaataggg

SEQ ID NO: 329510 - DNA, 201 bp, Homo sapiens
tctcttcttttattcctaatgtttgcaatgtaaatctttgttttcttggtcagtctagctaaggttaatcaatttcatcaatctttgcaaaaaaaaaaaaagatttttcttccccactttgttttgttaatttttctcaatttttaaaattctctgtttcattaatttctgttctaatatttattattgtttttttttttt

SEQ ID NO: 329511 - DNA, 201 bp, Homo sapiens
aaaaaacaaaaaaaaaaccctaaatttaaaaatctcccattaggctcagaatttcagtcataagtatgcacccaagagaaatgaaaacatacatccttacmaagcttgtatacaaatgttcatagcagcattgttcataatatagccaaaatatggaaacaacccaaatgcccatcagctgatgaatggataaatagtatg

SEQ ID NO: 329512 - DNA, 201 bp, Homo sapiens
aaaagtgaataccacaggtataaggaagggctggttataaaaataatggaaagataaacataaaaataatgtccttagggaaagttttttatgaaacacartgtgcatactactaaagaactgttttccagattatgagaacaggttattttctccttcagtaactcacaaaatgagtaaaacttagggacaattagcaac

SEQ ID NO: 329513 - DNA, 201 bp, Homo sapiens
ttgtttcctgagtatgtaccatatggcaggtgatttgtgaaggctttgcgtatattatctcatttaatcctgtagcagtcctataaggtagatcttaaaargccatttccagataaggcagccaagattcaggcaatagagatacttccctgtagtcacacagataggtggaagaacagtatttgaacccagatcttctag

SEQ ID NO: 329514 - DNA, 201 bp, Homo sapiens
tctaacaaatatttatagaatacctattatatagtattactattaataataattattttctctctctgttgaattggtattataaatgtactttgtctttrggaagactctttttgtcctaaattctaagttgtctaatatcagtatagccgctccagctctcttaggtttatatttgcattcatttttaaagaaaaatga

SEQ ID NO: 329515 - DNA, 201 bp, Homo sapiens
taagcgtggtatatttttccatttatgtaagctatctcagcagtattttgtaattttcagtgtaggagtagtcatatatacatacatatatatatatatakagagagagagagagagagagagatttattcttatatatcttgtattttttgttgctgatgaattggcattgattttttaaatttaattttccaacagttg

SEQ ID NO: 329516 - DNA, 201 bp, Homo sapiens
attgctagtctttctaaaaaatctcttccatctagttctgttattccctgtgtcctcattccagtagttcacttaacagcacctctgacttccatcggctrtactgggccagtcaggatcggtaataaagcacagttttctctagatcctcacaataggcaattaatgctgtctttcttgggcttcatgactagtcatctg

SEQ ID NO: 329517 - DNA, 201 bp, Homo sapiens
tagaggcaactttataggaatctgcttttaaatggatttgaatgttgactggaaaccagcagcaataattgtatcctatttgattttgggaaaagctgaargctgtgggcattctgcaaagatttcaggcagtagtggttacattttagagtctttctacagctctctccaaaagaatatatgccacgttgccaaggtaat

SEQ ID NO: 329518 - DNA, 201 bp, Homo sapiens
ctattccggattggttagatataatagacagaaggtttggctctattgctagtctttctaaaaaatctcttccatctagttctgttattccctgtgtcctyattccagtagttcacttaacagcacctctgacttccatcggctatactgggccagtcaggatcggtaataaagcacagttttctctagatcctcacaata

SEQ ID NO: 329519 - DNA, 201 bp, Homo sapiens
tttgaagcttcccttgaggatgaaactgtgttttattcatctctgctcccttgttgattaacttagaacggagctactgagcaaatgtttaatgaacgaaygaatgaatgaatgaatgaatgaatgactcatctttgcccacttctctgaaggcagttggaaatcctaggacccctctcagttttattcatctcgcgctct

SEQ ID NO: 329520 - DNA, 201 bp, Homo sapiens
aatagtattatttgaatcttttatattcttactttttatttacttgttcactcaattactcaaagaggaatattaaagtctccaaatatatttgtagattkgtctatacttccctttagttttgtaagtttttgctccttctattctgaagctttatggttaggtatgaatacagttaagattgctttgtctttctgctga

SEQ ID NO: 329521 - DNA, 201 bp, Homo sapiens
caaattctgcagaaagcctgctatgatattcattggcatttcattgacttttcaagtaaacttaaaaataatttacctctctacaatattgagtcttccarcccataagcgtggtatatttttccatttatgtaagctatctcagcagtattttgtaattttcagtgtaggagtagtcatatatacatacatatatatata

SEQ ID NO: 329522 - DNA, 201 bp, Homo sapiens
attagcagctgcttaaggaccagactggaagaagttctaagacctgtcagctccttctcttgagaactactgcagcagcacaaccagggtcagctctttcktcaagaataggttgaaacatgaacttttggggagaaagggcttataacagattgtaaatcatttttttttttctttctcagcttggtgaagttgaaatag

SEQ ID NO: 329523 - DNA, 201 bp, Homo sapiens
ttctatcactcaacatgttttttaagattcattcatattgttatttgtatcaagaacttgttcctttatttctaagtagtagtctattgtttaaacatacmataatttgtttatccatgttcccaataatagacatttcagttgtttgcagttttttgcttttctgaataaagctgcaatgaagattcttttttttttttt

SEQ ID NO: 329524 - DNA, 201 bp, Homo sapiens
cttctatcactcaacatgttttttaagattcattcatattgttatttgtatcaagaacttgttcctttatttctaagtagtagtctattgtttaaacatayaataatttgtttatccatgttcccaataatagacatttcagttgtttgcagttttttgcttttctgaataaagctgcaatgaagattctttttttttttt

SEQ ID NO: 329525 - DNA, 201 bp, Homo sapiens
ctggatccagccctgcaaacataccttctattgtgagaatcattatgcttttagtgtttgctttaaggaatatgctctggtatcactataattggtaaatkatgtttaatcaattttcatacagttgagctctgcaggtaataacccaaagaaagacggtctccagggatgataaaaattatctcttaactcatgaatatt

SEQ ID NO: 329526 - DNA, 201 bp, Homo sapiens
tgcagtgagccaagatcacgccatggcactccagcctgggcaacaagagcaaaactccatctcaaaaaaataaaaagaataaaaaataaatcattatctargcacaagtggtaatggccctaaaataaatgattaatcaaatgtataagaaggttttgaagagacagtgagatcagtgagatatgttaagctgctttccat

SEQ ID NO: 329527 - DNA, 201 bp, Homo sapiens
attctacttttatatgtaaactcggaaagaaaccctgttctcctaaagggagaaagaacaggtgatatgagccctagcttttaatgaatcaacatacaaayataatctcattttcatctcgtaaggaggcttgtgatccaattgatggctttgacaattggaggcagtgtgacctctttattgcaagttaatctctttaaa

SEQ ID NO: 329528 - DNA, 201 bp, Homo sapiens
tttaatgaatcaacatacaaatataatctcattttcatctcgtaaggaggcttgtgatccaattgatggctttgacaattggaggcagtgtgacctctttrttgcaagttaatctctttaaaaaacagtttttctcatctgtaaaatttgcctgattaatagtatctacttcctggagctcttctcatgataagttatatg

SEQ ID NO: 329529 - DNA, 201 bp, Homo sapiens
ttctcatctgtaaaatttgcctgattaatagtatctacttcctggagctcttctcatgataagttatatgattcatgtcaaaatatgtgacataggactcytaaaatatatggcatgcaagtattaaataaatgttagttattattattatcgtgttatttctgtattattaagggctgccattatcaactatgttctcca

SEQ ID NO: 329530 - DNA, 201 bp, Homo sapiens
ctgattaatagtatctacttcctggagctcttctcatgataagttatatgattcatgtcaaaatatgtgacataggactcctaaaatatatggcatgcaartattaaataaatgttagttattattattatcgtgttatttctgtattattaagggctgccattatcaactatgttctccatacctgaagttcctctacat

SEQ ID NO: 329531 - DNA, 201 bp, Homo sapiens
ctcatgataagttatatgattcatgtcaaaatatgtgacataggactcctaaaatatatggcatgcaagtattaaataaatgttagttattattattatcrtgttatttctgtattattaagggctgccattatcaactatgttctccatacctgaagttcctctacattctccctctctgcatgagtctattcttctatc

SEQ ID NO: 329532 - DNA, 201 bp, Homo sapiens
ataggactcctaaaatatatggcatgcaagtattaaataaatgttagttattattattatcgtgttatttctgtattattaagggctgccattatcaactrtgttctccatacctgaagttcctctacattctccctctctgcatgagtctattcttctatccattcattccacaaacaattgtgtattattaatgtgggt

SEQ ID NO: 329533 - DNA, 201 bp, Homo sapiens
cgtgtaatatctgaaaagagtttcagcaacagcttccaatatgttcttaatatttataaaaatacctaattaccttgcattttgattaaaaaaaaaagggrgggggggctctaaaattagactatcctattcttaacttttctgactacatgacctggagcaaatagcttctctttctgagatgtgatttttcaactataa

SEQ ID NO: 329534 - DNA, 201 bp, Homo sapiens
tgcttttaaatctatcctctagcaggcatctcaccaacacctcactccaacacatttgccttacctggtaaatcaagtctgcagcattaagtaattgctaygtgttatcagaaatcaatggcagtttatacatgatactggaataaccaccaaattaaactgaaaaccaacccaggtcagaataaaaaaaattgtcactaa

SEQ ID NO: 329535 - DNA, 201 bp, Homo sapiens
attctgccatgttataaaaataatatagcctaagtatacattttaaagtttttggcaggacgtggtggctcatgcctgtaatcccagcactttgggaggcmaagttaggtggatcacctgaggtcaggagttcaagaccagcctggccaacatttttagtgtctactaaaaatttaaaaaagtagtcagacatggtggcgt

SEQ ID NO: 329536 - DNA, 201 bp, Homo sapiens
ttgacagctttattgagatataattgatatgcaaaaagttacacgttttatacatacaattttgtgtgtttaaaaaaacagattttttttaaagatatcatcacattatagtatctttcattgtattttataacattgtatattctacattgtttcaaaccagattgcttacctcatgtactttttccccttaattgtctt

SEQ ID NO: 329537 - DNA, 201 bp, Homo sapiens
ccatacatttattagctgaacttggtcaatgtgcttaacctctctaagcctcagtttcttcatatttaaagtggagataaaatcattcttacttcatagtragataatatatgtgagagcatctggagatgcaatcatgaaaactaatggttattacttaaaaatgtgactgtaattgagaggttaaaaataaattccaaa

SEQ ID NO: 329538 - DNA, 201 bp, Homo sapiens
attttaggcaaatcacatagattttatagaatatttcttaaggagacaaaagggaagataatggggtgactttgctccaaattctatattctgtataccaycctgctgcacggagttattctgggctgacctcaagattctgtggagcccgttggctctttgatattttgaccattacttttcactgtgcctggcttttat

SEQ ID NO: 329539 - DNA, 201 bp, Homo sapiens
ggattagaggcgtgagccaccgtgcccagcctttctttgccaatctcttctgatcataaaataaaatatctcattataaaaaggcccatatattctttacrtgcatgtagttttctaaaagaacagatattagatgctgttaactttactcagaacatgttttagatgtcgctgttacttagcaaaccccaaattatctta

SEQ ID NO: 329540 - DNA, 201 bp, Homo sapiens
atataaaggtctggttatctgcttcacacttgggaagaaaaaacaggaagctcaaaactcacattaatatttcagttatcctactccctcccacttatttwtgtatttatttatttttgagacagtctccctctgttgcccagactgtagcgcaatgatgaagtcttgggtcactacaatctctgcctcccgagttcaagc

SEQ ID NO: 329541 - DNA, 201 bp, Homo sapiens
tctgaacagtattattagtatccttcatgaagaagtttattctttttattcttcaagttcttgtatttccactataaccaatactgctatagaagatactyatgttgtctttatgatttggaccttgccttgtctccactgttaatttccagtgcatatcctatctaaggtttcctgttcgtctcactgtttcacactttt

SEQ ID NO: 329542 - DNA, 201 bp, Homo sapiens
aaatctggatgtccagggtggaagtgggacataagtgtcaaaaacagaactaaaatatccacaggtgattctgatgcacaggtagatttgggaatcactgkcttaaattcattgtgtctttgacctcagaaaatcatattaccagaagttggctgggtgtggtggctcaagcctgtaatcccagcattttgggagtccaag

SEQ ID NO: 329543 - DNA, 201 bp, Homo sapiens
taatccttacatagtatgtttgctaaatgtgtcctgtctctgtgctatcttcttcttcattgtcaagacccttggtctactactctcctggactccctcayttgcctctgaacttgtctctctgattttgattttccttcctcctgtccacatagctctctgagttcttattccagaaaactacctatggtcccatctttt

SEQ ID NO: 329544 - DNA, 201 bp, Homo sapiens
ttagttctcaaaattgtggaggaagctatcgttttttagctaaggaaactgaaaggtgctttgaggttgtgaagtttccaagttcatatcattttgtaatsgcaaattggacttgtgctcaggccctctgattcctcccacctaaatggttattttctgttgggcaggtctttatgggcattgctggaactaagcttcctt

SEQ ID NO: 329545 - DNA, 201 bp, Homo sapiens
actggtgtagccattatggaaaacagtatgcaggctcctaaataaattaaaaatagatttaccatgttacccagcaatctctggtcttgttatatacccaragaagatgaaatcaccaccttgtaaagatatctgcactcccatgttcaatgcagcattatttacaatagccaagatatggcaacgaccttcatgcctgtc

SEQ ID NO: 329546 - DNA, 201 bp, Homo sapiens
ggttgtggctagggaggaggtctctcctgccctgctcatgtctgactagctacctactataacactttcatccatgttactttaattagttctcaaaattktggaggaagctatcgttttttagctaaggaaactgaaaggtgctttgaggttgtgaagtttccaagttcatatcattttgtaatggcaaattggacttgt

SEQ ID NO: 329547 - DNA, 201 bp, Homo sapiens
cattctcaatgccagacagaaagaagtctcacaggtcattgccctgcagcaaatagctagcaaccagttattacttagagttatgactgtgaaaatctgayactaaaatggtgctaaagagttttatgaggatgaagttatttttgaatggttcaaggagaaagagcaaggagaattaactctgagctgtgtctgtttcct

SEQ ID NO: 329548 - DNA, 201 bp, Homo sapiens
caagcttccagcttgcttatttatgttttcagcttgatttttcaggctgctctttattaggagaaaaataatttcttgggctgcgttttgctagaagggamgctctgccaaggactctttgccctcactatctgcctaaacaatttctttctacctcctgtatcactgactgtgaccaattattattttagagtagcggtt

SEQ ID NO: 329549 - DNA, 201 bp, Homo sapiens
tatcatatctctaatatctggcccagagtctgacacataacaggtatgcagtaaacatttgatcagtgaataaacaaatgccagacactgaaatgaaaaamgatttaagggaacatgtcttatctagaagagaaatgtgagaggtgctagagaagcttacggcttaatggagaactcacagccagcattcaaacacatcag

SEQ ID NO: 329550 - DNA, 201 bp, Homo sapiens
ttcatgtttctctgattatttctttaggataaaatcctagaatcgaatgatcaggtcaaacagtattttaaagtagaaaaattctaaaaatcaaaaaaaaatcattgtcggtacaacattatatataaatgaatgtgattataatattactacttattttcctcttttttattatatataaccccattttgagagaaattt

SEQ ID NO: 329551 - DNA, 201 bp, Homo sapiens
taaggtccagcacagtgttgttgaacacttcattaataaaaggttgaagtgctacaaagagaaacacattgttcgagattgtggttgacaggaaatttgcragtatacatgttgtgaaagtttaaagtcaacctgggaagagatttttttttttaagacaggttctccctctgtcacctagactagagtacagtggtgcta

SEQ ID NO: 329552 - DNA, 201 bp, Homo sapiens
aacaaattgggaaaaaattgcaaaccatatatctgatgataggttaataaccaaaatttataaagaactgatacaactcaagagtagaaaaacattaacasgattttaaaaatgcacagaggacatgaataaatatttctccaaagaagatgcaaaaatgtccaacaggtatgcaaaaaggtgcttaatatcactaatcat

SEQ ID NO: 329553 - DNA, 201 bp, Homo sapiens
gaaacaatcaacaaaatgaaacaaattgggaaaaaattgcaaaccatatatctgatgataggttaataaccaaaatttataaagaactgatacaactcaakagtagaaaaacattaacaggattttaaaaatgcacagaggacatgaataaatatttctccaaagaagatgcaaaaatgtccaacaggtatgcaaaaaggt

SEQ ID NO: 329554 - DNA, 201 bp, Homo sapiens
aatgggagatcctgccatttaccacaacatgggtagacttggagggcattatgctaaatgaagtaagccagaacagaaggaacaatattgcatgatctcayttatatgtggaatcttaaaaaataaaagtcaaatatacagagatagaggataaaacagtggttacagggggaggtggaaaatggggagatacagatgaaa

SEQ ID NO: 329555 - DNA, 201 bp, Homo sapiens
ggaacaatattgcatgatctcacttatatgtggaatcttaaaaaataaaagtcaaatatacagagatagaggataaaacagtggttacagggggaggtggraaatggggagatacagatgaaaggataaaaagtagcagatatgtaggatgaacaagtctagaggtctaatgtgtaacataaagactatagttaataaaat

SEQ ID NO: 329556 - DNA, 201 bp, Homo sapiens
tctagaggtctaatgtgtaacataaagactatagttaataaaattgtattatattaggaattttgcgaaataagtagattttagctgctcttgtcacaaamaattataactatgatgatggatatgttaatttacttcactatagtgaccactttattatctatatgtgtgatataacatcatgctgtgaacctgaaatat

SEQ ID NO: 329557 - DNA, 201 bp, Homo sapiens
gaatttttatctgtttttattcactgatagatcccaagctcctagaaccatcactgacatatagtaaatgctcaaaagtatttgctgaatgaaaatgagtragtggccaaatgaatgtaccttcttacccatattcccaaccaaacatcaagctgtacaactgtaggaagaaagcctttgctgagtcccaacaaactatag

SEQ ID NO: 329558 - DNA, 201 bp, Homo sapiens
agtagattttagctgctcttgtcacaaaaaattataactatgatgatggatatgttaatttacttcactatagtgaccactttattatctatatgtgtgayataacatcatgctgtgaacctgaaatatacacaacaaaatttatttttttatatagtagccagatacggataacctaggtatttgaaatacttcctgaat

SEQ ID NO: 329559 - DNA, 201 bp, Homo sapiens
tctctatctctagtcaacaggtgataatgggaaactttacgggcatatgagatttagaagggtaagttccctaatttcaggtcttctcctgctacagtacrgcctgtagtttccatccagttttctgaaaaatcataggcaaaataacaaactcagtattggggcaggcaaagtgattgcccaactgtctgatattgtggt

SEQ ID NO: 329560 - DNA, 201 bp, Homo sapiens
agagttgtgcacaaatatagaaaaaggattagtgcaacattatttatagttttaaaaaattagaagcaaactaaacatgcgctagtaagaaactggttagrtcattatactgtagtcatgcaacataatgctctgcagaaaacaaaagtcatcttgttaaactacattgctgctacaaacaactagtcactctaggtttaa

SEQ ID NO: 329561 - DNA, 201 bp, Homo sapiens
cagaagcccaggtacaaagatatgaagtaatttgctgaaaatcatactgcagcttaaaatagtgagctaatatttgaatccaggactatctgagtttaccrtctcatgatcttcacgagtcatgcatatataaacttaaatgtttgaatgataatcgactattagcaataataaaattccatgccaggttatttcttcttt

SEQ ID NO: 329562 - DNA, 201 bp, Homo sapiens
gaccgtactagctttatcatttgtcagtccataaacacttaaaagagtgccactggatagcagaggtaggcttaagttgtttatattccagtgagtaacastagaaccagggtatagaatttacaggggaaaaaatttagatttttttagactcaattaacaaatattgagtacctactggattctaaaagctctcatgtg

SEQ ID NO: 329563 - DNA, 201 bp, Homo sapiens
attaaatgtatgagattctgaaagcaaaagttgagaggaatgaaagagacagaacagcaaagaaacataaaatcccagtgggaggttttggactaagtaarggactacaactagagccagtttggagaaattatgaactatatgactttatcaagaaattacagaaacccacatgtctgtggattatcaaacaaattactt

SEQ ID NO: 329564 - DNA, 201 bp, Homo sapiens
agatggcacctggaaaatcaggtcactcccaccctaatactgcgcttttccaatggtcttagcaaacgtcacaccaggagattatatcccgcgcctggctyggagggttctacgcccatggagcctcactctttgctagcacagcagtctgagatcaaactgcaaggtggcagcaaggctgggggaggggctcccgccatt

SEQ ID NO: 329565 - DNA, 201 bp, Homo sapiens
ctttatcaagaaattacagaaacccacatgtctgtggattatcaaacaaattacttcacttgaatacatatttctctgcctattttatagattccatattstcctcctgcttggagttggtaactccatcttctctaactgattaaataaaattgaaaaaggccccttgtggatattccttcctgccagaattgatctaaa

SEQ ID NO: 329566 - DNA, 201 bp, Homo sapiens
tttgtatgttctggatattagtcgcttgtcagattaatagtttgcaaccattttctcccattcaatttgttgtttcttccctctgttaactgtcttttctrctgtgcagaagtttaatatagtccaatttgtttatttttgttttagttgtccgtggttttaaggtcttagccataaaatctttgcctagattagtgtcat

SEQ ID NO: 329567 - DNA, 201 bp, Homo sapiens
tcataactaaacaaagcacttagtttgtggttttcattgtgcatttagaaaaatttgttttcattttatggctgtgatttataaatagaatcttataattkaccttatatttgttagccaccattccaacccttcaaaaaatgggaaaatctctctctctttctctctctctctctctctctctgacatacacacacacac

SEQ ID NO: 329568 - DNA, 201 bp, Homo sapiens
atataactggcagctatcaaaccttattgtgcatatacgtttacatgtctgtctttctgtactaggtggtacggtctctgaaagcaaattctctatcttayatgattttatatcctcaatatttagcacaatgcctggcacatagcagtctcccaaaaaagaagtgtttatcgaatgaaaaagtgttgaataaatatggtg

SEQ ID NO: 329569 - DNA, 201 bp, Homo sapiens
aagacagaattagttgcattagctttgctcttagggtggatgattcactgtataataacaatgaacacttctccattatttattatatgccagccattctyctaagcactgttttcacatcttgactcatttaacccttactgtcgggtccagagttcctgttttaattatcaccatacacttcccatccaggcatcttct

SEQ ID NO: 329570 - DNA, 201 bp, Homo sapiens
ctggcttggagggttctacgcccatggagcctcactctttgctagcacagcagtctgagatcaaactgcaaggtggcagcaaggctgggggaggggctccygccattgccaaggcttgagtaggtaaacaaagcagctgggaagctcaaactgggtggagcccaccacagctcaaggaggcctgcctgcctctgtagactc

SEQ ID NO: 329571 - DNA, 201 bp, Homo sapiens
tagtttcctcacctcttcaattttttctaaaatgtcaccttctcaatccatcctacccaggccctcctcaccacaacctatccctcctacactgctctgcytttttttctctccaaaatactttttgccttctaacgtgctatataatgaacttatttattgcatctattgtttattagtggtctaccttcattagattgt

SEQ ID NO: 329572 - DNA, 201 bp, Homo sapiens
agagagagagagacagagagagaaaggaaggagggagggaaggagggagggaaggaaggaaggaaggaaggaaggaaggaaggaaggaaggaaggaaggaaggaaggaaggaaggaagggaaaattagtgatcataaattgatttgatttcacaatccacttttgggttgtgatttgcaatttggaaagcatacttttaaa

SEQ ID NO: 329573 - DNA, 201 bp, Homo sapiens
aaaaccacaaagatggggaaaaaacagagcagaaaaactgaaaattctaagaatcagatcacctctcctcctccaaaggaacgcagctcctcaccagcaayggaacaaagctggacagagactgacttcgatgagttgagagaagaaggcttcagaagatcaaactactccgagctaaagaaggaagtttgaacccatggc

SEQ ID NO: 329574 - DNA, 201 bp, Homo sapiens
aagagagagagagacagagagagaaaggaaggagggagggaaggagggagggaaggaaggaaggaaggaaggaaggaaggaaggaaggaaggaaggaaggaaggaaggaaggaaggaagggaaaattagtgatcataaattgatttgatttcacaatccacttttgggttgtgatttgcaatttggaaagcatacttttaa

SEQ ID NO: 329575 - DNA, 201 bp, Homo sapiens
ggctaatacctataacaagttctgcacaatctgtgtggggcgccttgtttgtgtgtggtgtacgacaaatatgtataaaatgtgtattttatacatatgtrtatatatataatattaatgtatatataacgatacataggcacacataattaaacaattgacataaatgtttcatgaaataatactcttactgtgtgcatt

SEQ ID NO: 329576 - DNA, 201 bp, Homo sapiens
aggtgggaggatcccttaaacccaggaagtcgaaattgtagtgtgaactgtgtttacatcactgtactccaacctgggtgacaaagtgagaccctgtcatwaaaaaaaaaaaaaaaaaaatggcctgcccactgttatgtacattgtaagtgaaagagagagaaagagacagagatataaagtagggtgcttagggcatag

SEQ ID NO: 329577 - DNA, 201 bp, Homo sapiens
ggagctgctttgaaagaaaaactgaagggagtgtagtattacaaactttttttttattatactttaagttctagggtacatgtgcacaacgtgcaggtttkttacatatgtatacatgtgccattttggtgtgctgcacccagtaactcgtcatttacattaggtatatctcctaatgctatccctccccgctccccccac

SEQ ID NO: 329578 - DNA, 201 bp, Homo sapiens
tggtcaaaatatttaccctttctgagtctcagttaatactacctaaaaatcatactacatttcctttgtaaattcactgtcccctcaaggactactttttmtttctcctcttaccttaaactttcagcaacactctcctcattctcattgtcagctgctgagcttcctttctacttttctgaaacaactttatttaatcaa

SEQ ID NO: 329579 - DNA, 201 bp, Homo sapiens
gtaattcgataatttaaagctatgaaatagacactatatatatgaaatatatatgaaatatatatatgatatatatgatatatatcatatatatatgaaayatatatatgatatatatgatatatcatatatatgacatatatatgccatatcatatatattacatatatgaaatatatatatatcatatatatagtgtct

SEQ ID NO: 329580 - DNA, 201 bp, Homo sapiens
attatgagtaaagaggagggtgatataatcaaaacaagaatgatcagcctagaaagtaagattgaaactgtggtatttaattatttttaagttactttttwtaactccttactatatgtcaagcactggactaagcagattgcatgcattttttcatttaatctcaaagcatgcctatgagatagttacttgtattctctt

SEQ ID NO: 329581 - DNA, 201 bp, Homo sapiens
tagccaggcgtggcggcatgcgcctgtagtcccagctgttgagtaggctgaggcaggagaatggcatgaacccaggaggcggagcttgcagtgagccgagrtcatgccactgcagtccagcctgggtgacagagcaagactccgtctcaaaaaaaaaaaaaaaattaatacttaatctcaacacttaggtttgccattgtc

SEQ ID NO: 329582 - DNA, 201 bp, Homo sapiens
agtctcgctctgtcacccaggctggagtgcagtggcacaatctctgctcactgcaagctccacctcctgggttcacaccattctcctgcctcagcctcccragtagctgggactacaggctcctgccaccacacctggctaattttttgtatttttagtagagacgaggtttcaccgtattagccaggatggtctcgatct

SEQ ID NO: 329583 - DNA, 201 bp, Homo sapiens
ggtgtcggtagttaataacagctaatgtctattgagagcttattctgtgtcaggcactgtcctaattactttaaatgtattccacatataattgtcccagraactccatttagtggtcactaggacacgagaggttaagtaatttgccaaaatagctaggaagtggcagaccagggatttaaactcaggcaatatgatgcg

SEQ ID NO: 329584 - DNA, 201 bp, Homo sapiens
acggtggctcgttctcacaatttcacagtttcagggtgggattagttaggcctaacgaacctactggtcatgttggttgcttgcaggcctttctagctctrtgtcttcgtggaggaagatagcctgcaggtgtaatgccttggaaaatgacaagttttctgttttgtcttcatgtttcctcagaacagggcaaaagatagg

SEQ ID NO: 329585 - DNA, 201 bp, Homo sapiens
gcaagtgctgatttttatgtctcatacccagcattcaaatttgacaggagggttggaccttactacactgaataaaatttcacatgatttattaaagattrtttaaactgtttaaagttcgtttggtggtagttttttaatgtacaaaggatggtcagtctttgtaattaaataataagtgaagacattttattttgctta

SEQ ID NO: 329586 - DNA, 201 bp, Homo sapiens
gtgagtgagggacggcatggaggagtggtgttcagtgtggattctgggagagtgtacagtgagatccaggtgtggcctgctgggtgtgataaacaccgacyagctattgaccaggtgttgggctgggcattagattttctttcgattatgtttatttatgaaagtaacagtctttttcatgtaaaaatcattctgtggtcc

SEQ ID NO: 329587 - DNA, 201 bp, Homo sapiens
aagtatttatatgtcctttgaaatttttttggcggtggcattctttttattttaatatataaggttttgttactttttgataaacagtctttttacatacraaatttattactgtttgccatatttatagcaaacatagtttccttttttactatttatctttgaagggttgtggagttttttcatatacagtggtttaaa

SEQ ID NO: 329588 - DNA, 201 bp, Homo sapiens
tatgtacaaaacccagaagggacactgatagatttttgaatatgtaataatcaaggtcttctttggaagagggtggggttaagggtagaagtagtaggacrtatgcaagttcaggtcccttctcttggggaggggacagttctgagtgcctcaccttcccaggctctcctgtgggctcagggaaagctgtcctgggttctt

SEQ ID NO: 329589 - DNA, 201 bp, Homo sapiens
tcatttctaagaggtagagattaaagcaaacatgaggattaacttttgaaaagagattagggaattttggatgctcagatggtaattccagtaggtaatcwgacttttcatttagaaatgtgtgtctgatcgcatgactttaaatgcttcccatttaaaaactcaacacttcttcttgtgcagagttcgcagtatgtgcag

SEQ ID NO: 329590 - DNA, 201 bp, Homo sapiens
taaattggtgagtgccctttccttttaatgtaaaataacatttacaagcatctctccttgacattttcaaagaaatatgtaatcatctaaaagaaatattytatttttttcatatctgtttaacaattgactatgctaagctttttagaagttagtaactatcaaactgagcccctttccttgcttgatctgttcttttat

SEQ ID NO: 329591 - DNA, 201 bp, Homo sapiens
attcagtaagtaaatcttaagacttggaaatttgcactagctttacccatgaaatttacctggagcttagtagtcagtttattattgttccatttttagcwacttactgattaatatattatctggaagaatgtaacgatatttagaacattttatgtcatccccttgctttttatttagtaggattaggaataaaattat

SEQ ID NO: 329592 - DNA, 201 bp, Homo sapiens
ggttcttgtcgtccagccagaccgccattgttggcttacctaaattgtaatatgtatttgttctaaaactttctctccgaattttgattttgcaaatactrtgaattttgtttgaaaaggaaagcactgtcttctaagaaattatgttcccactttgtgtattttaatttgagtaattttcgaaaggacttagaattttta

SEQ ID NO: 329593 - DNA, 201 bp, Homo sapiens
tgcatagcattttaagaaaacctgaatttgttgtcacctatacaaatcaagagagtccactaaaatacgttaatgtctcctgagaagacatcattctgacrtggcaacaattggtcagaactgtgtgttatctcttcttatttacggagattcccactgttttctgccgtctaaactctgaccggctttactccctcagga

SEQ ID NO: 329594 - DNA, 201 bp, Homo sapiens
gaatgctgttgcatacttaaaactatgttttttggggggtgatttaagggattttatagagtgttttgatttgtaccctatttgatttatatgctgagttwagaacttggccccataataaggttcaattctgctgcctatcggggggcctcattggctgaaggagcccatatacaaattggtctgattcttacaacagtc

SEQ ID NO: 329595 - DNA, 201 bp, Homo sapiens; identical to SEQ ID NO: 68846

SEQ ID NO: 329596 - DNA, 201 bp, Homo sapiens
cttcaaaaagaaaccccatatcctttggccgtcacctctctatccacccatctacctagccctaagtaaccaccaatatctcgatttgcctgttacagaartttcatgtaaatggaatcatataatagatttttttttgtgactggcttctttcatgtactgtaatgtgttcagggctcatccatgttgtggaatttatca

SEQ ID NO: 329597 - DNA, 201 bp, Homo sapiens
aaggtatatgatgtgatttttagaattaatgttgcgttaaatgtatctcttatttgttttcaggcagcaagaattattgccaagttagcagcttggggaaragaactgatggaaggcagtgacttaaattactatttcaattggataaaaactcagctgagttcacaggtaaaagaaaattttttaaagtacctttgaaag

SEQ ID NO: 329598 - DNA, 201 bp, Homo sapiens
gcttggggaaaagaactgatggaaggcagtgacttaaattactatttcaattggataaaaactcagctgagttcacaggtaaaagaaaattttttaaagtwcctttgaaaggaatataacatccgtgttcttttaagctatttatagtaaatatgttaaattacaaaaatgttttattaaaataatgccgttttgaacttg

SEQ ID NO: 329599 - DNA, 201 bp, Homo sapiens
aagcaatgccagtgcaatgcagtgatgagtgacgaagggaggaaaggcagtagaagagaggcggacagccagaggaggggtgtgaggaggagacagggccygaggggccttttgaacggggatgtgaggagaagagagggctcaaggggccttttgaaccaggaatagttatcttggaagtgcaacggtggggagaggttg

SEQ ID NO: 329600 - DNA, 201 bp, Homo sapiens
attcttctttccatgaatcctgtctgggctcttctcttgctgggcttttggcattttgacctacaatactcaaaccaggctcacaaagttccacctggggsccctgatgtgcaggttcttagttggaccctttttcatctatatgagtccttgttcttcccccaaatccaaattacatgaactgtcaactaggcagaagaa

SEQ ID NO: 329601 - DNA, 201 bp, Homo sapiens
tctggtactcttgttgctcttgtcttctgttccctttaagtacaacaaataaaatactcaaaaccaattgtaatttttgattgcctatataactttatgcygtcgtcggtaatcaagagttattagtggctaagtatatctatttaaaaatagtaaacattctgaaacttatcactagaaatgttcacaagctgatacaag

SEQ ID NO: 329602 - DNA, 201 bp, Homo sapiens
tctttgcaagttagaaatgtttcctaagactgtattaacttttctggacagtatgcaccactgaattacagttgaattgcaaatgccggcataacataaayctcagattgttgcaaagtatcagcctaaataaatattcagaagagttggaaaataagcattttgacagtaaagaaaacccctgatggataatgtagtctg

SEQ ID NO: 329603 - DNA, 201 bp, Homo sapiens
atttatgaggtcattcagaatcgtaattgaggtgatgttgaacttcttagattgcagaaatggcagtagcagtaaacaagacctttatctgaacaggaaastagtctttccccaggaagtaattacatttccttgtaatcacctgtttgtgtaatcgtaataactttacaagttattcataaaaataggagaatgactagt

SEQ ID NO: 329604 - DNA, 201 bp, Homo sapiens; identical to SEQ ID NO: 68847

SEQ ID NO: 329605 - DNA, 201 bp, Homo sapiens
gatattcataatcataatattaatagttgtaaaaaaaagaaacacctcgtattctgtttttaccttgcatcaaaattgaagatttgttgaaagacattcargattacgaagtttagatgaccaaaatggatatccgaggtgctgtggatgctgctgtccccaccaatattattgctgccaaggctgcagaagttcgtgcaa

SEQ ID NO: 329606 - DNA, 201 bp, Homo sapiens
acaatatgaaaagcacaagaaagtaggtaaattagacttaatcaaaattaaaaacttttgtgctttaaagtacatcaagaagaaagtgaaaaggcaacccrcaaaataggggagaatattgcagatcatgtaaataataagggacttgtaatccagaatatatacagagctcttacaattcaaaaacaaacaaaaaatacc

SEQ ID NO: 329607 - DNA, 201 bp, Homo sapiens
cccagggaggtcaaggctgcagtgagctgtgactgcaccactgcactccagcctgggcaatggagcaaaaccctgtctcaaaaaaaaaaaaaaaaaaaaaattgtgtaggagaggatgttacctgtaatttatatctttgaccaggaagaaaaaaatgaatggaagatggtagggtggaagctgtggctgcatgtgtcttt

SEQ ID NO: 329608 - DNA, 201 bp, Homo sapiens
tatttttttcttctacttaagtgcttcattatccatattcgtatttatttagtaaaagcaaaaattttcagaaatggagtcttttgccaatctctcctaartcacaaaacagttgtgggttccatgtatgtgccaggggctgtgctaattattcggggacacagatgaccaacatagagctggacatcgaaggtcttatgg

SEQ ID NO: 329609 - DNA, 201 bp, Homo sapiens
gaagtggatcattgtaaaggtcttcatcctccttgtcgtcatgttgagtaagctgagaaagagaacatgttgatgttgctgtttcaggggtggcaaatgggtgtaagaaaatccatgtgtaagtggacctgtgcagttcagatttgtgctgttcaatggtcaactgtacaagattatgtcatctgtgaatagagagtttta

SEQ ID NO: 329610 - DNA, 201 bp, Homo sapiens
gtagagatattatttttcttttcctttgctaacgagaaaacaattttcgagattaagtgatttgcccaacattatgtgacaaaacttctgattcttgttcyagtttttactctgtccttctccctctctattcctcttttactttcttttctctatttcttttttaaaattatgtcataacttacataaaggaaaatgcac

SEQ ID NO: 329611 - DNA, 201 bp, Homo sapiens
gtagttttcatgtgatctttaataactttgctgttttctgtaccaagtcagctacagacgccagcccgttatctgaggcgattcgtaagggtggtccaaakctaggaataagatctcggagaagcacatgggttactttacgagctttttcagtttgtattggataagcctccacccacccagagtaggtacacacaagaa

SEQ ID NO: 329612 - DNA, 201 bp, Homo sapiens
tggggggcttttatgttcaggttttgcccaagagtcagtttatctgctttttgttctagcagggcagttgctgttaaggccctcaaacatggggggcaacytttagaaaccccgtctagttgtttagagaggtaggccaccagcctcggccagggtcccacagtctgggtcaaaacctcaactgccattttttctctctct

SEQ ID NO: 329613 - DNA, 201 bp, Homo sapiens
tgatttctgctgaagattgtgagtttattcagaggtttgaaatgaaacgaagccctgaagagaagcaagagatgcttcaaactgaaggcagccaggtgatsaataaacattatataatgaacacttccccgtgtcatccaaaagtttagaaaaatcttagtgattataagtgacttccagttttcttgctaatttggaaag

SEQ ID NO: 329614 - DNA, 201 bp, Homo sapiens
tttatagcatggtttttatcacatgctgtttgttacattggggatttattgaatgagtgaataccaagtgaaatacactttaatttatacatccttaaggkggggaagtttttcaatgtatgactccaaacctattactgaatgctgttgcatacttaaaactatgttttttggggggtgatttaagggattttatagagt

SEQ ID NO: 329615 - DNA, 201 bp, Homo sapiens
tgttttatgttttttcctctggagtttaacaagcctttttccttgtataatgccccatgtacttggagggttaagaaggcatactgagagtcagtgtagaygttcacagtcttacctacacttagttctaaagcctgaattaaagcaatgagttcatccttctgggctgaagtaccctggggcaatgattgggcttcaatg

SEQ ID NO: 329616 - DNA, 201 bp, Homo sapiens
gtggaagtggatcattgtaaaggtcttcatcctccttgtcgtcatgttgagtaagctgagaaagagaacatgttgatgttgctgtttcaggggtggcaaatgggtgtaagaaaatccatgtgtaagtggacctgtgcagttcagatttgtgctgttcaatggtcaactgtacaagattatgtcatctgtgaatagagagtt

SEQ ID NO: 329617 - DNA, 201 bp, Homo sapiens
aatgtcaagcatcttttcatgtgcttattggccatttgtatatctactttggagaaatgtctgttcagatgcttggctcattttttagttggattgtcttyttattacttagttgtaggggttcttcatatattctggatacaggtccaagatcatatatgtgatttgcaaatattttgtctcattttgtgggttatctta

SEQ ID NO: 329618 - DNA, 201 bp, Homo sapiens
accagccactgcaaaaacatgccaaattgtaaagaccatcactgctaggaagaaactgcatcaactaacgagcagaataaccagctaacatcataatgacaggatcaaattcacacataacaatattaaccttcaatgtaaatgggctaaatgctccaattaaaagacacagactggcaaattggataaagagtcaagacc

SEQ ID NO: 329619 - DNA, 201 bp, Homo sapiens
tcgcttgaacccaggaggcggaggttgcagtgagcctaggctgcgcgactgtactctaatctgggtgacacagcgagactctgtctcgaaaaaaaaaaaaagaaattatctttattggcattatcagtaaaagtctgtctcctgcattatattctggtaaagctaacagtgaccattttctattacctcagtaaaaataat

SEQ ID NO: 329620 - DNA, 201 bp, Homo sapiens
tgcatcttttcaactcaataaatttattctctgagggcttaatgctccttctgttccatttgtcttagttttgagtttctcccttgtctttccttttttttaattctaccattgtcacaggagcctttattttgccaaaatcttttagtgtaaattaagcatctaccatttgcaaaaatagagctagtttgatcttttact

SEQ ID NO: 329621 - DNA, 201 bp, Homo sapiens
catttaatcttttcattttttcagaaatatgtactttctactttttgagtttttgcttagcattgaatttgtgtgtgtgtgtgtgtgtgtgtgtgtgtgtgtttctcacattgcaaataggaataatgtgaggagaaaaattttcaagtatagcccatttgaagagaggaagataactgaggtctttttttttcctttctg

SEQ ID NO: 329622 - DNA, 201 bp, Homo sapiens
tcatttaatcttttcattttttcagaaatatgtactttctactttttgagtttttgcttagcattgaatttgtgtgtgtgtgtgtgtgtgtgtgtgtgtgtgtttctcacattgcaaataggaataatgtgaggagaaaaattttcaagtatagcccatttgaagagaggaagataactgaggtctttttttttcctttct

SEQ ID NO: 329623 - DNA, 201 bp, Homo sapiens
gtcatttaatcttttcattttttcagaaatatgtactttctactttttgagtttttgcttagcattgaatttgtgtgtgtgtgtgtgtgtgtgtgtgtgtktgtttctcacattgcaaataggaataatgtgaggagaaaaattttcaagtatagcccatttgaagagaggaagataactgaggtctttttttttcctttc

SEQ ID NO: 329624 - DNA, 201 bp, Homo sapiens
catcattttgccattcagtgatttttaataaatttacagaattgtgcaaccattaccacagtctaacttcataacatttcaacatctcagaaaaacaaacmaaccaaccctgtacacattaacagtcttccccattcctgttcttgcctccaagccctggcaaccactaacctactttctgtcttgggatttgcctctttt

SEQ ID NO: 329625 - DNA, 201 bp, Homo sapiens
tgcagtaacagtattttagattgagaggaaaaaggacttagttttttttttttctaagtagagatgggggtttcgccatgttggccaggctggtctcgaaygcctgacctcaggtaatctgcccacctcggcctcccaaagtgctgggattacagacgtgagccaccacacttggcctaggacttagtttttttttggctt

SEQ ID NO: 329626 - DNA, 201 bp, Homo sapiens
tatatacatttgtatatacatatgtatatatgtatatacaatgtgtgtatgtgtgtgtattttatatatatatatatatatatatatatatatatatatawgcttttttttttttttgagatagattcttgctctctcactgaggctggagtgcagtggcacaatctcagctcactataacctccacccaccaggttcaag

SEQ ID NO: 329627 - DNA, 201 bp, Homo sapiens
atatacatatgtatatatgtatatacgtatatacatatatacatttgtatatacatatgtatatatgtatatacaatgtgtgtatgtgtgtgtattttatatatatatatatatatatatatatatatatatatatgcttttttttttttttgagatagattcttgctctctcactgaggctggagtgcagtggcacaatc

SEQ ID NO: 329628 - DNA, 201 bp, Homo sapiens
ggtggcatagacaaataggccagtctcgccttaaaataaggactcaattatttgaactgaactcagactcctaaggtttatcatccagctaggaggccacycagcctgtttcactaactcatgaaggtcccacttgggtggccccagcaatgataaaccactttccaggggcacaatgagcaccctggtattatacttcat

SEQ ID NO: 329629 - DNA, 201 bp, Homo sapiens
ggtgaagacagtcgacgtgaataagcaatgccagtgcaatgcagtgatgagtgacgaagggaggaaaggcagtagaagagaggcggacagccagaggaggsgtgtgaggaggagacagggcccgaggggccttttgaacggggatgtgaggagaagagagggctcaaggggccttttgaaccaggaatagttatcttggaa

SEQ ID NO: 329630 - DNA, 201 bp, Homo sapiens
atggggtttcaccatgttggccaggctggtcttgaactcctgacctcgtaatccacctgcctcggcctcccaaagtgctgggattataggcatgagccacyttgcctggccgataactgaggtcttaaaaaaacccagcacattttaatctatatagtttgctgacttttttattgttgttaaaaagcctattatatacat

SEQ ID NO: 329631 - DNA, 201 bp, Homo sapiens
attagtgttatatctacagtgaattgtggcatttatcattaaaagtgtcccttttatcatacttaatacattttggcttaaattatactttaatactggtmtagcaactcatggcttcttgttgtttctgattgtctgcatatctttgcctgtcccttttttaggtgaatcattttgttttaggtaagtcttttgtataca

SEQ ID NO: 329632 - DNA, 201 bp, Homo sapiens
ggagtggattagtttttcactgttaccttatgactttgagttttaacaacagaaagagcttggaggttttttttaaatctagtgtttagaaaacttgaatrtagtggaggggaacgttttacaagttattacaaaagcattatgcatatctttattatgatacacttaaagagacttttgaaaagggtactttctattttc

SEQ ID NO: 329633 - DNA, 201 bp, Homo sapiens
tagtgttcctatagatcttgtattacagtttttcaccttctacctcaacttcattggaactttttgtgatgatagaagtagtttatatctgtgctgctcartacaatagtttgtcactaaagagcactggaaatgttcttggtagctgagaaactaaatttttatcaatttaactttaaaacaaaccacatgtggctaatg

SEQ ID NO: 329634 - DNA, 201 bp, Homo sapiens
tatttatacctattctatttaatcatgatttctgatttcagtatattaggtgattgctttaaaaatcttactgcagtgttagtgccaataatgaaaaaaawttttctagaaaagcaaaagcctaaagaactcttttatggagcagtggacaatatttgaaatataatgatactttcagacttaggacatttaatatttgag

SEQ ID NO: 329635 - DNA, 201 bp, Homo sapiens
cagggatcagcaaactttggaagcctatgggccaaatgtggtccacctgtttttaatcaataaagctttattggaacactgctttgctcatttgtttatgktttttaatgactgcttttgcaccgtagtagtagaattgtgcagttgtgacagagactgcaaagcctaaaatatttactcttcgcccttttacagaaaatg

SEQ ID NO: 329636 - DNA, 201 bp, Homo sapiens
agacaggcataggaaatcacaagggtattgattggggaagtgataagtgtccatgaaatctttacaatttatgtttagaaattgcagtaaagacaggcatragaaattacaaaagtattaatttggggaactaataaatgtccataaaatcttcacaatccacgttcttctgccatggcttcagccggtccctccgtttgg

SEQ ID NO: 329637 - DNA, 201 bp, Homo sapiens
cactcactgaagcatggcaccttctaataagaccctttgtcagatctagttttagcactttattctgtgctctcctgctctgagggaacatggaataagarctgattcttcttttaaatttgttcactgtggcaaaatagatattgcatcttttcaactcaataaatttattctctgagggcttaatgctccttctgttcc

SEQ ID NO: 329638 - DNA, 201 bp, Homo sapiens
tcttttatggagcagtggacaatatttgaaatataatgatactttcagacttaggacatttaatatttgagttgaatgcctggggagattaaagtgatcaygatattcataatcataatattaatagttgtaaaaaaaagaaacacctcgtattctgtttttaccttgcatcaaaattgaagatttgttgaaagacattca

SEQ ID NO: 329639 - DNA, 201 bp, Homo sapiens
caaatttgacaggagggttggaccttactacactgaataaaatttcacatgatttattaaagattatttaaactgtttaaagttcgtttggtggtagtttkttaatgtacaaaggatggtcagtctttgtaattaaataataagtgaagacattttattttgcttaattttggagtactgtcagattcttataaaccttga

SEQ ID NO: 329640 - DNA, 201 bp, Homo sapiens
ctcatcttaggattagctgggttggatgatctgagtcctactggctggttcacttgtcctgagatgccggtgttagccgactgtggtggatccaagaaacracacctgcaactttagcagcagtgggagtggacaagattacagtatagggcctatcttatatggatcctagagaaattagattttactttttaaccgaaa

SEQ ID NO: 329641 - DNA, 201 bp, Homo sapiens
acaaactgtactgcctttgaatctaaatacaaatgtccaattttctgtgctcccacaggattctgaatatattaatgcttccattatgtaacacttttcastttgtacagtgataatgtgatgaagtctgtttatctcactagactgtgaacttctcaaaagagccacctgtatctgactagacatagtgttcaccacaca

SEQ ID NO: 329642 - DNA, 201 bp, Homo sapiens
aagcccagcaaaagctgctttaatcattatatgatattctatccaagcttcccacataccctacttttttgtccccacttagttcctcctctcttcctttrtttttcactgaatcattaggtaaaataaaaaggttattggaagcatgtatctaatactgtaatatcacagaagagagatattagttgatattaattgaat

SEQ ID NO: 329643 - DNA, 201 bp, Homo sapiens
gtatatacatatgtatatatgtatatacgtatatacatatatacatttgtatatacatatgtatatatgtatatacaatgtgtgtatgtgtgtgtattttatatatatatatatatatatatatatatatatatatatgcttttttttttttttgagatagattcttgctctctcactgaggctggagtgcagtggcacaa

SEQ ID NO: 329644 - DNA, 201 bp, Homo sapiens
attgttttaaatttgcattccgttaataatgaatgaggctgagcatcttttaatattattggctatttatattctttctataaattgcttattcatagcakttgtcaccttccaaattttaaaatttgatgtgtaggaactcttttctaggtgtcggtagttaataacagctaatgtctattgagagcttattctgtgtca

SEQ ID NO: 329645 - DNA, 201 bp, Homo sapiens
ggcgggcagatcacttgaggtcaggagttcgagaccagcctggccaacatggtaaaacttcgtctctactaaaaatacaaaaaaaaaaaaaaaaaaaaaaagagtgtaattattgattaaactatttgagcgtgtgagagttttgatatgatgaaaatgctgtcttgatagattgtaccagtttgcagatcctgccagcag

SEQ ID NO: 329646 - DNA, 201 bp, Homo sapiens
aggctgaggcgggtggattacctgaggtcaggagtttgagaccagcctggccaacatggtgaaaccccgtctctactaaaaatacaaaaatgagctgggcrtggtggtgagcacctgtaatcccagctactcgggagactgaggcaggagaattgcttgagcctggaaggtggaggttgcagtgagccgaaatcctgccac

SEQ ID NO: 329647 - DNA, 201 bp, Homo sapiens
attaggatgggggtttgctatattgtatgattgagtccctgaggagtggagaagttgggaaggttgagctgtgtttcttctacctccagagatagtcttaycattttcaaattcagcagcatcaccaccggggaaagtgacagtgggatatcatcttcactggggatgacagggaagatgacaggaacatgatgctgaatt

SEQ ID NO: 329648 - DNA, 201 bp, Homo sapiens
agtattctctatacatagtatctttattcagggatatgtgaaacattgcaaggcagtgtgcttatttatcaaactgtatcaaatataaattattttgttcyggatttccctgtgtgttaagtagtcttgacttgtgtagatttaattcaggagacaaaatcttgttcatttctaagaggtagagattaaagcaaacatgag

SEQ ID NO: 329649 - DNA, 201 bp, Homo sapiens
ttttatgttcaggttttgcccaagagtcagtttatctgctttttgttctagcagggcagttgctgttaaggccctcaaacatggggggcaacctttagaarccccgtctagttgtttagagaggtaggccaccagcctcggccagggtcccacagtctgggtcaaaacctcaactgccattttttctctctctgatgcata

SEQ ID NO: 329650 - DNA, 201 bp, Homo sapiens
gtaatgctaccagcacttccaaaggagagggttagtgatgcactagcatgagtgcgtttgaagatgcaggcacatacagtgtaggagaatatccaggagtrctgctgtggtatcatgtgttacatattacgttcctgccacttaacacttttatcataaataatgacatttatgtaaattcttacaagtgctttttgagtg

SEQ ID NO: 329651 - DNA, 201 bp, Homo sapiens
cactgtcatagcaggacgagccgcagacaaaaccccttagatactaggttaaagaaggaagtggctgtattcggctgggagctttggcagacttgtgtccygaaaaccaagctccctgagagagaaatgcctgcccttttaagggcttacagctctaagggggtccatgtgaaaggattgtgatcaattgagcaagcaagg

SEQ ID NO: 329652 - DNA, 201 bp, Homo sapiens
gtgaagacagtcgacgtgaataagcaatgccagtgcaatgcagtgatgagtgacgaagggaggaaaggcagtagaagagaggcggacagccagaggagggrtgtgaggaggagacagggcccgaggggccttttgaacggggatgtgaggagaagagagggctcaaggggccttttgaaccaggaatagttatcttggaag

SEQ ID NO: 329653 - DNA, 201 bp, Homo sapiens
gctggggtaccaggaggacttcaggcaaaggcaccctgtgagcctgctgcgtgtcgggagtcacagcagtgttgtcagaagtggaactgggattctagcartagcggaactaacaccagaaggcatcctttgaagtcgcgtggaggcttaataagattacagtcacctgaatgttaattttacttctttttggatttttat

SEQ ID NO: 329654 - DNA, 201 bp, Homo sapiens
ctcacttgtagtttacaagaataactgtggatatgccgggaatgtaatatccccagatagggaaggacagcctggaatagcctgggctccattccacactsccttcctccccacagcagggtgagcttcagcacattagcccagcacatcatgtggcccccagggtgtaaaactcagggtgggctacttcctggggtcctt

SEQ ID NO: 329655 - DNA, 201 bp, Homo sapiens
ctggggctcagtagccacccatgccgagtggctcttggcccctgtaaggctgaggatggaggctgaaggggtgagttgggagagatgtggctgctgaggtrggggaaccttccttgtcacattaaggagtgaggacattttcccggaataatggaagcaattagaggactgaacaggcggctaccgtgagaaggcttgtgt

SEQ ID NO: 329656 - DNA, 201 bp, Homo sapiens
tcttttgtgaagaaatcaattatcttcaccacttgttgtctgctaagtattagtgaagtctgatatggggaatgaactaccctcaggcctctggaagggawggagcaggtgggagcctgtctgtgaccagacgcacaggaccctttgtgataacttaccagttccctgcctgagctcctggaggctttcccatacattctt

SEQ ID NO: 329657 - DNA, 201 bp, Homo sapiens
tacaagttattcataaaaataggagaatgactagtttgtctttgtcataacttgtttgtgtatgatacatgaagtagaattcatacagcacaagtactttkgaaatttggaaaagtttaattttctaggactttttagttatttttggatgttaaagtaagtatatatgacagtgcataatgtgtttcaattttggaagtg

SEQ ID NO: 329658 - DNA, 201 bp, Homo sapiens
tggatttatcattaggaattcaaaaacgaaagtatttgaatactgtaaatctatggttcagggaaaatgatgtaaaaaaagacacgtttggtttatttacrtacattgttactttcctttttagcgtgttggtatttgagctgcctgcttacaaactgtgaatttgagagtaattgcatcttcctcaccacgtctctcccg

SEQ ID NO: 329659 - DNA, 201 bp, Homo sapiens
agtgggggagcaggggatggaggggtcccctcaagggaaggctctgactgtacccccatgtttaggaggcagccatggccaagctggccgcctcggaggcsgcgaccgccatcagccaccaggtgagtgtccacagtgagctctgagggggccagctgccccttctccagctttccccacgccggggtcttctccctcctg

SEQ ID NO: 329660 - DNA, 201 bp, Homo sapiens
gaggggcagctgctgacctgtggtgtggggtggggctattgcagttcaagttggcagacatggccctggccctggagagtgcccggctgctgacctggcgygctgccatgctgaaggataacaagaagcctttcatcaaggtgcccacaggggtccccgagccatggcccagaatgtggtgggcccagggacggggagagg

SEQ ID NO: 329661 - DNA, 201 bp, Homo sapiens; identical to SEQ ID NO: 68861

SEQ ID NO: 329662 - DNA, 201 bp, Homo sapiens
gacctggcgcgctgccatgctgaaggataacaagaagcctttcatcaaggtgcccacaggggtccccgagccatggcccagaatgtggtgggcccagggayggggagaggttggggcgggtctctgctccttggccccgtgggtcagaggtgtgggcctggggtttacagccccatggggaggctccacaggcctcccctg

SEQ ID NO: 329663 - DNA, 201 bp, Homo sapiens
tgtcccccaggctggagtgcagtggtgcgatcttggctcactgcagcctctgtctcccaggttcaagtgattatcctgcctcagcctcccaggtagctggyactacaggtgcccgccaccatgcctggctaatttttgtatttttagtagagatggggtttcaccatgttggccaggctggtcttgaactcctgacctcag

SEQ ID NO: 329664 - DNA, 201 bp, Homo sapiens
gagttccctctgcaggctctggggaaatccactcctgtctttcccagttctagaggccgcctgcattcttcccgccagagttcctgcctctgcttccgtcrtcacctctccttctctgagtctgtgtctgtctttgccttacaaagactctgtgatgacactgggtgactctgatcatccagaataaccctcacatctcca

SEQ ID NO: 329665 - DNA, 201 bp, Homo sapiens
aggaagattgccttcggggtcccctggtttaagacgccagctcctgcacacccccctcgccctctggtcccatcactgagagctttgggaccctcatcttyggagcccgagtcatagggtttcgtgtctgccagcaggggtgtggagggagtgaggctggtgcccttaggttgtgtggggtggggcgtgcgctgagccctg

SEQ ID NO: 329666 - DNA, 201 bp, Homo sapiens
ctgtccctgtccctgctctcccagagataagtggttttacttgttcctttttgaagttaggtagattctgtggtccacatttcccatattactcacctgaragtaataatactattattattattttgtttttggtagagatggggtcttgctatgttgcccagactggtctcgaactcctggcctcaagcaatcccctca

SEQ ID NO: 329667 - DNA, 201 bp, Homo sapiens
ccccggcagctgcccatggcgtgccgtccttccctgtgcccaggtgaagaagatgggcgggcttgggcttctggccatggacgtgcccgaggagcttggcrgtgctggcctcgattacctggcctacgccatcgccatggaggagatcagccgtggctgcgcctccaccggagtcatcatgagtgtcaacaacgtgagccc

SEQ ID NO: 329668 - DNA, 201 bp, Homo sapiens
cggagcggggagcaggcgtggaggcgggggcaggacagcttgaatgagaagtgccatcatatagacctcagtgggactgggtcttcagcttctggacttgkggatcccttgtgcgtggctggggtcacatggcctgagtttctgcagggcactgcctcgggggcaggagggtttgggcttggggagggtgggctcgccccc

SEQ ID NO: 329669 - DNA, 201 bp, Homo sapiens
aacggcagtgatgcaggagctgcgtccaccaccgcccgggccgagggcgactcatgggttctgaatggaaccaaagcctggatcaccaatgcctgggaggyttcggctgccgtggtctttgccagcacggacagagccctgcaaaacaaggtgggcccacccagagaggggttcagccggatcctgggctgctgtcatttc

SEQ ID NO: 329670 - DNA, 201 bp, Homo sapiens
ctcccttctgtcccctggaggggcagctgctgacctgtggtgtggggtggggctattgcagttcaagttggcagacatggccctggccctggagagtgccyggctgctgacctggcgcgctgccatgctgaaggataacaagaagcctttcatcaaggtgcccacaggggtccccgagccatggcccagaatgtggtgggc

SEQ ID NO: 329671 - DNA, 201 bp, Homo sapiens
ccggggtcttctccctcctgagccactgttctcatctcaggccatccagatcctgggcggcatgggctacgtgacagagatgccggcagagcggcactacygcgacgcccgcatcactgagatctacgagggcaccagcgaaatccagcggctggtgatcgccgggcatctgctcaggagctaccggagctgagcccgcgg

SEQ ID NO: 329672 - DNA, 201 bp, Homo sapiens
cttgccggcagctctctgtcctagggcctggcggcagttacacaccatctaccagtctgtggaactgcccgagacacaccagatgttgctccagacatgcygggactttgccgagaaggagttgtttcccattgcagcccaggtggataaggaacatctcttcccagcggctcaggtgagagtgcaacctcagcagcccac

SEQ ID NO: 329673 - DNA, 201 bp, Homo sapiens
ggtggaggtggatttaccactggttttacaaaggaccgtgtaaagtcattgaagttgtgaaagtctattttttttcctgtaaatctattttttacagaatrtaagaaacatcaatgacctgatctgtccttcctcctccttcccgcttcccccaaaatcacattccagtttttattgtctttgtgtccaaagtaaactagg

SEQ ID NO: 329674 - DNA, 201 bp, Homo sapiens
caggtgatccacctgcctcagctaccaaagtgctgggaatacaagcatgagccactgcgcctggcaaagtactctgaagtgtgggctagaaaagtgttctrttcagaggccatgtgtgtgctgccgcaggtctgtgtctccaggtcctcttcctagtgaaaagcactctctcacttggacttccccttccctagttggttc

SEQ ID NO: 329675 - DNA, 201 bp, Homo sapiens
gcatatttatttttgtttttgtttttttgagacagggcctcactgtcgcccaggctggagtgcagtgacacaaacacagctcactgcagccttgacctccygggctcagggctcaagtgatcctcatgcctcacctcctgcagtagctgggaccacaggtgtgcaccgccatgcctggctcatttatttttatttttataa

SEQ ID NO: 329676 - DNA, 201 bp, Homo sapiens; identical to SEQ ID NO: 68862

SEQ ID NO: 329677 - DNA, 201 bp, Homo sapiens
cagctgcccatggcgtgccgtccttccctgtgcccaggtgaagaagatgggcgggcttgggcttctggccatggacgtgcccgaggagcttggcggtgctkgcctcgattacctggcctacgccatcgccatggaggagatcagccgtggctgcgcctccaccggagtcatcatgagtgtcaacaacgtgagccccctccc

SEQ ID NO: 329678 - DNA, 201 bp, Homo sapiens
tgttgggcaggtggtggggctgggccatggagctggcccagaggcccctcagccctttgtaaagtctgatgaaggcaggggtggtgattcatgctgtgtgrctgactgtgggtaataaacacacctgtcccccagtctgtgtcctcgccctctcctgggtgctccggggagggatggtggtctctgcacagagtcctgctc

SEQ ID NO: 329679 - DNA, 201 bp, Homo sapiens; identical to SEQ ID NO: 68869

SEQ ID NO: 329680 - DNA, 201 bp, Homo sapiens
cctcaccaagctccaggtcatccaggtaatggtggcagctttaggagctgggcctagaggctggacagcgggcggagagtgtggcctcctgactgctctcygtcctcctccccctcccttctgtcccctggaggggcagctgctgacctgtggtgtggggtggggctattgcagttcaagttggcagacatggccctggcc

SEQ ID NO: 329681 - DNA, 201 bp, Homo sapiens
accgccatcagccaccaggtgagtgtccacagtgagctctgagggggccagctgccccttctccagctttccccacgccggggtcttctccctcctgagcmactgttctcatctcaggccatccagatcctgggcggcatgggctacgtgacagagatgccggcagagcggcactaccgcgacgcccgcatcactgagatc

SEQ ID NO: 329682 - DNA, 201 bp, Homo sapiens
ctgagggaggtggggaggggaccgggttggtgttgggtgtgctggtgtgagggtgtggctgaggggcagctctgagaaaaccacccgcctctcctttcagrgcatcagtgccttcctggtccccatgccaacgcctgggctcacgttggggaagaaagaagacaagctgggcatccggggctcatccacggccaacctcat

SEQ ID NO: 329683 - DNA, 201 bp, Homo sapiens
tttgctctggggcaagtgggctgtccctgtccctcctcagctgccactgaagcctgcaccttccccagaagccggcagagggtgtcaaggcctgagcttcygagggaggtggggaggggaccgggttggtgttgggtgtgctggtgtgagggtgtggctgaggggcagctctgagaaaaccacccgcctctcctttcaggg

SEQ ID NO: 329684 - DNA, 201 bp, Homo sapiens
ggctggtgcccttaggttgtgtggggtggggcgtgcgctgagccctgggtctgtgtgggcagggaacggcagtgatgcaggagctgcgtccaccaccgccygggccgagggcgactcatgggttctgaatggaaccaaagcctggatcaccaatgcctgggaggcttcggctgccgtggtctttgccagcacggacagagc

SEQ ID NO: 329685 - DNA, 201 bp, Homo sapiens
ccagctcctgcacacccccctcgccctctggtcccatcactgagagctttgggaccctcatctttggagcccgagtcatagggtttcgtgtctgccagcasgggtgtggagggagtgaggctggtgcccttaggttgtgtggggtggggcgtgcgctgagccctgggtctgtgtgggcagggaacggcagtgatgcaggag

SEQ ID NO: 329686 - DNA, 201 bp, Homo sapiens
ttgttagcattttgattaacgaatgtgggcacgaacagccagctgaccgaccgcgcgcgcagtcgagcgtcggttcctcgccttgggagggaccactggargccccgccccctggccgcgagcgcacctcggccccgctcccgaggccctacgggcgtggcctctgtcccgggtcccgccccccagcactccggaacagcg

SEQ ID NO: 329687 - DNA, 201 bp, Homo sapiens
tgggcgggcttgggcttctggccatggacgtgcccgaggagcttggcggtgctggcctcgattacctggcctacgccatcgccatggaggagatcagccgyggctgcgcctccaccggagtcatcatgagtgtcaacaacgtgagccccctcccaggcccctgggacacacgggtggagggaggctcccgtgagcgggcag

SEQ ID NO: 329688 - DNA, 201 bp, Homo sapiens
ggctggggtcacatggcctgagtttctgcagggcactgcctcgggggcaggagggtttgggcttggggagggtgggctcgcccccggcagctgcccatggygtgccgtccttccctgtgcccaggtgaagaagatgggcgggcttgggcttctggccatggacgtgcccgaggagcttggcggtgctggcctcgattacct

SEQ ID NO: 329689 - DNA, 201 bp, Homo sapiens
gatgggcgggcttgggcttctggccatggacgtgcccgaggagcttggcggtgctggcctcgattacctggcctacgccatcgccatggaggagatcagcygtggctgcgcctccaccggagtcatcatgagtgtcaacaacgtgagccccctcccaggcccctgggacacacgggtggagggaggctcccgtgagcgggc

SEQ ID NO: 329690 - DNA, 201 bp, Homo sapiens
tacgccatcgccatggaggagatcagccgtggctgcgcctccaccggagtcatcatgagtgtcaacaacgtgagccccctcccaggcccctgggacacacsggtggagggaggctcccgtgagcgggcaggctctggcctcggctcccagccctgatctctctggagacgtcacaggccttggtcctactgggtaggccct

SEQ ID NO: 329691 - DNA, 201 bp, Homo sapiens
ggcctggggcctccgaccgctccccgctgtcctcctagtctctctacctggggcccatcttgaagtttggctccaaggagcagaagcaggcgtgggtcacrcctttcaccagtggtgacaaaattggctgctttgccctcagcgaaccaggtacctgccctgtcccctcacctgtccttagggtgacaggcccagagggga

SEQ ID NO: 329692 - DNA, 201 bp, Homo sapiens
cagcggctcaggtgagagtgcaacctcagcagcccacgatagtggtctgccctctgctactggatgaatggtggcagtgacagtcagcggcactcggactytggtagaggaaccccaaagcagggcctggaacccagaaaatgctctggaagtttcccttgtccagcctgtggccagtagccaggacttaacttctgggac

SEQ ID NO: 329693 - DNA, 201 bp, Homo sapiens
ggttggtagggtgagcgctcttgccaccgcggcgctgggaggaagattgccttcggggtcccctggtttaagacgccagctcctgcacacccccctcgccmtctggtcccatcactgagagctttgggaccctcatctttggagcccgagtcatagggtttcgtgtctgccagcaggggtgtggagggagtgaggctggtg

SEQ ID NO: 329694 - DNA, 201 bp, Homo sapiens
tattggggctgggacgggcgcctggctgctgttagttaattaccatcaatttacataggtcagaaacgatggacaaacccgaacccatttttttcccttgrctgcttctctttttcttttttcttttttttttttttttgagatggagtctcactctgtcccccaggctggagtgcagtggtgcgatcttggctcactgca

SEQ ID NO: 329695 - DNA, 201 bp, Homo sapiens
ttctggggatgagatggagttatggagcgattggctcatgtgccatttattccagggttttataccaacaagttccggggtgaaaaggagggtgtgtctckgtccagggagatctgaaggtgcttggagggtgaggcggcttgagctagtttagccttattctgttttgctggtaagctagagaaaaaggcttttggtgag

SEQ ID NO: 329696 - DNA, 201 bp, Homo sapiens
caacctccacctcctgggtacaaatgattctcctgtctcagcctcccaagtagctgggattataggcgcccaccatcacgcctggctaattcttgtatttwttttattttattttattttttttattgatcattcttgggtgtttctcgcagagggggatttggcagggtcataggacaatagtggagggaaggtcagcag

SEQ ID NO: 329697 - DNA, 201 bp, Homo sapiens
tggctgccgggcggagacgctcctcacttcccagacggggtgtctgctgggcggaggggctcctcacttctcagacggggtggctgccaggcagaggggcycctcacttctcagatggggtggctgccgggcggaggggctcctcacttctcggggcgggcaggcagagacactcctcacctcccagacggggtggcggtc

SEQ ID NO: 329698 - DNA, 201 bp, Homo sapiens
gacgctcctcacttcccagacggggtgtctgctgggcggaggggctcctcacttctcagacggggtggctgccaggcagaggggctcctcacttctcagayggggtggctgccgggcggaggggctcctcacttctcggggcgggcaggcagagacactcctcacctcccagacggggtggcggtcgggcagagacactcc

SEQ ID NO: 329699 - DNA, 201 bp, Homo sapiens
ttatattcacaggagtatagaaaaacaagaatatattagcaaacattcttattagtttatgtaagtcatggtagtataagaacatggttgagactaggtgyggtggctcacacctgtaatcccagcactttgggaggccgaggtgggtggatcacgaggtcgggagttcaagaccagcctggccaagatggtgaaaacccg

SEQ ID NO: 329700 - DNA, 201 bp, Homo sapiens
ttagctgggcgtgattatgggcacctgtaatctcagctactcggtaggctgaggcagagaattgcttgaacctgggaggaagaggttgcagtgagccgagwtctgcactactgcactccagcctgggcaacagaacaatactctgtcacaaaataaaataaaataaaataaaataaaataacatgtttgcaggaatgagat

SEQ ID NO: 329701 - DNA, 201 bp, Homo sapiens
tgaggcagagaattgcttgaacctgggaggaagaggttgcagtgagccgagttctgcactactgcactccagcctgggcaacagaacaatactctgtcacaaaataaaataaaataaaataaaataaaataacatgtttgcaggaatgagattgtataaaagggctcgtgaaaagcaacggttccctcccgtccccatccc

SEQ ID NO: 329702 - DNA, 201 bp, Homo sapiens
ctgacctcaggtgacctggctgcctcagcctcccaaactgctgggattacaggtgtgagccactgcttaattatattttgggtttctcctttttgactgtytcgtctcttccctctcctgccacccctttttccttccctcggtgctggtctccctgtctctttttcaggaggccctttaacgagtgcacattaccatggt

SEQ ID NO: 329703 - DNA, 201 bp, Homo sapiens
tcaggatgacgaggcctggggtcctggtgttgggcaggtggtggggctgggccatggagctggcccagaggcccctcagccctttgtaaagtctgatgaargcaggggtggtgattcatgctgtgtgactgactgtgggtaataaacacacctgtcccccagtctgtgtcctcgccctctcctgggtgctccggggaggga

SEQ ID NO: 329704 - DNA, 201 bp, Homo sapiens; identical to SEQ ID NO: 68873

SEQ ID NO: 329705 - DNA, 201 bp, Homo sapiens
cattcctcctgtggagtgggttccttatcaccagaccggccactctcagaactggcgtccactgtaaatccaggtgccttacgtgtggctctgtcccttaygctgcaggggaaagctgcattgccattgttcccacctcctcactggcagaaagatgccagggctgttagcactgtctcctcaccttctgtttctcattgt

SEQ ID NO: 329706 - DNA, 201 bp, Homo sapiens
atggggttttcagtggccgccatggacattttgggctgacagttctttgttgtgggggctgtcctctgccttgttggatgttcagcagggatcccggaccyctatccactgggtaccaatagtattcccctgctctagttgtgacaactagaactggctccagacattgccagatgtcccttggagggcaaaatcctccct

SEQ ID NO: 329707 - DNA, 201 bp, Homo sapiens
ccagccctgatctctctggagacgtcacaggccttggtcctactgggtaggccctggacagaacaggccctgaggtgcagcccgcaggtgggcaggatgcrcctgggcctggggcctccgaccgctccccgctgtcctcctagtctctctacctggggcccatcttgaagtttggctccaaggagcagaagcaggcgtggg

SEQ ID NO: 329708 - DNA, 201 bp, Homo sapiens
cgcatcggcatcgcctcccaggccctgggcattgcccagaccgccctcgattgtgctgtgaactacgctgagaatcgcatggccttcggggcgcccctcascaagctccaggtcatccaggtaatggtggcagctttaggagctgggcctagaggctggacagcgggcggagagtgtggcctcctgactgctctccgtcct

SEQ ID NO: 329709 - DNA, 201 bp, Homo sapiens
gtgtggggtggggcgtgcgctgagccctgggtctgtgtgggcagggaacggcagtgatgcaggagctgcgtccaccaccgcccgggccgagggcgactcaygggttctgaatggaaccaaagcctggatcaccaatgcctgggaggcttcggctgccgtggtctttgccagcacggacagagccctgcaaaacaaggtggg

SEQ ID NO: 329710 - DNA, 201 bp, Homo sapiens
gacccgctctgacagcttctactttgttgacaacaagctgataatgcacaacaaggctgattatgcctataatggaggccagtaagtgctgcaagagtagrtaggggaggtgctttgccgcggccacaagatcctggcacacggagatgatcgaagctgcagtttgtcaacacacatctggaacctggccccaggaagcca

SEQ ID NO: 329711 - DNA, 201 bp, Homo sapiens
gggaccctcatctttggagcccgagtcatagggtttcgtgtctgccagcaggggtgtggagggagtgaggctggtgcccttaggttgtgtggggtggggcrtgcgctgagccctgggtctgtgtgggcagggaacggcagtgatgcaggagctgcgtccaccaccgcccgggccgagggcgactcatgggttctgaatgga

SEQ ID NO: 329712 - DNA, 201 bp, Homo sapiens
tgggctgtccctgtccctcctcagctgccactgaagcctgcaccttccccagaagccggcagagggtgtcaaggcctgagcttctgagggaggtggggagrggaccgggttggtgttgggtgtgctggtgtgagggtgtggctgaggggcagctctgagaaaaccacccgcctctcctttcagggcatcagtgccttcctg

SEQ ID NO: 329713 - DNA, 201 bp, Homo sapiens
accatgttggccaggctggtctcgaactcttgactttgttatccgcccgcctgggcctcccaaagttctgggattacaggcatgagccaccgcgcccagcyggtagatgctgtaaaagaaaatgctgatggtgagaaaggagggaagacaggagctgggggaaaattgagggcgatggtatatgctagtgaggtcctttgg

SEQ ID NO: 329714 - DNA, 201 bp, Homo sapiens
acggggtttcaccatgttggccaggctggtctcgaactcttgactttgttatccgcccgcctgggcctcccaaagttctgggattacaggcatgagccacsgcgcccagctggtagatgctgtaaaagaaaatgctgatggtgagaaaggagggaagacaggagctgggggaaaattgagggcgatggtatatgctagtga

SEQ ID NO: 329715 - DNA, 201 bp, Homo sapiens
aaattgagggcgatggtatatgctagtgaggtcctttgggtgtgggaattgtgaattcctacaacttttgattctagctcattgagaagtgtcgcattagycagagggaggcggcgctgtgtagggaggaggaggctggggttctgtcttgcctcctggtggcctagacctggccactgacaccacataccctttctgtgt

SEQ ID NO: 329716 - DNA, 201 bp, Homo sapiens
gaggcagagaattgcttgaacctgggaggaagaggttgcagtgagccgagttctgcactactgcactccagcctgggcaacagaacaatactctgtcacaaaataaaataaaataaaataaaataaaataacatgtttgcaggaatgagattgtataaaagggctcgtgaaaagcaacggttccctcccgtccccatccct

SEQ ID NO: 329717 - DNA, 201 bp, Homo sapiens
aggcagagaattgcttgaacctgggaggaagaggttgcagtgagccgagttctgcactactgcactccagcctgggcaacagaacaatactctgtcacaaaataaaataaaataaaataaaataaaataacatgtttgcaggaatgagattgtataaaagggctcgtgaaaagcaacggttccctcccgtccccatccctg

SEQ ID NO: 329718 - DNA, 201 bp, Homo sapiens
ttccccacgccggggtcttctccctcctgagccactgttctcatctcaggccatccagatcctgggcggcatgggctacgtgacagagatgccggcagagyggcactaccgcgacgcccgcatcactgagatctacgagggcaccagcgaaatccagcggctggtgatcgccgggcatctgctcaggagctaccggagctg

SEQ ID NO: 329719 - DNA, 201 bp, Homo sapiens
ggcagagaattgcttgaacctgggaggaagaggttgcagtgagccgagttctgcactactgcactccagcctgggcaacagaacaatactctgtcacaaaataaaataaaataaaataaaataaaataacatgtttgcaggaatgagattgtataaaagggctcgtgaaaagcaacggttccctcccgtccccatccctgt

SEQ ID NO: 329720 - DNA, 201 bp, Homo sapiens
gcagagaattgcttgaacctgggaggaagaggttgcagtgagccgagttctgcactactgcactccagcctgggcaacagaacaatactctgtcacaaaataaaataaaataaaataaaataaaataacatgtttgcaggaatgagattgtataaaagggctcgtgaaaagcaacggttccctcccgtccccatccctgtc

SEQ ID NO: 329721 - DNA, 201 bp, Homo sapiens
cttgagaaatgctgttcacgagttactcaacccgagtcaggcatccagtgtgggtcccacagggctaaatcaaggcatcggcaggactgagttccctctgsaggctctggggaaatccactcctgtctttcccagttctagaggccgcctgcattcttcccgccagagttcctgcctctgcttccgtcgtcacctctcctt

SEQ ID NO: 329722 - DNA, 201 bp, Homo sapiens
cggggtcttctccctcctgagccactgttctcatctcaggccatccagatcctgggcggcatgggctacgtgacagagatgccggcagagcggcactaccrcgacgcccgcatcactgagatctacgagggcaccagcgaaatccagcggctggtgatcgccgggcatctgctcaggagctaccggagctgagcccgcggc

SEQ ID NO: 329723 - DNA, 201 bp, Homo sapiens
aagacacctcagtctttgggccatttgatttccaatacatagggtggaagaatgtgattttggggctgaccataaactggaaatttgtgaaatggcagtgrttgggcaatcttcagtttattttttcagttgaagtggaactcatttctggaatggatttaataggctgtgtctaatgtacaaactgggtgagtcctgcct

SEQ ID NO: 329724 - DNA, 201 bp, Homo sapiens; identical to SEQ ID NO: 68882

SEQ ID NO: 329725 - DNA, 201 bp, Homo sapiens
ccaaagtgctgggattacaggcttaagccaccacacccggcctccctatgagtattgaaagagatacaaaacagatattaaagaaaatgagggacattgargacatccagggaggggtctgatgcatggaaagcccaatgttggttctccagagtaagaatttcacaaaaaggacaattagacaaggcaaacctttggttt

SEQ ID NO: 329726 - DNA, 201 bp, Homo sapiens
tttttttgagacaggatcttgctttgttgcccaggctgtagtgcggtggtgcaatcaccactcactgtagcctccacctccctggatcaagacctccctgkctcaagtgatcctcccaccttagcctcctaagtaactgggactacaggcatgcacaaccatgcccagctaattttttttatttttcttttgtagagacag

SEQ ID NO: 329727 - DNA, 201 bp, Homo sapiens
aggccagacgtggtagctcacacctgtaatcccagaactttgggaggccgaggtgggaggagcgcttgagccgaggagttcaagaccagcctgggtatcayagggagaccccgtctctacaaaataaaaaaataattcactgggtgtggttgtgcacatttgtagtctcaggcactcaagaagctgaggcagaagaatcac

SEQ ID NO: 329728 - DNA, 201 bp, Homo sapiens
ttttctttttttgttttccttttgagacagagtctccctttgttgcccaggctggagtgcagtggtgcgatctcagctcactgcaacctccacctcctgtrttcaagagattctcccacttcagccttccgagtagctgggactacaggcatacgccaccacacccggctaatttttgcattttttggtagagataggttt

SEQ ID NO: 329729 - DNA, 201 bp, Homo sapiens
atcgcttgaacccgggagctgggggctgcagtgagctgagatcgtgccattgcactccagcctggacagcaagagggaaactctgcctcaaaaaaaaaagraaaaaagaaaaaaaaaagacaccaccctcactctcagagaactcaccctatgttgtcaggaagcaaatccatgaaacaaacttacacaaaactgctagaa

SEQ ID NO: 329730 - DNA, 201 bp, Homo sapiens
aatcgcttgaacccgggagctgggggctgcagtgagctgagatcgtgccattgcactccagcctggacagcaagagggaaactctgcctcaaaaaaaaaaraaaaaaagaaaaaaaaaagacaccaccctcactctcagagaactcaccctatgttgtcaggaagcaaatccatgaaacaaacttacacaaaactgctaga

SEQ ID NO: 329731 - DNA, 201 bp, Homo sapiens
ccacgttggccaggctggtcttgaactcctgacctcaagtgatcctcccgcctcagcctcccaaagtgctgggattacaggcgtgagccactgtgcctggsccagataggaattcttggaaatagcattgtctccatcctgttactctcctgcggtgttttggggccctcttgaacatccccgggatgtggatatcacaat

SEQ ID NO: 329732 - DNA, 201 bp, Homo sapiens
gtggcgggtgcctgtagtcccagctactcgggaggctgaggcaggagaatggtgtgaacccaggaggcggagcttgcagtgagccgagatcgcgccactgyactccagcctgggcaagagagcaagactctgtctcaaaaaataaaataaaatataacagggatttaaagaaaaaacaattaccggccaaatgtggtagct

SEQ ID NO: 329733 - DNA, 201 bp, Homo sapiens
accatgttggccagcctggtcttgaactcctgacctcaagtgatctgcccacctcggccccacaaaatgctgggattataggcgtgagccactgcgccccrctcaaagagctggtgttaatcatggacttgcagtcaccccaagttaataagcaagcccaagatccccttcaagccaatattctttaaaatatttattcaa

SEQ ID NO: 329734 - DNA, 201 bp, Homo sapiens
gggcagatcatgagatcaggagatcgagaccatcctggctaacacagtgaaaccccatctctactaaaaatacaaaaaaatagccaggcgtggtggcgggygcctgtagtcccagctactcgggaggctgaggcaggagaatggtgtgaacccaggaggcggagcttgcagtgagccgagatcgcgccactgtactccagc

SEQ ID NO: 329735 - DNA, 201 bp, Homo sapiens
tttgtagagacagggtctcactatgttgaccagcctggtttcgaagtggtctcaagcgatcctcccaccttggcctcccaaagtgctgggattacaggcaygagccaccacacccaccccacatgttcttgttacccttcaattacagtctaggcctggcagatgtcagcttcgccgggtactgtggccattcgtcacagc

SEQ ID NO: 329736 - DNA, 201 bp, Homo sapiens
cgcgcctctcctctcacgtgacgtcatgaaggaggcttgataacggcggtgttctccacaatcctttgcggtggttcaagatggcggcgcccagtggcacwgtgagcgattcggaaagtagtaacagcagtagcgatgcggaggagctggagcggtgccgcgaggcggcaatgccggcttggggcttggagcaacgcccgc

SEQ ID NO: 329737 - DNA, 201 bp, Homo sapiens
ttcggaaagtagtaacagcagtagcgatgcggaggagctggagcggtgccgcgaggcggcaatgccggcttggggcttggagcaacgcccgcacgtggcarggaagccaagagccggtagggtactatgtttggggagactggctgaggggcgtgggatcttcccctggagcctgagaggatggatggtgaggagagagtc

SEQ ID NO: 329738 - DNA, 201 bp, Homo sapiens
caagctcctcactgcctcagtcttctcatctgtacattggagataattctcctagtacccacctcaatacaggaagtgaaggcgtttttttttgttgtttkgttttgttttgttttgtttagatggagtctcgctgtgtcgcccaggctggagtgtagtggcgagatctcagctcaccacaacctctgcctcctgggttca

SEQ ID NO: 329739 - DNA, 201 bp, Homo sapiens
ccgggaggtggaagttgcagtgagccgagattgcaccactgcccttcagcctgggcgacagagcgagactctgtctcaaaaaaaaaaaaaaaaaaaaaaaaggaacttagggaggtctgtaaaaaggggacaaccacaacaataaacaataaaaataacagtccctaccttatagaattgctgtaagattaaaataggtta

SEQ ID NO: 329740 - DNA, 201 bp, Homo sapiens
accacacccggcctccctatgagtattgaaagagatacaaaacagatattaaagaaaatgagggacattgaggacatccagggaggggtctgatgcatggmaagcccaatgttggttctccagagtaagaatttcacaaaaaggacaattagacaaggcaaacctttggtttctgaagatatgaggtctcaagtgtccctg

SEQ ID NO: 329741 - DNA, 201 bp, Homo sapiens
gaccccaccctcaacgtggcagaagggtacagatgggacatcgttgctcagagggcctcccagtgcctgaaacaggactgttgctatgacaacagggagawccccatctccagctggaacgtgaaggtaatggctcctctctgggctgtcaagggcttgaaggtcagaacgacagataaactactcagtatttactcattc

SEQ ID NO: 329742 - DNA, 201 bp, Homo sapiens
tgatatggaaaaccatgtggcaaagccaggacctgctggacctcgggctcgaggacctgaggatggagcagagagtccccgatgctctcgtcttcaccatycagaccagggggactgcggagcccatcacggtcaccattgtgcctgcctacagagccctgggtaaggggaggggaagctcacccgactcacacacttgcc

SEQ ID NO: 329743 - DNA, 201 bp, Homo sapiens
cgcccaccttggcctcccaaagtgctgagattacaggcatgagccatcatgcctggctgggaagtaaagattaaaaggaataatatgtatacagggctctyatgggtgccagacacagggcgtgctcatgtcatccagcatccgtgctcatgtcacacagggcatgttatatcatccggcaacagctggaatctgattctt

SEQ ID NO: 329744 - DNA, 201 bp, Homo sapiens
tgggcaagttgcctcctttggggtcaaacactatccaacttcagtttcccaacgtcataaaggagaactctaaaagttgagaatcgaaactgatgacagaytgactagacggccagcctgttaaggtggccccagatattccagcctcagcccagagtcctcctgtgcccctactgcagcaagggtgtctccaagaagggg

SEQ ID NO: 329745 - DNA, 201 bp, Homo sapiens
cgaacctcttcgggatcccaagtgggacgctggcgtgcttactcaccagcttcccagccgtcactggttgggggctgctttgggagcactaactcactggyccctgttgtttgtcctcgggcagagtcctaggtgtttgaagtaaaacctacatgctgcaagcccagatcctagaggtttcatctcatgtgctaactccta

SEQ ID NO: 329746 - DNA, 201 bp, Homo sapiens
cccattcccacctggtatccccaacccagtacagttcatggccaatggcggtccaagtcttggaactacaatccccacaatgcctcgcgcctctcctctcwcgtgacgtcatgaaggaggcttgataacggcggtgttctccacaatcctttgcggtggttcaagatggcggcgcccagtggcactgtgagcgattcggaa

SEQ ID NO: 329747 - DNA, 201 bp, Homo sapiens
cacgtccctggggatgctggggacccctgtcctccttatccctagcccatgctgatgacatctcagaataccccatcccacctagctgtctacaccccacygcaccactgccttgagtagaatgagtctagtaataatagctcacatttgggggctcactggactaacctcttaacatacactatctctaattcttgcact

SEQ ID NO: 329748 - DNA, 201 bp, Homo sapiens
tggagaaggtataagagacaggatctgattttagcaaggaagagagtgctgggatgtctcagtgatgtgtaccatggaactggttcctggttctccctatragtttatatatatatatattttttgagacggagtctcgctctgtcgcccaggctggagtgcagtgccgtgatctcggctcactgcaacctccacctccag

SEQ ID NO: 329749 - DNA, 201 bp, Homo sapiens
aatcttggagactcaagtttaaatcccagctcagccattttcctactgctatgagcctcaatcccttatccataagacaggagtaaactggaacctacgayataggattgatgtaagggttggagaaaatctgtgttaaggatccacaatatctagcatctggcagatgctgagtaaatgcttatattggagcatgtgctg

SEQ ID NO: 329750 - DNA, 201 bp, Homo sapiens
agttgagctgggtattttttttatctattcactaaggcttacatcttacagattacaggcatcctacattttatatatcatctaagttttaagaatgtaayatttcactaatattgaagaaaataagttatattaccatgagtttaaatttctaacaaaattataatgttattagttatggtttacaaaattgagtgttaa

SEQ ID NO: 329751 - DNA, 201 bp, Homo sapiens
atgttctgaggctgatatggaaaaccatgtggcaaagccaggacctgctggacctcgggctcgaggacctgaggatggagcagagagtccccgatgctctygtcttcaccatccagaccagggggactgcggagcccatcacggtcaccattgtgcctgcctacagagccctgggtaaggggaggggaagctcacccgact

SEQ ID NO: 329752 - DNA, 201 bp, Homo sapiens
tctcaaccttcaaagtgctgagattacaggtgtgagccactgtgctcggcttctagttttttttgtttgtttgtttgttttttggggttttttttttttttgcatttttttttttttgagatggagtttcactcttgttgcccaggctgcagtgcaatggcacgatctcagctcactgcaacctctgcctcctgggttcaa

SEQ ID NO: 329753 - DNA, 201 bp, Homo sapiens; identical to SEQ ID NO: 68890

SEQ ID NO: 329754 - DNA, 201 bp, Homo sapiens
tacttaccaccctctggcttcctcaatccccaatctcttcctttgctccttcactcctcagggccttctcttcccaactcccagccaccccctgaggtctrtgtgagcctgatcaaggcctgcggtggtcctggaaatttctgcccatccttcagcgagctgcagagaaatttcgtgaaacatcggccaactaagctgaag

SEQ ID NO: 329755 - DNA, 201 bp, Homo sapiens
tcgggctcgaggacctgaggatggagcagagagtccccgatgctctcgtcttcaccatccagaccagggggactgcggagcccatcacggtcaccattgtrcctgcctacagagccctgggtaaggggaggggaagctcacccgactcacacacttgcccaccccaggagacttcccagtgtctcacctttactcatggcc

SEQ ID NO: 329756 - DNA, 201 bp, Homo sapiens
ggggactgcggagcccatcacggtcaccattgtgcctgcctacagagccctgggtaaggggaggggaagctcacccgactcacacacttgcccaccccagsagacttcccagtgtctcacctttactcatggccacgtgcacacacccacatttattcatttcatctgtgtcctatgcttggggctgggttattgcagtgc

SEQ ID NO: 329757 - DNA, 201 bp, Homo sapiens
gagcatttccaggggaagcgtgggctggaccaggatgtgcgggtgctgaaggtagtcaaggtaagactgggctcctccagcccccacgcaagacaaaaccyagtatcagagtccacgtccctggggatgctggggacccctgtcctccttatccctagcccatgctgatgacatctcagaataccccatcccacctagctg

SEQ ID NO: 329758 - DNA, 201 bp, Homo sapiens
ccccaacacacacacacacacacacacacacacacacacacacacacacaacctcttaatcccttctcttgctttgtttttctgcttagcacttatcaccrtcttctttactataattttacctatttatcctatttgttgtttgtctccactaccagaaagaaaactatctgcaggtagggatttttcactactgtttgt

SEQ ID NO: 329759 - DNA, 201 bp, Homo sapiens
cttaaaaaaggaggtgtgtgccagggagctgggtaggagcctggctatatatctgcccagcagcggtactctcgggacagagatggcactgatgcaggaastgtatagcacaccagcctccaggctggactccttcgtggctcagtggctgcagccccaccgggagtggaaggaagaggtgctagacgctgtgcggaccgt

SEQ ID NO: 329760 - DNA, 201 bp, Homo sapiens
attattttatggcttatacatagcttttatttccttgttgatagtgtagttttatatagttaatgtggtaggatcattaatattctccagtaacatctatwctttggtggagctaattgctaagtttgttagttgtctgactaaacacagttttttgaagagtgtctgggtattttctgttattttaaaacaccatgttct

SEQ ID NO: 329761 - DNA, 201 bp, Homo sapiens
tgccatcaccaactgtctagttttcagggcgaggggtaggagggatgcatttccacctctagagcaggtgccgattaatctttctggaactaactattgakgctgttattttgccaaaattagcctcagggaagtcctcagcagcctgtttctttatctttattttcctaggttagcaatggaaaggctaggtgggggagt

SEQ ID NO: 329762 - DNA, 201 bp, Homo sapiens
gttcaagaccagcctggccaacgtgatgaaatcctgtctctactaaaaatacaaaaaattagctgggtgtgatggcgcatgcctgtaatcccagctactcraggctcaggcaggagaatcacttgaaccagggaggcggaggttgcagtgagttgagattgggccactgcactccagcctgcgcagcaaagtgagactccg

SEQ ID NO: 329763 - DNA, 201 bp, Homo sapiens
cgaggctcaggcaggagaatcacttgaaccagggaggcggaggttgcagtgagttgagattgggccactgcactccagcctgcgcagcaaagtgagactcygtctcagaaaaaaaaaaaaagaaaaaaagaggaagaggaaggatgataattggctcatttttggccacaatgagttggaggaacttgttggatacctgtg

SEQ ID NO: 329764 - DNA, 201 bp, Homo sapiens
aggcaggagaatcacttgaaccagggaggcggaggttgcagtgagttgagattgggccactgcactccagcctgcgcagcaaagtgagactccgtctcagaaaaaaaaaaaaagaaaaaaagaggaagaggaaggatgataattggctcatttttggccacaatgagttggaggaacttgttggatacctgtgtggagagg

SEQ ID NO: 329765 - DNA, 201 bp, Homo sapiens
aaggatgataattggctcatttttggccacaatgagttggaggaacttgttggatacctgtgtggagaggtgtggttgggtgttgtggggccacagatacrgatggataggaatgtatgtcatggcatctttgacgctacatgagtgcgtttagaacagaccggatgtggggtggactttctgtcagagtcttgctaacaa

SEQ ID NO: 329766 - DNA, 201 bp, Homo sapiens
atgttgacaactctgtgttgtgtgctttaagctgacacttggggccacttctctgtgacagctttgaggagacttcatggatgatgaggtaggttggatayagattgtcaccaggatgctgggcttctgtctgaatggtaccatcttattaggctttttcattatttttgttattgttttgctgaccacctggtaagccag

SEQ ID NO: 329767 - DNA, 201 bp, Homo sapiens
gaggtaggttggatacagattgtcaccaggatgctgggcttctgtctgaatggtaccatcttattaggctttttcattatttttgttattgttttgctgascacctggtaagccaggaaggaaatggtgatgaatttcatggtgtttaagtgattaggattgctaactgggtttctttcacatatgcagtactcagaaaaa

SEQ ID NO: 329768 - DNA, 201 bp, Homo sapiens
tggcagatcccaaagttctttgagctctgctctgatgctgtttggggcatgcggaaagcctgtgcagaatgcttcacggctgtgtcgcacagctcctcccmtggggtccgcagaacccagctcttcccgctcttcatcagacttgtcagcgacccctgccgatgggtgagtgccagcagccctgtccagacaccagcctct

SEQ ID NO: 329769 - DNA, 201 bp, Homo sapiens
ccctggggtccgcagaacccagctcttcccgctcttcatcagacttgtcagcgacccctgccgatgggtgagtgccagcagccctgtccagacaccagcckctgttgaccaactgaacagctacgtctggcttccaggctgggattcacttctgggcttgtaactttgtattttgtcccttcagttactgattgccataat

SEQ ID NO: 329770 - DNA, 201 bp, Homo sapiens
tcttcccgctcttcatcagacttgtcagcgacccctgccgatgggtgagtgccagcagccctgtccagacaccagcctctgttgaccaactgaacagctaygtctggcttccaggctgggattcacttctgggcttgtaactttgtattttgtcccttcagttactgattgccataatcacatttagaccttgtgaggtct

SEQ ID NO: 329771 - DNA, 201 bp, Homo sapiens
tgaggtgggaagattgcttgaaactgggagatggaggctgcagtgagccaagattgtgccactgcactccagcctgggcaacagagcaagactctgtttcaaaaaaaaaaaaaaaaaaagaagacagggcaggggtaggaggggaaggcttctgaggggaggtggcatttgagttggggcaggcggaggaaggcgatgggc

SEQ ID NO: 329772 - DNA, 201 bp, Homo sapiens
ggtttccatgttggccaggatggtctcgatctcttgacctcatgatctgcctgcctcggcctcccaaagtgctgggatttcaggcgtgagccaccgtgccrggccagttgcatgattcttaagagttggaaactgcaatctactcaaatatttatcatgactacaaaggattataaattctggtatgttcacacaatggaa

SEQ ID NO: 329773 - DNA, 201 bp, Homo sapiens
cgggccagttgcatgattcttaagagttggaaactgcaatctactcaaatatttatcatgactacaaaggattataaattctggtatgttcacacaatggraaaccatgcagctgtaagaatgaatgatctatagctctaatcagtaatatggataatttcacaaacatctgaaaagccagacacaaaagggtacacacta

SEQ ID NO: 329774 - DNA, 201 bp, Homo sapiens
ttccagcactttgggaggccaaggcaggtggttcacctgaggtcaggagtttgtgaccagcctggccaacatggttaaaccctgtctctactaaaattacaaaaaaaaaaaaaaaaaaaaaaaaattagccgggcatgctggcacatgcctgtaatcccagctactcaggaggctgaggcaggagagtcgcttgaacctgg

SEQ ID NO: 329775 - DNA, 201 bp, Homo sapiens
aggaaggaaatggtgatgaatttcatggtgtttaagtgattaggattgctaactgggtttctttcacatatgcagtactcagaaaaatcatgcattccttrattgagaagcaccaagaagcgtcagttggaagcattgtctgcccgctttgtattttgactgcgctgtgtatcaggaacttcggtggcaatgtgtcatgcc

SEQ ID NO: 329776 - DNA, 201 bp, Homo sapiens
atggtgatgaatttcatggtgtttaagtgattaggattgctaactgggtttctttcacatatgcagtactcagaaaaatcatgcattccttaattgagaarcaccaagaagcgtcagttggaagcattgtctgcccgctttgtattttgactgcgctgtgtatcaggaacttcggtggcaatgtgtcatgccatgctccgt

SEQ ID NO: 329777 - DNA, 201 bp, Homo sapiens
gttggaagcattgtctgcccgctttgtattttgactgcgctgtgtatcaggaacttcggtggcaatgtgtcatgccatgctccgttgtcaccgtgtacggkgttggcagggttcgactccaggcccaccttggctcagtagatgaccttgattcttaatatcctgaagaaagcagaaattaaggcttccctttacatttac

SEQ ID NO: 329778 - DNA, 201 bp, Homo sapiens
aaccctgacttgtcttgttctaaactatcctctgagcttccctacttccttccccatgtagtccctaatacaccacctgccaagacttgatggtactcacrtagcctctttccttaccttcattggctcttgcttttaaaaattacattctggctgggcgcggtagctcacgcctgtaatcccagcactttgggagtccaa

SEQ ID NO: 329779 - DNA, 201 bp, Homo sapiens
cttgaatggtgtcttttttcttttttgtctttctagttttggcatctagctaccgccaaataatgtaatttaattttattgtttctggactttatatatgkgaaatcatacaggatacattacttttatggatttcgcatatattaatagtttgaatttgttctttttctaatagtgttcttgaatatactgacatttatc

SEQ ID NO: 329780 - DNA, 201 bp, Homo sapiens
ggatgtttctgtgtcgtgtgttgcatttcgccacttccttcttccccaggcatgtgtactgacgcatgtgcgtgtggacctgtattcatttacactgtatrcacattgagaggagagacttgttcagtctcagtacagctcgaaaagtcagaaatacctctgtgcaggtacctatgcaatgattttgctttctgattttgc

SEQ ID NO: 329781 - DNA, 201 bp, Homo sapiens
ttatctgccaattggtattgtcagatttttgtattttagccagtctgtagtttggtagtgtatataacgatatcactttgtgatttgaatttttattttcyttactgtgagtttaaacactttttcatatgtttgttggacatctgtatttcttttttgtgaagtgcctgttcaaatctttggttgaattggtagggagaa

SEQ ID NO: 329782 - DNA, 201 bp, Homo sapiens
ttgctatagatttataatgagtcttgatatttgatagaacaagtcttcccatcttgtttttcttctttggcatgactagttattcttggtactttgtattytcatgtaaatttaaaatccagctcaccagattctaacaaaatgaaacaaaacagaacatctattaggattttgattgggtttgcattgaatctataggtc

SEQ ID NO: 329783 - DNA, 201 bp, Homo sapiens
taaaatacgttagtgtttggggggcagtgtatttcttttcaaatatttagcttgcaagagctatctgtgaaagagcttggaagacgatatacttctatttrtgggaaaagccaggttctaacaaatgatatctggacctttggtgaaaacgggattagctaagccaatggaatatagagaaaatcttggaatcttaatgct

SEQ ID NO: 329784 - DNA, 201 bp, Homo sapiens
cttcccgctcttcatcagacttgtcagcgacccctgccgatgggtgagtgccagcagccctgtccagacaccagcctctgttgaccaactgaacagctacrtctggcttccaggctgggattcacttctgggcttgtaactttgtattttgtcccttcagttactgattgccataatcacatttagaccttgtgaggtctc

SEQ ID NO: 329785 - DNA, 201 bp, Homo sapiens
gcctgggctcagtcctggccaccgccgctggccgatgctgcgttcattcactgcactgttctttctggttccaggtgcaccaggctgccttccagtccctyggccccttcacttccacctttgcaaacccctccagggctggcctttatcttcgagaggatggcgccctgagcatctggccactcacccaggatttggact

SEQ ID NO: 329786 - DNA, 201 bp, Homo sapiens
ttaggtatgttgggaatattttgaatattggcttttggaatatatctttagtgctacatgtgacttacatgctttgacattttaaatgattcgattttttwaaaaaatttatagataatctgcaaaatggcttcaatgctgagtaagagtaccgttgaacgcctgctactcccccgattctgtgaactgtgtggtgacagg

SEQ ID NO: 329787 - DNA, 201 bp, Homo sapiens
atattacagccagtttaatggagaactcaaagtactcatttatagtcagagcaaggaatatcgaagtgaacttacaaatgaattcaaaactggtcaatatycagggtgataattgattacatttcactggacacaatttgcatttctgttggcaggaattatttgcattactatcaggttttagcaacctaccttctatca

SEQ ID NO: 329788 - DNA, 201 bp, Homo sapiens
aaaatccaaattctccagggttcttttataaatttcaagtttctctataagaaattaaatttgttttgcaaaatgaacctggataatatcatttagttggrgtatttggcagttgagcagtgaactttgccaactagatcttcttttccatttggaagttggttaggcgagtttccaaggttacgactgacaaccaaatat

SEQ ID NO: 329789 - DNA, 201 bp, Homo sapiens
attatctgttaaaggtaaccaagtcatttactaaaattaggaggtaaaagaaatgtttatttcttccacttctcataatatctgtttgtttcaaatgattycttttagaccagtatgtattttccttttccttgtcattaatttctgcatatgccttcactgcttcattaaaataggttccagcactttgggaggccaagg

SEQ ID NO: 329790 - DNA, 201 bp, Homo sapiens
gtggatgctccagtgctggtcctggcatgctgtttctctttcttttgaaaaagcaccagtgacccccttcctcctgtgggtggaaccagccccttgtgagwccacggccccaaagctggagtgaagaggggcccatgatttatttcttcaggtttctccagaagcttgggtcaaccccttgtagctggaggttcttgagct

SEQ ID NO: 329791 - DNA, 201 bp, Homo sapiens
actgcttcattaaaataggttccagcactttgggaggccaaggtgggctggtcacttgaggccagaagtttgagactagcctggccaatgtggagaaactycatctctactaaacgtacaaaaaaattagccggatgtggtggcacatgcctgtaatcccagctactcgggaggctaaggcacaggaatcgcttgaacctg

SEQ ID NO: 329792 - DNA, 201 bp, Homo sapiens
ctgcagaggttttgtgctttttttcgttgtgtattttaaaggaaatttgagacatcatattttatccagttaaggacttagaacaaatctaactgtactakcattatcacatttaacaaaattaacaacaatgctttctagtttatcactctatgtcgagttttcctgactaaaaaatacctttttatggttgatttgttt

SEQ ID NO: 329793 - DNA, 201 bp, Homo sapiens
gtaactagttaacatagaggagggtaaatccttttttctcaatgttgtagtttccagaaatatttttctctggtgggcctcttagtcggagaagagtttctttttttttttttttaaatgtagtcacctagcatcaggggcaagggataataaaccctgttattctttgcaaagtggtcaggaccttcctgaagaggaact

SEQ ID NO: 329794 - DNA, 201 bp, Homo sapiens
cattctgtatttggtggtcatgattctcatggtatcattttccctgtcttttctgtaaactgaaaattacgtttggagaatttattatattctgcttcaattttttttttaagcaatacttcatatgttgttttgtgaaattcttattacaagacaccaggaaacaatgtctagttgtcacacctttagagatttcatatt

SEQ ID NO: 329795 - DNA, 201 bp, Homo sapiens; identical to SEQ ID NO: 68942

SEQ ID NO: 329796 - DNA, 201 bp, Homo sapiens
aggtggaggttgcggtgagccgagatcacaccattgcactccagcctgagcaacaagagcaaaactctgtctcaaaaaaaaaaaaaagagaaaccaggtctggtggtgcgcgcctgtagtcctagctacttgggaggctgaagcaggaggatctcaggagttcaaatgtagcctgggcagcatagcaagaccctgtctcta

SEQ ID NO: 329797 - DNA, 201 bp, Homo sapiens
ttccctgtcttttctgtaaactgaaaattacgtttggagaatttattatattctgcttcaattttttttttaagcaatacttcatatgttgttttgtgaarttcttattacaagacaccaggaaacaatgtctagttgtcacacctttagagatttcatattgagcagtgggctcaggtgttttattctttcattataaaa

SEQ ID NO: 329798 - DNA, 201 bp, Homo sapiens
ttccctgtggctttcagtctgttacacagtattaaaagtttgcttccctcagtttaactcgttcagcaaagcctgtgcggagcgagccagagctacctgtrgaagggacctcagcgaaaaccagtgattgcccacacagcagtagctcctctgacggcccagcggaaagccctgtggaaagctgtgtgtcggctggagctg

SEQ ID NO: 329799 - DNA, 201 bp, Homo sapiens
ggtggaggttgcggtgagccgagatcacaccattgcactccagcctgagcaacaagagcaaaactctgtctcaaaaaaaaaaaaaagagaaaccaggtctggtggtgcgcgcctgtagtcctagctacttgggaggctgaagcaggaggatctcaggagttcaaatgtagcctgggcagcatagcaagaccctgtctctac

SEQ ID NO: 329800 - DNA, 201 bp, Homo sapiens
aaatgacaattttttttttattgtctgtgagatgtgttgtgtccccatttccatcctgttatttgttgtttgtgccctctctctctttttttatccccctrgataattcttaccagaaggttatgaatttcattagttatttcaaagactcaagttttggctttgtttctgttgtatgtttgttttctataatagttcaat

SEQ ID NO: 329801 - DNA, 201 bp, Homo sapiens
gtggaggttgcggtgagccgagatcacaccattgcactccagcctgagcaacaagagcaaaactctgtctcaaaaaaaaaaaaaagagaaaccaggtctggtggtgcgcgcctgtagtcctagctacttgggaggctgaagcaggaggatctcaggagttcaaatgtagcctgggcagcatagcaagaccctgtctctaca

SEQ ID NO: 329802 - DNA, 201 bp, Homo sapiens
agtcccagctactcgggaggctgaggcaggagaatggcgtgaacccgggaggcggagcttgcagtgagctgagatcgtgccactgcactccagcctgggcracagagcgagactccgtctcaaaaaaaaaaaaaaaaaaaaaaaaaaagatgtggtttcactgtcttctgcctctactgtttctggtcaagagtcagtggt

SEQ ID NO: 329803 - DNA, 201 bp, Homo sapiens
tcccagctactcgggaggctgaggcaggagaatggcgtgaacccgggaggcggagcttgcagtgagctgagatcgtgccactgcactccagcctgggcaamagagcgagactccgtctcaaaaaaaaaaaaaaaaaaaaaaaaaaagatgtggtttcactgtcttctgcctctactgtttctggtcaagagtcagtggtca

SEQ ID NO: 329804 - DNA, 201 bp, Homo sapiens
atccataagcattattgtaatagttgctttaaagtccttgtctgtaattccagcatttgagtcctctcagagtcactctgttttgatttttttttttcttycagctagttcaggttttctcattttcttcatatgttgagtaattttggagtataacctggatattgtgaatgttacatgttgtagaacctctggattctg

SEQ ID NO: 329805 - DNA, 201 bp, Homo sapiens
tttatatagttaatgtggtaggatcattaatattctccagtaacatctatactttggtggagctaattgctaagtttgttagttgtctgactaaacacagwtttttgaagagtgtctgggtattttctgttattttaaaacaccatgttcttaacccataaagtacacagtgatcctcagaagatcttttgaaacccctga

SEQ ID NO: 329806 - DNA, 201 bp, Homo sapiens
acccccttcctcctgtgggtggaaccagccccttgtgagaccacggccccaaagctggagtgaagaggggcccatgatttatttcttcaggtttctccagragcttgggtcaaccccttgtagctggaggttcttgagctgtcctagtttctactaagcttccacttggaccactttaagttggggtcttccacaggtagg

SEQ ID NO: 329807 - DNA, 201 bp, Homo sapiens
gtacatatcagtgaaaaccttgggaattgaaggttctggtggcgcgcctcagagcaaacgaagcatctatcggtgtgttaatcgactttcctggatcatayattgagctgatttgtcagaatccattaagctggtagacagtatgacatttcaagtgcaacttggaaatccatgttatggttgaaggagaaggtcaggtcc

SEQ ID NO: 329808 - DNA, 201 bp, Homo sapiens
tgaacactgtgggggatgtgaaacatgggagtaagtaaagggaggtgaacaatgtcaaggtcagccagatcctgcaggtcttcccatgcatggtcccactkactccagcatcctgatggcacaaggaaggggtctcatcccaccctcaagatgagaacacggaagtgtggacaggtgacgtgacgaactctggccacatag

SEQ ID NO: 329809 - DNA, 201 bp, Homo sapiens
tggaggtgttcagggatgcatttgatgtcagtgtacagcagtgttcattcgcagccacgctgcgtgatagatgacgaggtgtaggggaaatgcaaaagttsttgccagtgacaaatgtataattggaagtggaataaaagggggcatttggggtcattttgaaggattatacatgtttgtttatatatacatttttaaaaa

SEQ ID NO: 329810 - DNA, 201 bp, Homo sapiens; identical to SEQ ID NO: 68931

SEQ ID NO: 329811 - DNA, 201 bp, Homo sapiens
aaattcattttaaaggtggaaggatgcataaaaatgtctagtttccgtgtagagtagtattcgtaattcaaatagatggcagcattttaaatgtgctcttytgatgtttttcacaggtcgtggcaattctgcagaagttctattccaacagtgaaagtgcattggggttaaatttcatcaatgagctcatcataaggttcc

SEQ ID NO: 329812 - DNA, 201 bp, Homo sapiens
taggagcaatggcagtgataatggctgccatttcttgaatacctcttgtgtgccaggtatcacatcacacatttaattctctaataaaaagtaatgtgtcrtggcgggcacctttaatcccagctacttgggaggctgaggcaggagaatcgcttgaactcgggaggcggaggttgcagtgagctgagattgcatcactgc

SEQ ID NO: 329813 - DNA, 201 bp, Homo sapiens
ttttacttatgaatttctaagaaattatgtataaccagtaatagctattttttaaaaaacctgtttattaatcaataacctttaagcagtttctaaccatsaatggattttgtcttgaagaatgtatgtcttatttgaattttgactgaaattttcttatatttagaaaattaaaatgattaatggctacgaatgctgttt

SEQ ID NO: 329814 - DNA, 201 bp, Homo sapiens
cagattgtcagaagatgcaggtttgtataaggattgtataattttattttttacttatgaatttctaagaaattatgtataaccagtaatagctatttttwaaaaaacctgtttattaatcaataacctttaagcagtttctaaccatgaatggattttgtcttgaagaatgtatgtcttatttgaattttgactgaaatt

SEQ ID NO: 329815 - DNA, 201 bp, Homo sapiens
tatctgagatttagaaagtctgaaataaacaaaaggactcttgggactgcgggggaagggtgggagggggtgaggggtaaaaggctacacattgggtgccrtgtacactgcttaaaggagcctaggaatatgtgcctgccttctagtgttgtcatgggcttccgtgggctgataaagctgagctacccagcatggcgcctg

SEQ ID NO: 329816 - DNA, 201 bp, Homo sapiens
agggctgcttgatatcttccgggacttcggtaacaatgaagaagacttcctcacggtaatggagattgtagtcagattgtcagaagatgcaggtttgtatraggattgtataattttattttttacttatgaatttctaagaaattatgtataaccagtaatagctattttttaaaaaacctgtttattaatcaataacct

SEQ ID NO: 329817 - DNA, 201 bp, Homo sapiens
taacctgtaaaactaggctgattttgaattccagggctagtcctgagaattaagtgagagaatacatgtaaagtcgtgtaactggagaagttatatgcacwtgctgggtatgactacaggactggcatttacggattgtttatagaggtctgggcattgggttatggtttgggatttgactgtcacttgacagccacggcc

SEQ ID NO: 329818 - DNA, 201 bp, Homo sapiens
tttattagctccttagacacactcttacatcatctcccacatagaatgccctttctagttacgaacagccaagggtggcctccttttggagcctattaacrcagcccttagctaaactttaaggttcttgtctttgtacaggaaggaaaagcacaactactgctttggggtatttttcattttatgactcgtgctcccact

SEQ ID NO: 329819 - DNA, 201 bp, Homo sapiens
ctggtgcagagagtggactagaggcagctcaggagccacaggcatctggcagattgggagctactggcaaaaagggaacagtggacactcaggatggggcktgcctcaccaagatgcatgaagctacacccttcacttttctctcttcttatttgagagagcacttctagccaaggtggtgtctgggtgtcttgtggattt

SEQ ID NO: 329820 - DNA, 201 bp, Homo sapiens
aggggtggcactgaccctgggcaggcaaaattggcactgcctgaaagatacatatgaaacactggcttctgatgtacaggtaaaagcctttccagaggcaygtgcagaaagagggtgggtcattcattagggagaaaagggaagctgcagcaaggcttattggcctgaattttatgtggatgcaaattggcatgtttactg

SEQ ID NO: 329821 - DNA, 201 bp, Homo sapiens
atttaggttgtttccatctttcggttattagtattaataatgtgctgggctcatttatgaacacttattcttttaattgggctgtttgtctgcttattatkgagttataagagtacaaggattatttatatattctggataccagttttggtcagatattttctccagtctgtggctcatgatttttattttctcagtggt

SEQ ID NO: 329822 - DNA, 201 bp, Homo sapiens
aatcccagcactttgggagtccaaggtgggcggatcacgaggtcaggagatcgagaccatcctggctaacacgatgaaaccctgtctctactaaaaatacragaaattagccgggtgtggtggtgggtgcccatagtcccagctactcgggaggctgaggcaggagaatggcatgaacccgggaggcggagctcgcagtga

SEQ ID NO: 329823 - DNA, 201 bp, Homo sapiens
tccctgacataagcaaggacttagagctgcttctgagtgaggctgggcctcaggaggacgactgcagcagacctggggttgtgcacaacagctgtgtggcmcggagtgagattcagaaagtccttggtagcttgcaggagcatctgatgaatgatccagatgttcaaggtaaatgttgttcattgtcattaaagagaagat

SEQ ID NO: 329824 - DNA, 201 bp, Homo sapiens
ctgcttctgagtgaggctgggcctcaggaggacgactgcagcagacctggggttgtgcacaacagctgtgtggcccggagtgagattcagaaagtccttgrtagcttgcaggagcatctgatgaatgatccagatgttcaaggtaaatgttgttcattgtcattaaagagaagatgggatgtttctgtgtcgtgtgttgca

SEQ ID NO: 329825 - DNA, 201 bp, Homo sapiens
ggcatgaacccgggaggcggagctcgcagtgagccaagatcacgccactgcactccagcctgggtgacagagtgagactccatctcaaaaaaaaaaaaaamcaaaaaacaaaaattacattctataaaaaaaaaaagaaaaagataaaacgaaaattacattctatgccaaatataggctaagccctttcatctattaaat

SEQ ID NO: 329826 - DNA, 201 bp, Homo sapiens
tggtttgtatactttggctcctcagaaatctttgtctaacctaaggtcacaaagatttttttttctcttcaagaagttttatgttttagttcttacattasatctatgggtccattttgaattaattttggtttatggtatgaaataagagtcaattttttttccccccatatggctatttattctagcaccactttttga

SEQ ID NO: 329827 - DNA, 201 bp, Homo sapiens
aatagtgttcttgaatatactgacatttatccatctgctattgttaaagaagagttttgctgtgaacagtcttgtagatgtatctggggacacacaattakgcgtttctgtaggacatgtacccaggaaagaaatactgtgtgacggtgtatgcttatcttctgctttagtagataatgccagttttccaaagtggttgta

SEQ ID NO: 329828 - DNA, 201 bp, Homo sapiens
cacaataataataaagtgttatttttaacttagtcaattatttctgaaagagatttaaataataacataaaagtttgtgtatctatgcatgtagttatcasttctggtgttctttattcctttctacagattcacatttccatcggattttctttatcatttcttatagttcagatctgctggtgatagattttttgaatg

SEQ ID NO: 329829 - DNA, 201 bp, Homo sapiens
ggcaactcaaaactgtgtattttcttaaagttaactttaagaattggaaccaaatattttttcttctatcaatattgattacatattttaattcatatttygtgttgctaattgtaaaaaattaattgtaaggtagtgtttaagcttctgaacaatctataatagtgttttcaataaagcaaactaatatgagaaaaaaat

SEQ ID NO: 329830 - DNA, 201 bp, Homo sapiens
gttcaagcaattctcctgcctcagcctctcaagtagctgggactacaggcgtgtacactaccacgcctggctaaggtttgtatttttactagagacaggtwtcaccatattggccaggctggtctcaaactcctgacttcaggtgatctacctgcctcggcttcccaaagtgctgggattacaggtgtgagccactatgcc

SEQ ID NO: 329831 - DNA, 201 bp, Homo sapiens
ttttctctatttctttatattgctttaaagcctttattttttttctgtgaaatagatatactatagttctgtaatctgcctgaacttaatttttatcatargaaaaatggctccagcttcattttcctaattgtcacaatgtcatttatcaaaagtatgttcttttcccactgctctggagtgccacctctgttacagtcc

SEQ ID NO: 329832 - DNA, 201 bp, Homo sapiens
atggattttgtcttgaagaatgtatgtcttatttgaattttgactgaaattttcttatatttagaaaattaaaatgattaatggctacgaatgctgtttgccttggcagttaggcctttggtatttcttgagttttgccagactactggttgctaagaaatgccaaatcaaaagaagcctcttgggttcgaaaatctcagt

SEQ ID NO: 329833 - DNA, 201 bp, Homo sapiens
ccaatctgtaaacatggtttatcttttcatttatttaggttttctttagtttctcaatacagtctgatcattttctctgcagaggttttgtgctttttttsgttgtgtattttaaaggaaatttgagacatcatattttatccagttaaggacttagaacaaatctaactgtactatcattatcacatttaacaaaattaa

SEQ ID NO: 329834 - DNA, 201 bp, Homo sapiens
tttttttacaagaaaacagatcaaattttccagtggtgctctctgaatatctcatacctattgtagtgaggtacctcacagatccaaacaatcaggtttgraaaattataaccttaagatctctttagcaaattctctttagtcttgttttagctgatattcatactacaaaaaacaacttcttagagttaagtgattcta

SEQ ID NO: 329835 - DNA, 201 bp, Homo sapiens
tgcgtcgacaattgtggatttatctacgtttccttttaattttagttttacatatttcacgtattttgaagttttgatgtcgggtgcatacacatttagtwttgttctggtttgttaaataaattgatttctttttttttttttttttttttgagacagtatcttgttctattccccaggctgcaacctctgcctcctggg

SEQ ID NO: 329836 - DNA, 201 bp, Homo sapiens
tgaggtcaggagtttaagaccagcctggccaacttggtgcaaccccatttctactgaaaatacaaaaattagctgggcatagtagtgcgtgcttgtagtcscagctactcgtgaggctgaggcagcagaattacttgagcccggcaggtggagattgcagtgagccgagatcgtgtcactgcactccagcctgggtgacac

SEQ ID NO: 329837 - DNA, 201 bp, Homo sapiens
cataattataactgagtgattgagtgatacttccatggctggatttccagggaacattggttatattgccacgtaaaattaagccattctcttttttttgtttttttttttttttgagatggagtctcgctccgtcacccaggctggagtgcagtgttgcaatctcagctcactgcaacctctgcctcccaggttcaagtg

SEQ ID NO: 329838 - DNA, 201 bp, Homo sapiens
agtttaagaccagcctggccaacttggtgcaaccccatttctactgaaaatacaaaaattagctgggcatagtagtgcgtgcttgtagtcccagctactcrtgaggctgaggcagcagaattacttgagcccggcaggtggagattgcagtgagccgagatcgtgtcactgcactccagcctgggtgacacagtgagactc

SEQ ID NO: 329839 - DNA, 201 bp, Homo sapiens
tgtatcgcattcaccagttcagggaacactgggagttttccatttcgtggctgttatgaataatgcttatatgaacatttgcattcaactttgtgtggacatatgttttcattttggatgggtaaatgcctaagagtgaaattgctgggttgactggtaagtgtatgtttagcttttagaggaattgccacactgttttcc

SEQ ID NO: 329840 - DNA, 201 bp, Homo sapiens
tatgtttcaaactgttatagtacttattctttttttttttttaaattatactttaagttccagggtacatctgcacaacgtgcaggtttgttacagacgcrgtaaaacactttcctcataattgtcatatttttaattttgttgaatacttggatttcgttcaggttttgtgtgtgtgtgtgtgtgtgtgtgtgtgtgctg

SEQ ID NO: 329841 - DNA, 201 bp, Homo sapiens
gtatcgcattcaccagttcagggaacactgggagttttccatttcgtggctgttatgaataatgcttatatgaacatttgcattcaactttgtgtggacatatgttttcattttggatgggtaaatgcctaagagtgaaattgctgggttgactggtaagtgtatgtttagcttttagaggaattgccacactgttttcca

SEQ ID NO: 329842 - DNA, 201 bp, Homo sapiens
tggcatcattggacgtgtattccattctgccgattgcgtgactcctttgtgtcttagacccctccacattgattgggatagctgctggtcattctttttasctgctttatagtatttgtatttcattttagctgctatatagtatttatatttctcccacaatttcttaatctactcactgactttttttctttgtttgac

SEQ ID NO: 329843 - DNA, 201 bp, Homo sapiens
tattggacaggctggtcttgaactcctgacctcaagtgatctgcctgccttggcctccccagccatcctctttatattaaaaaaaaattcacaaacataakacatgcccattgaaatatttaacaacttcaggaatttaaatagagtttccctccctcccccactacaaccttgggaagagctgtgaagtttggtgagtac

SEQ ID NO: 329844 - DNA, 201 bp, Homo sapiens
tttgtctaatttccttgatgaagtattttagtaagaaaagctagaaactatcagtatatactatctaagatgcttggcttattcttaatataatttttttwaattttttattgctgcagagcccacagtgcggactgagctgatggaacagattcctcctattgccatttttttacaagaaaacagatcaaattttccagt

SEQ ID NO: 329845 - DNA, 201 bp, Homo sapiens
gtctaatttccttgatgaagtattttagtaagaaaagctagaaactatcagtatatactatctaagatgcttggcttattcttaatataattttttttaaktttttattgctgcagagcccacagtgcggactgagctgatggaacagattcctcctattgccatttttttacaagaaaacagatcaaattttccagtggt

SEQ ID NO: 329846 - DNA, 201 bp, Homo sapiens
gatggaacagattcctcctattgccatttttttacaagaaaacagatcaaattttccagtggtgctctctgaatatctcatacctattgtagtgaggtacytcacagatccaaacaatcaggtttgaaaaattataaccttaagatctctttagcaaattctctttagtcttgttttagctgatattcatactacaaaaaa

SEQ ID NO: 329847 - DNA, 201 bp, Homo sapiens
ttcccttccctcgggggaaggatttttgttgttggggaaactttggactccctgtcacttcttttcttcctgcgcctgcagctgccgtgggatgggcggarggggtagtcccaagtcctagtcgaccctgggcgggcggggggtccgccacctgggaggtgggtgacttccctctcagggccttgcccttttcctagggac

SEQ ID NO: 329848 - DNA, 201 bp, Homo sapiens
ttagtagttatttaacactgttgagcctggtacagtatagatccaggtttacccagctgaatgtttcagccgatgggcatgctcagattgaaggagttgtrtcatttccgttgatacaacggataaacaatgtttagttgccatgatggtgcttgtcattcatagatgtggtatttggtctgactggaaagctattttcta

SEQ ID NO: 329849 - DNA, 201 bp, Homo sapiens
gacttaagtactcttcagcagacagctgaagacttgccccaatgaggaaggaaaccaccgttatggctctgaacttaaccacaccttgggtaggacaaccytggcagcctcttgggggcttcctgtttgggcaagggtaggagctgtggagtgctgtaccttaggagtttataacataattgatctgtacgggagggcatg

SEQ ID NO: 329850 - DNA, 201 bp, Homo sapiens
cctggggcatttgtgtctaaatgatgcgatgcctatttagactgtaggtcccttggggtagggacacaggccatcctttctataatccaatgtctcgcatkatctaggtgctcaattaatgttgttaatgttaatgataacgaattatgaggcttttgtctgatttactttgtgattcttgattatgtttggctaatttca

SEQ ID NO: 329851 - DNA, 201 bp, Homo sapiens
atttagactgtaggtcccttggggtagggacacaggccatcctttctataatccaatgtctcgcatgatctaggtgctcaattaatgttgttaatgttaaygataacgaattatgaggcttttgtctgatttactttgtgattcttgattatgtttggctaatttcaaaagggagccataatgaatggatgtcttgttttt

SEQ ID NO: 329852 - DNA, 201 bp, Homo sapiens
caggccattgcagcacagaagagatttcatttcagagaattggcttgctgaagcaatctaaatttcttctcttgaaagcggaaagtgtgtgggatggcctkacatattggtttccatgttgaattacacatggaaggtggagctgtatgtctatgcctaagcagctgcaggcctatgaatgtctagttttgcttatagcat

SEQ ID NO: 329853 - DNA, 201 bp, Homo sapiens
ttaaaggagtgagatgaaagtgtcacatgatcaaacatctataggaagagttggaaggctggattccaattctgaagtcactgcggagttcttgtaagatmcatttagcttcaaaagactgactcataaaatacgttagtgtttggggggcagtgtatttcttttcaaatatttagcttgcaagagctatctgtgaaagag

SEQ ID NO: 329854 - DNA, 201 bp, Homo sapiens
tcttacatgtctggcttctcttccttagcaaaatgcattagaattcatccctgttgttatcaatagctcattcctttttattgctgagtatgtacagataytctgttttgtatcgcattcaccagttcagggaacactgggagttttccatttcgtggctgttatgaataatgcttatatgaacatttgcattcaactttg

SEQ ID NO: 329855 - DNA, 201 bp, Homo sapiens
aagacgatatacttctatttatgggaaaagccaggttctaacaaatgatatctggacctttggtgaaaacgggattagctaagccaatggaatatagagaraatcttggaatcttaatgctagaaggagcaatatatgttcaacctggaataaaagacattttccagagcaaaaagcattccatgttatctgcccactttg

SEQ ID NO: 329856 - DNA, 201 bp, Homo sapiens
atggaatatagagaaaatcttggaatcttaatgctagaaggagcaatatatgttcaacctggaataaaagacattttccagagcaaaaagcattccatgtyatctgcccactttgttctatgtttgtaaaaatctcctcaaggacaacaaccaagcccccaaagcagaggaacgatattaatctgagtcctaaaccaaacc

SEQ ID NO: 329857 - DNA, 201 bp, Homo sapiens
agcctaggagttcaaggctgcattgagctatgatcgtgccactgcattctagcctgggtgacagagtgagaccctgtgttgtttttttttttttttttttwaaaaaaagctacatcatgttgtagtagtatgcatcagtacctcattcctttaataatgctccattgaatggatacgtagtattttgattattcactcctc

SEQ ID NO: 329858 - DNA, 201 bp, Homo sapiens
gccatcattcagcccactaccctttgcagactcctaggtgtcttttggcatctgatactgagtggctgctcagggccttccccctccttgcctggcgtgcyctcccatccttgttgtcctccatgcatctcagtatgtcagctagggtagcatcatgcagcaaagcggcacgtgggcttgcctgttcttgtctgtagtccc

SEQ ID NO: 329859 - DNA, 201 bp, Homo sapiens
ccagaaatggaaccagtgaccatctggagactgaccagaggcaggatcccaccccacttgaagagaataaatctaaattacaggttcgtttctttcggggkcgggggggcggggaggcaactcaaaactgtgtattttcttaaagttaactttaagaattggaaccaaatattttttcttctatcaatattgattacatat

SEQ ID NO: 329860 - DNA, 201 bp, Homo sapiens
atctgcacaacgtgcaggtttgttacagacgcagtaaaacactttcctcataattgtcatatttttaattttgttgaatacttggatttcgttcaggttttgtgtgtgtgtgtgtgtgtgtgtgtgtgtgctgtagatgcagtgaacatcggaaaggatgtggttttgtcctttcattgacttttctttttcctttggatt

SEQ ID NO: 329861 - DNA, 201 bp, Homo sapiens
tgaaaaaggactctttgaaggggaagtgacaggacagctgcttcctttggagcaaattggtaacatgtccaatcaactctgtaggatccaggtggacccaraaatggaaccagtgaccatctggagactgaccagaggcaggatcccaccccacttgaagagaataaatctaaattacaggttcgtttctttcgggggcgg

SEQ ID NO: 329862 - DNA, 201 bp, Homo sapiens
tctgcacaacgtgcaggtttgttacagacgcagtaaaacactttcctcataattgtcatatttttaattttgttgaatacttggatttcgttcaggttttgtgtgtgtgtgtgtgtgtgtgtgtgtgtgctgtagatgcagtgaacatcggaaaggatgtggttttgtcctttcattgacttttctttttcctttggattc

SEQ ID NO: 329863 - DNA, 201 bp, Homo sapiens
agtgccattttggaggaagtgcctcaactcccaaggagactgcacgtcttcatggataaaatacatctgttcattcgacttgtcactctcattagaacttaacaattagttgattctgatgccaacaactctagtgcatatatgattgggaaaatcagagataaccaactgcatgtgtcctgggtgttttagattgagtta

SEQ ID NO: 329864 - DNA, 201 bp, Homo sapiens
ctgcacaacgtgcaggtttgttacagacgcagtaaaacactttcctcataattgtcatatttttaattttgttgaatacttggatttcgttcaggttttgtgtgtgtgtgtgtgtgtgtgtgtgtgtgctgtagatgcagtgaacatcggaaaggatgtggttttgtcctttcattgacttttctttttcctttggattca

SEQ ID NO: 329865 - DNA, 201 bp, Homo sapiens
aacttttcatcttgtttcaatttcaaacttgcaagaaagttgcaagaatagtagtatgaattcccctatacctctttctggcttctttagtaatttgtatytagcttcatttattttatcattttttttctcttctcctccatttctccttctctctccacacatacagacagatgcatatttactgtatttattattttc

SEQ ID NO: 329866 - DNA, 201 bp, Homo sapiens
tgcacaacgtgcaggtttgttacagacgcagtaaaacactttcctcataattgtcatatttttaattttgttgaatacttggatttcgttcaggttttgtgtgtgtgtgtgtgtgtgtgtgtgtgtgctgtagatgcagtgaacatcggaaaggatgtggttttgtcctttcattgacttttctttttcctttggattcat

SEQ ID NO: 329867 - DNA, 201 bp, Homo sapiens
tttgcctaagacccagtccagggttacttgctgcaatgagctgtcctatctctttggtttccattaatctggaacagttcctgagtctgtctttgaatttkgtgacacttaagtattggaagagtactggccacattttttttgcagagtgtctccctgtttggctttgcctgatgtttccttgtgattggattcagattc

SEQ ID NO: 329868 - DNA, 201 bp, Homo sapiens
acactggacattataaatgatacattgcagagtccctggattctgttatatttttctaaaatgatttttgtcctaggaggcagttaccttgattaatctcyagctccaaattatctgccttgtgagcagaagctgaaatctctgctgagtttgtttaatttctgacgctgctttttttctgggtcctctgggatccccctc

SEQ ID NO: 329869 - DNA, 201 bp, Homo sapiens
atgtcctgcagttccatctaagttactgcaaaagacattattttgttcttttttatggctgagtagtattccatggtatatatatatataccacattaaaatatatatatatatatatatatttttttttttttttttcctttttttgagatagcatcttgctctgttgcccaggctggagtgcagtggtgcaaccttggg

SEQ ID NO: 329870 - DNA, 201 bp, Homo sapiens
tcctgagttacttcacttagaataatgtcctgcagttccatctaagttactgcaaaagacattattttgttcttttttatggctgagtagtattccatggwatatatatatataccacattaaaatatatatatatatatatatatttttttttttttttttcctttttttgagatagcatcttgctctgttgcccaggct

SEQ ID NO: 329871 - DNA, 201 bp, Homo sapiens
tgtcctgcagttccatctaagttactgcaaaagacattattttgttcttttttatggctgagtagtattccatggtatatatatatataccacattaaaatatatatatatatatatatatttttttttttttttttcctttttttgagatagcatcttgctctgttgcccaggctggagtgcagtggtgcaaccttgggt

SEQ ID NO: 329872 - DNA, 201 bp, Homo sapiens
gtcctgcagttccatctaagttactgcaaaagacattattttgttcttttttatggctgagtagtattccatggtatatatatatataccacattaaaatatatatatatatatatatatttttttttttttttttcctttttttgagatagcatcttgctctgttgcccaggctggagtgcagtggtgcaaccttgggtt

SEQ ID NO: 329873 - DNA, 201 bp, Homo sapiens
tcctgcagttccatctaagttactgcaaaagacattattttgttcttttttatggctgagtagtattccatggtatatatatatataccacattaaaatatatatatatatatatatatttttttttttttttttcctttttttgagatagcatcttgctctgttgcccaggctggagtgcagtggtgcaaccttgggtta

SEQ ID NO: 329874 - DNA, 201 bp, Homo sapiens
ttaaaatctagagccttctgggccttccaggtcccttcgtagatgccttttctgcctcacctccagtcccctttctcagttctgaacactaccctggcctyggtgggtctcacctctggccatatatctgaagcctgggggggcccaggcatctgcatttttgataaagtcccacatgattctgatgcatagcagagtaga

SEQ ID NO: 329875 - DNA, 201 bp, Homo sapiens
tctcgggctgacttaactgttctcctgtacattgctcaggccagtggactgcaatgatttctctttccttttggtagttgccacttctgactctatcttgrttctcttgaccagttctgcctatagtgggatgcagtgtccccagctcctccttcccttgctgccctcaaaataaacatctgtagctccttctcattttac

SEQ ID NO: 329876 - DNA, 201 bp, Homo sapiens
gttactgcaaaagacattattttgttcttttttatggctgagtagtattccatggtatatatatatataccacattaaaatatatatatatatatatatatttttttttttttttttcctttttttgagatagcatcttgctctgttgcccaggctggagtgcagtggtgcaaccttgggttactgcagcctcaacctcct

SEQ ID NO: 329877 - DNA, 201 bp, Homo sapiens
gctgtgtatatagtgagaataacagactttagagacaggaagcccttcctccccccaatccctgcctttctccatcccttcctttcttctctccctacttyggtccttcactcccctgccttaaccttcttccttccttcttttgttttttcctccttttctttttactgtgttgggggaatggaagaattctttcacaat

SEQ ID NO: 329878 - DNA, 201 bp, Homo sapiens
gttgttttgaagacttctctgaagtaaacccccacaaaccaaataaagttgttaaatttcttgaaacttctcttcctccagctcaagttcaggtattatcygctgcactgagagctgcacagctcgactgcgtgaatgaagctgagagcaagccaacagcaggcctaaaggaagtgtccatttcacatcccagctctgcct

SEQ ID NO: 329879 - DNA, 201 bp, Homo sapiens
tttttttatatgcttcttggccatttgtatatcttcttttgagaaatgtcctattcatatcattggcccacttttcagtgggattatttgtttttttcttygatttgtttgagttccttgtagattctggatattagttctttgttggatgcatggttcgcaaatattttctcccattctgtgagttgtctctttgatgac

SEQ ID NO: 329880 - DNA, 201 bp, Homo sapiens
attgccatttcttttgtattgcagggaaaaaagatagttactataattttaaaaatatgcataactgttgggagtccatctttaacattttagaaatactytttgatttattgtcctgacatgtggctaacaaaaaacaaaaccgagtgtgttttgaacactgttcatggcttacctgattcagactcatggtttctctct

SEQ ID NO: 329881 - DNA, 201 bp, Homo sapiens
attttattttttacttatgaatttctaagaaattatgtataaccagtaatagctattttttaaaaaacctgtttattaatcaataacctttaagcagtttytaaccatgaatggattttgtcttgaagaatgtatgtcttatttgaattttgactgaaattttcttatatttagaaaattaaaatgattaatggctacgaa

SEQ ID NO: 329882 - DNA, 201 bp, Homo sapiens
cactaaaagaaaggcgtccggctcttctttgttactctggtacctattattttcttttgcggttcttcaactgaccatttcattttgggtgaattctcaaygttgcgattcttagagacttcagctgtgaaggtagaacacatgccacaaggccatgtctttgcccaagtgtgacttgtcacagttgatgcacacttttga

SEQ ID NO: 329883 - DNA, 201 bp, Homo sapiens
atgtaactgtgcaaatgtaatttttaacatctggaaagataccattgacttcaaggaaagcttttgccttggcttacagaagtaatttctggcattgaaaraggactctttgaaggggaagtgacaggacagctgcttcctttggagcaaattggtaacatgtccaatcaactctgtaggatccaggtggacccagaaatg

SEQ ID NO: 329884 - DNA, 201 bp, Homo sapiens
atttgaacagcaatatctaatacttggaaaatggaacaaaacccagagatcaaagtattctctaagtcagagattggcagtttttttctggaaaggatcakatattttagggcttgctggctagaaggtctctggtctgctattgtagcctgaaagcagccataaatagcacataaatgagtaggcatgggtgtgtcctaa

SEQ ID NO: 329885 - DNA, 201 bp, Homo sapiens
actaggtttagttagaagagctgagctttgttgaaaaacctctgttgaataacccttgagaagctgctcaagcttcatgtctcatttttcccatttgtgtrtgagaatggcaaggaacaaaagagtcagagtggtggaagcggatccaccttgcttcccttcccgttgttgtaatgcattctactttagttgctctgtatt

SEQ ID NO: 329886 - DNA, 201 bp, Homo sapiens
agctgctcaagcttcatgtctcatttttcccatttgtgtatgagaatggcaaggaacaaaagagtcagagtggtggaagcggatccaccttgcttcccttsccgttgttgtaatgcattctactttagttgctctgtattttctatttcctgtgaggcaaacagatgaacatcagcaattcccacaagttgtctctgttta

SEQ ID NO: 329887 - DNA, 201 bp, Homo sapiens
tgaccttgaaaataccaaatagtttaaccctgatgggaaaaaaataagaggtgagggcaggtattagtttccatgcttggaaagtcattcatgcacataaygtgtttctccacgtcttccaaggtatcagccttcccaaaagcgttggggatagagttgtggggaagcctggggctcaactcctgacacccacagcctggc

SEQ ID NO: 329888 - DNA, 201 bp, Homo sapiens
gagaggctgggagatagcactgggggctgtcagtgaagaatctgctttaccagcccagggtttaggcttaacctgggaggcagtagggcgtccctaagcaytgtggtcgggtttctgtcttaggaatgcaacccaagcagtggtacaaacactgctgcttacttaggactaagagcatgtcaagctctgctgtgacacatt

SEQ ID NO: 329889 - DNA, 201 bp, Homo sapiens
cattgtggacacagaagtgaataaaacgaacccagtttttgcttatatgaagctttcagttcagcagcagaaacaagacactaaagaggtaagcagaaggrcatatagcaggtgagtgtgactgaaggtgccagcacagtgtggttgcatgcatacaggtgctgctaacgtcaagtggccagagaaggcatctctggagcc

SEQ ID NO: 329890 - DNA, 201 bp, Homo sapiens
agaaggacatatagcaggtgagtgtgactgaaggtgccagcacagtgtggttgcatgcatacaggtgctgctaacgtcaagtggccagagaaggcatctcyggagccctgagaggtgcttctgagttgagatttgagtaacacgctggagatactcgcatgaagagccagagaaagcctcctgcatacagctcttccttgt

SEQ ID NO: 329891 - DNA, 201 bp, Homo sapiens
tctggtacctattattttcttttgcggttcttcaactgaccatttcattttgggtgaattctcaacgttgcgattcttagagacttcagctgtgaaggtaraacacatgccacaaggccatgtctttgcccaagtgtgacttgtcacagttgatgcacacttttgagcgtgggttcccccccttcactcttcctttttaga

SEQ ID NO: 329892 - DNA, 201 bp, Homo sapiens
gtatgttttgtatgcattgtgaaagatcagttggttgtaagtatttggctttatttctgggttctctattctgttgcagtggtttgcttttatactattaycgtggtgttttggttactatagccttgtactataatttgaagttgggtaatgtgatgcctccagatttgttcttttagcttggtgttgctgtggctattc

SEQ ID NO: 329893 - DNA, 201 bp, Homo sapiens
tcacctccagtcccctttctcagttctgaacactaccctggcctcggtgggtctcacctctggccatatatctgaagcctgggggggcccaggcatctgcrtttttgataaagtcccacatgattctgatgcatagcagagtagagatccacttccctaagcagccaggtgacttcagcatccttgagacttcttgctctt

SEQ ID NO: 329894 - DNA, 201 bp, Homo sapiens
gttgcttttgcttgaggtctagctaccctgtatagccatgtagaacgggaagtaccctcaggcaaaaagcagcataaatgcaaaatttaatcttttttttyttttttttttttttcttgtaagggtctagtctttagtttctccagaatgtgatcatcttccagtgcttaccatgtcttgctgtcactggatgactcacct

SEQ ID NO: 329895 - DNA, 201 bp, Homo sapiens
tgatgaccgtgacaaaaattactttctcctgcgcctataaattcattttaaaggtggaaggatgcataaaaatgtctagtttccgtgtagagtagtattcrtaattcaaatagatggcagcattttaaatgtgctcttttgatgtttttcacaggtcgtggcaattctgcagaagttctattccaacagtgaaagtgcatt

SEQ ID NO: 329896 - DNA, 201 bp, Homo sapiens
ggagcaggcagtggtgagcaaggagtgtgtccccgtggaccagttcatggagcacctgcttcccagcctcctgagcctcgcatcagatcctgtgcccaacrtgagggttctgctagccaaggccctaaggcagatgctgttggaaaagggtaggtggagcacttttcagaacttacacatttcgggtagactccaccagtt

SEQ ID NO: 329897 - DNA, 201 bp, Homo sapiens
gctgcctgactagcggggtaattgctctcaaagttcctgcttgttagtttttacaatttgttaagacaaaaagaaagataagaataatggatatgcctttygcctttttaaggtttgtgctgcaaattttggtgatatttgtcatgctgttggacaagaagccactgagaaatttttggtatgtgacattttggccaattg

SEQ ID NO: 329898 - DNA, 201 bp, Homo sapiens
ttttccggtgggcttggctgtctcctccttacaagtcacttttccctgccttcttctcactgtccaagttgctctctctcttctctctctgctgctctttytagaacaccactctaccacctcactcctgggcctcaaaaccattgggatttttttcttggtttacaggttaaaatctagagccttctgggccttccaggt

SEQ ID NO: 329899 - DNA, 201 bp, Homo sapiens
atcgcgccactgcactccagcctgggcaacagagtgagactctgtctcacaaaaataaataaataaataaataaataaataaataaataaataaataaataaaaaaaacaggttctgctcttcctcagagtctccgattggagtagcactcttttgtttgttttggcagatcccaaagttctttgagctctgctctgatgc

SEQ ID NO: 329900 - DNA, 201 bp, Homo sapiens
tcgcgccactgcactccagcctgggcaacagagtgagactctgtctcacaaaaataaataaataaataaataaataaataaataaataaataaataaataaaaaaaacaggttctgctcttcctcagagtctccgattggagtagcactcttttgtttgttttggcagatcccaaagttctttgagctctgctctgatgct

SEQ ID NO: 329901 - DNA, 201 bp, Homo sapiens
cgcgccactgcactccagcctgggcaacagagtgagactctgtctcacaaaaataaataaataaataaataaataaataaataaataaataaataaataaaaaaaacaggttctgctcttcctcagagtctccgattggagtagcactcttttgtttgttttggcagatcccaaagttctttgagctctgctctgatgctg

SEQ ID NO: 329902 - DNA, 201 bp, Homo sapiens
atgtttctgtgtcgtgtgttgcatttcgccacttccttcttccccaggcatgtgtactgacgcatgtgcgtgtggacctgtattcatttacactgtatacmcattgagaggagagacttgttcagtctcagtacagctcgaaaagtcagaaatacctctgtgcaggtacctatgcaatgattttgctttctgattttgcag

SEQ ID NO: 329903 - DNA, 201 bp, Homo sapiens
gggcagcctttggggcttggtgagtgagagcattactcatctgtgtgtaaatggatgtattcatgcatgggtgtgtgtgtgcacatgtatgtatgtgtatrtgagcaggtagccatcctgctttataaatgggggagcaggatacccttcactgagttgttggacctcccagtcatccttgttcagtgataccatgctgtc

SEQ ID NO: 329904 - DNA, 201 bp, Homo sapiens
ctgaagaccgaaatcttgctgggtcttttgctgttcatttcccagcctggctatttttatctgtaagatgaaataacagtaaaaagaaatcaataattttktttttttgcccaaaaataatgttttttttgttgttgtttttgttgttgttgttttccttttaatttcagacagctgatactgattctggaactctatagt

SEQ ID NO: 329905 - DNA, 201 bp, Homo sapiens
caaaattgatttttctaaaggttttggacttcttcagtagacatagtctgggggaaaaatgtgtccagtgtgaactatgtaaggaaaatatctgaacagcrttgccagtttttactgcagttaagaaatgcgtagagacctggagataagagtctgtatgactagacctgttgccctcaggcacagggtgagagttagggg

SEQ ID NO: 329906 - DNA, 201 bp, Homo sapiens
gagtctgtggtcatacagtcattgggatagcaccgtgtcattatcatgtgccatgatggataatctcttcaatctcatggtctccagggcctaaataccarttgtttctctattcatacagtttagaacttgatttcagtgattaacacctcccttaccccttaggcctgctctaataaagcaaaataaaacattttagaa

SEQ ID NO: 329907 - DNA, 201 bp, Homo sapiens
tgtcctccatgcatctcagtatgtcagctagggtagcatcatgcagcaaagcggcacgtgggcttgcctgttcttgtctgtagtcccctcatgctctcaaytcctgacacatgctggacacgcaatccgagtgtgacactttagaggtagcatgggccttttcttctcctagtgacacccgggtcctgtcgctgtgcccgg

SEQ ID NO: 329908 - DNA, 201 bp, Homo sapiens
gacccagtggtcttcagggtgtttagggtatgggggtgggggtaggtaggggccggctcagccacccctgctcagtggggttggtcttgatcctgagggcrcttctgctcacttgtgcttcaccttctgcgtttttttcccttctgggtgagaaaatcaagtcaggaagtgctcttgattcttctggaacaagacctaatt

SEQ ID NO: 329909 - DNA, 201 bp, Homo sapiens
ggggctgggcagtgatgactgtggcccctgaggcccttgtgatatggttaaggggattgtgcaggcagccaccctgtggggcatggcgagggctcggaacrgaggggatgcgatgtgtagaggaaatgtctgggagagaccttacatagcaggtgacatttggcctgggctttagagattggctgagaacccaccattcag

SEQ ID NO: 329910 - DNA, 201 bp, Homo sapiens
tctcctgcagctctctgccccagacagtgatgacgaatataaagcagaagctgtgagcgtaagtccgtccagggaatgactgcccagcacctgtgggcacygtcccataagttgacttatacctgacatgaagtattacacgtgtttgattttggtcagcactgttctcgtgaacaaggtaaccagttactcgacctaggt

SEQ ID NO: 329911 - DNA, 201 bp, Homo sapiens
tttgcttcttaatgcactttcaaaatcacttaagttttgtatttatgaatggcagctcaattttgcatttgttaatttcaaatttcataacttctgaagcyaacattttcctaagcattaggtagctggtctgtggaatgggctggaagcaacccccatcttttttccggtgggcttggctgtctcctccttacaagtcac

SEQ ID NO: 329912 - DNA, 201 bp, Homo sapiens
tgcccgacttggcccctgacgtcttcgtcctgcgggtgcggctggaggagacgggggagatgttccgagtggcaaactgccgcggcgacatgaccgtgcgrgagctcaaagaggagctggacctgatggtcggcatccccttcaacctccagcggctccagtacctcgacgaaggtggctcctgccctgactccttccctg

SEQ ID NO: 329913 - DNA, 201 bp, Homo sapiens
tatagctctaatcagtaatatggataatttcacaaacatctgaaaagccagacacaaaagggtacacactacatggttctatttgtacaaactataaaacratgcaaagcgaatctaggctgtcagaaggcaggagagttgttacccattgcgggaggtggtaagtggaatggagcaagaggtggttttggagatgctggt

SEQ ID NO: 329914 - DNA, 201 bp, Homo sapiens
gggtgacatgttgaatggagaatcataaatactgggaatggctggagagtgaaaatgcttgcctggggtagacacgccataacattctacctccagctccygctctgcttatgtttgggccaataaagggatctcattaggtatgttttattgtgtttatttttttcccctttttccacttaaagctgattatggtgtggc

SEQ ID NO: 329915 - DNA, 201 bp, Homo sapiens
ccaagtggagctgtgtccctcctgtttgtctgtgcttgtgtcccatggtgcttgccaccatggcattgtgggtggtgatgtacatgatgatcttttttccygtggggcttatggtgcccagggaccactactctgttgaattaggtttgctgttgttgcctgctgtccatgagggaggaggggatgttcaaggtcagtctg

SEQ ID NO: 329916 - DNA, 201 bp, Homo sapiens
caagtggagctgtgtccctcctgtttgtctgtgcttgtgtcccatggtgcttgccaccatggcattgtgggtggtgatgtacatgatgatcttttttcccrtggggcttatggtgcccagggaccactactctgttgaattaggtttgctgttgttgcctgctgtccatgagggaggaggggatgttcaaggtcagtctgc

SEQ ID NO: 329917 - DNA, 201 bp, Homo sapiens
atcctcatctgatttcctttatgccccaacatacgttaagtgatagagatactgtcagggtttgataacccttgagtaactagttaacatagaggagggtraatccttttttctcaatgttgtagtttccagaaatatttttctctggtgggcctcttagtcggagaagagtttctttttttttttttttaaatgtagtca

SEQ ID NO: 329918 - DNA, 201 bp, Homo sapiens
ggttgtaagtatttggctttatttctgggttctctattctgttgcagtggtttgcttttatactattaccgtggtgttttggttactatagccttgtactrtaatttgaagttgggtaatgtgatgcctccagatttgttcttttagcttggtgttgctgtggctattctgacttttttaattctatatgaattttaggat

SEQ ID NO: 329919 - DNA, 201 bp, Homo sapiens
ttgcttttgcttgaggtctagctaccctgtatagccatgtagaacgggaagtaccctcaggcaaaaagcagcataaatgcaaaatttaatctttttttttytttttttttttttcttgtaagggtctagtctttagtttctccagaatgtgatcatcttccagtgcttaccatgtcttgctgtcactggatgactcacctc

SEQ ID NO: 329920 - DNA, 201 bp, Homo sapiens
caaacctacagattctgaaacgacttctttgggattaaagaagtgtatgtttctagaagactgcggaaaacatcatttctttggctgtgactttcttggarcaggcagtggtgagcaaggagtgtgtccccgtggaccagttcatggagcacctgcttcccagcctcctgagcctcgcatcagatcctgtgcccaacgtga

SEQ ID NO: 329921 - DNA, 201 bp, Homo sapiens
tggtagtgaattataataaaatattaactgtgtttctaaccaaatcagtgcttgagatttaaaaattcatacacacgcctcaaacctacagattctgaaaygacttctttgggattaaagaagtgtatgtttctagaagactgcggaaaacatcatttctttggctgtgactttcttggagcaggcagtggtgagcaagga

SEQ ID NO: 329922 - DNA, 201 bp, Homo sapiens
aggccctaaggcagatgctgttggaaaagggtaggtggagcacttttcagaacttacacatttcgggtagactccaccagttgttaaaggccacaactaghtttcctctaggaaactgaggcaggttgtgtgacagcacgcgtaaggtttattatgtaaatgattatgttaactttgatgcatcattttatgttatttata

SEQ ID NO: 329923 - DNA, 201 bp, Homo sapiens
ctgggaggtgggtgacttccctctcagggccttgcccttttcctagggactttttaggactgctggggggtttgggaggtccccctctcggtgtggccggycacggagttgcacggacttctcaagtgtcctggccacaagcccggctccatctcttatcccatggagcccattggcccccgcatttcttgggtgggaccc

SEQ ID NO: 329924 - DNA, 201 bp, Homo sapiens
tgtttggatcaaaactgtcttccacaaaccgccacacaatactcgatttacctacacctgtatcctgaaagagaacgagatgagggactgagaaaaagttyaccttttggcagacaccaaaaactactttgtggcataagttcaggattttagaaaaatcaccctagacgtgtaaattttataaacggaggaacacaaaag

SEQ ID NO: 329925 - DNA, 201 bp, Homo sapiens
cgactgtaagtaagagttggggcacccctgtccctccctgggaccctctcaaagaattcagagtgcacgaagcgcggggcgggggaacctcaagccaggcmctccttgtcgggaccagaacagcgggacccccaactgcctagatccactggtggcggtccctcctccctgggcggggcgggctgagggtgggagcccttc

SEQ ID NO: 329926 - DNA, 201 bp, Homo sapiens
agttaagagcccggtgtctgtggaatcagatggccaagagtgaaatcccgtatcactgtttactgtcagtgtgatcccaggcaagtcgctgtaccactctrtgcctcagcgacctcatcagtaaaatgggcattatagtggcccacctcaaaaggcttttataagggattaaatgaataaaggatttagcacaatgcctag

SEQ ID NO: 329927 - DNA, 201 bp, Homo sapiens
cagcctcttgggggcttcctgtttgggcaagggtaggagctgtggagtgctgtaccttaggagtttataacataattgatctgtacgggagggcatgctcwttcgtgtcgccctgcttctacccctacacctccccatggtagtattgggaggtattatcataccattattggcagaaagaaccctgaagttttatcctct

SEQ ID NO: 329928 - DNA, 201 bp, Homo sapiens
taggagtttataacataattgatctgtacgggagggcatgctctttcgtgtcgccctgcttctacccctacacctccccatggtagtattgggaggtattwtcataccattattggcagaaagaaccctgaagttttatcctctacatcctggctctctcacacctgtagctgtgttacgttgggtggaccactcatccat

SEQ ID NO: 329929 - DNA, 201 bp, Homo sapiens
actcacagggttgctcctcagtgctttcactttagcctttgtatttctgtaaggacctccagcagtcttgaaattaaaatgtatgaaatcaattttccttwgcacttaaaagaactggtttatacagtatcatatgtaactgtgcaaatgtaatttttaacatctggaaagataccattgacttcaaggaaagcttttgcc

SEQ ID NO: 329930 - DNA, 201 bp, Homo sapiens
gttaatgataacgaattatgaggcttttgtctgatttactttgtgattcttgattatgtttggctaatttcaaaagggagccataatgaatggatgtcttrttttttaaatcattcagagtcttcaggccattgcagcacagaagagatttcatttcagagaattggcttgctgaagcaatctaaatttcttctcttgaaa

SEQ ID NO: 329931 - DNA, 201 bp, Homo sapiens
ccaattgtaattgttgatttgcttcttaatgcactttcaaaatcacttaagttttgtatttatgaatggcagctcaattttgcatttgttaatttcaaatktcataacttctgaagctaacattttcctaagcattaggtagctggtctgtggaatgggctggaagcaacccccatcttttttccggtgggcttggctgtc

SEQ ID NO: 329932 - DNA, 201 bp, Homo sapiens
gagaaggcagtctccattctcaagagctggatgtaccagcctaagcagacattgctgtctagactgtcctctatgatatcaaatattgtgccaatcttaaraagatgagttttgggtgttgctttcacttcaagcaaaattgaaaacccactctctggagaaaacagagttggcaatctgaagccctttggctttaggaag

SEQ ID NO: 329933 - DNA, 201 bp, Homo sapiens
ttattgttttcacctctaaactccaaactccttgtttttcatgagtattttcctgcattcacgatggcctcctttctctctcatttcccaggatgtaatamctcagccgctgctagatcagtatgtgtccatgactgacccagctcgagcccagactgtcgatactgacatagccaaacactgtgcctacagcctcccagg

SEQ ID NO: 329934 - DNA, 201 bp, Homo sapiens
gcgccactgcactccagcctgggcaacagagtgagactctgtctcacaaaaataaataaataaataaataaataaataaataaataaataaataaataaawaaaacaggttctgctcttcctcagagtctccgattggagtagcactcttttgtttgttttggcagatcccaaagttctttgagctctgctctgatgctgt

SEQ ID NO: 329935 - DNA, 201 bp, Homo sapiens
tcattaatttctgcatatgccttcactgcttcattaaaataggttccagcactttgggaggccaaggtgggctggtcacttgaggccagaagtttgagacyagcctggccaatgtggagaaactccatctctactaaacgtacaaaaaaattagccggatgtggtggcacatgcctgtaatcccagctactcgggaggcta

SEQ ID NO: 329936 - DNA, 201 bp, Homo sapiens; identical to SEQ ID NO: 68921

SEQ ID NO: 329937 - DNA, 201 bp, Homo sapiens
gagtagcactcttttgtttgttttggcagatcccaaagttctttgagctctgctctgatgctgtttggggcatgcggaaagcctgtgcagaatgcttcacrgctgtgtcgcacagctcctcccctggggtccgcagaacccagctcttcccgctcttcatcagacttgtcagcgacccctgccgatgggtgagtgccagca

SEQ ID NO: 329938 - DNA, 201 bp, Homo sapiens
gatctttatgtgtggtctggacttgttgggtcccagagtaattgtttgtaatactgccttgtagaccgtagccccttgtttctatcagcatttgccagacracatgccaacttagcaatggctagaaatgttaattcttttttttttttttttgagaggatcttgttctgttgcccaggctggagtgcagtggcatgatct

SEQ ID NO: 329939 - DNA, 201 bp, Homo sapiens; identical to SEQ ID NO: 68922

SEQ ID NO: 329940 - DNA, 201 bp, Homo sapiens
gatcttgttctgttgcccaggctggagtgcagtggcatgatcttggttcaagcaattctcctgcctcagcctcctgagtagctggcattacaagcgtgtaycaccatatctggctaatttgtatttttagtagagacgaggtttcaccatgttggccaggctggtctcgaactcctgacctcaagtaatccacctgcctcg

SEQ ID NO: 329941 - DNA, 201 bp, Homo sapiens
ccacctgcctcggcctaccaaagtgctgggattacaggtgtgagccaccgcacctgtccttagaaatgtaaattctagaaaattattatttttttgagagmgggtcttaccctatctccaaggctggagtgcagtggcacagtcatagctcactgcagccttgaccttccaggctcaggtgatcctccaatcttagcctcc

SEQ ID NO: 329942 - DNA, 201 bp, Homo sapiens
gtgatttttgccttgcttccccccacccccaggggacatcagacgatggctggagatggttttgatcgtcacaacctggggagggagtgctctggcaagtsgtgggtagaggccaggcatgttgctaaactttccacagtacacagcccgcaaaacaaagtataatctggcccggaatgtcaatagtgctgaggttgagga

SEQ ID NO: 329943 - DNA, 201 bp, Homo sapiens
tgtgattggccaccaatggcctattaatgcagaactctcccagggtggtagcagctagacagcctggttctttgttctttataggactaaaattgtaattscattgcttaaaacagaaatccctgttatttagacttattatttctgatgaattttaaacatctttcctctctctgcccttccttatatacttaacatgaa

SEQ ID NO: 329944 - DNA, 201 bp, Homo sapiens
gggcacagcgcagagccagctacaagctctcagtgttttgatgaatgttggagtccacgaaatttaattaatagaagcaggatgcaggaagtaatatgtgkgtgtgtgtgtgtgtgtgtgtgtgtgtgtgtcttttgggaggttgaggatactaaaacattcgtttatttttacagaaaggtatgtgaaatatgttatctt

SEQ ID NO: 329945 - DNA, 201 bp, Homo sapiens
tctcaaaaaaaaaaaaaaaaaaaaaaaaaaagatgtggtttcactgtcttctgcctctactgtttctggtcaagagtcagtggtcactcaagccatgactscatgtgtatgatacttgttttctctgctgctgtccggatgatcatgtttggttactagcagtttgactctaatgtacctagatgcaattttctatgtatt

SEQ ID NO: 329946 - DNA, 201 bp, Homo sapiens
tagctcattcctttttattgctgagtatgtacagatactctgttttgtatcgcattcaccagttcagggaacactgggagttttccatttcgtggctgttrtgaataatgcttatatgaacatttgcattcaactttgtgtggacatatgttttcattttggatgggtaaatgcctaagagtgaaattgctgggttgactg

SEQ ID NO: 329947 - DNA, 201 bp, Homo sapiens
agtgtgttttgaacactgttcatggcttacctgattcagactcatggtttctctctttagcgtattttagaaatgctggtaaccctcatcttgaagtcatkgaagagaccatcttagcattgcagtcagaccgggaccaagatgtttccttttttgcagccctagaaccaaagcggcggaatatcatagacactgctgtac

SEQ ID NO: 329948 - DNA, 201 bp, Homo sapiens
tactctttgatttattgtcctgacatgtggctaacaaaaaacaaaaccgagtgtgttttgaacactgttcatggcttacctgattcagactcatggtttckctctttagcgtattttagaaatgctggtaaccctcatcttgaagtcattgaagagaccatcttagcattgcagtcagaccgggaccaagatgtttccttt

SEQ ID NO: 329949 - DNA, 201 bp, Homo sapiens
agggacacaggccatcctttctataatccaatgtctcgcatgatctaggtgctcaattaatgttgttaatgttaatgataacgaattatgaggcttttgtytgatttactttgtgattcttgattatgtttggctaatttcaaaagggagccataatgaatggatgtcttgttttttaaatcattcagagtcttcaggcca

SEQ ID NO: 329950 - DNA, 201 bp, Homo sapiens
gttttttaaaataaaaatctccctgtcaactgaaataatttgaacagcaatatctaatacttggaaaatggaacaaaacccagagatcaaagtattctctragtcagagattggcagtttttttctggaaaggatcagatattttagggcttgctggctagaaggtctctggtctgctattgtagcctgaaagcagccata

SEQ ID NO: 329951 - DNA, 201 bp, Homo sapiens
aagagtggagacttgggaacaagggctgtgtgtgagggagggagtgggagaggctgggagatagcactgggggctgtcagtgaagaatctgctttaccagyccagggtttaggcttaacctgggaggcagtagggcgtccctaagcactgtggtcgggtttctgtcttaggaatgcaacccaagcagtggtacaaacactg

SEQ ID NO: 329952 - DNA, 201 bp, Homo sapiens
gaagaacgaaattatcgtaagctctagttgtcatgttctcattactttttaatttattactattattttgagacaaggtcttgctctgttgaccgggatgragtgcagtggtatgatcacagctcactgcaacctcaaccttccaggctcaggtgatcctcccacctcagcttcctaagtaactggaaccacaagtgtgca

SEQ ID NO: 329953 - DNA, 201 bp, Homo sapiens
agctacttgggaggctgaggcaggagaatcacttgaacctgggaggtggaggttgcagtgagctgagatggcaccgctgcactccagcctggtgacaaagygagacttcatctcaaaaaaaaaaaaaagatcttttcttagtctgtttgggctgctataacaaaaataccatagactgggaggcttatctacaacagacat

SEQ ID NO: 329954 - DNA, 201 bp, Homo sapiens
tgacattactcttgcagaatcaaacaatggtttgagaaaccttatcaaatttgcagttgtagctttccctcatgggtcttacagatgctaccaaaagactrgggtgtcaacgagaagagacaaactgtaaatttttttaagaggtttattctgagccaaatatgagtgaccatggccgcccgtgacgcagacttcaggaga

SEQ ID NO: 329955 - DNA, 201 bp, Homo sapiens
catagcatgtaaggatgaggaaaggcggagagagcgacccccatttgggcaccccttttggttctctggttcctctacttgcaagtatttgtgtaagcggraaaagcttgagggcatgccaggtcaaacaagaagcttcctgttacatattatgtctgtgcttgttcacactttaaactgctgcacacattacaccagaga

SEQ ID NO: 329956 - DNA, 201 bp, Homo sapiens
attttaattcttaatattttgagagacttataagatgtgcattaattagatagtagccaggaaaattcttgcatgctttctagtattacctaactatatayatgtatatgtagttaactatatacatgttatatatcatgctgttgatattatctatattttatatatatctaacaatataacttataaaacatttttatt

SEQ ID NO: 329957 - DNA, 201 bp, Homo sapiens
gggtatgaatgtgtactctttagagcgtgtagcactaaagtgtgcacttaggacccaaaacaaatccttagtggaaattgttattatagacattctatttwaaaaaaaaaattcagtagttttggggttacaggtggtttttggttacacagataagttctttagtggtgatttctgagattttagtgcaccgtcatctga

SEQ ID NO: 329958 - DNA, 201 bp, Homo sapiens
tccattctatgcaggatggggcccttgggtggacccactctatcttctgcagcttggagaagaaggaagcaggtcatgtctatgagaagccaaaacaatakttttcacattcatagatattgaaaactcacaagtagtttcattgatgtcttctcaggcacagtaaggaaactttccttctctttttctcctttcttcacg

SEQ ID NO: 329959 - DNA, 201 bp, Homo sapiens
gacatagggtcacaccatccttgttttcctttagatagctcatgcccatttgacttaggggtgaaatacctcataatgtcattatttttacttgtctcttrtatattattttaggcaagattcttgatgctatcgatgattttggcctaaggaacaacacccttgtctactttacatcagatcacggagggcatttggaag

SEQ ID NO: 329960 - DNA, 201 bp, Homo sapiens
caaatccttagtggaaattgttattatagacattctattttaaaaaaaaaattcagtagttttggggttacaggtggtttttggttacacagataagttcyttagtggtgatttctgagattttagtgcaccgtcatctgagcatgtactctgttcccaatatgtagtatttttttcctcagcctactcccaatcattccc

SEQ ID NO: 329961 - DNA, 201 bp, Homo sapiens
agtggcacacatataataatatgcacacattgcacatgaaaattggggatatctagtgatattttgagataggcaatgcatagtgatcagattagaataaytggcacatccatcatctcaaacatgcataatttctttgtgttgggaacattgaatatcctccttctagctatttgtaactatgtaacatattattgttaa

SEQ ID NO: 329962 - DNA, 201 bp, Homo sapiens
aatttgactcttagtaaaatgaagtattggaccaaggtcaagaaaattggtcttacatttgttaacatttctgtggaaggaagccatgtatgtagagggakcatctagaaatatgcctttctgacaaccctatcaaattatgaggagttagcacaagcagatgcttttatggggtctttaaagaaatatctactcattcat

SEQ ID NO: 329963 - DNA, 201 bp, Homo sapiens
tgtgtgagtgtgcatgcgtatttagatgtgtttatgtacatgcacatatgtgtgcacatatacattttttacgtgctttagccctgaagtgtcaaattggyttcaagtcaaagagtactcataaattaaataataagccaaaacgcttttcaagttcacgtgacttacataaatctttaataaataagctggctttaaaat

SEQ ID NO: 329964 - DNA, 201 bp, Homo sapiens
tctataagtttatttattgtctgtttgtttgattgatttgtttattttggagacagggtctcactctgtcacccaggctggagcgcagtggtgtgatcttkgttcactgttcccttgagcactgggctcaagggatcctcctgcctcacctcagccatccatgtagctggaaccacaggtgcatactatctcgcccagcta

SEQ ID NO: 329965 - DNA, 201 bp, Homo sapiens
taacataccaatacactgaggcagcagggtttatggcagagaaaggtttaataattgcagggcaattagtgcgaacatgagaggagacctcaaatccatctttttttttttttttgagactgagtatcactctgttgcccaggctggagcgcagtggtgcaatctcagctcactgcaacttctgcctcctgggttcagcga

SEQ ID NO: 329966 - DNA, 201 bp, Homo sapiens
tacttgatgttatgctcccacttattttgtttcatttttaaaaataaattttattgtgtattttaagattcacaacgtgacgttaaaagatacgtatagayagtaaaatgattactatagtgaagcaaatagtaatcattaagtaacataatatagtaatattaagtaatagtaatatagtaagcaaaagtatctatcatc

SEQ ID NO: 329967 - DNA, 201 bp, Homo sapiens
acagatgatagatgacagataagataggtgattgatagataagatagatagatgataggatagattgacagatacgtagatgataggtaggtagatagatdatagatacatacatacatacatacatacatacatacatagatgcatagatagatagatagctatgcatacccctcttactttctgcctccaccagcacta

SEQ ID NO: 329968 - DNA, 201 bp, Homo sapiens
ggactgttcccctgaccttgacccccttcgtgggcaggaactggagtggctcatgttactcagcctgcagtttgtggacagctatgtgttaacagctcagygaagggtcaaggtgacagccttctgcatctgtccttttggacaccgacttcttgtttggtgtccaagaatcatcaggtcacacaaactgaaagatgatga

SEQ ID NO: 329969 - DNA, 201 bp, Homo sapiens
atagatagatgataggatagattgacagatacgtagatgataggtaggtagatagatgatagatacatacatacatacatacatacatacatacatagatrcatagatagatagatagctatgcatacccctcttactttctgcctccaccagcactagtccttaaagtttagattcttaatattgcactcaatctcaaaa

SEQ ID NO: 329970 - DNA, 201 bp, Homo sapiens
aaataggtcattcaaactcaggctgtgataagtaaaagacattactatttgctttaaaaatttaaattaacaaagctcccaaagtatctaatttaataaamctgatgatgtgtcatagtgttcaaacaaggcactttgggtatgactttaatttcgatgggatttttctggtgacattcagataatattacgcaaacggat

SEQ ID NO: 329971 - DNA, 201 bp, Homo sapiens
actcaaagtaatttaatattatttgtaaagaacagaattgcctatgttaaaaaccctagagtttaataaaacacatatcagcacatagatgacatatgatrttataataaaattatattacatataatttatattatagttatattacttatatacatcattatattattatgttcatatataatataaacatatcattaa

SEQ ID NO: 329972 - DNA, 201 bp, Homo sapiens
aattagacttacagttccacgtggtgggggaagcctcacgatcatggtggagggcagggaggaacaagtcacatcttacatggatggtggcaggcaaagaragagagccaagcgaaaggagtttctccttgtaaaaccatcagatctcgtgagactcattcactaccacaagaataatatggaggaaactgccaccagaat

SEQ ID NO: 329973 - DNA, 201 bp, Homo sapiens
acactaatgatagctgatgagaaaaaaaaaaggcaagaaaatgtcgtaacattttcagaaagtttacacatttgtgttgggccacattcaaagctgtcctragccacgtgcggcccgcgggccgtggattggacaagcttgaaaaggaattggttcatcttctagattggtatcgtcagcttcctgagttcccttttctaa

SEQ ID NO: 329974 - DNA, 201 bp, Homo sapiens
caaactgtaaatttttttaagaggtttattctgagccaaatatgagtgaccatggccgcccgtgacgcagacttcaggagatcctgagaacatgcgcccartgtggtctgcgtacagcttggttttctacattttagggagacatgagatatcgatcaatacatgtaagacgtacattgtttccattcaaaaaaggtgaga

SEQ ID NO: 329975 - DNA, 201 bp, Homo sapiens
tcactttgtatacaatctatagctatctatctctatatatcacattttctttatccactcattgattgatgggtatttgggctggttccacatttttgcarctgcaaattgtgctgctgtaaacatgcgtgtgcaagtgtcttttgttgttgttgttgttgttgttgttgtttttgatggaacctcggtccgtcacccagg

SEQ ID NO: 329976 - DNA, 201 bp, Homo sapiens
attcaattatctcccaccaggtccctcccacaacaatgggaattatgggagatacaattcaagatgagctttgggtgtggacacagtcaaactatatcacygaggtcatagtgtgaaaggaaaataaaactcaggaccccaaaatcactaagccaagggaaaagtcaagctgggaactgtgtcaggcaagcctgcctccca

SEQ ID NO: 329977 - DNA, 201 bp, Homo sapiens
ttcatttaatctaatacccttccagttcatctgtgttgtcgaaaatggtgggatttccttcttttgaatatttaatcatatgacagttttgcaacctatgyagactgcagggaaatgtatctatcaaaccagtgagtgggtgggtctgtgagtagttaggcataagtaaggtctgtaagcaattagcctcgatgaatcaga

SEQ ID NO: 329978 - DNA, 201 bp, Homo sapiens
cacaacaatgggaattatgggagatacaattcaagatgagctttgggtgtggacacagtcaaactatatcaccgaggtcatagtgtgaaaggaaaataaawctcaggaccccaaaatcactaagccaagggaaaagtcaagctgggaactgtgtcaggcaagcctgcctcccatttgattcttaaataagacagctacaaa

SEQ ID NO: 329979 - DNA, 201 bp, Homo sapiens
atgcaagccatgtgggattggcttaatgatgaccgggatattcaccagctgaatatgcccattacccaatgtattagtccgttttcatgctgctgataaaracatacccgagattgggcaatttacaaaagaaagaggggtaattagacttacagttccacgtggtgggggaagcctcacgatcatggtggagggcaggga

SEQ ID NO: 329980 - DNA, 201 bp, Homo sapiens
tcttccaaggatatagtacagcatagaaagtagacaagcctgtcttgggtttcatgattaaattcacatatactgattttatgtcctgctgtaacatttastccacaaaataggtccataagctactacattggccagtctataatgtgtaacctgatgttagaatattatcttcatttgtgaaatgagggttaaaaaaag

SEQ ID NO: 329981 - DNA, 201 bp, Homo sapiens
taatacctaatacaatgtatgtaaatgccacataaaatagttgttatattgtaccctttagggaataatgacgagaaaaagtctgtacatattcagtacaracaagaccgtccctaaaaggaccataagcctaaatgtaaacccaaaattataacacttctaaataaaacataggagaaaatcattgtaatattcagataa

SEQ ID NO: 329982 - DNA, 201 bp, Homo sapiens
gcactttgagaggccgaggtgggtggatcccctgaggttgggagttcaagaccagcctgactgacatggagaaaccccatctctactaaaaatacaaaatyagctgggtgtggcggcacatgcttgtaatcccagctacttggaaggctgagacaggagaatcccttgaacccgggaagcagaggttgcggtgagcagaga

SEQ ID NO: 329983 - DNA, 201 bp, Homo sapiens
aggagtcttatcgtctccgtcctctgcaatgatttgcccctgagtacgtgttttcagacttccctcctggaagggcatctactttagccttttaaaaaaawttcaatagtttttggggagcaggtgatgtttgattacatggataagttctttagtggtgatttgtgagattttgatgcacccatcccctgagcagtgtac

SEQ ID NO: 329984 - DNA, 201 bp, Homo sapiens
ctctcctacagttgctataacaaatcactatagggctgagtccaatggctcatgcctgtaattccagcactttgggaggctgaggtaagcgatcacttaarttctggagattgagaccagccaaagcaacatatgggagccatatttctacaaaaaatacaaaaaattagttggatatgatggcatgcatcagtagtcaca

SEQ ID NO: 329985 - DNA, 201 bp, Homo sapiens
gataacccaggataatcactttgtctcatgatccttaattcattcccatctgcaaaaaccttttaccatgtaatatcacatgttcacaggttttgagaatkaggatgtggatatctttggaatggggcattattcagctgatcactttgaccacgactctttattttggcagcttagtttgggatgcaaactatttaattt

SEQ ID NO: 329986 - DNA, 201 bp, Homo sapiens
aacaagtttgtttaatttgactcttagtaaaatgaagtattggaccaaggtcaagaaaattggtcttacatttgttaacatttctgtggaaggaagccatktatgtagagggagcatctagaaatatgcctttctgacaaccctatcaaattatgaggagttagcacaagcagatgcttttatggggtctttaaagaaata

SEQ ID NO: 329987 - DNA, 201 bp, Homo sapiens
attaaatgagggggagtgtgattcctagagaacagagatcagaaaccagggatccttcatcattaagaagtcttcgacactctcttccaaggatatagtayagcatagaaagtagacaagcctgtcttgggtttcatgattaaattcacatatactgattttatgtcctgctgtaacatttagtccacaaaataggtccat

SEQ ID NO: 329988 - DNA, 201 bp, Homo sapiens
tacaaatgtgatctcttttgatactagcttaccttttaaatacattcaatacagtgactattttaactaggcacaataattgaacttaattgcattgtctyataggtggaaaaggcatggggggctgggaaggtggaatccgcgtcccaggaattgtccgatggcctggaaaggtaccagctggacggttgattaaggaac

SEQ ID NO: 329989 - DNA, 201 bp, Homo sapiens
tttttcctgaggaaatggccagcctggtggactaggtaaacaccactacaaggtctgtttatcctgaaaaggggactgcccagccctccctataaaatgcmaagtggagcaccctagataaagcagctgatgtgcttcatatgcaagccatgtgggattggcttaatgatgaccgggatattcaccagctgaatatgccca

SEQ ID NO: 329990 - DNA, 201 bp, Homo sapiens
ctctgtctctctctctgtctctctctctcctctttctgtctctacatctctttctatgcctatgcgtgtctctgtcacccctctctgtctgcttgtctctctttctatctctctctctgtctctctctgtctccctctctttgtctgcctgtctctctatctctctctctgattgtctctctctgtctccctctctttgtc

SEQ ID NO: 329991 - DNA, 201 bp, Homo sapiens
gtaacatttagtccacaaaataggtccataagctactacattggccagtctataatgtgtaacctgatgttagaatattatcttcatttgtgaaatgaggrttaaaaaaagaaaaagaaaaaagataattatctggaaaatgtcgagtatattttatcatatgtcttgagagagattttaaagtattttctagaggaaaat

SEQ ID NO: 329992 - DNA, 201 bp, Homo sapiens
ctaagtcctctattttgctattttcttttctgcctactttaaatcttctgtttactttttgttcttttcttttcttttctttttcttttttttttttttttgagacagagtcttgctctgtcacccaggctggagtgcaatggcgctatctactgcagcctctgccttccaggttcaagcgattctcctgcctcagcctcc

SEQ ID NO: 329993 - DNA, 201 bp, Homo sapiens
cctggccaacatcatgaaaccccgtctctactaaaaatacaaaaattagccaggcgtggtgacacatgcctgtaatcccagctacttgggaggctgaggcrggagaattgcttgaacctgggaggcagatgttgtagtgagccaagattgcgccactgcactccagcctgggcaacagagcaagtctccgtttcaaaaaca

SEQ ID NO: 329994 - DNA, 201 bp, Homo sapiens
gttcttcccttaccagctgaatgttcctagaaggttatagaccagttaaactccaccgttttgcttctcagtgtgcatgcttgagcccactcactcacctyctgagatcgtattgggaaactgctgaccaccagttttaggtgttttctatttactgggagacggcctttccctggtgctgactgtgaccaattattattt

SEQ ID NO: 329995 - DNA, 201 bp, Homo sapiens
gcgcagtgtgtttactggagttggacgcatgctcacttgaggcgttcttcccttaccagctgaatgttcctagaaggttatagaccagttaaactccacckttttgcttctcagtgtgcatgcttgagcccactcactcacctcctgagatcgtattgggaaactgctgaccaccagttttaggtgttttctatttactgg

SEQ ID NO: 329996 - DNA, 201 bp, Homo sapiens
cagatgctaccaaaagactagggtgtcaacgagaagagacaaactgtaaatttttttaagaggtttattctgagccaaatatgagtgaccatggccgcccrtgacgcagacttcaggagatcctgagaacatgcgcccaatgtggtctgcgtacagcttggttttctacattttagggagacatgagatatcgatcaatac

SEQ ID NO: 329997 - DNA, 201 bp, Homo sapiens
ggctaagtggcactcggattttttagaggaaggagaatatctctgctactttatttttgtgtattagctgattgtttcacgtgaagaatgctcacatggtytttgcaatgtgctggcatatgttgacatattgatgcgtagatgtgtttgtgtgtttggttttaggcaaatggcaccaaggcttgaactgcgactcccgaa

SEQ ID NO: 329998 - DNA, 201 bp, Homo sapiens
ccaatgtattagtccgttttcatgctgctgataaagacatacccgagattgggcaatttacaaaagaaagaggggtaattagacttacagttccacgtggygggggaagcctcacgatcatggtggagggcagggaggaacaagtcacatcttacatggatggtggcaggcaaagaaagagagccaagcgaaaggagtttc

SEQ ID NO: 329999 - DNA, 201 bp, Homo sapiens
aagccatgtgggattggcttaatgatgaccgggatattcaccagctgaatatgcccattacccaatgtattagtccgttttcatgctgctgataaagacayacccgagattgggcaatttacaaaagaaagaggggtaattagacttacagttccacgtggtgggggaagcctcacgatcatggtggagggcagggaggaa

SEQ ID NO: 330000 - DNA, 201 bp, Homo sapiens
attccagcactttgggaggctgaggtaagcgatcacttaaattctggagattgagaccagccaaagcaacatatgggagccatatttctacaaaaaatacaaaaaattagttggatatgatggcatgcatcagtagtcacagctactcaggaggctgaggtgggaggattagttgagcctgggaggttgaggctgcagtga

SEQ ID NO: 330001 - DNA, 201 bp, Homo sapiens
ttcccagctattcattgcaaatatatagacatttttaaaagttgttattgtattgtgtgatcttgctagtcttactcattatttccggcagttttttcagwgataattaacataggaaatcattgtatctgatagtaaatatagttttatttcttttaagatcctttttaggcatggcacggtggctcacacctgtattcc

SEQ ID NO: 330002 - DNA, 201 bp, Homo sapiens
cttactccctagctcagctacctcttatgcagggcaaagaagtcatgttgaatgatgaggaaggagagctacattcttctctgaagtctccagtagccccrttagactcctacagaccgtcatttcacaggagtcagaaaaactccaaaaacttcccccaacctggcttcctgcttccttcgagcccagcgagaggctttc

SEQ ID NO: 330003 - DNA, 201 bp, Homo sapiens
aaaacagatatgaaacaaactcagtgctttgtggtggataatagaagctatctgtattagccattcttatactgagcttaggagtacatcgttatcagacrtacatcatacacttttaagatcattgcgttgtatgactaatagatgctgaaggtagtcatcacagttttcgacaacggagctaggagtcatgaaaaagta

SEQ ID NO: 330004 - DNA, 201 bp, Homo sapiens
atacatattagtattaataatttgaaagttatcatatatatgaatatatattatgtatttctgtagcatataatttctatatttatttatttatttcagtkgatgttagaaaggtacgaatcatttccatggttgtaatccctgctactttggaggctgatgtggcaggatcatttaagcccaggagtttgaggctgcagt

SEQ ID NO: 330005 - DNA, 201 bp, Homo sapiens
ctttggaggctgatgtggcaggatcatttaagcccaggagtttgaggctgcagtgagccacgattgcaccactgcactctagcctgggtgacagagcaaamtcctgtctcagaaataatcatttccatggccactatgtaatctctctaaattttaagatataaatagaataattgaatataattgaataatattaagaat

SEQ ID NO: 330006 - DNA, 201 bp, Homo sapiens
ggagttcaagaccagcctgactgacatggagaaaccccatctctactaaaaatacaaaattagctgggtgtggcggcacatgcttgtaatcccagctactyggaaggctgagacaggagaatcccttgaacccgggaagcagaggttgcggtgagcagagatcacaccactgcccctcagcctgggaaacaagagtgaaac

SEQ ID NO: 330007 - DNA, 201 bp, Homo sapiens; identical to SEQ ID NO: 68960

SEQ ID NO: 330008 - DNA, 201 bp, Homo sapiens
gttccacttctgctgcatcctgcttgcctcagagctttccctcttttgaaaaggcctgggatggtaactctctccttcaacttttgctggctcccgtaatyttttaaaaattaatagtctaaaggaagagagagaatttttgaaaacaggcaagtgaaaaatgttataggatgtgcctctatctgtgtgtctgtctataag

SEQ ID NO: 330009 - DNA, 201 bp, Homo sapiens
ttctataaatgttgtggttcaagggtccccttctacaagagcaccccaggtgacattactcttgcagaatcaaacaatggtttgagaaaccttatcaaatwtgcagttgtagctttccctcatgggtcttacagatgctaccaaaagactagggtgtcaacgagaagagacaaactgtaaatttttttaagaggtttattc

SEQ ID NO: 330010 - DNA, 201 bp, Homo sapiens
cctctctctgtccttctgtttccatctgtctctccatctctttctatgtctgtctctgtcttccccctttctctgtctgcttgtctctctatgtctctctkattgtctgtctctgtctctgtctctctctttgtctatctcactctatccatttctttctgtgtctttctctctttccttctctctccctctgtctgtatc

SEQ ID NO: 330011 - DNA, 201 bp, Homo sapiens
tctgtctctctctctgtctctctctctcctctttctgtctctacatctctttctatgcctatgcgtgtctctgtcacccctctctgtctgcttgtctctctttctatctctctctctgtctctctctgtctccctctctttgtctgcctgtctctctatctctctctctgattgtctctctctgtctccctctctttgtct

SEQ ID NO: 330012 - DNA, 201 bp, Homo sapiens
caggccagcatctgggtatggacacacattaagcttccttctatccttgcagaggtcatggaagaagtgacaacatgctccttcaacagccctctgttccrgcaggaagatgacagagggattacctaccggatcccagccctgctctacataccccccacccacaccttcctggcctttgcagagaagcgttccacgagg

SEQ ID NO: 330013 - DNA, 201 bp, Homo sapiens
atgatcatggctctgcaacctcgaactcctgggctcaagcaatcctctgcctcctgagtagctgggactacaagtgtgtgccaccatacccagctaatttwtttatttatttatttatttatttatttatttatttatttattgtagaaatggggtttcagtatgttgcccgggctccattcatctcttgatggatacttt

SEQ ID NO: 330014 - DNA, 201 bp, Homo sapiens; identical to SEQ ID NO: 68964

SEQ ID NO: 330015 - DNA, 201 bp, Homo sapiens
gtggctcacgcctgtaatcccagcattttgagaggctgaggcaggcggatcacctgaggtgaggagtttcagaccagcctggccaacatggtgaaaccccrtctctactaaaaataaaaaaattagctggacgtggtggtgcaagcctgtaatcccagctactgaggagattgaggcgtgagaaccacttgaactcgggag

SEQ ID NO: 330016 - DNA, 201 bp, Homo sapiens; identical to SEQ ID NO: 68965

SEQ ID NO: 330017 - DNA, 201 bp, Homo sapiens
tttcctctccatttccttttttttttgagatggagtcttgctgtgtcacccaagctggagtgcagtggtgcagtctcggctcactgcaacctccgtctcckggtttcaagtgattctcctgcctcagcctcccgaatagctgggattacaggtggatgccaccatgcctggccaattttttttgtatttttagtagagatg

SEQ ID NO: 330018 - DNA, 201 bp, Homo sapiens; identical to SEQ ID NO: 68966

SEQ ID NO: 330019 - DNA, 201 bp, Homo sapiens
gaatagaacaaggaaagaagataggctggggcaaaggagttgacagagaaaccttcctgattggatgatgtttgagcagagctgaagaaggtgagggagcrttatgtggctatctgaaacgagtgttccaggcagagcctgtgactatatgaggcaggagttcttttggctcaatcattctctccaaaaatccttctctgg

SEQ ID NO: 330020 - DNA, 201 bp, Homo sapiens
caggattttttttaatgagaaaaatatcacgaattcaaatttacagaagctttacatttttatgtcctctaagttagcagtctgtctttccttttattggygtttgtaaaatttcttctttttaaaattgttatattttagagacagggtctcgctctgtcacccaggctggagtgcagtggtgcaatcacagctcaccac

SEQ ID NO: 330021 - DNA, 201 bp, Homo sapiens
atcccagcactttgggaggccaaggtaggcggatcacgaggtcaggagttcgagaccagcctgaccaacatgctgaaatcccgtctctactaaaaataccaaaaaaaaaaaaaaaaaaaaaaaattagccgggcatggtggtgcatgcctgtaatcccagctactcaggaggctgaggcaggagaatcgcttgaacacagg

SEQ ID NO: 330022 - DNA, 201 bp, Homo sapiens
agcacctgattgctgtggcagctggtttttatgtgtgaatgagatgatctctacttctctataattacccattggtttgttctgccttctggggcagtcartctatacaaaatgtagataaaatctctttttcagagaactactctctgaagtacctgaaagctgtattcatgccctctgagtagtctgttttctgggcta

SEQ ID NO: 330023 - DNA, 201 bp, Homo sapiens
ctgagtagctacgactacaggtgtacaccactgtgcccagccttttaaattttaactgtctgtttgtctgtctgtctgtctagagacgagccctctctgcrttgcccaggcgggagtgcagtggctattcacaggcttgatcattgcatactatagcctcaaactcctggcctcaagcaatcttctcacctaagcctcctg

SEQ ID NO: 330024 - DNA, 201 bp, Homo sapiens
aataaaatactttgaatggacctggttccagtttctgtcagtttaattagagtgacaggtggagtggcatacttatgggagaattcatcaaaagccaagakggcatagaaatgaaaggtgcatatcgttgggagacaattcttcatgggtctctagcatttctgcatattttgcaaagagaggcactgactatctttgttc

SEQ ID NO: 330025 - DNA, 201 bp, Homo sapiens
tgttccggcaggaagatgacagagggattacctaccggatcccagccctgctctacataccccccacccacaccttcctggcctttgcagagaagcgttcyacgaggagagatgaggatgctctccacctggtgctgaggcgagggttgaggattgggcagttggtacaggtgactcttcatcccagatctgagtctgggc

SEQ ID NO: 330026 - DNA, 201 bp, Homo sapiens
ttgagatttatccaaattgttgtgtgtaaccctaatttgtttttcattgttacatagtattctatcgtatgaacataccacaattaagtgatccattttaytgttgttggatacttgggttagttattataagtatagattatactgctgtgaatattcttatacatgtttttggtactgcgggcatacattttgttgggt

SEQ ID NO: 330027 - DNA, 201 bp, Homo sapiens
actgaagctcagaagtaaagtgacttgctagtaagtgtcaaagataagtcagacttcagagtccatgctaggctatactctctcccagtaagaaagcgggraggacttgatgggaaagtgattatatcgagcagcaagtaatcatttgaattctctgcttaaatgaaccccagagcaggcccatatctgattattttctat

SEQ ID NO: 330028 - DNA, 201 bp, Homo sapiens
ctatgcttgagctttcaacaaaagttatgaattgccttcccagtgtagtacaggagggaaaaaaatttgtcttaaatttccttttatttgcttaaaatttstgtatttgtttgccttgcttttcttttcttccttttcttttttctttctttcctttcctttcttttttttttctttctttctttctttgtaaaaatattt

SEQ ID NO: 330029 - DNA, 201 bp, Homo sapiens
ctttcctttcttctaggacaagcattgcctgtggtcatcgtcatgttgcactgtttttgatcacagacagtaggctgttaagcattttttttaatcctatyttttagagacaacttctatgttgcctaggctggtcttgaactcctggctcaagcaattttcctatctcagcctcctgagtagctacgactacaggtgtac

SEQ ID NO: 330030 - DNA, 201 bp, Homo sapiens
gcttcagtttcaacttaggagacctgggtcttggtccagattttactgtggagtggcgttcagtaagctttgtccccatcccgggcccgagttttcccatmtataccatgagagggtttagactacagatcttcaaaggtctggcacgtggtaggtgctccttaaatattacttgttaggagtgaataaatgagataggaa

SEQ ID NO: 330031 - DNA, 201 bp, Homo sapiens
agctactcgggaggctgagggggaggattgcttgagcccagaagttcaaggctccagtgagctgcgattgtgccactgccctcccgcctgggggacagagyaataccctgtctacccccaacaagaaataagacaacaatgaagtttgctgaaacagttgacacttcctttcacaaaagatttctctgtagcatgcaatgc

SEQ ID NO: 330032 - DNA, 201 bp, Homo sapiens
gaagcttctcttatggccccaccctccttcccaaaggagaagttgattatattaagttgatttatagccctagagtttagttttgcttatttttaatctaygtattcttttggtctggcttttgttcagtattcttgagatttatccaaattgttgtgtgtaaccctaatttgtttttcattgttacatagtattctatcg

SEQ ID NO: 330033 - DNA, 201 bp, Homo sapiens
cactcatactatgtcataggccttgtaatagccactgtagttaagcattttatttctatcacctactctgctgaattgtataggggaggatcctgaagcayagagaagttgaataacatgcccaaggtcacatagtcctggcctggtccaaatcctatgttcttaaccattacaccagcctggctcagagacagattgttt

SEQ ID NO: 330034 - DNA, 201 bp, Homo sapiens
atcatttctagctttgatttaaagtgaaagatgggggactcttcctttcacttgaacacttagaggccattgtagggttactaattggcctaatttcaatrttgttgcatttcagggaataggctgaaggaaaggaagagagatgagggaacagttggttggtgaagcagtcaggacacatatagcatttatcaagttcac

SEQ ID NO: 330035 - DNA, 201 bp, Homo sapiens
gggttactaattggcctaatttcaatattgttgcatttcagggaataggctgaaggaaaggaagagagatgagggaacagttggttggtgaagcagtcagkacacatatagcatttatcaagttcaccatgtaatatgggcacagttgtcatactccaaaacaattacagtaataacatcaaagatcactgatgaaagatc

SEQ ID NO: 330036 - DNA, 201 bp, Homo sapiens; identical to SEQ ID NO: 68974

SEQ ID NO: 330037 - DNA, 201 bp, Homo sapiens
acaccacgttaccctgttttatttttcttttcatagcatttaacaccttatacgtgaaataaccttatttacttaatacttaaaatacttatcgtctgctstaagaatgtaagcttaccaggacagatctttttcatacgctatgcaccgctgtatcaagcgcctatggcagggcctgcagaacacagcaggcactaaata

SEQ ID NO: 330038 - DNA, 201 bp, Homo sapiens
ctgaaaactggaaacaacccaggtgttcttcagtgagtgaatggctaaacaaactgtggtacattcatactatggactactactcatcaataaaaagaaaygcgctattgatacatgcaacaacttggatgagtctccagataattatgctgagtgaaaaaaaaattctaaaaggttgcactctgtatgattccatctata

SEQ ID NO: 330039 - DNA, 201 bp, Homo sapiens
attctttttctcatgctgagtcttcaaaatatagtgtgtattttacacttatagcacacctcattttggactagctacattttaaaagtgctcattggtcmcatgaggactgaccattctcacatctaaagtccttttgagttcccagggttctgtggtctcactggcttctaggaagaaaggtgaatcctcctacatctg

SEQ ID NO: 330040 - DNA, 201 bp, Homo sapiens; identical to SEQ ID NO: 68980

SEQ ID NO: 330041 - DNA, 201 bp, Homo sapiens
agttattaaaccaaaagcatcaataaaaggaaaagtggataaattggaccttatcacaatgacaaacttttgctctgcaaaagatacggttaagaggatgmaaatacaagccatacactgtgagaaactgtttacaaagcacatatttgacaaagggctaatatctagaatatataaagatatctcaaaactcaacagtac

SEQ ID NO: 330042 - DNA, 201 bp, Homo sapiens; identical to SEQ ID NO: 68984

SEQ ID NO: 330043 - DNA, 201 bp, Homo sapiens
gggctgggcaaagagttattaaaccaaaagcatcaataaaaggaaaagtggataaattggaccttatcacaatgacaaacttttgctctgcaaaagatacrgttaagaggatgaaaatacaagccatacactgtgagaaactgtttacaaagcacatatttgacaaagggctaatatctagaatatataaagatatctcaa

SEQ ID NO: 330044 - DNA, 201 bp, Homo sapiens
tttagtttaactagatcccatttgtcaattttgtggggggggggagggatagcattaggagatatacctaatgctaaatgacgagttaatgggtgcagcayaccagcatggcacatgtatacatatgtaactaacctgcacattgtgcacatgtaccctaaaacttaaagtataataataataaataaaaaattaactcaa

SEQ ID NO: 330045 - DNA, 201 bp, Homo sapiens
ctttccttaaggaaggaagctgagcgtatgaaggaggatatttaacaccctggctttcctcctttgaaaaagcctcttcttgtttgttcagagtcttttcytcaaaataaacagattgtccagagtctggtgaatgagtgctgagggtgaggacgtgaccaactgcagttactagtccagtgtcttgttcccccactgagg

SEQ ID NO: 330046 - DNA, 201 bp, Homo sapiens
cactggggcctttccttaaggaaggaagctgagcgtatgaaggaggatatttaacaccctggctttcctcctttgaaaaagcctcttcttgtttgttcagwgtcttttcctcaaaataaacagattgtccagagtctggtgaatgagtgctgagggtgaggacgtgaccaactgcagttactagtccagtgtcttgttccc

SEQ ID NO: 330047 - DNA, 201 bp, Homo sapiens
aatgatactctaactgcaacatagctgatgttgtggtccagacaccccctcagggcctagacagtcattccctcagcttctggagttggttactgatgatwcacaactgagtccttctccgggggccgccctccaccgagggaagcagtcttgccaaaaaaaaaaaaaaaaaaaaaaaaattcacagctcctccccaggtg

SEQ ID NO: 330048 - DNA, 201 bp, Homo sapiens
agcagagaataagcaaaaaaatgcagtgagtaatgcacacaggtcttggccccatgtggggcattgtgggaaacctgttgttggcgtgtccagcctgcacrcatgccatttaattactttttgtgggaatgcatggggaaatccaggtgtgagcagaaaaactgcagcagaagagagctgggggggtcttttttcccattg

SEQ ID NO: 330049 - DNA, 201 bp, Homo sapiens
catagctgatgttgtggtccagacaccccctcagggcctagacagtcattccctcagcttctggagttggttactgatgattcacaactgagtccttctcygggggccgccctccaccgagggaagcagtcttgccaaaaaaaaaaaaaaaaaaaaaaaaattcacagctcctccccaggtgtagcctgtatccatgactg

SEQ ID NO: 330050 - DNA, 201 bp, Homo sapiens; identical to SEQ ID NO: 68987

SEQ ID NO: 330051 - DNA, 201 bp, Homo sapiens
tcccccaggggctcaacacaggacacaccacgttaccctgttttatttttcttttcatagcatttaacaccttatacgtgaaataaccttatttacttaayacttaaaatacttatcgtctgctgtaagaatgtaagcttaccaggacagatctttttcatacgctatgcaccgctgtatcaagcgcctatggcagggcct

SEQ ID NO: 330052 - DNA, 201 bp, Homo sapiens
tttttaaaaatttttaaaattttttagttaaaactaagacatacacatagtagcttaggcctacacagcatcagaatcatcaggttgtcactaggcaacakaaatttttcagctccattataatcttatgggaccaccatcatacatgtggtctgttgttgaccaaaacatcattatctggtatgtgactgtataacaaca

SEQ ID NO: 330053 - DNA, 201 bp, Homo sapiens
ggctgaggtctagctgtggcatcaggtcaggctactgctgtgggttcctggctctccttcctgcttggacagatcccacctccggtttcccactggggccyttccttaaggaaggaagctgagcgtatgaaggaggatatttaacaccctggctttcctcctttgaaaaagcctcttcttgtttgttcagagtcttttcct

SEQ ID NO: 330054 - DNA, 201 bp, Homo sapiens
agttggttactgatgattcacaactgagtccttctccgggggccgccctccaccgagggaagcagtcttgccaaaaaaaaaaaaaaaaaaaaaaaaattcmcagctcctccccaggtgtagcctgtatccatgactggtcaatgcaaggataagagtttctggcccccttgctttaatgtggaactactctgaagggtcat

SEQ ID NO: 330055 - DNA, 201 bp, Homo sapiens
tctagcaaccctaacaaatgaccatacaacttgttcttgaatgcttccagagactggaaaagaaatagacatgtactcagcactcatttattgccacatayggtcatactgtgttagcctcttaagtacgtgctctcatttgacagcctgttccattcttctggaccatagagaatctgtacacaattgtagtggctgatt

SEQ ID NO: 330056 - DNA, 201 bp, Homo sapiens; identical to SEQ ID NO: 68978

SEQ ID NO: 330057 - DNA, 201 bp, Homo sapiens; identical to SEQ ID NO: 68976

SEQ ID NO: 330058 - DNA, 201 bp, Homo sapiens
gactggaaacaaggcaaggatgtctgctattaccactcttattcaacatagtactaaagttttagtcagtgctctaaggcaaaaaaaaaaaagggggggggattacaggcatacacatcagaaaggaagaaaatagaactgtcccaatttgcagatgacatgatggtctccatagaaaatcctaaagaatctacaaaaaac

SEQ ID NO: 330059 - DNA, 201 bp, Homo sapiens
cctctttttcttatcactgatattcacaggggtatctttaggtctttttgacattttcaacaatatatttataccacacagcagagaataagcaaaaaaaygcagtgagtaatgcacacaggtcttggccccatgtggggcattgtgggaaacctgttgttggcgtgtccagcctgcacgcatgccatttaattacttttt

SEQ ID NO: 330060 - DNA, 201 bp, Homo sapiens; identical to SEQ ID NO: 68981

SEQ ID NO: 330061 - DNA, 201 bp, Homo sapiens; identical to SEQ ID NO: 68983

SEQ ID NO: 330062 - DNA, 201 bp, Homo sapiens
attcctagattgctaagtattttggtcagaagaggtgtttatttttgccaatagatttatctgtattttttaacataatcatagcttttctttaaaaaaawtttttattatttcttccaatgaaggcttttctcttttaaggtaaattacattgtttgatttcagaatgcaaaaccaaccttgcattcccgggataaaccc

SEQ ID NO: 330063 - DNA, 201 bp, Homo sapiens
aagaggatgaaaatacaagccatacactgtgagaaactgtttacaaagcacatatttgacaaagggctaatatctagaatatataaagatatctcaaaactcaacagtacgaaaaacaattaattagaaaatgggcaaaagacatgaacagacatttcactgaagggaatatacacatggaagataagcacatgaaaagat

SEQ ID NO: 330064 - DNA, 201 bp, Homo sapiens
atagcatttaacaccttatacgtgaaataaccttatttacttaatacttaaaatacttatcgtctgctgtaagaatgtaagcttaccaggacagatctttytcatacgctatgcaccgctgtatcaagcgcctatggcagggcctgcagaacacagcaggcactaaatactggttgttgaatgaaccgatgagtctggccc

SEQ ID NO: 330065 - DNA, 201 bp, Homo sapiens
tggagttggttactgatgattcacaactgagtccttctccgggggccgccctccaccgagggaagcagtcttgccaaaaaaaaaaaaaaaaaaaaaaaaawtcacagctcctccccaggtgtagcctgtatccatgactggtcaatgcaaggataagagtttctggcccccttgctttaatgtggaactactctgaagggt

SEQ ID NO: 330066 - DNA, 201 bp, Homo sapiens
tttttcttatcactgatattcacaggggtatctttaggtctttttgacattttcaacaatatatttataccacacagcagagaataagcaaaaaaatgcartgagtaatgcacacaggtcttggccccatgtggggcattgtgggaaacctgttgttggcgtgtccagcctgcacgcatgccatttaattactttttgtgg

SEQ ID NO: 330067 - DNA, 201 bp, Homo sapiens
aagaacgactggattcaatgatcctcaggtcaggtcacctcatgagttagtggagggcggggtgtgcgtgtgtgcgtgcacgcgtgcgtgcgcgcgcatgygcctgcgtgctatgatttagaacaagatagagtttgaagcctgaccgtgggaagtccacagaaacagcagcacactgtactgtgtggacaactggatatc

SEQ ID NO: 330068 - DNA, 201 bp, Homo sapiens
ttgtagaaagagtaaatcaagctaattgacatatccatcacctcacatcatttttttatggtgagaatgttaacaatctattagcaattttaaagtatacatacattattattaactgtggtcaccatagagcagagcataatagatcactaaaacctattccttcagtctacctgaaattttctaccctttctccttccc

SEQ ID NO: 330069 - DNA, 201 bp, Homo sapiens
tttaactttgcttatacagacgatttaaaatgttaatatgtcacatttatctacttaactaacttttccttgatagctgatagattttgtaccttatttcmttaatcctcctctgtgctaagattataaaaatattatacttctctctaaattttataacttttcttttcacattttggtattttatctgtatgaaattct

SEQ ID NO: 330070 - DNA, 201 bp, Homo sapiens
tatatactctaacaagttgtttcttggatggtaatctatttctttctatgttccatatctcttcatcttttaaatttttctatatgtttctgtgtgttgawttctatgtggcttcttcacatctgttttccaattccctaatgccctctttagctaatcatagctgttgtttaatacacccactgcattttaattttattc

SEQ ID NO: 330071 - DNA, 201 bp, Homo sapiens
ttgtcagcctgaacatccctgtcccacctcctcctctccatgggtgctgcttctggttacacactctttctccctttcatccattgatgttatcccactgttttgcaactcatcgttaagagagaaaggtcaacaggccctacggcatgatctttaaaaggctgataaggtcaagataaatgcatcctcttaaatctgttt

SEQ ID NO: 330072 - DNA, 201 bp, Homo sapiens
atggagcctagtgggaggtgtttggatcataggggtggatccctcatgaatggcttggtgaagagtgagctctcactctgggttcacaggagatctggtcttttttttttttttttttttttttttgagacggagtcttactctgtcgccagactggagagcagtggtacgatctcagctcactgcaacctccgcttcctg

SEQ ID NO: 330073 - DNA, 201 bp, Homo sapiens
atggtctcgatctcttgacctcgtgatctgcctgcctcagcctcccaaagtgctgtgaatacaggcgtgagccactgcgcccggctgagatctggtctttktaaaagtgtgtggcacctcccccaccactatctctctcttgctcccacttggccatgtgagatgcctgctccctctttgccctccaccatgaataaaggc

SEQ ID NO: 330074 - DNA, 201 bp, Homo sapiens
tgttagtcacatggaaaacatgttaggcaaaaatactttctgcatatagttgtaattcagtaattgtttcactatcactcagaagagaattattttatatrctggttgcatttagtccaaaatttaaatcattttccctcattagagaatagtaaaatgtaagagaaatataaatttcatgtttttaatttgttcaaaatt

SEQ ID NO: 330075 - DNA, 201 bp, Homo sapiens
ccattttagataagaattgcttcaagggaaagaatcctgattctgtttataacttattttttcttatctttggtgttggagaaataaaaataagcaaaaayaagcaaactgacatattcatttatctccccacttccctgcaaatagatagattgcccagcaaattaaatgtcagctaaggaaaccacagctcagagaagt

SEQ ID NO: 330076 - DNA, 201 bp, Homo sapiens
tctcagccctccagactctccctggtaccttctagttcttgacatttctgctggattgtctatacccaaccccccctaaacacatgcatgcacacacacayacacacacacacacacacacacacacacacacacagggagctgcctgccttgcaagctctcattagcattaaatgccaagtttcaggaataaccagcctt

SEQ ID NO: 330077 - DNA, 201 bp, Homo sapiens
gccctccagactctccctggtaccttctagttcttgacatttctgctggattgtctatacccaaccccccctaaacacatgcatgcacacacacatacacacacacacacacacacacacacacacacacagggagctgcctgccttgcaagctctcattagcattaaatgccaagtttcaggaataaccagccttcttgg

SEQ ID NO: 330078 - DNA, 201 bp, Homo sapiens
aaattctagaatactaggctgagaattagccataatagggactttcctcctgatgattttcaagtctagttacctttgagcttctctctatttattttaatatttatttatttatttatttatttatttatttatttatttatttatttttgagatggagtctcgctctgtcacccaggctggagtgcagtggtgcaatct

SEQ ID NO: 330079 - DNA, 201 bp, Homo sapiens
ccctccagactctccctggtaccttctagttcttgacatttctgctggattgtctatacccaaccccccctaaacacatgcatgcacacacacatacacacacacacacacacacacacacacacacacagggagctgcctgccttgcaagctctcattagcattaaatgccaagtttcaggaataaccagccttcttggt

SEQ ID NO: 330080 - DNA, 201 bp, Homo sapiens
aattctagaatactaggctgagaattagccataatagggactttcctcctgatgattttcaagtctagttacctttgagcttctctctatttattttaatatttatttatttatttatttatttatttatttatttatttatttatttttgagatggagtctcgctctgtcacccaggctggagtgcagtggtgcaatctc

SEQ ID NO: 330081 - DNA, 201 bp, Homo sapiens
tggatgttgtggtctatcagctcccagcgtgtttatagttatgtatttttatagttatagtaaaagaaaatctgttgattcaagctcattcttgttggttaaaaaaaaaaaaaatctgctgaagaagactgtatcccaaatctcaaaggcaagaatgccggctcttctatgttaccagtgaacagggcccaggtgccaatt

SEQ ID NO: 330082 - DNA, 201 bp, Homo sapiens
tcaaagtctccctaagctctagatcctactcccagagctaagtcaacccaagagagtaagaaagtagagtttcagatgggaatgagtgttctagaatcaaktgttgttgaggtcacagtcaggaaaatgaagctgaacatcaagtcccagcaagaaaagaaggaaaaggaatgccaagcagtcatgttagcagtttgaagg

SEQ ID NO: 330083 - DNA, 201 bp, Homo sapiens
gtctccctaagctctagatcctactcccagagctaagtcaacccaagagagtaagaaagtagagtttcagatgggaatgagtgttctagaatcaattgttrttgaggtcacagtcaggaaaatgaagctgaacatcaagtcccagcaagaaaagaaggaaaaggaatgccaagcagtcatgttagcagtttgaaggggctg

SEQ ID NO: 330084 - DNA, 201 bp, Homo sapiens
gtgggggtgagggagaatggtgagtcagaaggagcccagggttctggctcatgcatggggtggaggatggcagtgacatccatggtgccagggcacagtgraagaggcagctgtcatgcataacctgagctctgctttgagtcacacagagaattgcaaaatactgtgaagggaagaggcagatgtgcagttgtaggaggg

SEQ ID NO: 330085 - DNA, 201 bp, Homo sapiens
tggactaagacattcactcaggcctgcagaagacagtcaagcccctactaaccacacttaattgtggagaaaacccatcagcctgaggtcctgcaaggaakcgccctcccattcctggcctccaggtggtgcccttccctgcccccagatggcagtttattattgcaaagaagacccgcaaatagaatattcctcattcct

SEQ ID NO: 330086 - DNA, 201 bp, Homo sapiens
cagttgactgaacccactttataccgcaatcaaacacccacaggcatcaaagggaaaaaaaagcaatgaaatccatccaaaggacagtaacatcaaatataaaaaggaacatcagcccatacagataagaaagaaccaggataagaactctggcaaatcaaaaagccaagatgtcttcttagctccaaacaactgcactgg

SEQ ID NO: 330087 - DNA, 201 bp, Homo sapiens
tgtgcatctactgcaggtactgagagtcattgcccctggatatttgaaaaatcacattcctctccaatttagttatatctataccagtgaagctataaacytttatgaataactataagaggataaaacttcgcattgtggtctcccgaaatatcattcaatcacattgccctctggacaccacattgctgaagctttcag

SEQ ID NO: 330088 - DNA, 201 bp, Homo sapiens
catctgacaataagataaagtaagatgcaaatgtgaatgatatatggactgtcaagaaatacagtcccaaagtgtgaatggcctgactttgttgttatctrtggaacttaacacgtcacttcatcattctagggcctctccctttatcagagccccagcagccagacatttctaataataatcactgcaactcccatttaa

SEQ ID NO: 330089 - DNA, 201 bp, Homo sapiens
gtgaagaaattgaagttcaaagagaccaaaagacccaggacttggagccagagcctaactctcctcatccatgccctgtgttgggatgagtttgaggttgyaggagcatggggaagaaataggcttaactaaaatcagcagaggtttcaaaaggacctgcagacctcatctctaattcttggatggtggcagccactgcct

SEQ ID NO: 330090 - DNA, 201 bp, Homo sapiens
caatgttccatttgcagaaaaaccatataatacccttttgaattaaaaccatataatacccctttgaattttgtcaatgtgcaaacacagaatttcttttrcaagattaattcttagaaaccttccacaatgtgtttaaacctttagctttatcttatctaattttaaaaaattctttagccctaggcaaaaatttacatt

SEQ ID NO: 330091 - DNA, 201 bp, Homo sapiens
ctgaggcaggagaatcgcttcaacccaggggttggaggttgcagtgagctgagattgcgccactgcactccagcctggtgacaaagcaagactctgtcttaaaaaaaaaaaaaaaataggccaggcacggtggctcatgcctgtaatcccagcactttgggaggccaaggcgggcagatcacgaggtcaggagatcaagac

SEQ ID NO: 330092 - DNA, 201 bp, Homo sapiens
gttcaaagagaccaaaagacccaggacttggagccagagcctaactctcctcatccatgccctgtgttgggatgagtttgaggttgcaggagcatggggargaaataggcttaactaaaatcagcagaggtttcaaaaggacctgcagacctcatctctaattcttggatggtggcagccactgcctacaagtcacttctg

SEQ ID NO: 330093 - DNA, 201 bp, Homo sapiens
ggctgaggcaggagaatggtgtgaacccgggaggcggagcttgcagtgagcagagatcacgccactgcactccagcctgggtgacagagcgagactccatcccaaaaaaaaaaaaagagaaagaaaaacagtctcagaccctgccccagacataatgaatcagaatctgccccagacataatgaatcagaatctgcatttt

SEQ ID NO: 330094 - DNA, 201 bp, Homo sapiens
tgcacaagggatcccttttctccatatcctcaccaacacttgttatctttcatctttttattaagagacattctaacatgaataaggtgatatctcattgkggtttaaatttttatttcatttcactaatgattagtgatgttgagcattttttcttatacctgttagctctttatatgctttcttttgaaaaacgtctat

SEQ ID NO: 330095 - DNA, 201 bp, Homo sapiens
ggaggcggagcttgcagtgagcagagatcacgccactgcactccagcctgggtgacagagcgagactccatcccaaaaaaaaaaaaagagaaagaaaaacrgtctcagaccctgccccagacataatgaatcagaatctgccccagacataatgaatcagaatctgcattttaacaagattgccaaaggattcatatgcac

SEQ ID NO: 330096 - DNA, 201 bp, Homo sapiens
atgcccagctaatttttgtatttttagtagagatggggttttgccatattggccaggctggtctcaaactcctgacctcaggtgatccacccgccttggcmtcccaaagtgctaggattataggcatgagccaccatgcccgactgagaactgggaattttaaagggcacggatcccattcacattgctcaggccatacag

SEQ ID NO: 330097 - DNA, 201 bp, Homo sapiens
ggccttaaaaagtaaacccaggtggatcaccaactattgtagctggtgttggaaagaaagcctcagattagttacaaatattcatatcggaaaggactccrgtggccatggtttggcctcctgaagaatgattccaacggaactgcctgtgccctgtatttcaggtcccccaggcccagttggcactacctcattccaaag

SEQ ID NO: 330098 - DNA, 201 bp, Homo sapiens
ttcccacctccacattgggtgccatcaaggtggtgacttgaaatccaccatggtaggggtgttaacaccacagaaatctgcaaatgctacatataagcccycttttttatctggagagctggatgatagagatttatcagcacacagcacaccactgttcttagaggtcaagggcaattcccagaagaaaggtgagttgat

SEQ ID NO: 330099 - DNA, 201 bp, Homo sapiens
ataggggagaactagctctgctgtttgaaagtaactttggccagacttcaattcaaaataagaattcaagctatgtgaaaattgaatgaccttctgtttcrtggagacccgtggcacagaaagagttctgatgggcactgaggggtacttgaaattgtagaacacaatgaggcatcagatgagagctttgacttgacctgt

SEQ ID NO: 330100 - DNA, 201 bp, Homo sapiens
tgacaagtgaggccattgtcatgcaatacccttcactgagaagacagtatctggaatgttagcatcagttcccctagtgctgacagtaaggttaactaatrgaaaacacattgacacagtaaagtacagaagaagaggaagaaagtaatgaaaaatcaaaatgttttatattcagttttctctgtctatgcatctattgga

SEQ ID NO: 330101 - DNA, 201 bp, Homo sapiens
ctcatcaatccttggcctgtccaggtgcaaataaagagaagcacaccagctggtcacagcaacttgtgtcctgtcctgtgcagaagccactgagatatctrcatggagcaggggctttggaatcagattacagtcctgtcatttactgattgtgtggccttagacttcacctcttcgagtctcaggctgactatttgtgaa

SEQ ID NO: 330102 - DNA, 201 bp, Homo sapiens
gtcatccatttgcaaccccaggcataaacatgctgcctactgaaactttggtttaaatatttggtttcaattctacatacagtcacataccacctaacaasatttccttcaatgacaggctgcctatgtgacagtggtcccctaagactacaatatcgtattttgattgagccttttctacgtttagatacacaaatactt

SEQ ID NO: 330103 - DNA, 201 bp, Homo sapiens
tagttttcctaactccctatctacagcagaggaagccctctcagggtcaagcctgagcagaaaaaaaatgctaacagccacctaactttaaaataggacatttttttttttataattaacacatttccatttccttttttatgttcaaacttatcattctccagttttctacttttacaaagagaattatttgatattgaa

SEQ ID NO: 330104 - DNA, 201 bp, Homo sapiens
attctagaatactaggctgagaattagccataatagggactttcctcctgatgattttcaagtctagttacctttgagcttctctctatttattttaatatttatttatttatttatttatttatttatttatttatttatttatttttgagatggagtctcgctctgtcacccaggctggagtgcagtggtgcaatctcg

SEQ ID NO: 330105 - DNA, 201 bp, Homo sapiens
ttctagaatactaggctgagaattagccataatagggactttcctcctgatgattttcaagtctagttacctttgagcttctctctatttattttaatatttatttatttatttatttatttatttatttatttatttatttatttttgagatggagtctcgctctgtcacccaggctggagtgcagtggtgcaatctcgg

SEQ ID NO: 330106 - DNA, 201 bp, Homo sapiens
ttccctttgtactgttgataatttataccttttatatattattttcctattaaattcttttttttttttactagaagcttaccaattttgtcaatttctcaaaagaacagttcttggttggtgtcatggattttcttttttctttgttttccatttaattgatttctttattatgtctttttctttattttaggttcagtt

SEQ ID NO: 330107 - DNA, 201 bp, Homo sapiens
tccctttgtactgttgataatttataccttttatatattattttcctattaaattcttttttttttttactagaagcttaccaattttgtcaatttctcaaaagaacagttcttggttggtgtcatggattttcttttttctttgttttccatttaattgatttctttattatgtctttttctttattttaggttcagttt

SEQ ID NO: 330108 - DNA, 201 bp, Homo sapiens
ttccacaaaactggttcctcgtgccagaaatgttgatgatatggtttggctgtgtccccacccaaatctcctattgaattgtagttcccataatccccatwtgttgtgggaaggagcccatgagaggtaattgaatcataggggtcgttacccccatgctgctgttctcataatagtgagctctcttgaaatctcagggtt

SEQ ID NO: 330109 - DNA, 201 bp, Homo sapiens
ccctttgtactgttgataatttataccttttatatattattttcctattaaattcttttttttttttactagaagcttaccaattttgtcaatttctcaaaagaacagttcttggttggtgtcatggattttcttttttctttgttttccatttaattgatttctttattatgtctttttctttattttaggttcagtttt

SEQ ID NO: 330110 - DNA, 201 bp, Homo sapiens
cctttgtactgttgataatttataccttttatatattattttcctattaaattcttttttttttttactagaagcttaccaattttgtcaatttctcaaaagaacagttcttggttggtgtcatggattttcttttttctttgttttccatttaattgatttctttattatgtctttttctttattttaggttcagttttc

SEQ ID NO: 330111 - DNA, 201 bp, Homo sapiens
acacccagtcagggaccgtcttatccgggcaaaggagattggtctataacaactctatttagtatcggtcctttccaaggtactaaaacaacccaagcacttttttttttttttatccctgtgttgacttatctttttaacagtcccagatgtaggacactttccaaaaaccttttgaatatttaagtctgagatatcccc

SEQ ID NO: 330112 - DNA, 201 bp, Homo sapiens
cacccagtcagggaccgtcttatccgggcaaaggagattggtctataacaactctatttagtatcggtcctttccaaggtactaaaacaacccaagcacttttttttttttttatccctgtgttgacttatctttttaacagtcccagatgtaggacactttccaaaaaccttttgaatatttaagtctgagatatcccca

SEQ ID NO: 330113 - DNA, 201 bp, Homo sapiens
tatacgtatatatgtatatatacatgcatatatgtgcatatatacatgtatacatgtatatatatacacaaatatatatttttatatatttatgtaatattatatatatatatatatatatatatatatataccagtttctttatccacttgttgattgacgggcatttgggttggttccacgattttgcgattgtgaact

SEQ ID NO: 330114 - DNA, 201 bp, Homo sapiens
atacgtatatatgtatatatacatgcatatatgtgcatatatacatgtatacatgtatatatatacacaaatatatatttttatatatttatgtaatattatatatatatatatatatatatatatatataccagtttctttatccacttgttgattgacgggcatttgggttggttccacgattttgcgattgtgaactg

SEQ ID NO: 330115 - DNA, 201 bp, Homo sapiens
tacgtatatatgtatatatacatgcatatatgtgcatatatacatgtatacatgtatatatatacacaaatatatatttttatatatttatgtaatattawatatatatatatatatatatatatatataccagtttctttatccacttgttgattgacgggcatttgggttggttccacgattttgcgattgtgaactgt

SEQ ID NO: 330116 - DNA, 201 bp, Homo sapiens
aagtatctttttcgaataacgacttcttttcctctggattgctggatcaaatagtagtactacttttaatcacatggttcattttcctggccaacaggccmatgttgggctagccaggtgcccaccaagagtcatctcattagaacaaaagatgctcctatcacccaggaaattccaagggatttaggagctctgtgtcag

SEQ ID NO: 330117 - DNA, 201 bp, Homo sapiens
acccacactgactttatgacattctgaggaaactccacatctccctaacagtcaacaacgacaacataaaatctccaaccaatcacattctaatttgtttaaaaaaaaaatactaattacctttaacattttagcagatgtagagagaagtaggtatgcaaattttttaataaaaaaagaaattgcttttctaattagaaa

SEQ ID NO: 330118 - DNA, 201 bp, Homo sapiens
ggcatgatggtagcagagaggcatgcatgagcatctctacctggagggtgaagcctgagcagggttttgaaggatgagtaagagttttccagatgaacctgggggggaaggacattctaggaggaggggaaggtgtgtttacagatacagatgtgcaaacagtcaggtccatgcagtggcttggcatggccggcttatgtg

SEQ ID NO: 330119 - DNA, 201 bp, Homo sapiens
actgggaagccaacaacaaattactggtgtgtttcacaagctcctacagaaacgttcattcctaccgagctcgtgactagcagctggggtttgcaagtccyagttgcttgcccacaggctgttgaaagaaacttaggctgtagaccctgaggtcagtgaagggataataactagctcctgcatcttctcaggtcagtttag

SEQ ID NO: 330120 - DNA, 201 bp, Homo sapiens
catgaggtactacaggccagccctctgctaggcactggtatccagaagtaagatgaacaaagctcttggtccctaagggtgcacagcctcttgtagttgtyctcccctccttctgaactctctgccttcccttcccagcagggtgggcaggagtgggatatgacaagccccacatcctggtagtttagtcctagagttatc

SEQ ID NO: 330121 - DNA, 201 bp, Homo sapiens
  misc_feature (1)...(201): n = A,T,C or G
tgaacaatgatgttagcattaaagtgttaatgatgactgcagtcaacaaagaaactgcaggatgagtgggcctcaaacaagaaaatctgatgacaagagancatgcaggtaagacttagagaagtggaccaagattcagaccaggaaaataccatagcaacccccaaggatctccatgggtgggaacatttggtggttctc

SEQ ID NO: 330122 - DNA, 201 bp, Homo sapiens
ctgactggctggctggatggatggatggttggttgattgaattacatggcttatgatatactcaattcatgcaataatgagcagtgatacttttcagttttttttttttttttccatttccttatacctctattctgggtactctttatgtctcaccctctacgtagatgaatttccccttcctaacatgtcagtccctac

SEQ ID NO: 330123 - DNA, 201 bp, Homo sapiens
agtctcccctcctgcaaagccactggaactccctccccactagaaagcagccagagctcagggaactcattttaacttttccgggagaagactgagactgrcagggtgagggatctgggctggtagaattcatttatgttcaattcagctcccctgggcagatagccctggcatgggaatcaagaaatgagctttttctga

SEQ ID NO: 330124 - DNA, 201 bp, Homo sapiens
actgaaaatgagtggacggtttcctttgggtatttgtgctcagctctcaatgtcatttttctgcctatcaaatgaacaccaattctttatctacaagtacwttaggttaatgacacagtgttgaactaaacaaagatgaagtcaagttgctaagctcttgtctggcattgattagggggctcataaaataagtcactccct

SEQ ID NO: 330125 - DNA, 201 bp, Homo sapiens
ggatttgggaaaagttgggtgagacagcacacacccatagatgaaagaaataatatgaggaaaaaagattgtctttacctaattaggagcgagtaggatamtgggattcaagtcctggctttgtccttcatcaaggagtttcctcactttgactctgtcattcatcttataaagtaaaaaagttgaacttcaagtttctaa

SEQ ID NO: 330126 - DNA, 201 bp, Homo sapiens
atcgaactggaaattgccacagaaattcattctaatagaagttttcatgtgacactgaaaatgagtggacggtttcctttgggtatttgtgctcagctctyaatgtcatttttctgcctatcaaatgaacaccaattctttatctacaagtactttaggttaatgacacagtgttgaactaaacaaagatgaagtcaagtt

SEQ ID NO: 330127 - DNA, 201 bp, Homo sapiens
cagcaggttaggccagcactggcccataaattcaggttaagatgaagacaactcagggggccctatcagggtatcctgcttctgtccttctaaatgttcgrgagacagaaatcaaccccccaccccaccatttctaccatgctactgagggacacctaacctccacccctgcccattctactgttgctacccagaactgca

SEQ ID NO: 330128 - DNA, 201 bp, Homo sapiens
aagtaaataatctcaaaatataagcaagttgtttctatttgatagaaccacagtgatgtctttgttctcatttcactatggattgacaaaaacttgacccrgaaaccactggtacaaaccatagagcatggccactataagctataaaatcttaagctagtttctctgggccttgctttctttcattgatagaattcattc

SEQ ID NO: 330129 - DNA, 201 bp, Homo sapiens
tccggagtctcataacatactcgacctcacactagtgagcctccccagtgtgttagttgttcttgtgcttacctgccttcctcgagattcagcctaacccrgtgcgtgatgccaaataggagttcactgcatgtactatgggtgggtgaatgaatggccatataatctcaggggaatctgaaggacacatggatccagaga

SEQ ID NO: 330130 - DNA, 201 bp, Homo sapiens
aagtcattaatgactaaaaagccaattcaaactccttaaactaaaggaaatggtctaccagaggcttattggcatggatgaaaccaaattagatatttgtsatattttaaaatgagacccatcttattttgatgttgaagtgtttgtctaggccaaggaacttatttttagttctcctcccatgtctgttacagttgccta

SEQ ID NO: 330131 - DNA, 201 bp, Homo sapiens
atcaatttaggattttcttatactcattgcaggatttaagttaaaatttgttacatgacattgatgtctatatgtacaccttggccagcaagtaagctacrttggtattttcatttttagataggaatagttttcctaactccctatctacagcagaggaagccctctcagggtcaagcctgagcagaaaaaaaatgctaa

SEQ ID NO: 330132 - DNA, 201 bp, Homo sapiens
atgcacatgtgtcaatgtttctcctcttcctcctcctcctctttctccctctgtaactcaggccattgctaccattttgaaagtcattaatgactaaaaakccaattcaaactccttaaactaaaggaaatggtctaccagaggcttattggcatggatgaaaccaaattagatatttgtcatattttaaaatgagaccca

SEQ ID NO: 330133 - DNA, 201 bp, Homo sapiens
cttttcctggttcccagagaatggttgctttatcaatttaggattttcttatactcattgcaggatttaagttaaaatttgttacatgacattgatgtctrtatgtacaccttggccagcaagtaagctacattggtattttcatttttagataggaatagttttcctaactccctatctacagcagaggaagccctctca

SEQ ID NO: 330134 - DNA, 201 bp, Homo sapiens
tgatttaaaatcagccatccaggggtaaataaacttagatagcagttcagggctggagccaatgagggacacagctgagcaggagagaggtttctcacttsttcctcgattggctgagcaggtgattagcatcagagacgcaggctttgatcgtgaagtggggatataaaaccccgaaactgttcgtcataaagaattcca

SEQ ID NO: 330135 - DNA, 201 bp, Homo sapiens
tatgattgtgatttctatctcttctgttacatttttattataaatatgttgtctttttcaagagtatatattatttttgattcttacagcatacattatcwatttaattttagcttctgactactcctacattgatttatttcctcctgttgtttctaattttggttaggaatctgttattcaatggatatctctttttct

SEQ ID NO: 330136 - DNA, 201 bp, Homo sapiens
aactggaaaattggcactaatgttattcttgatttaccaaaagagaaatgatagcaaaagtcttacaggggtcttggcagcaattaactgaaatttcctamaatgatctgctcatgtatagagcctgctggagaggaaggggtttagagcagcagaggctcagtagcactggaaatcttgagtaatgttctttactctgtc

SEQ ID NO: 330137 - DNA, 201 bp, Homo sapiens
taacaagccacaagtatatactctaacaagttgtttcttggatggtaatctatttctttctatgttccatatctcttcatcttttaaatttttctatatgwttctgtgtgttgaattctatgtggcttcttcacatctgttttccaattccctaatgccctctttagctaatcatagctgttgtttaatacacccactgca

SEQ ID NO: 330138 - DNA, 201 bp, Homo sapiens
ttgaagctttcattcatacgcccatccttgctctgcatgtaaagtgggccatctgactcccatgccccagtaggcacaggcacttcatggacgcctgtttycacagccttcgtcctaaaccatttccctagaatctagattacaccacatttgcagacctagtctggtccattcggcacttgagttccctagactagcttc

SEQ ID NO: 330139 - DNA, 201 bp, Homo sapiens
tcatagagtctataaagggcacaatgatggtagatgagtaggagtgattcaatctttgataggagaagtggagatgagaagggcaggagcagggtcatggraggtgctggagaactaatctgcaggctcccttgagcataactgtgtgttttccaacgatcttctttgtgtttgagaagtacagggtatgtatatagagat

SEQ ID NO: 330140 - DNA, 201 bp, Homo sapiens
ttcctagagttctatttatattcacttaataaatagttaaacttgtactatgcttacacgaattaacagaatcaaaattggatcagtgtagcacagtaagygctccatgaatggggaaactatggctatggagggtcaactatactacgttattttatataaaggacttgagcaactacagattttggtatcagagtgggg

SEQ ID NO: 330141 - DNA, 201 bp, Homo sapiens
taagtttaaacatctgattttggaggatagccatggaaactaagagaaaaaaattcaacaatatttctcttaccttggaaatagaggcagtgcctgccacrgcattatataacccacttttgctccaaaaggtgacacgggtgtctataaacctgaaagataacactatgaagggtagatgaagggtagttaagtatcaga

SEQ ID NO: 330142 - DNA, 201 bp, Homo sapiens
gttgatcacctttcagaggtgaattaataacagagacttctaaaggaggcattcaagtgggagcaacaaaatctgttttgacgaacaaattgtccttgccrattaccgtgagatctggtatttcctacgtggatggtgtaacatccctgtaggatgcttgagacatcaacagatatgaggcataagatgtgcataaagatg

SEQ ID NO: 330143 - DNA, 201 bp, Homo sapiens
aaggggaagggctcttgctttactatgcagtgtctcattgaatttctatggaagttttgataatgcatgaagtcgttccataaaataattgtcagtcttcraagaaaccaagaaacaaggctcttttcctctgagtgttaactgcattcagcgcctcatggcaattaaagcagtcccatcccctgtagttgagttagtgca

SEQ ID NO: 330144 - DNA, 201 bp, Homo sapiens
tgcagaattaaaataccacccccccaaaacaatgatataaaatatggagagggtatcattggatttgaagcttctaagaagcttgcattgttcaggaaatrccaaaaatatctgaaaatatatcatccaaattgtttaatatgaggtaatgtagatttaaggcaaaaaatattaccagcggtaaacaggatattttataat

SEQ ID NO: 330145 - DNA, 201 bp, Homo sapiens
ctacttttataacaggtaccaggataatgctaaaagaggaggttcatattttctggacaccggacttgcaaaggaaagctgtgcaaaggcccgctaactcrgttttgccttcaggatctcttccttggaggatcttcctgaaggcttggagcttacatagcactaacctcaatcttttcactgaccttcccaagttgtgtg

SEQ ID NO: 330146 - DNA, 201 bp, Homo sapiens
gtacatgagtaggtttgttatatggaatcaacctcgatacccatcaatggtagactggataaataaaatgtggtacatacaaaccatgtaaaactctacascaataaaaaaagaacaaaatcctgtcttttgcagcaacaatgagtgatgctggaggccattatactaagcaaactaacacaaaagcagaaacccaaatac

SEQ ID NO: 330147 - DNA, 201 bp, Homo sapiens
agctattttcactattctcagtataagcaaaatgcattacttgcactatgatggagaaaatgaatacacattatacttagtatgttgctatttaatgcatygttgctaggtaggtttgaatacagaaatcaattcagtgtttgttgactctcacgtcatttattctgagcttgtcaaattcaaatagaataagagtttcac

SEQ ID NO: 330148 - DNA, 201 bp, Homo sapiens
cagggaggggtggatatttgaactgtgatcagtagcccctagatgctagtcgtggatgtgtggtagattagctactcttgtcaaatatagatttcgttctttttttttttttttttttttttttgagatggagccttgctctgtcacccaggcaggtgtgcagtggcgcaatctccgctcactgcaacctctgcctcctag

SEQ ID NO: 330149 - DNA, 201 bp, Homo sapiens
ctttaattcttaaaaaatgccattccatttattctgccttccataacttttattcaacttttattttagattcagggggtacatgagtaggtttgttatayggaatcaacctcgatacccatcaatggtagactggataaataaaatgtggtacatacaaaccatgtaaaactctacaccaataaaaaaagaacaaaatcc

SEQ ID NO: 330150 - DNA, 201 bp, Homo sapiens
ctcctttggtatattgtactctgagtagctggaatgaaggattcagagcaaaatgaatgttataaaagaggattttgattacagattttaaaatgagaccraggtagttgtgtttatactcagagcagagctttttgcagggagcggaagatttcagtgcatagcagtgaaaagtgatgaaagataagcaaaatgtgaaag

SEQ ID NO: 330151 - DNA, 201 bp, Homo sapiens
ctctcctttggtatattgtactctgagtagctggaatgaaggattcagagcaaaatgaatgttataaaagaggattttgattacagattttaaaatgagaycaaggtagttgtgtttatactcagagcagagctttttgcagggagcggaagatttcagtgcatagcagtgaaaagtgatgaaagataagcaaaatgtgaa

SEQ ID NO: 330152 - DNA, 201 bp, Homo sapiens
caatatttcactcccacatccttctttctccccagccttacaccccctttccctccttcattactccttatgccctgccaagtaaaaccttccaatggaargaggtaagtatatacactaagaattaaaacgcataacaagctcctttctctctcttatactcaagtatattcctctttggggagtatttactgtacccac

SEQ ID NO: 330153 - DNA, 201 bp, Homo sapiens
gacaaacttcatttacctgatcgcagcagaaactcaagttctaatttgcaagtctgatcatagggctatgaagcccaggattgctgactatggaaaatttyatcatcatcctcataataataaatgattatgataaaggatcataaattataacataaatgataggctccaaatatggtattaggagcatatgtacataca

SEQ ID NO: 330154 - DNA, 201 bp, Homo sapiens
cttctctaagcttcagtttcctcatttgtaaaaggagcatcatcattctaccttccttgcagggtggtggtggagagaattatatgaaaaaatgcacttaktaggcaggtaataatgcaagttatcaagccaatgactggcagagaagaacatgctgttagctaccatcacaggtgtttttgttttcagcaagaaaacata

SEQ ID NO: 330155 - DNA, 201 bp, Homo sapiens
tccaatggaaagaggtaagtatatacactaagaattaaaacgcataacaagctcctttctctctcttatactcaagtatattcctctttggggagtatttrctgtacccacaccctccctatcaaacccctccccatcaattgcctccctcctttgtgccatcacagttttataacattcaacatgttatatgcggttatt

SEQ ID NO: 330156 - DNA, 201 bp, Homo sapiens
acaaacttcatttacctgatcgcagcagaaactcaagttctaatttgcaagtctgatcatagggctatgaagcccaggattgctgactatggaaaatttcatcatcatcctcataataataaatgattatgataaaggatcataaattataacataaatgataggctccaaatatggtattaggagcatatgtacatacat

SEQ ID NO: 330157 - DNA, 201 bp, Homo sapiens
cacttcacaaatgttaagcatttgcgaatgcatgaacccatgtctttttcttctctcagagcctttactacctggtggggaagggtgggggctccccacargcgagtgggggaaagacctgggttacccaagtgccccgtgcctgtgctgtggtacctctgcccttagacagcttggccatggctgcctccatcctgtgag

SEQ ID NO: 330158 - DNA, 201 bp, Homo sapiens
catcaacaccattatcatggctttattccatctcatgcctttattcatgttcttccttccattcctcttctatgtggctaattcttacccttctagctcaratgtcatcttctctgaccttccttgcaacccttctctgctgcagtagcattttgtctattacactcttatggcactgagcactagcactgcctattaggt

SEQ ID NO: 330159 - DNA, 201 bp, Homo sapiens
agcatacatacttactgtatattaaggtcaaggtaaaaggggaagtctaacattctgtcatgtcatagctgactttttgggggagtgtatatatacatatmctatatatatgatatcctctttcttcatggtaatgataatcatttttactttatgaccatcatcacaatcatcaatatcttaaacacaataattattatc

SEQ ID NO: 330160 - DNA, 201 bp, Homo sapiens
ctcaacttctttaccagtttaagcttctacccctccagagcctgggaagtcctgggctatttcacaacccaggtggcaaccagcttctggccaatgacacygtgtttccagcagcgtagcatgcaacaatgtgaatgcatgctggaaatacgttcaaaatctaaagagaggaaatagaggggagcttttaggcttcttcaa

SEQ ID NO: 330161 - DNA, 201 bp, Homo sapiens
ttgacttcattccctgctcattgaatttaaaccttaatgatacatctactgatagaatggatttaagtttttgattggattacatcagcttttctgagtcrgaaacagcactaacatgcatttttctaatataaataatattaataagttcatgttgaacaaaatataaaaaatcccaggcattctttaagttatttagtg

SEQ ID NO: 330162 - DNA, 201 bp, Homo sapiens
ttttttaaattttattattattatattttaagttttagggtacatgtgcaggtttcttacatatgtatacgtgtgccatgttggtgtgctgcacccattarctcgtcatttagcattaggtatatctcctaatgctatccctccctccaccccccaccccacaacagtccctggtgtgtgatgttccgcttcctgtgtcca

SEQ ID NO: 330163 - DNA, 201 bp, Homo sapiens
ggaggttagttcaaagaaagctagaaagcactatggagactcctcaaaccaccttactatccagcaaccccacttctgggtatatacccaaaggaaataattttttttttttttttgagatggagtttcgctcttgtcacccaggctggcatgcaatggcatgatctcggctcactgcaaggtccacctcctgggttcaag

SEQ ID NO: 330164 - DNA, 201 bp, Homo sapiens
gcatgatctcggctcactgcaaggtccacctcctgggttcaagcgattctcctgcctcagcctcccaagtagctgggattacaagtgcccgccaccatacmtgggtaatttttttgtatttttagtagagacggggtttcaccatgttgcccaggctggtctcaaacacctgacctcaggtgatccacccaccttggcctc

SEQ ID NO: 330165 - DNA, 201 bp, Homo sapiens
atcttaatgttacttaataggctcaacattattatctttttacataacttaaatttggctcacatttcacatatgtgactatgtctaagtaaaaataagtrtattatgtgttcagtctatggctaggattatgacagtataagaagtatcacctcaaacggggatgttctccttctggctatggaggattagcttagatca

SEQ ID NO: 330166 - DNA, 201 bp, Homo sapiens
tggagaaaaaggaaacacttatacattattggtgggaatgtaaattagttctgccacttggaaagcaatttggagatttcttttttttttttttccgagayggagtttcgctcttgttgcccaggctggagtgcaatggcatgatctcggctcactgcaacctctgcctcccgggttcaagcgattctcctgcctcagcct

SEQ ID NO: 330167 - DNA, 201 bp, Homo sapiens
ttctgccacttggaaagcaatttggagatttcttttttttttttttccgagacggagtttcgctcttgttgcccaggctggagtgcaatggcatgatctcrgctcactgcaacctctgcctcccgggttcaagcgattctcctgcctcagcctcccaagtagccaggattgcaggcatgcaccaccacgcctagctaattt

SEQ ID NO: 330168 - DNA, 201 bp, Homo sapiens
gaaaatgattatccaagttggaaaggaagaaatcaaattatccttgtctgcaaatgagataatcttaggttttaaaaaaacctatcattcccatggtaaawggtaaatagatagatagatagatagatagatagatagatagatagatagatagatagataggatggataggtagataggtaggtagatagaaaacaaact

SEQ ID NO: 330169 - DNA, 201 bp, Homo sapiens
aaaatgattatccaagttggaaaggaagaaatcaaattatccttgtctgcaaatgagataatcttaggttttaaaaaaacctatcattcccatggtaaatggtaaatagatagatagatagatagatagatagatagatagatagatagatagatagataggatggataggtagataggtaggtagatagaaaacaaactg

SEQ ID NO: 330170 - DNA, 201 bp, Homo sapiens
ctccatgatttctcttcactctctagtccccaggggcttatttctctggtcttctgtcataaatggcagggctttaggttccctatgctatttcacacttsccatgatgacttgcttcccttgagggcaaaacaaccagagagagactggaaagagaaaattaatgacgattcacacacacacacacacacacacacacac

SEQ ID NO: 330171 - DNA, 201 bp, Homo sapiens
aaatgattatccaagttggaaaggaagaaatcaaattatccttgtctgcaaatgagataatcttaggttttaaaaaaacctatcattcccatggtaaatggtaaatagatagatagatagatagatagatagatagatagatagatagatagatagataggatggataggtagataggtaggtagatagaaaacaaactgt

SEQ ID NO: 330172 - DNA, 201 bp, Homo sapiens
atttctcttcactctctagtccccaggggcttatttctctggtcttctgtcataaatggcagggctttaggttccctatgctatttcacacttcccatgaygacttgcttcccttgagggcaaaacaaccagagagagactggaaagagaaaattaatgacgattcacacacacacacacacacacacacacacacacaca

SEQ ID NO: 330173 - DNA, 201 bp, Homo sapiens
atgattatccaagttggaaaggaagaaatcaaattatccttgtctgcaaatgagataatcttaggttttaaaaaaacctatcattcccatggtaaatggtaaatagatagatagatagatagatagatagatagatagatagatagatagatagataggatggataggtagataggtaggtagatagaaaacaaactgtag

SEQ ID NO: 330174 - DNA, 201 bp, Homo sapiens
attatccaagttggaaaggaagaaatcaaattatccttgtctgcaaatgagataatcttaggttttaaaaaaacctatcattcccatggtaaatggtaaatagatagatagatagatagatagatagatagatagatagatagatagatagataggatggataggtagataggtaggtagatagaaaacaaactgtagcat

SEQ ID NO: 330175 - DNA, 201 bp, Homo sapiens
aggaaacacaccaaaatgctaatagtaacagttttagatgactgaaattgttttttcttttttccatatagtctgtgatgtacttatgtcatttttaccaytgaattactgtatttagtaatagaagatatatgggtatgaatacctcaaattggtgtaagagaaaaggctatctgcatagacctgagagagagaaaaata

SEQ ID NO: 330176 - DNA, 201 bp, Homo sapiens
tctgtaacaagtttcattcctgtttttctactgtggtgaagttccttgtggccttttagtttgttttagcactgagttttattggttgaatgagagccacrtgcaattttaagtgtataagttagtgcaggctttttttttttttttaaatctgcttttagaactgcttaaattagagcttgactaagccaggtaaaggca

SEQ ID NO: 330177 - DNA, 201 bp, Homo sapiens
aaatccactaggagagaaaagaatcagctgcatcctgcacagaagtgacattcaatgaccacacagagtgcagcaggaaggatgttctaacccaaggtcattttttttttttttgcttgctcagcagaaatatgtagcacaaggagctatcaatcattcttccaatttacggatagggaaactgactttcctagccacagc

SEQ ID NO: 330178 - DNA, 201 bp, Homo sapiens
caccacggccggctgattttttgtatttttagtagaggcggggtttcactgtgttagccaggatggtctctatctcctgacctcatgatccgcccgcctcrgcctcccaaagtgctgggattacaggcgtgagccaccgcgcccggcctatttttatttttttaccatggtgtttcaccacattggtcaggctggtctaaa

SEQ ID NO: 330179 - DNA, 201 bp, Homo sapiens
attttgctttatttacattttctctcaacagtaagttgtattgatcaagtaaagacacagcattagctaataagccataataatggatgctttaaaaatawaagtttaaacatctgattttggaggatagccatggaaactaagagaaaaaaattcaacaatatttctcttaccttggaaatagaggcagtgcctgccacg

SEQ ID NO: 330180 - DNA, 201 bp, Homo sapiens
acattgagaaaaggcgctacagtaaagggtcacttccctctagagttttcaatcgagtgtcagaaacaaacctgctgtcatcaacattccctacccctgcwcgtacaacccccttctccatcttcaaactttggatgactttccactgttctgaggatagacaatattcttaccagggtctccaagcatgaatgtggtctg

SEQ ID NO: 330181 - DNA, 201 bp, Homo sapiens
ggattacaggcgtgaaccaaagtgcccagccagccacatcttattttttttttattatcatactttaagttctagggtacatgtgcacaacatgcaggttkgttacatatgtatacatgtgccatgttggtgtgttgcacctgttaacatcttattttaaagcagttagagagttgtaggctagccttgtagccaggagca

SEQ ID NO: 330182 - DNA, 201 bp, Homo sapiens
cagcagcaaattctgctggcttaggacaaatgaataaggaagatgcctaaaagcacaatctaacttcggaacaccttctctaggacaaagaagtcaaggcmagttttaactctccttatcggacttgattcctctggttccttgctcttctgacctatttgtttttggtgaaaactttgttgtttttgtccagacgttgcc

SEQ ID NO: 330183 - DNA, 201 bp, Homo sapiens
tatttaactttcccttgtttttaagcatatatgttgtttctagtttatgacattttttggcatttgtttttatccaagtagatatttatcgaatttttttwaaaaataatctcaatattgtgattattgggtcaaacagtatgaagttccttaccattttactgtattatatctgaaagtaatgtataacctgtttatgag

SEQ ID NO: 330184 - DNA, 201 bp, Homo sapiens
aagatttgttgcatcaactttcagtgccaaccctaatgcctggcacatcagaggctgtcagtaaatgcttttgaattgaatttatcttgttgccataggayttagcaaattcacataagctgtataaacttattccaagtgcctaatatcctgcccacagcagcaaattctgctggcttaggacaaatgaataaggaagat

SEQ ID NO: 330185 - DNA, 201 bp, Homo sapiens
taatctctgagtaacttttgtgtttctgtgggattggttgtaatgtcatctttgttgtttctgatagtgcttatttgaatcttctcccttttttcctttgytaatctagctagtagtctattgatcttttttatccttacaaaaaataaactttggttttcctgtatagatctttattttgttcagttctgaaaagaagac

SEQ ID NO: 330186 - DNA, 201 bp, Homo sapiens
ctaacctactggccaggtgaccttagaaagtcatttaacctctttgagtattattttcctcacctgtaaaataataataatgaggaggattgagcaagatwagatgtgtcaagttcctagcacagagcttgttaaacagggggtgatcagcaaaagagaattccctcttcctcctttctctttacctttagtgatgtgctt

SEQ ID NO: 330187 - DNA, 201 bp, Homo sapiens
ggagggacatccatggcataatgttactttttataaaaatacttcttttttagaaaagaacctctcaaatatatatatacatgtgtatatatttgtatgtrtgtttgtaggagtatactgaaagatgttgaatgatgcctaatacactttcacactggtttcctcaggatgttactggaaggaggaagagatgattacctc

SEQ ID NO: 330188 - DNA, 201 bp, Homo sapiens
catttttttccatggaccaggggttgggagggaaggttttgggatggttcaagcatacatacttactgtatattaaggtcaaggtaaaaggggaagtctarcattctgtcatgtcatagctgactttttgggggagtgtatatatacatatactatatatatgatatcctctttcttcatggtaatgataatcatttttac

SEQ ID NO: 330189 - DNA, 201 bp, Homo sapiens
ctcagaatttatgcccaggataccttaaaaattcactcctcattcattcatcaaacaacgtatatttcattatcatactataagctacaaggattattaaracgcaaaaacatgctttctgctattgttataagacatgttacaaatggcagagacattggataaaacagaattttagaggaagaagaaagtatcacttaa

SEQ ID NO: 330190 - DNA, 201 bp, Homo sapiens
ataactatttgagataatagcggtatagatattaagaaatgattaattagcaaatcaatcatcttggcattaatgttttaatagagtgagaagttgggttkgtcaaacaagactttatggaagaggtaggatatgagctagcatgaaaagggagatagaaagaaatgtaacttgcaggaggatcttaaatgtcagatgatc

SEQ ID NO: 330191 - DNA, 201 bp, Homo sapiens
cttgagagagtcaagctcaaggtgactgtgaaagtcactgaatgactgaatcaggtaccactattggccaaacatcctgacaggcactttatgtctcgctratcttccacaacagtgatggggatggcaatctttggcgttttacagatgagaaacagcaaacgccttcgccttgagaggttgagcaaccttcctaagcct

SEQ ID NO: 330192 - DNA, 201 bp, Homo sapiens
ttggctttttttttttttttttttttttgcacatgaagatgcattccaaaatcaagatgttgcattgtaaaaagtgcctgagggcctctaaagagcaaggkggattctacatacagaaatacttaaataattacattataaaggccaagtagaaaaaggtctgtcatttctgagacaatggaagcattcatcatatttttg

SEQ ID NO: 330193 - DNA, 201 bp, Homo sapiens
tgcttttaacctctgtggctccaatactatctcttaaattcctcttgatctctttagctaactgtgaaatctctctttatttggcttcttaagcaccttayttatatttattttaggatctgaaccttggcctgtaatattaatatcgctttccttgtaaggaatagtaagacaaatatactatagatattagcccttaga

SEQ ID NO: 330194 - DNA, 201 bp, Homo sapiens
agggaagccagacattctcaatttctaatttttatcaactgtatctttttttcatcatttgatttatcgattgagcaacttattgcaaagggaaatttggsggaatgggagaagatattagcattaattaaacacatggcatcaccaaagaactgtgtgaagaactctttacttattattgtctttaatccttgagatgtt

SEQ ID NO: 330195 - DNA, 201 bp, Homo sapiens
aggataattaaccttgacaacaactagcaagttgaagatggatctgtttgttgaatgccaaagcccccaagaatgaatctagatatgtgggtttggtctawccccagctactttttctttttccttgaattttttgagccttgctgatatctctaggataggcatgtttcatattctcctaagaggggaacctcacaactg

SEQ ID NO: 330196 - DNA, 201 bp, Homo sapiens
tggcagactttcacagacatccagtacaagtttttggaatacaacctgttcctgatacagagggtagaagatcttgaaacctctgagaaggagataggttrtagaaataattgaccttagcctaatggcacagtcaggaatataagaagtaaaaagaagcagggtgcagtggcttgcacctgcaatcccagctccccagaa

SEQ ID NO: 330197 - DNA, 201 bp, Homo sapiens
gttttcccatgaaatcccaaaaagtgctacatgcagttactttatgaattgaagtctgggaaaaatctctaaatcattctcatgcatgcatcatatgttgyttttcaaagggaaaggatatgcattaaagatttgttcagtcttaaacctgcttttgagcatccaagatcaatttgaaggctgattaagttgtgctctata

SEQ ID NO: 330198 - DNA, 201 bp, Homo sapiens
ctttatatacccagagcctagcacagcacccaggatacagttgtaactttatatgttattttaaaataaacaagatttcgaatgaagcctaaattcttttwcttgctgtctgatctcacttaacaaaattggatcaattctattcattgatccagtttggcctcattctattcaagtataaaatgagaaagttacattaca

SEQ ID NO: 330199 - DNA, 201 bp, Homo sapiens
tatctcaactgtgataatttcatataaaataattgtttaattggatattagagggctggaaaggcacacacataaaagaccctggtgcaccacaaaaaagkcataataaaaggaaccaactaccacttcagggacggcagaataaggagaagggactgggaaaagaatttagaagctgagcatcggagagcacagaactgg

SEQ ID NO: 330200 - DNA, 201 bp, Homo sapiens
ttggtatacaatgaactgtttgagtccctgcttccagtttttctgggtgtatggcaaggagtggaattactggggcatatctatgtttaactttttgaggwttgtcacacttttttacacagtggctatactattttacattctcatcagcaacacacaaggattccaatctttccatatcctcacagaaacttgttgttt

SEQ ID NO: 330201 - DNA, 201 bp, Homo sapiens
tgtaaataggaaaagaaagttacataaatcatcttcgcatccttttccatggtcgtaccatgactattctttcctcattacagtgcctccagtggcttctycgtacttggcagtggaaattaaattataaaccatattttcagcaatgtgatacaccaataaaaagataaaatcatcaggataaataacaaagatgaattt

SEQ ID NO: 330202 - DNA, 201 bp, Homo sapiens
tgtttctgcttttgttgccattgattggtttttctcctgggcacaggttatcttttcttgcttctttgtatgtcttgccattttgaattgatggtagataytgtgaattttactttttgggttgctggattttgtcatattccttttctagtgttggattttcttctagtatgcagttaagctacttggaatctcttgtag

SEQ ID NO: 330203 - DNA, 201 bp, Homo sapiens
attttatttatttttcttatatatgaaacaaatgcttactaataaaaaatcactgctgttatcactcaatatattatggacatctttctggacagtaataktgatctatcatgttctttttaatagatgcagattaatcatacatttttagcatgtaaatataccttcaaaaatatataatatcagcaatttagcaaacat

SEQ ID NO: 330204 - DNA, 201 bp, Homo sapiens
gacacagggccatgagccaaggaggcctctggaagctgcaaagcgcaaagaaacagattcttccttggagcttccagaaggaatacagccctactgacacyttaattttagcccagcaaaactgatttcagatttctaactccccaaatataagataataaatttgagttcacttgagccactaattatggggtaatttgt

SEQ ID NO: 330205 - DNA, 201 bp, Homo sapiens
cctccatttgaagcatggatcacctctataggtgatgtgctgcttgattacctccagtgataggaaactcacttctccccaaggccactcatttcactgtkgcgtagcttataccccatgtcctttcttgtgttgttcaaaatttatctccagtaatgtgatccttatcttcaatctctggagactaaacatatatgtgaa

SEQ ID NO: 330206 - DNA, 201 bp, Homo sapiens
cataagacataatgtatatgaaacatacatgaattttttgtttcgacttggatcccatccccaataaatctcattagatatatgcaagtatccaaaattartaaaatttgaagcacttatgatcccaaacattttgcataatgaatattaaatctgtaattgtatttttacaaatggcacgcccttaaggctgggttgtat

SEQ ID NO: 330207 - DNA, 201 bp, Homo sapiens
agggtttacgtgcctttgttcctttgtttcttttcttctctctcttcatccctccctcatttcttcctttcttttcttttcttttcttttcttcttccttycttcctcccttcccactcttcatttcctccattcttcatttttcccctccctccctccttcctttccttcccttccttccttccttcgttccttccttcc

SEQ ID NO: 330208 - DNA, 201 bp, Homo sapiens
cctgtaagactgggaagttttgttgaatttgggcaagatgtcacattttgaagtctgagccaagctgggtgtcagtacgtgaaatgcagcctagtaactayatgttttgtgtcgcatttttatccacaagcattattctttctggtgttcaagtgtatcttatgcacaaaactgtgatgcagctctctggaagcccctgac

SEQ ID NO: 330209 - DNA, 201 bp, Homo sapiens
tgttgatgtgaaagaaaaaaaatgtcaacacagcttctccctaaaatttattgggaaagaagagattgggagatagtctagtgttaaaaatcactcacatrttatgacttgggtttttttttgttttagagatattttttgaacagatgattttgtatctttccaattcaggaaagtatacctgatccaaaccaattttca

SEQ ID NO: 330210 - DNA, 201 bp, Homo sapiens
tatattcgattgatataggttggtgcaaaagtaactgcagtttttgccattactttcaatggcaaaaatagaacccaagttcaggcctgtggtctagctgygaaggagtctgaaaataccagttttctagtctcctgtttttgagcagggaggacttgtaatatgagatttaactaaaatatggggaagatatggagcagc

SEQ ID NO: 330211 - DNA, 201 bp, Homo sapiens
cagaaatgccagctttctatccctggaacacttgggccctgaccctgcaagctcagggttgtgacagagccatttaatgaggtgaattcctaaagtcattsaagagttgcaactttctggcatcaactgatcataaactcttcatgaataaaaacaatagaaactacaaaacatggaagcatagaattgtaaggctggaat

SEQ ID NO: 330212 - DNA, 201 bp, Homo sapiens
tatccaagttggaaaggaagaaatcaaattatccttgtctgcaaatgagataatcttaggttttaaaaaaacctatcattcccatggtaaatggtaaatagatagatagatagatagatagatagatagatagatagatagatagatagataggatggataggtagataggtaggtagatagaaaacaaactgtagcatta

SEQ ID NO: 330213 - DNA, 201 bp, Homo sapiens
tccaagttggaaaggaagaaatcaaattatccttgtctgcaaatgagataatcttaggttttaaaaaaacctatcattcccatggtaaatggtaaatagatagatagatagatagatagatagatagatagatagatagatagatagataggatggataggtagataggtaggtagatagaaaacaaactgtagcattact

SEQ ID NO: 330214 - DNA, 201 bp, Homo sapiens
caagttggaaaggaagaaatcaaattatccttgtctgcaaatgagataatcttaggttttaaaaaaacctatcattcccatggtaaatggtaaatagatagatagatagatagatagatagatagatagatagatagatagatagataggatggataggtagataggtaggtagatagaaaacaaactgtagcattactat

SEQ ID NO: 330215 - DNA, 201 bp, Homo sapiens
cataatttttatcactctaaaattaaacatctcagaattataaatttagaagagaaattatccaacaaattataattgacctttgctttagaggtattctraaagcctggtaattttatgtagccttgctacaaagccaacgttgaggggttgattcttgttaaaaggaagtaaggcaacatttcatgcccataggacatc

SEQ ID NO: 330216 - DNA, 201 bp, Homo sapiens
taggtaggtagatagaaaacaaactgtagcattactatatgttaacagtgatcaatctgaaaaaggaatcaagaaatcaatcccatttacaatagctaccaaaaaaaaaaaaaaaaccctaagaataaattaaccaaagaagtaaaagctatctacaaggaaacctataaaacactaagaaaagaaattgaagaggaacaa

SEQ ID NO: 330217 - DNA, 201 bp, Homo sapiens
acaagcaagagagcttgtgcagggttactcccatttataaaaccatcagatctcatgagacttattcactaccacaagaacagtatgggggaaacagacgccccccccgacccatgattcaattatctccacctggccctgcccttgacccatggggattattacaattcaaggtgagatttgggtggggacacagccaaa

SEQ ID NO: 330218 - DNA, 201 bp, Homo sapiens
catgcagcatgtgctagagtgttgcatgcaaaggaggtggccttggagaagctgctacttgccaggatttgttgatggaacatagaagaaactcatgatgraatactaagctttcatctataagctgcagctataatctgttagtacacaataaattacaaataaatatagcatcaaagcattaccatgatgtaaatgtct

SEQ ID NO: 330219 - DNA, 201 bp, Homo sapiens
acccacaggatttttgtgtgaattaaatggaatgatgtatgtatcaagcacccgccactgtgcctgctacagaggagcccttcatcaacgtcaggtttcccttctttgccccacgtttatcagggcgtgttccgtctttccatttccttacatttggttattaatggtaaggagacaagcttctgtttccaatgtatatac

SEQ ID NO: 330220 - DNA, 201 bp, Homo sapiens
cttctcttgaacagaggcagctcttcttcctatttgtaaacatgccaaaaacattttctgagacctgctgtgtcccaaatttgtattagatgctgggctaygggggaaatacaccatggatcttcccttcaattccccaatgactcaactttctagtctacttttcagcaacaagcgaacctcaggtgtcacctaggttca

SEQ ID NO: 330221 - DNA, 201 bp, Homo sapiens
cccacaggatttttgtgtgaattaaatggaatgatgtatgtatcaagcacccgccactgtgcctgctacagaggagcccttcatcaacgtcaggtttcccttctttgccccacgtttatcagggcgtgttccgtctttccatttccttacatttggttattaatggtaaggagacaagcttctgtttccaatgtatataca

SEQ ID NO: 330222 - DNA, 201 bp, Homo sapiens
ggattttcatatctgtgttcttcagggatagtagtttgtagttttctttttttatcatgtctttgctgggctttaatgttgagctgatgctgatttcatcraatgaattagggaggagtctctcctccttgattttcacttgatcttagccaaagggctgagaagcagtcctcctcctttattttctagaatagtttcagt

SEQ ID NO: 330223 - DNA, 201 bp, Homo sapiens
cagtgggtgggaaacataagactggaagtccctcccgaggctttccaacaggcagcaggttaggccagcactggcccataaattcaggttaagatgaagamaactcagggggccctatcagggtatcctgcttctgtccttctaaatgttcgagagacagaaatcaaccccccaccccaccatttctaccatgctactgag

SEQ ID NO: 330224 - DNA, 201 bp, Homo sapiens
ccacaggatttttgtgtgaattaaatggaatgatgtatgtatcaagcacccgccactgtgcctgctacagaggagcccttcatcaacgtcaggtttcccttctttgccccacgtttatcagggcgtgttccgtctttccatttccttacatttggttattaatggtaaggagacaagcttctgtttccaatgtatatacaa

SEQ ID NO: 330225 - DNA, 201 bp, Homo sapiens
acaggtacacagtgtaaggttgcagcaggactagggcaggggcgaggaatatgcagaatatgcatgaagcttctaggccttctttgggtgcaccaccgtcycagcacctcaatatgttcaccaatcgggaagctcatcaaatctcgcgaagactttttttaaaaataattatgacccctcaccagatggataggatttttt

SEQ ID NO: 330226 - DNA, 201 bp, Homo sapiens
tagtcccagctactagggaggctgaggcaggagaatggtgtgaacccgggaggcggagcttgcagtgagcagagatcacgccactgcactccagcctgggygacagagcgagactccatcccaaaaaaaaaaaaagagaaagaaaaacagtctcagaccctgccccagacataatgaatcagaatctgccccagacataat

SEQ ID NO: 330227 - DNA, 201 bp, Homo sapiens
aataaagagaagcacaccagctggtcacagcaacttgtgtcctgtcctgtgcagaagccactgagatatctacatggagcaggggctttggaatcagattmcagtcctgtcatttactgattgtgtggccttagacttcacctcttcgagtctcaggctgactatttgtgaaattggatataattccttttttgctggctc

SEQ ID NO: 330228 - DNA, 201 bp, Homo sapiens
catttgggttgtttctaccttttggtattgtgaatagtgctgctgtgaacatgggtgtacagttttcagtttgggtacctattttcaattggcagccggtkggggggggggtgtatacctaggagtggcattgttgggttatatggtaattgtatgtttaactttttgaggtaccaaattgttttgagtgcttaccccgta

SEQ ID NO: 330229 - DNA, 201 bp, Homo sapiens
tccttgccttgttgatatgctgggccactagtggtacacacttccctccctgaaaagtaagtggctcacgctgatgtaaccttgacatttagtgaaactamaaaagaggaaggtgtgcattctattaaagttcaagccgacagcaatgagaaaaccaagaaaccaagccaacttactggtcctttctcatatgggttattc

SEQ ID NO: 330230 - DNA, 201 bp, Homo sapiens
cataaccacggtgaactaaaatgacttctaccatcagctgtaatttattgagcatgtactgtgtctcaggcattgtgcttagggccttatcacacccagtsctcacaataagcttttgagctagcacttattagcaccattttatattcaaggaacagaaacctcgagaggttaaagaacctgctttcagttgcatggttg

SEQ ID NO: 330231 - DNA, 201 bp, Homo sapiens
accaggctgccaagattcaaatacctgattcaccacatagtatatccatgtgatcttaagcaagttacttatcctctctgtgctcagttttctcatatccrtaacgaggatagcaatggcatctacctcatagtgttcttgtgaagattaaatgaattaattcatgtaaagcattctgcactcaataagttaaagaaaata

SEQ ID NO: 330232 - DNA, 201 bp, Homo sapiens
tttgatagttattgcaatcccaactaaatattgggcagaagaaaaatcctgctgccccaattacttatgctaaagatattctcaaagttatttaaataggrataacaaagtattctcatagagatcatagtatccgttatttttaacttcttcataattttatttatttttcttatatatgaaacaaatgcttactaataa

SEQ ID NO: 330233 - DNA, 201 bp, Homo sapiens
ggggggctgtagggaagcagggacaaacacactaagggaaggacaatggcctaagagttggacacttgggccaccagacagaaggcaacattttgacttaraagatctgacttcagcactcctctctgccacttattggctgtgtgatcttggaaaaggcagaattcagtaaactgctttggctttttgagtctcttaaac

SEQ ID NO: 330234 - DNA, 201 bp, Homo sapiens
ggccacttctttcaatagaacactgatagtccttgttacagtgtttgttatatgttatttcagttaccattcgaataaacaggaactcaagatgctgggtstaactgaaatagtgaggatttgccttagtcatgggtagggtgtgattcacccatgggaattagagcatgaattggaaggtgattcaaaagatagtatcca

SEQ ID NO: 330235 - DNA, 201 bp, Homo sapiens
atgtgttcacatcttattgtataattgcaaataaatatacaaatatataagtaaagaggccagtgctctcctctatttgctacattctctcctcacttctrgtcagctttcaaaaaagttgacatcaaaacattctttagcaaaatgtaatatagaaaaggcattgcttagtttatttttatgtattaatcctttataaag

SEQ ID NO: 330236 - DNA, 201 bp, Homo sapiens
ctgtgccttagagcctcacccacacagctctaagtggaaattttgacaaaggaatcaaagtgtagaaatttccaacatatgtgcagatattcaaacactgycattttctgacaggtacttatggcttgattgaaggcagaggcacagagttaaaattaattcatgaatgagtttgaaaatagaagtgtaaatgagaccaca

SEQ ID NO: 330237 - DNA, 201 bp, Homo sapiens
atgaagaccgaggctgtcagccagacatttgctcattttcaaacatctaaatgactgatggatatttttttaaaattcatgtgttggctcttggaaagggmaaatagacactgcattacatcaaaattaaaataataacaataaaggcatatacttcatctgttttcaaaaatgcatttctattctttcatatgtgagcct

SEQ ID NO: 330238 - DNA, 201 bp, Homo sapiens
ctggctgatattcagtgtcttggagggtacccaatactaattgttcctaattgtactaataattagtataacagcatccatatgtaatttatgaataaatrttcacatggtggcattgcacgcaaatttttttccccaacagggatatactatccaaaatttttgcaactactgccttagactgagttgctttaagacatt

SEQ ID NO: 330239 - DNA, 201 bp, Homo sapiens
ggctgaggttagggggcttctttctccccaccaacccgcttcatgacttcttatgaatagactccatggtgacttatgatttttgcattccaattccaaaytgccctgcaagctgccttcttccctcactgaacagaattgggtcatcacttcctgccaaatgcccttgtcgcctttccaatcaccaatcaccagtgactc

SEQ ID NO: 330240 - DNA, 201 bp, Homo sapiens
gaagaatgatttggacaagtgcagcttggcaagcagatgagttaagatttacatatagggtactcctggatggcaggcaggaaggcacctctagagatccrccccacttcccacctctaagctgcttttaagctaattctctggctcttaggcctactgtgcatgcatgatgggactgttttccttgataggttcttagat

SEQ ID NO: 330241 - DNA, 201 bp, Homo sapiens; identical to SEQ ID NO: 68993

SEQ ID NO: 330242 - DNA, 201 bp, Homo sapiens
tgttgaaaaggataagagtcatgagaatttgtggattaagcaactgaacctggggctctaacatctgactccagatgacctactttatctgagtgggtacytgtggcaaacaatggaccccttacctcttattacttgactataaagttaagagtgttcttcaatttgttactgagatttttttcaggttatggatgtgtg

SEQ ID NO: 330243 - DNA, 201 bp, Homo sapiens
ggcaagaagcggtggcccaaatgaagaggaagcagtgattggtggtaggagaaggacacccaataggaggtgtgaccttgggagaggaaaacagccatttyccatccatagccctgcaagggtggttgctgatggaataaacgtccaggcatctctcttctcaccctccagttccctgcgagtgcctcctattggccaaac

SEQ ID NO: 330244 - DNA, 201 bp, Homo sapiens
gaagttattgtgtgtacagaatgtttcctcctggatacaggattcagcagtttctcaccacttaggttctccctcccaaggcaacctcagcaggttccacraggttgtcttgaagatcagattttgttcagtatggtagcaactcttagagtacatctgcagttattgattagtacaaagaaaggaaactcaggcatgtga

SEQ ID NO: 330245 - DNA, 201 bp, Homo sapiens
ccaaaatgctaatagtaacagttttagatgactgaaattgttttttcttttttccatatagtctgtgatgtacttatgtcatttttaccattgaattactrtatttagtaatagaagatatatgggtatgaatacctcaaattggtgtaagagaaaaggctatctgcatagacctgagagagagaaaaatacacacacaca

SEQ ID NO: 330246 - DNA, 201 bp, Homo sapiens
ataaatcatctttattttcttctagtctgcagccattaaattttgtaattgatagacatcaaatgggctcttccagctgattgatttttggagggtgaatktggttcttcacaatgcacatcaaagacagctaacaggagctctgcagttctactattacaataggctttattcagatggtctgattgtcttattacctgc

SEQ ID NO: 330247 - DNA, 201 bp, Homo sapiens
ctttgaatctaggctgcatgcagtgactcacacctataattctaatactttaggagactgaggcaggagtatctcttgaggccaggagttcaagaccagcmtagtccttttttaattctcctattttgaatgacctccacaaagcaagttgctgtagatatgtcacataagtctctggatgggttttcatataggatgagt

SEQ ID NO: 330248 - DNA, 201 bp, Homo sapiens
ttgatcttcactgatataaaattagtaggttggctccccacccttgccctgaaaactttcttaaatagagagaaatcgaactggaaattgccacagaaatwcattctaatagaagttttcatgtgacactgaaaatgagtggacggtttcctttgggtatttgtgctcagctctcaatgtcatttttctgcctatcaaatg

SEQ ID NO: 330249 - DNA, 201 bp, Homo sapiens
tccacatcgccctgcacctcacactccatctgtccccaagtacacaccactccttccttgactctttttctagcattgctctgtctacagtggccttgacrccctacccgattcccagctacaaactgatcacctcctgctgttaaagatgcagttcaagtcaactcctcgattcattccttcctgagtaccccgcaccct

SEQ ID NO: 330250 - DNA, 201 bp, Homo sapiens
tgaacctcagttttcctttctgtcaaattgtaacactttagtttaaaaagtcatttatctttgaacctcagttttcctttctgtcaaatgagaataatgtwtgtctctcagagtttgcagaaaacaaatgataatggacttgaaaatactttatggtggaagctctaatcacaacagagtaatacttatcactattaaaat

SEQ ID NO: 330251 - DNA, 201 bp, Homo sapiens
cagtgtgttagttgttcttgtgcttacctgccttcctcgagattcagcctaacccggtgcgtgatgccaaataggagttcactgcatgtactatgggtggrtgaatgaatggccatataatctcaggggaatctgaaggacacatggatccagagactcgatggaagtactgaaaggggcagggaaaggctgaaagtatag

SEQ ID NO: 330252 - DNA, 201 bp, Homo sapiens
gcccccaagatggtcagtaggcatagtcaagtttaagaacgactggattcaatgatcctcaggtcaggtcacctcatgagttagtggagggcggggtgtgygtgtgtgcgtgcacgcgtgcgtgcgcgcgcatgcgcctgcgtgctatgatttagaacaagatagagtttgaagcctgaccgtgggaagtccacagaaaca

SEQ ID NO: 330253 - DNA, 201 bp, Homo sapiens
ctagctctaggacgtagtgccttagcttttttatttataaaccagagagcattatttagaaatcctctaagcccattcaaatcctaagcttatgtgactcygtgactccctagagtctaaagatgaactgtcttcatttgttcatattttatgaccatctgctgagtgcaaagaagtggatgcctcaagtgcttggaaatg

SEQ ID NO: 330254 - DNA, 201 bp, Homo sapiens
aggtccatttaagaaggctaatgtgattgttaggctcatcttctccaggagtcactccctgcctcccctctaccatggcaggattggcttcccctcatccrgagtctcataacatactcgacctcacactagtgagcctccccagtgtgttagttgttcttgtgcttacctgccttcctcgagattcagcctaacccggtg

SEQ ID NO: 330255 - DNA, 201 bp, Homo sapiens
aatctcagctcactgcaacctctgcctcccgggttcaagcgattctcctgcatcagcctcccaagtagctgggatgacaggcatgcgccaacacacccggmtaatttttgtatttttagtagagatggggtttcaccatattggccagaatggtctcgatctcttaacctcgtgatctgcctacctcagtctcccatagtg

SEQ ID NO: 330256 - DNA, 201 bp, Homo sapiens
caagggacacatgacttaccaagggccactcagttcacttgtggaggtgccatgactatatccctggcatgctcacatttgccacttgtgtgtgcgttackgacaaagactgctaggaggatgccctaatgaaggctttattttcataatttgagatgattgagggataaataaatataagatcaagtcagtgtttttttt

SEQ ID NO: 330257 - DNA, 201 bp, Homo sapiens
tagtattaactataagttttactgatatcattgctcattttattggtatgttatgtatttctgtttttcaactttatcttgctgaagtacaacctgaagtwttttgttgttgctttgttttcagaaaaggttatgtgggtggtaagccttctatgttcttgtatgtctaaaaatgtcattcccctctgccccatactttaa

SEQ ID NO: 330258 - DNA, 201 bp, Homo sapiens
gaggaggaagatcaacatgtatgcagagaaatgaaagcaatttaacaaatgcttgcatacagttatgtgcacaggagcaggaagaatgggcaagagaatakccagactagctaggacatgtgggagacttcagagagaagactgggtgcagatagatgttctgagtttgaagaggccaaggctgtatataacctccacgaa

SEQ ID NO: 330259 - DNA, 201 bp, Homo sapiens
cttgagactgggaagagcttggcagacgctaaagggcccctgtagcatgtgtagttcccttaaaaatgctgactgatttccctctgctttgggtgtgggtmaaaaaaaaagcctctgcttttttgtaggtctaaagaataaaaagttttttgctgaaccaaaaggaacaggaagcctctcaccactgccaaatgtatcatt

SEQ ID NO: 330260 - DNA, 201 bp, Homo sapiens
tctggaggtcaaatatattctcaaggggttaaacatcatggtatcagcaggcctatattccttacagcaggaagctctaggtggagaatccattgtcttgyctcttccagcttctagaggccacctgcattccttggttcatgtccccttcctccatcttcaaagccagcagagtattatcttctctcctggctgacctct

SEQ ID NO: 330261 - DNA, 201 bp, Homo sapiens
ttgcatacagttatgtgcacaggagcaggaagaatgggcaagagaatatccagactagctaggacatgtgggagacttcagagagaagactgggtgcagakagatgttctgagtttgaagaggccaaggctgtatataacctccacgaaaaccactgtctgcagtgcccagccataggccacccccttagacctcctaact

SEQ ID NO: 330262 - DNA, 201 bp, Homo sapiens
aagtcaaggccagttttaactctccttatcggacttgattcctctggttccttgctcttctgacctatttgtttttggtgaaaactttgttgtttttgtcyagacgttgccaaggtgtgttattaaacagctggagcttttttatttcatgggtctgaacaagcagctgataagttttgctttgggtttgccaaggctcat

SEQ ID NO: 330263 - DNA, 201 bp, Homo sapiens
ataggcagcacatataaaacagacaaggttcacaccccatagggttcttatgggattacataagttaattcatgagcagtgctgagaagagggcctggtamagagtatattctacattaataattttaataatgttacaaagatggtcccagcagagttaaaaaaaaaagaaggaaaaaagcatcaaagcctaatttaact

SEQ ID NO: 330264 - DNA, 201 bp, Homo sapiens
ggaaaagagcaagggaaagatatgagttcttatttaaaatgtattcatatgctttataaccccaaagtagagattgctatattgaagtggaaggctttatytgtaggattgaattcactagagatatgttttatgccagcgttcattttcccaactttcatttgctttcccttgaccaaaaagtaggggacttagtttatt

SEQ ID NO: 330265 - DNA, 201 bp, Homo sapiens
taattatagaccaactagacttccattttggttttcagactccttctgtagctcattactattctgtctcattcttttgcacttctcgattgtcctttttstatcattccaaccagcagtctcaactcagtgtttcattcctgcttggcagaccaaatacaaccagggcctattgcaatacagaagcatccatataacatg

SEQ ID NO: 330266 - DNA, 201 bp, Homo sapiens
aggcatgtgccaccacgcccagctaattttgtgtttttagtagagacagggtttcttcatgttgggcaggcttgtctcaaactcccgacctctggtgatcygcccacctctgcctcccaaagtgctgggattacaggtgtgagccaccacgtttggcttaacaaaaggcatttattaagcacctgtttattcctggcattg

SEQ ID NO: 330267 - DNA, 201 bp, Homo sapiens
cagtatctttgaaactaatttgacagcatctattaaaataaagcatgtgcctaccttgactgaacaatactacctttaggaatcttttctactgaaatgaragcaccagtatgaaaaagaatatctctgaggctatttattgcagcattgattttcatggtaaagtaagatggaaataactgtaatgtctttcatctaggg

SEQ ID NO: 330268 - DNA, 201 bp, Homo sapiens
tgtctttaatctgcttcgatttttgttgttgtttttgttgttaaacgtaatgttagatacaatatgtttttcttatcctgtaagccataacaactcttgtrgaatgaggcagggtagaaggaagaacaaaacaattaagtgaagctgtgcaccatcaggaacagctgattcagaagagggacatcagctggtgtgtttccc

SEQ ID NO: 330269 - DNA, 201 bp, Homo sapiens
cattgctaattttattgttttgatttttcactatcactttggtggacaaagatattcagcaaagtgtgtcctcttatgaccctgattttacaaaggaggaractgaggctcagaagaaaacatgtttggcttaagtcagggcaccaggttagggaggaagtatagcacaggagttataagaacacaaggaatctggagcca

SEQ ID NO: 330270 - DNA, 201 bp, Homo sapiens
catatacagttattaatatgtggtagggtttgcaattctactgtacccttcattattcacctacttttgccatgtgtgtaagggtataattttgcatgtaygtacagagagagtgagtgttaaagggatagagggacagtgagatgtttacatactaaacatatacatacatacatatgtattccatgatatccagatgtt

SEQ ID NO: 330271 - DNA, 201 bp, Homo sapiens
aaaggacatgagcctccccttctgttattcattcctattaccctgcttctcatggtgcatctggtttaaacagcttcagtcaccaggatgtgaaaagaaamgatgacgataagaggaggagcagatagattaagcaagcagtgcagggcaacattttattacatgtctataatttttaaaattgaagcgaaaaatttttcc

SEQ ID NO: 330272 - DNA, 201 bp, Homo sapiens
tgtctataatttttaaaattgaagcgaaaaatttttccaattacagagtggaagaacttgcagtagtttaaaagagccagtgcagtgaaaatagagaaggkggttatgggatggcaggcaggctgttgaagaaaggagtctttctcgacattcttgttactttctgcagttaacatcgatgagatgcaaatattgcggaag

SEQ ID NO: 330273 - DNA, 201 bp, Homo sapiens
tgtaattttgttcttataaaggattgctttttatttctaatacttgccatgtttctttagtgtcttcccatgtctcaaaatagctcgaaaaaagagcagasgacactgagcttccccttttcaaatttgtagcatttacctctgaatttcacctgacttgtgtggctttcagttccttgaaatcatggtaacaagctggat

SEQ ID NO: 330274 - DNA, 201 bp, Homo sapiens
tgagctgatgctgatttcatcgaatgaattagggaggagtctctcctccttgattttcacttgatcttagccaaagggctgagaagcagtcctcctccttkattttctagaatagtttcagtaaggattggtaccagctcttcttcatatgtctggtagaatttggctgtgaatccacctggtcctgggccttttttggtt

SEQ ID NO: 330275 - DNA, 201 bp, Homo sapiens
tagcacggctgctttgaaatatcatgtgcgctggagcatgttttcactggaggtacagtcttccctgaaatgtaagcagctctatctctggcttttgcagmaaaccagatgacgtcaaaaaatcagttatgaaagccaaggacattttattcagtgagagtggcctattttactaatgtctttgtgtcgatatcagattag

SEQ ID NO: 330276 - DNA, 201 bp, Homo sapiens
tttcatctggtaccaggtgcatgcagaagcaagggcagaatttcaaatggaactgaatttctaattgtaagttggaattgcctggatggtagtgtttgtgsatcagagaacacagtgcctttgagatcacacaggactgggtctgatcccagcccttctactttattcattcatttactcactatttattgaacacctgct

SEQ ID NO: 330277 - DNA, 201 bp, Homo sapiens
gactgtgggctcactgggaatgaggtgcgatcttgcacaggggctcttatcagctaaagacaatcctgggaaagagatggccactgagaactcccagcagytgggggaataagtccttcagcctcgaagagggatctggtcaggaacagatattaaaccaataaagtacgtagatatatatacacacatatatacatatat

SEQ ID NO: 330278 - DNA, 201 bp, Homo sapiens
ccattaattttttgcatcatttctggtggaagccttagatttatggttgccccaaatgaattatgccacttagttgcctgtgccatgctcatattcagaaytggttggaaagggcagaattctgggcagtaaatatttagccgaagcagcctaggatatagtaagtgaaggtgattatccattcccaaataccagccacag

SEQ ID NO: 330279 - DNA, 201 bp, Homo sapiens
ttatgaaaagaagaaaatacattagccagggaaaaaataatatttgaaaagaaacatgccttagattccattgcagtagtgggggctggacaagaagaatmttcctgatttgggatacattagacaagttcatttaaaaatccttccttaagttcttcttttcaagggggcagaagggtacacggagaattgtaccagcca

SEQ ID NO: 330280 - DNA, 201 bp, Homo sapiens
aacactgcttcagagtagaaatatttgttaaatgaataattgataaaatgtagatgtttactaggctaaaatctttacattgtattattctttagtgacasttgtttcttcagtatatgataagggtgctttgtaacttatacgtgaaccacaattttagagtaaatgagtgcttccaaaatccttaagggaaacatatag

SEQ ID NO: 330281 - DNA, 201 bp, Homo sapiens
gaccacagatgagtttccttagggtcttcgtcattgacagtttccctaaagtgggccagaaagaatggaattgattcaggcaatccaaaaaaattatgttratattctcctgttataatcagttaccaagtctagcacttgcaaggggagaattcacagggaattttatttaacaaacattagttgaacacccactgtgca

SEQ ID NO: 330282 - DNA, 201 bp, Homo sapiens
acagctgagatttagaactcttgcagtatctttccattccaaatccttatagtaagaaggacaaattcattttttataaaatacaatgcacaaaatattartcacaaatgatgaaaagtctccttcaagttcttacctcaaattcctaagccatcatgtggtttatgcctcacagaaattaccatagatcccacatatacc

SEQ ID NO: 330283 - DNA, 201 bp, Homo sapiens
tctgtgctgaccccaccagccacatttctcacagcagccctccctccccttccatctccacatcgccctgcacctcacactccatctgtccccaagtacayaccactccttccttgactctttttctagcattgctctgtctacagtggccttgacaccctacccgattcccagctacaaactgatcacctcctgctgtta

SEQ ID NO: 330284 - DNA, 201 bp, Homo sapiens
gggccagaaagaatggaattgattcaggcaatccaaaaaaattatgttgatattctcctgttataatcagttaccaagtctagcacttgcaaggggagaawtcacagggaattttatttaacaaacattagttgaacacccactgtgcaccaggcactctgcattccaatcaaaatgaatatacagatggaatattaattt

SEQ ID NO: 330285 - DNA, 201 bp, Homo sapiens
gaatttcaaagaatgaaaatttttcctaccttaaaaatgcattgaccaaatttatttccctctaaacatgatagtgtcaccagaatgaaaaaagatgaccmcatttattagaggccccaaatcactgactgctgcaaagcactgtgtttgctatgcaaagacatctaattttgcaaaataaatacaccaggcatacaattt

SEQ ID NO: 330286 - DNA, 201 bp, Homo sapiens
tgagggaaagtttccccccactcccccaagtggtcctaggcattttatcatagtgtacgtctcctacaaaaagaaaaagtcagcttgggagttgtaaccaygactaagaactcagtataagataaatcacaggttcatcaagaacatgtcaaaaaaccaaaggttcagctgtcaacttctgcagtcatttgaaataataaa

SEQ ID NO: 330287 - DNA, 201 bp, Homo sapiens
  misc_feature (1)...(201): n = A,T,C or G
ttgaacacccactgtgcaccaggcactctgcattccaatcaaaatgaatatacagatggaatattaattttaactttgtaaatgaagatagaaatatgagnattccttgttatattatcatttgattgcatgaattggttttgaatagaaatttaaaatggggaactgttctattaggtaatattaaactggtacaataga

SEQ ID NO: 330288 - DNA, 201 bp, Homo sapiens
gtgataataaaaatatccacttcatgaggtagtggcaaggatcaagttgctaatgcatgcatagttgcagccatatagagctctgtagatggtagtgataytgatggattattattattagtatatctagatatgatctctagttagaaaatgcagtctccttggttgcttgcttctagaaaggatgcatgcagtttctag

SEQ ID NO: 330289 - DNA, 201 bp, Homo sapiens
tcatcagtggtccacatgagtaagcacaatgcatttaacagaggctgcctgttaaatgcagactgaaaaaaaaagttcagactgagggaaagtttcccccsactcccccaagtggtcctaggcattttatcatagtgtacgtctcctacaaaaagaaaaagtcagcttgggagttgtaaccatgactaagaactcagtata

SEQ ID NO: 330290 - DNA, 201 bp, Homo sapiens
agcggctttgtcccatgaaacaggaccttcagagttgatgggtcccaaaaagactaacccaaggtaaacaaacacccagaagaagacagcataaatctgarggctgctattatttagaatgagagtgcactttctgaagactatgtcctttacccaagacagctctctttactatcatttgtcaacaaaaggtacttggac

SEQ ID NO: 330291 - DNA, 201 bp, Homo sapiens
atttgcctcagattacaagaggaaatgtcattctatatgagaaaattgccaaatagttccatattgatcaggaacaagtccagtattgatctctgaaactrccgtgccttgttctcattggaatagttctcttcaaatgggaacttcataagcaggaagccgggcaatattaaatctcatcagtggtccacatgagtaagc

SEQ ID NO: 330292 - DNA, 201 bp, Homo sapiens
attatttcaacagaaaataaaagcaatctgggccagtactgaatacagaaaactaggatataaagaggtaagactccaggtgccatttggacttaattctrccattctgtataatagcatgaacagcatctcctacctccattcttgagactgggaagagcttggcagacgctaaagggcccctgtagcatgtgtagttcc

SEQ ID NO: 330293 - DNA, 201 bp, Homo sapiens
ttaattttttaacgtagtgtattggaataaggttaatatccctccatttttcttgtgttaattaattggcattaattaacagaatcccaattaaataaaargtagtattcttattttattatctacccaatttcattaagccagcattattttttaaaaagagattttatgctgttttcaagtggctaaactagtgaccaa

SEQ ID NO: 330294 - DNA, 201 bp, Homo sapiens
gtttcagtagaaccagtgggaagtgagatggtacaaggcctgccttgaacaccttggaataacgtttcttactttcctttcaatttgtataaaatcgttamgaaataaatccaagttctactttaattaactcgcaaaatacttgagctcatctattaccctctattcctgtagaatatttataggcatattttaaaactg

SEQ ID NO: 330295 - DNA, 201 bp, Homo sapiens
tgggaacgctggactcatgacaattgccactccctttgtgtgccttatatttgcccattcccaagtcttcactgattttattccctattctaggcatctcyagatgcctacatcctacccgtgctcaaagacacatttcaaatgcccactcctctgggaaatgcctgttgtacccctggacacaaatcatctctcctcctt

SEQ ID NO: 330296 - DNA, 201 bp, Homo sapiens
tgacattgaaaaatagattttccgaatggattttctggaggagatattggtaatttacttgaagtattttaattttttaacgtagtgtattggaataaggytaatatccctccatttttcttgtgttaattaattggcattaattaacagaatcccaattaaataaaaggtagtattcttattttattatctacccaattt

SEQ ID NO: 330297 - DNA, 201 bp, Homo sapiens
agtagaatcatacttacatggaatttgaggcaattctactaccactatctgttgactactctaattcctaatgctacgtgtttttttctttgcagctacayacgtcatttaatgaacttcacattgaacacttactatatgttagcactgtgccacagattgaaggcacgacaaagatgaattagatgagtccctgccttc

SEQ ID NO: 330298 - DNA, 201 bp, Homo sapiens
cattgcagacaatttcaagagcagccctggaaaaaccgtgtggagaagaaatactgtgtttttttcttctcagtcttgccatgtcatcagttttcatcatyggccctttcctttctgaaaacgagatgaactctcaaaattgagttttgagacaagtttgattttcctttgtcctagctggaaagagagctttaacagaga

SEQ ID NO: 330299 - DNA, 201 bp, Homo sapiens
  misc_feature (1)...(201): n = A,T,C or G
aatcacttattgatcatctgtttcacatcagacactgtgattactctgcataagccttaaagttggggctcagttaaggtatagcttagggcccatctaanttattcaaaattcagactttatatggttgagatttaaaagtgttacctatacatggcaaaaagaaatccatccacaggcatcactttcagaacccatctg

SEQ ID NO: 330300 - DNA, 201 bp, Homo sapiens
gcctggttatctgcctcatcatagagtgtagagggccccactgcaccacaatttctgcacagaaagggtggggcagttcaggcttataatccatgcaaatrtgttgtgctctgactgcctggagatatgcctgggcattgggcagagagggccctgcttcaccacagtctctgcacaggaggagttgggtggctcagtctg

SEQ ID NO: 330301 - DNA, 201 bp, Homo sapiens
ttattccaattgacctcagcacatagttggccctcaaagattttttgaacaaatgaattccaggcccatgtaaaggattgaggtgaggtggcctttctgaratgagaagtcaagtcacatcagatcatggaggacttcttagatatagagaatgcactgcatcatggcaccagccatgtgggagcatcatgacaagactgg

SEQ ID NO: 330302 - DNA, 201 bp, Homo sapiens
attctttaagacctgagcaatgtctattagacgaaggcagcttagaaaaaagatattcaatgtagttcaagttaaaaacaaaagaaaactaatatttaatrcggttaaaaatgagattgtgttcaccttataggtttgttttcaaggtaaatatttaaactgagtaaatcattttttcctaaaactacttggtgagtatca

SEQ ID NO: 330303 - DNA, 201 bp, Homo sapiens
tccagcaaaagctgctgaaatgtgatctcccctcaaatacagaacacctttccttttctctttactttcctgtagaaagaaactatttgcatatgctaatktgaaatgaatagtcactgtcactttttgtctgtgtgacctcagaagaggtgcttaacctctctgtgccttaatgtcttcacttcacctatttattttagg

SEQ ID NO: 330304 - DNA, 201 bp, Homo sapiens
gggagtgttgagtggagaactaggcaggagatgaagctcaaaaagcatgcttatttaggttttgaagacattttacatgatatttggaacagattgctgcrctttatccaaatatatgtgggcttttgttttctttcttatcaaagctcggtggagagaaaaaaatccatgctttgatgattctttaagacctgagcaatg

SEQ ID NO: 330305 - DNA, 201 bp, Homo sapiens
gtgatttattacatcttttcctgaaatatatactaaaaccaagaatgttaagtgactgactccaaagttaagacttttgcagatagggtgaactctaaacragacattttttcccccagtttggctctcagcaaactgcctttcagatgcttcagcaaaataaaaccaaaaacaaatgttttttttttttttttatttttg

SEQ ID NO: 330306 - DNA, 201 bp, Homo sapiens
gtacagtggttctcatgggacaaactcttccacagaaatagcaacaatcctaaaagagaaaaggtatttggtatgagacatgttcagtatatctattttcrtaatacaagaatacgagctacagaaagaaaagactggcaaaatcttcttggtagtcatctgacaataagataaagtaagatgcaaatgtgaatgatatat

SEQ ID NO: 330307 - DNA, 201 bp, Homo sapiens
ccgattcttcttggttcctctgtgtaggtattttacctgacaatataaatgtgactttatttttaaaaggaaatagtaagaaagcaaatgaaacttctctktgatttgtgataagcagaataaacaaaacacaatattttcaggatagaagaataaagaatctgtgaagaatagctttagtaacttggaaagactgatgaa

SEQ ID NO: 330308 - DNA, 201 bp, Homo sapiens
catcatcttctattttctagaagattaaatgtttggtagaaaggcatcaatgaaaccatctaggcctacacaatttttataaagatttataactacttcartatcttgaattgttatatgactatccagattatttcttctacagtaagctttggtagaaagtattttcaaggaatttgtcgttttcatataagttgtaaa

SEQ ID NO: 330309 - DNA, 201 bp, Homo sapiens
aagtctgatctggaatttctttcatagtgtattttgaaatccatatttagatcatacccactaatgaatgaacaccaattaccaaatagtacctacccaawtatggaatggtcagggcaatatttcccatgcaaatccattgtgtagtcaagtaaattttcatcactgcttgtccactttctctactgcttctctttccag

SEQ ID NO: 330310 - DNA, 201 bp, Homo sapiens
aagatttataactacttcagtatcttgaattgttatatgactatccagattatttcttctacagtaagctttggtagaaagtattttcaaggaatttgtcrttttcatataagttgtaaaatttattagcataacattactcattatatccttttagtatactttcggtgtctgtagaatcttagtgataaattccttcct

SEQ ID NO: 330311 - DNA, 201 bp, Homo sapiens
gtcagggtggctaaggagggattttggagagcaacaatgtctgtggattttaaattttagtggaaacaatatgcactccaaaatatcctttacaatgactyaatcactcttcagtatggaagaccaaggaaaaagtgaacagaagagaaagagaaaaaaaatggaaggaaagaaaaaagggagggagaaatttattaattt

SEQ ID NO: 330312 - DNA, 201 bp, Homo sapiens
atccacttcctttaatggatggacctcctctaagaccaggagtcttacgaatctctatatcaatggttttacccacctctatatcagttcttattaatctmtgtatctataacagtaatgaaggtcacaactgttgttttcagataacttagatgttcagaaaagtgcattgtacaaaacttagtttagaataccatcgat

SEQ ID NO: 330313 - DNA, 201 bp, Homo sapiens
caggaggcaacatttgaatgtttgtttctctgttccatactttcttattgaccctttagtcgatgtgtttttccctttaggcctgtcattgttaaggtcaygttgctgaccttgtaaagctgagaaaaacctgctttcttccaataaatgttaatttcatcagctggtttctcctattatcatgacctatggacaattgca

SEQ ID NO: 330314 - DNA, 201 bp, Homo sapiens
ttagcataaaattatataatatttctttatcatctttataatgtctgtagaaaggtcccttcttttgcttctgatactgctgattcttgttttaccttttyatcgtgatgagttttattaatcaattttactaatcttttcttcaaattttgatcttgttgatttccttttttttgtctttttttcactctcatttttaac

SEQ ID NO: 330315 - DNA, 201 bp, Homo sapiens
tccagaaacaggatagtcctggtatattcactgatttggaccttaggcctgactggtgatcattaaaatagcacaggatggtgaataagccattatgaccrttcattttaaaatgtgggaattgggaaatcccctttctataacagaactattcatgtctgccatctaagacattctttttctttcttgggattagaacac

SEQ ID NO: 330316 - DNA, 201 bp, Homo sapiens
agggcagtcaaagccagactaaaggaggttcagtgcaccagtggcaatgaggagccattgagtgttcttaatccccagagatactacaagcatctgatcastagattgaagtagttaaactaaatcaagttaattaacatacgtcttacctcacacacttatttttttgtggtgaaaacacttaaaatctgttcttagcac

SEQ ID NO: 330317 - DNA, 201 bp, Homo sapiens
aaaacctgcttggaaggttgataaatgaatatagaatgagatagcgaagacagtataaaaaactatttaaaaattttttgacataaaagggagcacaaaakgggggtaggctagctagagagaaatagggatcaaaataaggatatattttaatccaggacatattaggatatacttgtactgatgggaataatccaattc

SEQ ID NO: 330318 - DNA, 201 bp, Homo sapiens
aatgtctgaggagagtgcacgaaaagctatttatagaaagctaggcagagtttaagagaaactaacaaggaatggtgaagtcgtctagggccttctaatartagggaactatctcctccagggcaagaagcggtggcccaaatgaagaggaagcagtgattggtggtaggagaaggacacccaataggaggtgtgaccttg

SEQ ID NO: 330319 - DNA, 201 bp, Homo sapiens
caggacatattaggatatacttgtactgatgggaataatccaattcactggtgatgctaaggaaagacagagtctctgtaggtgtcaagtcctcctccacrcaagataatgtaggatcctatccaagaaaggaggtgctggccaccagcaggtgaagggacagcttacccccataactggagggacagaggagggtttctg

SEQ ID NO: 330320 - DNA, 201 bp, Homo sapiens
tcatgtttgattaaataacaaggactacctcttagccaagttgaaaatacagaactgaccatcacttgtggtattttcattttcacttagttcagaatatrttctaatgtttcttttgacttcctctctcatattttgattatttgaaagtgagttatttaattttccaatatttagaggtttttaaatatctgtttttga

SEQ ID NO: 330321 - DNA, 201 bp, Homo sapiens
tttattaatatagtcaaactgttctgtgttgttggcctctgtgattagaaatataaaattaaaagaattgtgaagacatgggaaagctgaatgttacacawactcccaggattacacacttggtgagaactttaatttgacttttaatagatcggaatcaatctattaaccaaagggaagaatgtaagagtttgttgatca

SEQ ID NO: 330322 - DNA, 201 bp, Homo sapiens
agggaagcctcagttctgctcttaacgcctttcaactcagaatcttcttgcttaaagcaaaataattatacagtaatcatgtctacaaaatacctcacagsaatacctagactcatgtttgattaaataacaaggactacctcttagccaagttgaaaatacagaactgaccatcacttgtggtattttcattttcactta

SEQ ID NO: 330323 - DNA, 201 bp, Homo sapiens
actttataccgcaatcaaacacccacaggcatcaaagggaaaaaaaagcaatgaaatccatccaaaggacagtaacatcaaatataaaaaggaacatcagyccatacagataagaaagaaccaggataagaactctggcaaatcaaaaagccaagatgtcttcttagctccaaacaactgcactggttctccagcagtggt

SEQ ID NO: 330324 - DNA, 201 bp, Homo sapiens
cttgtttaccagtagaagctctagcttctacctctagcaatgggctcatccatggagcccacagttgtctgagctgtctcctcagtcctgaggggtttggrgacccagatgggtgaggtcagaccgggcaggcccatgtacaggtcccccagtgtcagccacatgcatcagcaccaaggaagaaatgagtgaagggccacc

SEQ ID NO: 330325 - DNA, 201 bp, Homo sapiens
taatggtaatagatggaaatttaagatttgtgcttctcctagttcagtgttaagactgaaaggaattcaagggtgaccctcagttcccaagtcacaccaasaagaggatgatcaaaggctttgattgcaatggtatttggctcagcatccccaccaaacactgttgctgccagcttaccccagcctcccagggtcatccct

SEQ ID NO: 330326 - DNA, 201 bp, Homo sapiens
aactaaaaaactacatgatcatctcaatagattcagaaaaggctttcaataaaattcaacattttaaaaaaacaacaaaccagacactgagaaaacatatkttaaaataataagagccacttatgacaaacccacagccaacatcgtactgaaaatgcaaaagctggaagaattccccttgagaagcagaacaagacaagg

SEQ ID NO: 330327 - DNA, 201 bp, Homo sapiens
accttgcttcctttgaacaatcgatgtgttttatttttcctctctgcaagaacggcgtaactacgttgtccatttccctttgagtgtcaaggccttcagarccaaattttcacttgtaataaagttagaggaactttataaactggtgaattactctagatcctgccattctatctgaatttgtctttaatctgcttcgat

SEQ ID NO: 330328 - DNA, 201 bp, Homo sapiens
ataaatcaggatctaagaaaatagaattggttcctgaaatgtaattctccttacatgaaaaaaattgtatctccaacaatgggtataaattcttaagacaraagccctggctcctttcagggattggggcactgggaagtcttttctttaggaggtatgacactttatcctttagtagcccattatggtaatcaaagttac

SEQ ID NO: 330329 - DNA, 201 bp, Homo sapiens
ctaggaaaccactgtgtcatctggaagagacataagacatggttgatgcaaggtgcagataagtgatgtagtgcaatatctgtttcaaacgtagggcaagmaggacatgcagatggattggacattggttgtgagagaaggagagtagtcattgagtgaatggccctttgatatattgagatagagaagactgaggaagga

SEQ ID NO: 330330 - DNA, 201 bp, Homo sapiens
gaacactgtatttaagtcaaagagacaaaatccctcttgtatagtccaagcactaattttacagtcatcactcaaaataccccagtagaaatgcttccctycccgtatcccctgccatggttgctatgtttctgcatctggaaagattgccctttactataaccctggcttcggacttagagcgtggatttttccaacatc

SEQ ID NO: 330331 - DNA, 201 bp, Homo sapiens
ccattacactctacagtctcattcaatacttaggttatttccaattctatttaggcacttttagaccccatcttaatattgagaatctcatttccttgaamatcatgctttttcctttcaatatgccacgagtcatcagtaccaggagcagaaagcatcttacttactgcaattacacttgctaatcaattctgcatcact

SEQ ID NO: 330332 - DNA, 201 bp, Homo sapiens
tttttattttttcgttaggatatcacatatttgtttatgtattttgattatagtctttttatctgttagcctgtaacttgatattatgcaacttataaaamcaataacaataatactgatgatgacaagaataataataaacatcacttattaagcataaagtaggtaccaagtgcttttataaactatcaattttaagtg

SEQ ID NO: 330333 - DNA, 201 bp, Homo sapiens
gcaaattacatagtgtgtcagaggttggtgagtaccatggagaaaaataaagcaggaaagtgagatgaggagtgtcagggtgcagtagaataaatgcaatktgatgtataccagtcatacttcagaaggtgatgaagagaccctgaagaatttttttgaattaaaggacctcagagggaaagtccattctgcctgtcccca

SEQ ID NO: 330334 - DNA, 201 bp, Homo sapiens
ttttttcgttaggatatcacatatttgtttatgtattttgattatagtctttttatctgttagcctgtaacttgatattatgcaacttataaaaacaatamcaataatactgatgatgacaagaataataataaacatcacttattaagcataaagtaggtaccaagtgcttttataaactatcaattttaagtgttttta

SEQ ID NO: 330335 - DNA, 201 bp, Homo sapiens
cagcaggtttaaaatataatagggggaaaggggtttttcacaggtaaagcttttcctaatgcctttctaatcctatacttgctgtatgtacatcttttttytctctctctctcatccttatttttccacttttgccattttaactcatgcatttagaaaatctccacaatgaggctggttctgcaacgttggagaaactgc

SEQ ID NO: 330336 - DNA, 201 bp, Homo sapiens
agaaatttctggactcagccttggaaatgaatcctgcaggagctatttggcaaaatgagcttagccaggaggttttaaatcacactcccagccaggaaaarggggaaggcccaggggccaccagatatctgcatcaggacttagcatcctggcaccagtttttcaaatcaagtaattgtgtctgctttgggaaagactaat

SEQ ID NO: 330337 - DNA, 201 bp, Homo sapiens
gcagtctactttcaaggcacggagacaaatgcccccatatatttcccaaatgggctaattctcactatccggaattcttttaatgttctgaagtttcatgmttttccctgctgagcctggaagctctctacataagaatgctggatttatttcatctgggcctagatttttaatgtgttgaccacctagagtccttggcct

SEQ ID NO: 330338 - DNA, 201 bp, Homo sapiens
gaaaccattcttcctttccaagcctctgggcctgtggtgggagacctgcctcagaaacttgtgaaatgcctttgaggtctttatcccgttgtcttggctaygagtgcatgactaccatttagtcatgtgaatgtctctagcaagtggttgctccacagcctgcttggtctattctcctgaaaatggtctttccttctctac

SEQ ID NO: 330339 - DNA, 201 bp, Homo sapiens
cctcgcctcactggtctcctcccctcctgccccattctgccactcagaacctaggaaaccattgttccaagtacaagttcaatcagtgcttgctaagtcawcaggaaagagtcagggctggctaacattcactttctcagatttaggaagaagtggcaaggctgagacatagtgggacagccacccatgccaaaaggggga

SEQ ID NO: 330340 - DNA, 201 bp, Homo sapiens
tgcaccaccacgcctagctaattttgtattttcagtagagacaggatttctccatgttggtcaggctggtctcgaactctcaacctcaggtgatccactcmccttagtctcccaaagtgctggaattacaggtgtgagccactgtgtccagccgggggtgaatttcttaaagaacttagaacagaactaccattcaacctc

SEQ ID NO: 330341 - DNA, 201 bp, Homo sapiens
ccaccacgcctagctaattttgtattttcagtagagacaggatttctccatgttggtcaggctggtctcgaactctcaacctcaggtgatccactcacctyagtctcccaaagtgctggaattacaggtgtgagccactgtgtccagccgggggtgaatttcttaaagaacttagaacagaactaccattcaacctcacaa

SEQ ID NO: 330342 - DNA, 201 bp, Homo sapiens
tgagagacttgctcatgtaaggggacccaagggtgaaaccaggctttgcaacccacgcagcccaatgtgatactcagtgtcttggttcccattagagatamcctttggaattccagactgttctttaaccagttcagccaagcgccttgttctctctgtcccttgggacatcacacttcattgtacaatagacagcctgca

SEQ ID NO: 330343 - DNA, 201 bp, Homo sapiens
aaagccacagtgctctcacatacacacagatacacttggaatggatattgaagtcttaatatagagtgcccacacgcctgttcccaagtgctgtcagcaamatgctgtctctgtttccctcccagagcatattttggaagcttaggacaagggcaccatctggacttccctgcagtacagtgagagtaatttggctctccc

SEQ ID NO: 330344 - DNA, 201 bp, Homo sapiens
gtgtgatggatgggaagcctagattttcaggcagctgttataatgctgcttagcatataaacagataaaaatattttcatttttcccatatgacaaaagaktggtgattcccaaaggtgagaacaagttagtagtacattctttggagtattcagatgaccacggggcaaaagtcttttcaaattaagtctctgagtattt

SEQ ID NO: 330345 - DNA, 201 bp, Homo sapiens
atgctacagataaatccagagaaagagctggaatggagctcagggatcactgaacccctcagccagggcccaacaagagaagattaattccccagattcaygcatgagttggtgtcccagagattccagggggaaaaaaaaaaaaggaatgcggacccaatcaatcagggaagctccccacaatccttggtgagaaagccc

SEQ ID NO: 330346 - DNA, 201 bp, Homo sapiens
tgggctctgggcagcagctggatggcgtgctccttcctggctgagaagataaatgtcacctccacatacatgggtttgccagctccatggggtccagccarctcctctgagaactcccagagttcacaatgggcacttggccttgggtaactgaagctgtctggtttgcttccctgcctgaagaatgggaataataatatt

SEQ ID NO: 330347 - DNA, 201 bp, Homo sapiens
  misc_feature (1)...(201): n = A,T,C or G
atcattgcaatatgaagcagtagaggccttaatagaggtatgttgtgggcatgatggtagcagagaggcatgcatgagcatctctacctggagggtgaagnctgagcagggttttgaaggatgagtaagagttttccagatgaacctgggggggaaggacattctaggaggaggggaaggtgtgtttacagatacagatgt

SEQ ID NO: 330348 - DNA, 201 bp, Homo sapiens
tacgctttcttacctccttgcctcttacaaaggagcgcacagccttctggagacagttctgtttgtttaaggcaacggggggcaacaggctgtgtgctgargatgaaatgggagccatgttaatttcgtgttaatgacagcagcgcaattttcttacaggaaataactagttaccttaatcattttaagtagttattagca

SEQ ID NO: 330349 - DNA, 201 bp, Homo sapiens
ggtgcagtgagcccaacagattagaaaataattgccacggaaaagacattttgtggcagggcacaatgtctcacacctatactcccagcactttgaaaggstgaggcaggaggatcgcttgagcccaggagttcaagacaagcctgggcaacatggcaagacaccatctctacaaaagatacaaaaattagctgggtgcat

SEQ ID NO: 330350 - DNA, 201 bp, Homo sapiens
tttaattaaaattaagtttctaaaatgtatacagggttggtcacactttccatttcctgttctattagttttgctaagttttgtttcatggaatctgcccrtttaatctatattgtaaaactaattagcataaaattatataatatttctttatcatctttataatgtctgtagaaaggtcccttcttttgcttctgatac

SEQ ID NO: 330351 - DNA, 201 bp, Homo sapiens
gaaccactggcttccaaatgctcacccagaaatccactgttatacctggccttcattattgctcacggatacacatgtagtccaccatacacttgcccaaktggtttaatcttccagagctgggaaccagagtttctttgtgtcagagcatttctctttcccattcagaaggaagctggcagtctggacagcaacctggct

SEQ ID NO: 330352 - DNA, 201 bp, Homo sapiens
tttccatctctattctctgaaaaagaatatgctaaatggatattgtacagctcttaaatatttgatagtattcaccagtgaagccatttgtgcctaagaawtatttaattaaaattaagtttctaaaatgtatacagggttggtcacactttccatttcctgttctattagttttgctaagttttgtttcatggaatctgc

SEQ ID NO: 330353 - DNA, 201 bp, Homo sapiens
aggttttgatgagagctgttttaaactgacatattttaaattaaacctccctaatttccaaaaccaggcataactgccttccatgtttccctcacaccttycagaggctaatgagaatcacagtgctgcagggttctcctgggctctgggcagcagctggatggcgtgctccttcctggctgagaagataaatgtcacctc

SEQ ID NO: 330354 - DNA, 201 bp, Homo sapiens
tacaaaatttcagaatgttctcatagaatatatggccatgggtaggtggggtaaatgggatgaagcctttgggtggtggcagtaaatggtcgcttaagaargaatccgctgggttttttgaattctcttcattttctgtgttaactgtaattcaccatcccctttcacctttatccagggagcaggagtatctagcccaac

SEQ ID NO: 330355 - DNA, 201 bp, Homo sapiens
actgagggtcatgggtgaagtagctgtggcatgcaggaagccttcttatgggtaatttgaatgtaactgagttactatggaaaggaaagaaggggtaaaayggtgaagtcatcatgagacttattgcttgaaaatatacatgttagggatgagtacccagagatgggcaatgactaggtaaaagttcaaaacaagtggggg

SEQ ID NO: 330356 - DNA, 201 bp, Homo sapiens
cccatgattcaattatctccacctggccctgcccttgacccatggggattattacaattcaaggtgagatttgggtggggacacagccaaaccgtgttagycccccaatccctggggcaccccaggtttggaggttgagcagaggagctggcaaggagcttaagcagcaacagccagcattgagctcagaatgggtgtcag

SEQ ID NO: 330357 - DNA, 201 bp, Homo sapiens
agagaaggggtattctagacatagatgatttattgagacgttcgtgagatttctgttttcattcttatgaaatgcaggaatagaaaaccaaataccatgtrttctaacttataaatgggagctaaatgatgagaagtcatgaacacaaagaagaaaacaacaggcactggggtctatttgattggggaagagaagggagag

SEQ ID NO: 330358 - DNA, 201 bp, Homo sapiens
ggatagaagccactggaggtttttaaataggggtgtgacatgacctggttttaagattactttggatacaagagggagaagtgagtagagaagagccaaawgtaagcagattaattaaaacttgcagtggtacaggttggacttgatggtagaatgacgttggatgttttcaagttggaactgaagactttgctggtggag

SEQ ID NO: 330359 - DNA, 201 bp, Homo sapiens
gtctccagatttttggaatgttattaatcaatgtattagttatccattgctgcataattcattatcccaaaatgtaatgacttaaaaaacattacctcacwgtttcaggaatctgggagtggcttagctgggtagttctggctaggggtcttccgagaggttgtagtctgatgtcacccaaggcagaagtcatctgaaggc

SEQ ID NO: 330360 - DNA, 201 bp, Homo sapiens
cattggtcaggctggtctaaaactcccaacctcaagtgatcctcctgccttggcctcccaaagtggtgggattacaggcgtgaaccaaagtgcccagccakccacatcttattttttttttattatcatactttaagttctagggtacatgtgcacaacatgcaggtttgttacatatgtatacatgtgccatgttggtgt

SEQ ID NO: 330361 - DNA, 201 bp, Homo sapiens
agttttttctacagttctagaagttgttttatgtatctgtgtgctccaatgttggatgcatatatatttaggatagtaaaggcttcttgttgaattgaacmttttttcattatttgatgcccctctttttcctttttttaatgttggtggtttaaagtctgttttacgcaatttaagaatactgaccactgctcttttttg

SEQ ID NO: 330362 - DNA, 201 bp, Homo sapiens
tccaaaatgtataggagctcaagcaactcaatagtagtaaaaacacctgatttaaaaatgggcaaaggattggaacagacagttctcaaaatgacataccratgaccaataggtatatgaaaaaatgttcaacatccctaatcatcaaatgcaaatgaaaatcacagtgagatattacctcacaacttagaatatctatta

SEQ ID NO: 330363 - DNA, 201 bp, Homo sapiens
ttgacttaatgctttgtttttaaaggttggaatgagtcagggcattacatttccctccctggacacctttaactcatagacacaaaaggctccatcataartgacagaatatagctgaatgtgtggatagaccctgattgcacaatttaagtcaaccaagaagctgaacacaatgtggctgttgatagtagtgatgagagt

SEQ ID NO: 330364 - DNA, 201 bp, Homo sapiens
ggatttagtgctttaaactttccttttagcactgtttttgctgcatcacagagactttggtatatggagtcttttatttcaaagattttttttttgacttyggcattaaatttgttttttacccaaaagacattcagaagcaagttgttatatttccatgtaattgtgctgttgggggcaggggattttcttggtgtggat

SEQ ID NO: 330365 - DNA, 201 bp, Homo sapiens
actgtccaatatggtagatactagccacatgtaactgtcaagcacttaaatatgaattgagatgtgctataagtgtgaagtacacacaggatttcaaagayatccaaaaaaaggtgaaatagctcattaatatttttatattggttatatttttgaaactataatacattggatatactaagttaataaaatattaatttc

SEQ ID NO: 330366 - DNA, 201 bp, Homo sapiens
aagtttttgaggtagggatttagtgctttaaactttccttttagcactgtttttgctgcatcacagagactttggtatatggagtcttttatttcaaagaktttttttttgacttcggcattaaatttgttttttacccaaaagacattcagaagcaagttgttatatttccatgtaattgtgctgttgggggcaggggat

SEQ ID NO: 330367 - DNA, 201 bp, Homo sapiens
ttttctcacagacacacacagaggaatattatttagttgtaaaaaagaagaaaatcctgtcacttgccacgacatgaatgaacctggaggacattatatamgatgaaacaagccagacatagaaagacaagtactatatgatctcacttatatgtgaaataaaaaattagaactcatagaagcagagggtaaaatggtgat

SEQ ID NO: 330368 - DNA, 201 bp, Homo sapiens
ctcagttttgtactgtctcctctcctacttcctttatgggcatttcactgattagcacaacttctacttgtaaaactcagacctgttaggttatcatttakactaattttttttttaattaggaaaacattttagcaaaaattctgtttggatattatagaatttcataaatgttttcttaatattaatgtgaaatgatag

SEQ ID NO: 330369 - DNA, 201 bp, Homo sapiens
catggccattttaaaaatattgatctttccaatttgtgagtatggaatgttcttccgtctgtgtcatctgtgatttcattgagcagtgttttgaagttctygttgtagagatctctcacctccttggttagatatatttttaggtgttttttgtatggctattgcaaattagattacattcttgatttggctctcagcttg

SEQ ID NO: 330370 - DNA, 201 bp, Homo sapiens
accctttccaaaaagcagtcatgttaactgagcaaatgtaaatggaattagattgattagaatgaaaagagaatctgaaaagaggatcactaattgatgtrcaataaaatttaccacctagatatcaagaaagtggttgtttggacttagaattatctcagttttgtactgtctcctctcctacttcctttatgggcattt

SEQ ID NO: 330371 - DNA, 201 bp, Homo sapiens
tttttctggttctgtgaaaaataacattggtagtataataggaataaaattgaatctgtagattgcactgggcagcatggccattttaaaaatattgatcyttccaatttgtgagtatggaatgttcttccgtctgtgtcatctgtgatttcattgagcagtgttttgaagttctcgttgtagagatctctcacctccttg

SEQ ID NO: 330372 - DNA, 201 bp, Homo sapiens
tgtctcatatacacacacacataaaatgctaatccacaataaggaagggctcaataaatgctttagcatgttaataaggtatcacttagtgggacttgctrtatgtcatacagtatgctaacttatttccatcttacttaatccccatgaacacttctgtggaaggtactgttattattgtcattttgtaggtgaagaagc

SEQ ID NO: 330373 - DNA, 201 bp, Homo sapiens
ttccaaaaatgttggtctgaaattaatgaacagctgtagatctttagcttatggaaatattccattcaagtcaaaagtctgatctggaatttctttcatartgtattttgaaatccatatttagatcatacccactaatgaatgaacaccaattaccaaatagtacctacccaaatatggaatggtcagggcaatatttcc

SEQ ID NO: 330374 - DNA, 201 bp, Homo sapiens
gtctttttatctgttagcctgtaacttgatattatgcaacttataaaaacaataacaataatactgatgatgacaagaataataataaacatcacttattragcataaagtaggtaccaagtgcttttataaactatcaattttaagtgtttttaactggaagtaatgaaaaataaagccatagtgtctaatacaagtagt

SEQ ID NO: 330375 - DNA, 201 bp, Homo sapiens
agtgacattttatggtttaacttttgttttcatgacacagccccaatttgcatctctgccatagcattcaggacttccctgcttacagcatgtgtatttcyctgtccttgaagcatgtcttcgggaagctagttctaaagaccccagtttggcatctttcctgaagaagccaatccttctgtgactgtcttgtggaaatgg

SEQ ID NO: 330376 - DNA, 201 bp, Homo sapiens
gagactcgtaggcagatttctggagctccttatctgcagagcgtcctcctgtcctcttccctgctgaaagattcctgcccctcacaatctctgtagtccartgtgtttccttcatccagctgagaatgctcctccttgcatgggctccactccatatgtcaagactcgaaatgtgccctctggcaacaattcaggatcagt

SEQ ID NO: 330377 - DNA, 201 bp, Homo sapiens
ctaacccatattggccatatgtttgccataacaagattatctcattttatacatttctgccattgttattcctctaaggatattgaaagccagagaatttmtgtgactcatgcaaaatcacaccattggcaagagaaatggctggacttgaacttatctctacctttctctgaattctcattatttccttttattatacta

SEQ ID NO: 330378 - DNA, 201 bp, Homo sapiens
ataggaagccatttatttgaatggtcattcaacaaacattttattaagtgtatcttatgtgctaggcactgtggtaggtgatgcatgtgagctagctacamctacatatatttaaaaggactccaaaaaacttagttttatatatatatatatatatatatatatatatacacacacatatatgtatatatatatatacat

SEQ ID NO: 330379 - DNA, 201 bp, Homo sapiens
tatacaggagtctccccaccgtactcataattgaccttgaaaaagtatgtttgacttgaaaaggccaatactttctaaaaatagctgtagtttttgtaggrtaggtcaaaaacaggcatgtactccagcatgtggccagtagagggcgatcaagttaatacaatctgagccgtgggctttcaattaatgcatggaagtgaa

SEQ ID NO: 330380 - DNA, 201 bp, Homo sapiens
tcagaaactctattcagctcacaattccccagaagttattctctgctagacctcacaaagtctagccttgcttatgtacactgtaatactcactacagtckaggagactcgtaggcagatttctggagctccttatctgcagagcgtcctcctgtcctcttccctgctgaaagattcctgcccctcacaatctctgtagtc

SEQ ID NO: 330381 - DNA, 201 bp, Homo sapiens
ctcagctatagaaagtaatccttattctactatttagttaccatttttatttagtttggagaaatctacaatggcatggtgtaccgcttaaagattttaawgtaaatgttcagtaaaagatgatatttgaaagtagcttattttgtctggaaaactctgaaccaagctaattttcttctatttgtgtatcttttctttttt

SEQ ID NO: 330382 - DNA, 201 bp, Homo sapiens
agggcacctggcttctaacatggggtgcagtccctaccgccccagcttgagagattaaaaaggggccttgtgcctgtcctacctcaaccttctcctttcayagatgagagggtaggcccatgtgaactcagatcttctggctcctggtcatggttcttcttaaattatcaaatatatggaatcgaaagatctttcaggaag

SEQ ID NO: 330383 - DNA, 201 bp, Homo sapiens
tcctttcttctccttttttttaaaaatcaataccaccttctgattatctcttactggagacaaggaaaagaaatctagaagatgtcatatttcagggactyaccaagtttcaactatcatgtgaagtgatcacacacagttttttttgttttgttttgtttttgtttttgttttcttgagatggagtctcattctgtctcc

SEQ ID NO: 330384 - DNA, 201 bp, Homo sapiens
gccttgctctgactttcttaaatgctcttaatgtttgttgcaaggatggaggattacactgtgctcaccctacctgagcaaatgtcttctttgaactgtgwctagggactgggtaatccaccaaaatgatggaagcaaaaggttgccgatcacattgcagatctgctttgtggagggaagtagagcagcttttaaaaaatg

SEQ ID NO: 330385 - DNA, 201 bp, Homo sapiens
tgatagaatagtgcctggcttattcttataatagaataagtgcgtggctaattaaatgcaaggacgttttatttttaaaaacaaattcctttcttgaaacwtggtaaattttccctaggccagattattgctaagtcaatcaattttacattgttgtatgtggcattttctgctttttctcatagtagaaaagaagttctt

SEQ ID NO: 330386 - DNA, 201 bp, Homo sapiens
cactaatagtttagtgtgaattcttctagacctgcactgtacacataaaatctatcatacaaacaaaattttccaccagtaccttacccaagatgtacccrgccaggattatatctgttgggagcacaacttttttcaagagagaagtgccaaactattactctattctgagaaaggagaacaaatagcaacttctgacat

SEQ ID NO: 330387 - DNA, 201 bp, Homo sapiens
atttcctgaaaaatattcttccatagtagaagagcaagtatccaaatacaggtcttcctgggtactgtttcctctgcttttccttcctatcatgctttctscctaaggaggaaggaaagcttagctccagggtcttaaaactaattgcaatgaagatgttttcacattccatgaaacttgtcagcatgtttttctcttaat

SEQ ID NO: 330388 - DNA, 201 bp, Homo sapiens
aggtcttcctgggtactgtttcctctgcttttccttcctatcatgctttctgcctaaggaggaaggaaagcttagctccagggtcttaaaactaattgcartgaagatgttttcacattccatgaaacttgtcagcatgtttttctcttaattccaactttggttcagtttgaagaagcatctttttgctatttgcatgtg

SEQ ID NO: 330389 - DNA, 201 bp, Homo sapiens
caaaaaattggcctctctcttgcatctacatttcaaacaagtacgttgtattggtggaacctaatttgcttatgaatgctagctccaagggagtgtgggaratgtagttttttgcctcccaggtcctgtaatactgagatcaggatgatagaacgattgctgagtgccaactacctaatgcactgcactctgtgaaggagt

SEQ ID NO: 330390 - DNA, 201 bp, Homo sapiens
taaactacacacatatattctacacttattgattattcaagatccaaggggtcctcctttactataaagatacagccaacacatacaaaattacaacactstcatataaaaatttgacctacctaagataaatttggctaacaagcttgtttatgttgaaagatggttttggatccatagaatgtttaatacctgaagatg

SEQ ID NO: 330391 - DNA, 201 bp, Homo sapiens
gcatctacatttcaaacaagtacgttgtattggtggaacctaatttgcttatgaatgctagctccaagggagtgtgggagatgtagttttttgcctcccargtcctgtaatactgagatcaggatgatagaacgattgctgagtgccaactacctaatgcactgcactctgtgaaggagtttatgtttttccaattcttta

SEQ ID NO: 330392 - DNA, 201 bp, Homo sapiens
acctagttgtctatcctcattgtcatcatttattgggtacttactctgttctgtaccttgttctaagtaccttcaaatattattttatttaatctttaackctgttacataagtattatggtccccactttgcaggtgagggaaaaaaaacaatgcagagacttaaataacttccctcaaatcccacagttagtaaagatt

SEQ ID NO: 330393 - DNA, 201 bp, Homo sapiens
ttaagatggggaggagctgaggtggaatcaggaagggaacttaagatggagctgccagggagggagctgggaaactggaagagtgtggtatcctggaagaygaaagaagaaagggttctcaggcagaaggagctgttcatgggtcaagtatggtaaagactgaaaatgaccacggagtcaacaacttggaggccattcatt

SEQ ID NO: 330394 - DNA, 201 bp, Homo sapiens
gaagtgccaaactattactctattctgagaaaggagaacaaatagcaacttctgacattttaaaaagaaaaccttcctggacctctttgtaggctccctakagagggaaggaggatggcaaggttaggtctgtaagctgacaaattccagtcttgactcggtgctctggctggcagagacccgtgaagttgtttgtgtagg

SEQ ID NO: 330395 - DNA, 201 bp, Homo sapiens
aaatgtaccacaattattcatccattttcttctttgacatatttgcccaattaattgcaagattttgctgatgtgaatagatatctttgtttttcaaataygcatttctctgaatcacaagtgaaaatgagcatctagttacttgcttgggtatcttctactgtgagtttttagtttatattatttgcctatttttttatc

SEQ ID NO: 330396 - DNA, 201 bp, Homo sapiens
ttacagccaaattaatcatcaagcagtgttttattcccctgctcaaaaaccataatagttctctggcgaatgccatgaactagctactcaaaagggactcrtagttaccttttccctgggctttctttgccaaagactcagaaaatagaaaatactcaatttctcagccccccatgtaggtagggatggcatgatacattc

SEQ ID NO: 330397 - DNA, 201 bp, Homo sapiens
ctctgtggggcttatacagccctttcctcatacagccaataccacctagcttggccagagtctctgtggtcttatttcttccctagtgcatttaagaggayggttggatctcacggccacttctctctcctcagatgcattccttgcgcctgctcagccagaaccagccatctcagatctttctgagcatgagtgacaact

SEQ ID NO: 330398 - DNA, 201 bp, Homo sapiens
cccagcaaatatcttctcccagtctcaggcatttaactttgcttatacagacgatttaaaatgttaatatgtcacatttatctacttaactaacttttccwtgatagctgatagattttgtaccttatttcattaatcctcctctgtgctaagattataaaaatattatacttctctctaaattttataacttttcttttc

SEQ ID NO: 330399 - DNA, 201 bp, Homo sapiens
aaataatggtgtctcttacaatctatagcatcatagattttatgaagtatggttaacttagccaaggttgtaaggtactgtgctgagtaactttaaaggarttatctcatttggttcttgtttttttatagaaggtttattgagacaccataaaattcttccatttcaggtgtataatttaatgttttttttgtacatcca

SEQ ID NO: 330400 - DNA, 201 bp, Homo sapiens
cctataaaacactaagaaaagaaattgaagaggaacaaaaaactgtagtgagatatcccatgctcatgagctggaagaattaatattgttaaaacatctgwactacccagaatggtctactgattcaagcaatccctatcaaaataccaatgacattgttcatagaaatagaaaaaattcctaaaattcatatggaatcac

SEQ ID NO: 330401 - DNA, 201 bp, Homo sapiens
ggacactctggggacatccctagccatctgcccctcaggctgaatccagactcagcaaccttcctcccaacttcaggattaattcccagatgtcctttttytcaaatgtagggagtgcttctggttgtttttttttttttttttttttttcagacatcaggcacaaatgatccaagcagagcctgcagagtacattagact

SEQ ID NO: 330402 - DNA, 201 bp, Homo sapiens
acataatgagaagtttgaggatttgcagctgctagcgttgttccagttgttcaatgttattcataatgaagcctctagtactcacgtggtcttttccccaytgtgctaaaatgactgcatcaactccagccatcatgcccaccagcaggaagaaaggagtataaaatggaggaacctgaatcagaaaagtaaaaatatcat

SEQ ID NO: 330403 - DNA, 201 bp, Homo sapiens
aaaaacctatcattcccatggtaaatggtaaatagatagatagatagatagatagatagatagatagatagatagatagatagataggatggataggtagrtaggtaggtagatagaaaacaaactgtagcattactatatgttaacagtgatcaatctgaaaaaggaatcaagaaatcaatcccatttacaatagctacc

SEQ ID NO: 330404 - DNA, 201 bp, Homo sapiens
tgagagctggaacaagacaaggatgttcactttcactgcatttatgcaacatagtactggagtggtcatgagcaattaagcaagagaaagaaagaaaatgrttatccaagttggaaaggaagaaatcaaattatccttgtctgcaaatgagataatcttaggttttaaaaaaacctatcattcccatggtaaatggtaaat

SEQ ID NO: 330405 - DNA, 201 bp, Homo sapiens
acatttatagatctttaaaaaccagaaccaaaataatataacgaatgtcaacattcatgaaaaattgagtggtagagtaaatcacggatgttttacttctyggtatgttagaaatgttttgtaataaaaacaaaggaacagtgcccaatttgcagttaagtgaataaggtctgtgatggagggccgcagagataggtgaga

SEQ ID NO: 330406 - DNA, 201 bp, Homo sapiens
ttcctatcaaagaaaaaagagaaaaggtaactatgtgaggtgatggatatgttaattaatttgactgattatttcacaatgtctacaaatattaaaaagtmattctgtataccttaaatatatacaattgccttctatcaattatacctcagtaaagcaggaagaaaaacagaagggagacaagaacattaagggcacgat

SEQ ID NO: 330407 - DNA, 201 bp, Homo sapiens
taagcctcataaccctttaagaggggtattgtaactccttttttttatagtaaagcaaaaatgaaacttatggacacaacaggacagtggttgcctccaakgagggaggaagagaataggattggaaggttcacagctatatcagaaacatttatagatctttaaaaaccagaaccaaaataatataacgaatgtcaacat

SEQ ID NO: 330408 - DNA, 201 bp, Homo sapiens
atttagcatcaagtaaacaaaatcgaattttatcgcgaataatttttaaagacaagttcacctttttttattctgtaaatcttgataattgaaaaggaaasagcaagttgggttataacaatctaaaaggctgagagggtattgaggatgccagaagactgagtgctcatctatccattatcttttagttcagcctctgga

SEQ ID NO: 330409 - DNA, 201 bp, Homo sapiens
ctatttcaaaggcagagctgggattcccagtctagttctctctgcagcatcgtgcagcctaccacctgatggccacaaccatggtgcaaacttattctaasatcttgaaaggaaggaaggaaagtactttgcatgccttctcccttcatctctgatgtctaccccatggggatgttgcaagaatcaaataaaggaacagct

SEQ ID NO: 330410 - DNA, 201 bp, Homo sapiens
gtatgggggaaaccgagtaagattgcctgccacttccttgcctatcagtatttagcatcaagtaaacaaaatcgaattttatcgcgaataatttttaaagrcaagttcacctttttttattctgtaaatcttgataattgaaaaggaaacagcaagttgggttataacaatctaaaaggctgagagggtattgaggatgcc

SEQ ID NO: 330411 - DNA, 201 bp, Homo sapiens
gaagcaagacaaagacagcagtgagacctgttaggcggccactgcagcaacccggctaagactacttcactgaccgggacattcaccagttctccaaggaygctctcctatttcaaaggcagagctgggattcccagtctagttctctctgcagcatcgtgcagcctaccacctgatggccacaaccatggtgcaaactta

SEQ ID NO: 330412 - DNA, 201 bp, Homo sapiens
gtcagagacaacagtagatgttaatccagcagagcgaattctgtagtggggagtgaaatattatttaatcagcagtgcttcatacataattcaattaactrccttcactcatcagtattaacgacaacaggagcttggattaatgtgcacgagcctcataaaaaagctcccagactacctaagtgctgccaaaacttaata

SEQ ID NO: 330413 - DNA, 201 bp, Homo sapiens
ggtaaatggaatgtgaatgcaagctagaaagtttgatagaatgtctaatttgtcaaaataggatttttctggcaatacattacaaatgactgtgaaattgytttcttggcctgttaccaaacatgggtgaataattgagagttaactattatgagactttcatttggggatataaataatatttaaaaggattaagaactt

SEQ ID NO: 330414 - DNA, 201 bp, Homo sapiens
ctatcaccttaagcagaatacaatgataaataattagaatttttcttcacattccaccgtgaatttaaataataatgcccttagaacacctgaggcactgrggaggatttctgttcatggttacacggatgctaataaataactatatcagttctccaaagtgacctcatgtcagagctgaaggatagttggttccagtgg

SEQ ID NO: 330415 - DNA, 201 bp, Homo sapiens
ttcatactgtctctcaggacttctgcaaaccttcagtcggatgtgtcctgcccaaaactccttatattagagttgaaaaaattaaagcctagaaaagaaaygtgatttgactaaggtcacgtgcaaatttggtctcttgccagatctatgttcctttcattataccatgtagggtcttaatacatcattatccttggaagt

SEQ ID NO: 330416 - DNA, 201 bp, Homo sapiens
ggtttctggcccatcttattaaagccattctccttgacagacaaaactctaccatggatatggatataatgaggtaggtgttttagggtctaatatcatamaatatttaaatcattcaattctttttgctggaagtccatacttgagtaacttttgattaaaatgtagatttccctataatttttaataaattttagggca

SEQ ID NO: 330417 - DNA, 201 bp, Homo sapiens
agttcaaccaaagtttgaacatgtgaaactgggatgttctttactatattcttgacttaatgctttgtttttaaaggttggaatgagtcagggcattacakttccctccctggacacctttaactcatagacacaaaaggctccatcataaatgacagaatatagctgaatgtgtggatagaccctgattgcacaatttaa

SEQ ID NO: 330418 - DNA, 201 bp, Homo sapiens
tagtaaaagtctagaagaaaataaagtctgagaggtgattctttaacactgtttttagaaaagggtttctggcccatcttattaaagccattctccttgayagacaaaactctaccatggatatggatataatgaggtaggtgttttagggtctaatatcataaaatatttaaatcattcaattctttttgctggaagtcc

SEQ ID NO: 330419 - DNA, 201 bp, Homo sapiens
tccactcattgattgatgggcatttgggttggttccacatttctccagttgctaattgtgctgctataaacatgcatgtgcaagtatctttttcatataaygactttttttcctctgggtagatatccagtagtgaaattgctagagcaaatggtagttctatttttagttctttaaggaatctccacagttttccatagt

SEQ ID NO: 330420 - DNA, 201 bp, Homo sapiens
agaagagggccatatgagctaagataggagcagtgaggggcctagggatggttcagcttctagagttagggaccttatctcttcccaccacctattcctcsaggatatacctcaggccttccatgcaccaggggctcaatgtttgccaaacaaacttgggtcagaatagacagcagtattccttaaagaaaaagacaaagg

SEQ ID NO: 330421 - DNA, 201 bp, Homo sapiens
tttgtgtatcaaccataatcttgatattttatcagttttattctctttcttcttatatggctacgcctatttgttgatctctgggttgccatcacattcarttccattcacgcatcttttgtagtaaactataggaaagaaaaaaagacctatagaaaaggaaaattggtgagtagtaaaagtctagaagaaaataaagtc

SEQ ID NO: 330422 - DNA, 201 bp, Homo sapiens
cttgtacaggacactgggaccctttcccaaaatctctgcagttgggattagtaattcttcctttggttatattatcttttaaggtacatgtttcattcttsttggcatttgcattagttgcctacacatgagtctttgaaggtacatgatgaactctctcagggtagtggtggtagttcatttgtgtctgtggttctgacc

SEQ ID NO: 330423 - DNA, 201 bp, Homo sapiens
ttttttatttccacaagttattggggaacaggtggtgtttgcttacatgagtaagttctttagtggtgatttgtgagattttggtgcacccattacccgarcagtgtacactgcaccctatttgtagtcttttatccctcgcccccttcccaccctttccccaagtcctcaaagtccactgagtcattcctatgcctttgc

SEQ ID NO: 330424 - DNA, 201 bp, Homo sapiens
ctgcagttgggattagtaattcttcctttggttatattatcttttaaggtacatgtttcattcttcttggcatttgcattagttgcctacacatgagtctytgaaggtacatgatgaactctctcagggtagtggtggtagttcatttgtgtctgtggttctgaccctctggtacatagaaaagggctgtcgcatacacat

SEQ ID NO: 330425 - DNA, 201 bp, Homo sapiens
tttttacagctgcatagtattctatggttataggtaccacattttctttatccagtctctcactgatggacatttaggttgatttcatgtcttggctatcrtgaatagtgctgcaatgaacatactcatgcatgtgcctttatagtagaataatttatattcctttgaggccattatctttggcaaactaacacaagaaca

SEQ ID NO: 330426 - DNA, 201 bp, Homo sapiens
ttcttggcatttgcattagttgcctacacatgagtctttgaaggtacatgatgaactctctcagggtagtggtggtagttcatttgtgtctgtggttctgwccctctggtacatagaaaagggctgtcgcatacacatgctcagtaagtaatgctgacattgcttatatagcaagtagagaagcaactggtattaaagtac

SEQ ID NO: 330427 - DNA, 201 bp, Homo sapiens
caagttacataatctattagtgcttctgttttctcttctgtaaaatgtggatgatagaacttgtaaagcattagcacgcagtaaccagcacataataattkctttttggaggaatgatggacatgaagagaggattacagcagaaaacaggttaaggaactgctgaagagcttctagaaaatgattgggctggatataatt

SEQ ID NO: 330428 - DNA, 201 bp, Homo sapiens
ccattacccgagcagtgtacactgcaccctatttgtagtcttttatccctcgcccccttcccaccctttccccaagtcctcaaagtccactgagtcattcytatgcctttgcatcctcatagcttagctcccactgatgagtgagaatatatgatgtttggttttccattcctgagttacttcacttagaataatagtctc

SEQ ID NO: 330429 - DNA, 201 bp, Homo sapiens
attactagctgggtgatattgagcaagttacataatctattagtgcttctgttttctcttctgtaaaatgtggatgatagaacttgtaaagcattagcacrcagtaaccagcacataataattgctttttggaggaatgatggacatgaagagaggattacagcagaaaacaggttaaggaactgctgaagagcttctaga

SEQ ID NO: 330430 - DNA, 201 bp, Homo sapiens
ttagagatgtagctaaatcaaagccacaactctgtggagtttattaaaagggaggccagaagatcaggagacatatcaacaaaagtcaggtggagattggkcagggttggtagtgtaaaataaggtcagttctgggataaatcttgtaatcttaaccactgagtgccttttactggggacttgacacccttatactgggtg

SEQ ID NO: 330431 - DNA, 201 bp, Homo sapiens
cagataacttagtgcttaacattttgtttttggcatcagacacaagctcttgttctattaaaaactgtgtgacctggatacattacttagcatctctaagsctcagtttccttaactctaaattggaggtgataaggttctcatacgtcgatttttgcaaggatcaaatgagataatgcatcagaacaggctaacacagcc

SEQ ID NO: 330432 - DNA, 201 bp, Homo sapiens
ctgtaaagaatgatggtggtactttgatggtaattgcattgaatttgtggattgcttttggcagtatggtcattttcacaatattctacccacccgtgagyatgggatatgttttcatttgtttaggtcatctgtgatttctttcagcagtgttttgtagttttccttgtagaggtctttcacctcctttgttaggtatat

SEQ ID NO: 330433 - DNA, 201 bp, Homo sapiens
tgtggagtttattaaaagggaggccagaagatcaggagacatatcaacaaaagtcaggtggagattgggcagggttggtagtgtaaaataaggtcagttcwgggataaatcttgtaatcttaaccactgagtgccttttactggggacttgacacccttatactgggtgaggcaggagacggcacgcttaaagcagtaagc

SEQ ID NO: 330434 - DNA, 201 bp, Homo sapiens
tctgattgctctggctaggactcccagtgctatgttgaagaggagtggtgagagtgggcatccttgtcttgttccagttctcagaggaaatcctttcaackttttgccattctgtattatgttagctgtgggtttgtcatggatgacttttattacattatgtcccttgcatgccaattttgttgagagttttaatcataa

SEQ ID NO: 330435 - DNA, 201 bp, Homo sapiens
aagggaggccagaagatcaggagacatatcaacaaaagtcaggtggagattgggcagggttggtagtgtaaaataaggtcagttctgggataaatcttgtratcttaaccactgagtgccttttactggggacttgacacccttatactgggtgaggcaggagacggcacgcttaaagcagtaagcaccttctaagcaata

SEQ ID NO: 330436 - DNA, 201 bp, Homo sapiens
tcactgtgttatacaatagatctcttgaacttattcctcctatctaaactgaaattttgaatcctttgaccaacatcaggattattttaaaaggagagcarggggttacctggaatagtgtagatcagcctctcagagaaagtgggactcgtgctggacttaaaggaggcatcacatttacataaacagagaatgagtatt

SEQ ID NO: 330437 - DNA, 201 bp, Homo sapiens
gagggcttcaaatgccagaagtaaatctatccagaaaaataaagataattggccaactctcctttcataaggttaaaacaatggccttgtcttgacttttrttattcactctgttattcatttagcaaatatttatggaccacttaccatgttttgggtgatctactaagcaacttagggtgcataatcattatccctatg

SEQ ID NO: 330438 - DNA, 201 bp, Homo sapiens
ccagttaaaggctggttctgtctcaaatcctctcttatctaaatgaatagagctgttaatttctgttgtaacatattcttgttactggctgctaaagaatsctgagaatctcagtgcaaaagggactctcccgtctgattctagattcaagcagtcctccaacttaagcttcactaatactagttggagcaaattaactac

SEQ ID NO: 330439 - DNA, 201 bp, Homo sapiens
gcagagtcttagtgaagactgggagtctatattaatagaaacagagacttatttcaataaggggaaaacaaaatgtctgacctgaagtcaaaagttgaccrtgaatgagatacagggagcagtttcaaaagagaagacccaataaataaaaggagagtctagtctgagaggatcttgtggggagagcaaggtaagcaagat

SEQ ID NO: 330440 - DNA, 201 bp, Homo sapiens
gggctcagagtggatcaggaataacttttaaagtcatgagcctcaaaggactggccagtgtaaatggcctgtctctgtttctcctaggcagtcatcctttragtcatttcatatgatgtgcataatttaacaggggcaaagctgacacatctctgccattcatttctcaggctgccctcagttctctgtggataataataa

SEQ ID NO: 330441 - DNA, 201 bp, Homo sapiens
gtggaacttgggacaagtcatttaacctctctgtgcctcatctacattacaggaacaatggcagtaacagcctcatcaggttcttataatgattaagtgaraaaatgtatatgggaactcagcacagagtaaaccctcaaacaaggacagacagagacagagacaaagggagagacagagagggggataaacaaagaggaa

SEQ ID NO: 330442 - DNA, 201 bp, Homo sapiens
aggacagaccttactgtttttgcagctggggtgttcaccccaaaagcatgattgcactttggaaaccgtaataggcacatttccaagttcctcagggctcrgagtggatcaggaataacttttaaagtcatgagcctcaaaggactggccagtgtaaatggcctgtctctgtttctcctaggcagtcatcctttaagtcat

SEQ ID NO: 330443 - DNA, 201 bp, Homo sapiens
aaaatggctcagagactattgccaaaatacacccttgacacacatcctctcattttattctcaaaacaatatggatgggtggggtggggagagaataaggycttatctcaattttgtaaacaaagagaatgagaccatagagtctaaggggctggcccaccccagggccaatacacagactcagatctgctagggacactc

SEQ ID NO: 330444 - DNA, 201 bp, Homo sapiens
atctcatcttgccctgaatttgcctggacagagaatcttagcatatctgaccatgaagagatcttagagagcattccttgagttcagctacattattttayggatgaaaaatgtggcctagagagaaacacttgcccaagaccacagggccacttaaattacaaagtcaactctcaaaccaaggtcttttgacttaacgcc

SEQ ID NO: 330445 - DNA, 201 bp, Homo sapiens
tcagaagtctggacatggcttaaatggatcctctactgagtcccataaggctgaaaaaggtgtcattctggctgcattctcatctgaagtcaagctcatgygggtccttggcagaattcaattccatgcagttgtagggctgagacccttgtctcctatggcctgccactgctgaataagcagttcacaacacagtttgca

SEQ ID NO: 330446 - DNA, 201 bp, Homo sapiens
agaaatgtaatatgtgaggagacacaaaagctggcccagttaggttccactgctaaaagtcagccactggaaaagtttgaaagcaagaataacacaggaawtcagttctgaaaatccaaccatctcagttgagtcatccttaggcctggatagtcagagaacctttgcacaaagaacacataactttctcagatattacag

SEQ ID NO: 330447 - DNA, 201 bp, Homo sapiens
gcagttgtagggctgagacccttgtctcctatggcctgccactgctgaataagcagttcacaacacagtttgcatcttcaaggttggcaggaaagtgcctyacttactttaaatctccccatcctgagaaggcctagactctcttttaaaggtcaagcctattcagtataacatgcctttttattaactgaaagtcaacgg

SEQ ID NO: 330448 - DNA, 201 bp, Homo sapiens
gggaggtgagagaaagtgtccctgaagaaatggtgagtaggctgctatctgaaggatgagcagttctcccaggatagaagatggggaaaggtacaagtggkccacacggaagccttgtaataagagggaacatagcaagtttaaggagcaaagatagcaagtcaaggcttaatacaaaatgagctggagaactgggaagag

SEQ ID NO: 330449 - DNA, 201 bp, Homo sapiens
tggatggccattctcttgtcactagctatctacagcacctgcagtctgaatgtgtaattaagcacaaaattattatactactttcattgttccttcatttwctcccatgagaagtcatttttatccttgatccccagtatgtagcagtctagggtgggtgaacaaaggacatggttctgtaaagaacataggctttgacct

SEQ ID NO: 330450 - DNA, 201 bp, Homo sapiens
agcttgaaccagggcagtggcagcaaaaggagagagaagcaactggattctgcatgcattttgaaaggagagccaacacaaattactgctagacttggtaygctatggagaaaaagagaggagtcaaggtttagagccacagaaatgtacagtttccatgagagctcatttctggcaaatggctttactcaggaatcaaat

SEQ ID NO: 330451 - DNA, 201 bp, Homo sapiens
gctctaattttataaggttggtgttttatgggataagaaattcccagggacaggcattaaaagaaagtaaagttaaatttattcttggctgactacactcmatgaagaactgcaggagggcaaatacttgtatcccattcttttctggatggccattctcttgtcactagctatctacagcacctgcagtctgaatgtgta

SEQ ID NO: 330452 - DNA, 201 bp, Homo sapiens
tgctgatagcttgaaccagggcagtggcagcaaaaggagagagaagcaactggattctgcatgcattttgaaaggagagccaacacaaattactgctagasttggtatgctatggagaaaaagagaggagtcaaggtttagagccacagaaatgtacagtttccatgagagctcatttctggcaaatggctttactcagga

SEQ ID NO: 330453 - DNA, 201 bp, Homo sapiens
aatctttactagaatgtctcctaaaaatggtaagagattacgtggcatgacagggagcaatatcccctattaaaaaaaaaacttccctatagttacttatmctttaattgcttacagaaaggtgcaacagcaacggcagagaatatctactatctcatgtagtcttattcacttcactgaaaaacaccaaacacagttttc

SEQ ID NO: 330454 - DNA, 201 bp, Homo sapiens
atactttgcatccttccatgcaatcaagttgacactcaacattaaccatcacagagtccaagttggtatttttgatagtatacgtcactggataagagctkccactcagcacacctggggaaaagtatactttctctacagacattattttctactttgagttcctcaacatgaggatgcaaaaagttttaataaacaaca

SEQ ID NO: 330455 - DNA, 201 bp, Homo sapiens
aagttgggctgcctcatggcctatttctatacagtgcagcaccctaaagaaaacacaaatccactttcaaaaatttataataatctttactagaatgtctyctaaaaatggtaagagattacgtggcatgacagggagcaatatcccctattaaaaaaaaaacttccctatagttacttatcctttaattgcttacagaaa

SEQ ID NO: 330456 - DNA, 201 bp, Homo sapiens
tccctgactccctccccaaatttgtttcttacctccatctaattcagtcatacctaccttctttctgcctggggaacactccaagccattccctacctgargacatttgcatatgctattctgtctagtaagttccacttctagtctaggttgctttgcaaccctggctgcacattagaataattttaagccttaccttga

SEQ ID NO: 330457 - DNA, 201 bp, Homo sapiens
tatacaaaattgtaaataaaacatcagcaaattaaatccaacagagtattataaatacattgaactattttttaagtctttttcttccaggaatatgaccrtaggccactatcataaaaattcataaaaatctctcagtataattctgtacattgattaaagaaaacaatcacacaatcacttcaatagaagtaggaaaaa

SEQ ID NO: 330458 - DNA, 201 bp, Homo sapiens
ataaaattcagcatttgtgtttcaagcatcttattccctatttttttaacttatttgtagtacgtgaagcacaacataaaagcaattaacaattttaattraagaatgacatttttctaataatccaaatgctgggtgttgggttttattttatttctcttggttgttttgtttgtaccaaatattttataacttgagatg

SEQ ID NO: 330459 - DNA, 201 bp, Homo sapiens
tcctctatgatctttattctatttggagtatagtcaaatcttaattgttgattttatcgactttctttgtaatagttttcctcaaatggtttagaactttrtttgcaaaggaatcctctggaaagaagcaataatgaaatagaaaacaaagaagagatgatcaatacaagtaaaactggccctttgaaaaataaaactgat

SEQ ID NO: 330460 - DNA, 201 bp, Homo sapiens
atctcttgaggacattgaacataagccaaaacttaaaggctgagcaggtaccaaccagacagagggattgaaagtcatgaagcttaaggtacaatctagtmtctgtcacctagaagctctgaacccctagcctacatctgttggctgtgagaaagttagatattttcagaaatttattaacatctttagatctgggggaaa

SEQ ID NO: 330461 - DNA, 201 bp, Homo sapiens
aaacaataagtggcataaaagagacacgttaaaaaaaaactttcaaaattgaattatttccagttgtcactataaagaaaagctttacaatagagggaggytgactcttgaaggagtgagatttagacttgtagtgtctttaagggctatgttcatatctatagagatgagatagactaagataaatggcaaaaggaagca

SEQ ID NO: 330462 - DNA, 201 bp, Homo sapiens
agatctcttgaggacattgaacataagccaaaacttaaaggctgagcaggtaccaaccagacagagggattgaaagtcatgaagcttaaggtacaatctartctctgtcacctagaagctctgaacccctagcctacatctgttggctgtgagaaagttagatattttcagaaatttattaacatctttagatctggggga

SEQ ID NO: 330463 - DNA, 201 bp, Homo sapiens
agcttctaccatttcaaataataggagacagtgtgttacctcaagtcctcatagatgcatgtatgtgattctgtgttttctcacagatccatattcattcwttgattctcctacctatcagctgtgtggccattgttaagtgactcagtgtctccaaatttcagtttcttacctgaaaataaggttaataatgctgaacta

SEQ ID NO: 330464 - DNA, 201 bp, Homo sapiens
tgaaggaaaagaaccagattctatgagaaagatgatagcggggatcaatctggattgaacatctagaaagatctcttgaggacattgaacataagccaaarcttaaaggctgagcaggtaccaaccagacagagggattgaaagtcatgaagcttaaggtacaatctagtctctgtcacctagaagctctgaacccctagc

SEQ ID NO: 330465 - DNA, 201 bp, Homo sapiens
tggcatgatgcaaaatggaattatatttattctacacatacttattgagacttactctgtgccaggatagtgctaggtatgcatggatgaacaaaacagcrctaggtatggatggatgaatgactcattacaaagcttatgaacaagtgcagaaaaatatagccaacaaataatagatctacaatggtaaattagcgtaag

SEQ ID NO: 330466 - DNA, 201 bp, Homo sapiens
gctgtttaaggcagaagcatgagcctcaagcgtgggcatgacatgtatgagaaatggaacaaaggtcactgtggccagagtgcaaagtgacaagtgcaaartggttggagattggggtggtcaggggccagctcatagagggccttgtgggccacataaagtatttggatggagatcctggaaataaaggacaatagatag

SEQ ID NO: 330467 - DNA, 201 bp, Homo sapiens
gtgattcatctttcactataagcctttgaagtgtctagtcatatacataagtaatcttttattcaactcttattttctgtgtatgtattcattgttcacaytggatttattttatgtaaatcaagtccctagacatgagggaaacaaagcaaagccagattaattggctaattttcaaagactcattctacattgattgca

SEQ ID NO: 330468 - DNA, 201 bp, Homo sapiens
agaacctaacaaggatcagctggcaaagcagaaacgcaggttgctagtccttagtcccagcacctcaaagcaaagtacagaaagttagatttgaagctgarggacagtggcttcataaatggcatggaaggtattttatgttaagatttcagagagtacagtttctgtccttggcttcataggaggtcagcgcaatacagc

SEQ ID NO: 330469 - DNA, 201 bp, Homo sapiens
atgtttgttaattatttgtgggaggcagagatttcttttcctgttttgtttcctgatctgtaaatgctaagaacaatgcctggcaaaaagtaagagctcastaaatcttatcgactaaatgaatattcaagtcacttcctagaaaaattttcttctattatttctttgattatcttctcccatctgttacccctactctct

SEQ ID NO: 330470 - DNA, 201 bp, Homo sapiens
cagggaccatgctggagcccggggaaacagtgagcacagcccctgccttcaaagaatatatggtaaaataaaagaaatacatatgcaatctggctcttacratgtactgtggtatttgcttgtagggagatgataaggtattatgggaacccacaggacaggcatctttataaactggagggcatccgtggggagccatga

SEQ ID NO: 330471 - DNA, 201 bp, Homo sapiens
acttcaatctctcccaaaacaagggttccatggacatacatggatgggatctgcctactgtctcctcagtttcagcaggagcactgtgtgtgtgttgtgtgtgtgtgtgtgtgtgtgtgtgtgtgtgtgtgtgtgtgtatggggaagatgatgaggacaggtagcaggggacttaaatacataattactatctctttaaca

SEQ ID NO: 330472 - DNA, 201 bp, Homo sapiens
tgcacaaatgtgctagccataacaatttacaatgttccagcagaggcaaggaccaagacacataggagccaagtgttttaataacttcctgtgctagcagytataaaaatgtaattgttggtgcacgttcaaagaattaaaatatggcaaggtagaaggagctcttaaagccagctttcagaactacggctttgcccttgt

SEQ ID NO: 330473 - DNA, 201 bp, Homo sapiens
actaaatgaatattcaagtcacttcctagaaaaattttcttctattatttctttgattatcttctcccatctgttacccctactctctcattctggatagkttttgcaacacatgggtctttaatgcctttttttctttccatttataatttccatatctatcgggggaaattcacccccgatatttcacgtaagttcttt

SEQ ID NO: 330474 - DNA, 201 bp, Homo sapiens
attataagtcaatagagccaagagatcaatacattttagagaaagttctctgaaacagaatttgtgaggatgtaaaaggatctttttgaaaagtttatcaktacatcaacatagcagacaaaaccccaatagctcccctggaccatgaaagtctggtaaagaattgtcaatccatgaaatggctttgacagctgttctcca

SEQ ID NO: 330475 - DNA, 201 bp, Homo sapiens
ctctgtattcctcctcgttgtggaccaaataaataagtaaacgctggtttgtgcagaagtttggtgtttatgctactcctgtcactgctctgtattttctrcttgtttatctgtgatttgcgtgccttgtcattatttttatgctccttggcggccacttactttacaactatctgtccttttatattgtttctagactcc

SEQ ID NO: 330476 - DNA, 201 bp, Homo sapiens
tttcacgtaagttcttttctattttccctaagtgttggccagtctgagaaataagggaaagagtacaaaagagagaaattttaaagctgggtgtctggggkagacatcacatgtcggcaggttccgtgatgccccccaagccgcaaaaccagcaagtttttgttagtgattttcaaaaggggagggagtgtacaattaggg

SEQ ID NO: 330477 - DNA, 201 bp, Homo sapiens
tttcccatcagtgttttagaagaatgacaaaaccctgtccttaaaatctccatgttttccagataaagaccctgaggtctaaaagggagcagtgactcacygagcacacctacctactgaatgacagagctgtcattcaaactcagcccctttgactcccagccctgtgctctttctaatattcatcccctacagtcaatc

SEQ ID NO: 330478 - DNA, 201 bp, Homo sapiens
taccttgtggccactttctgtacactgattacttgtgtagttcaaattttgacattttaagaattcatttaaggaattaattgcaactttcatcattaccyctttttactttgaggtagcaccagatttcaacgttattaaactctgcagctccatgaatgttgaagagacgagccagcacctaattgccttcatgcatta

SEQ ID NO: 330479 - DNA, 201 bp, Homo sapiens
ctggctccctcagcaaacttcaatctctcccaaaacaagggttccatggacatacatggatgggatctgcctactgtctcctcagtttcagcaggagcactgtgtgtgtgttgtgtgtgtgtgtgtgtgtgtgtgtgtgtgtgtgtgtgtgtgtatggggaagatgatgaggacaggtagcaggggacttaaatacataat

SEQ ID NO: 330480 - DNA, 201 bp, Homo sapiens
cctaggtctcctgtatgaccaaagactgcctgacctcactgaacattaacaatgtccagcaggggtgaagctgctgccacccctgccctgtgaacctattkacttggcctcagtttctcaccagggaccactcattggccagagtaatctcgtgaggaaggtggagaaagaaaaccgtagagcaagccaactggctgatca

SEQ ID NO: 330481 - DNA, 201 bp, Homo sapiens
tggctccctcagcaaacttcaatctctcccaaaacaagggttccatggacatacatggatgggatctgcctactgtctcctcagtttcagcaggagcactgtgtgtgtgttgtgtgtgtgtgtgtgtgtgtgtgtgtgtgtgtgtgtgtgtgtatggggaagatgatgaggacaggtagcaggggacttaaatacataatt

SEQ ID NO: 330482 - DNA, 201 bp, Homo sapiens
aacaatgtccagcaggggtgaagctgctgccacccctgccctgtgaacctattgacttggcctcagtttctcaccagggaccactcattggccagagtaayctcgtgaggaaggtggagaaagaaaaccgtagagcaagccaactggctgatcattccctgagaatcttggcgagatgaaggtgcctctcatccgtggcca

SEQ ID NO: 330483 - DNA, 201 bp, Homo sapiens
ggctccctcagcaaacttcaatctctcccaaaacaagggttccatggacatacatggatgggatctgcctactgtctcctcagtttcagcaggagcactgtgtgtgtgttgtgtgtgtgtgtgtgtgtgtgtgtgtgtgtgtgtgtgtgtgtatggggaagatgatgaggacaggtagcaggggacttaaatacataatta

SEQ ID NO: 330484 - DNA, 201 bp, Homo sapiens
gccacccctgccctgtgaacctattgacttggcctcagtttctcaccagggaccactcattggccagagtaatctcgtgaggaaggtggagaaagaaaacygtagagcaagccaactggctgatcattccctgagaatcttggcgagatgaaggtgcctctcatccgtggccaagtgtaggaccagaaggtaaacatctga

SEQ ID NO: 330485 - DNA, 201 bp, Homo sapiens
gctccctcagcaaacttcaatctctcccaaaacaagggttccatggacatacatggatgggatctgcctactgtctcctcagtttcagcaggagcactgtgtgtgtgttgtgtgtgtgtgtgtgtgtgtgtgtgtgtgtgtgtgtgtgtgtatggggaagatgatgaggacaggtagcaggggacttaaatacataattac

SEQ ID NO: 330486 - DNA, 201 bp, Homo sapiens
acctggttgataaaactgaaggccgttaccatctctccctactcccatcacttagccttccagaatattacttcagctctgcttctgagcaagcacatggstctcatgaaagggactcagctctggtttgctttctgtttcttaaatgataaactgtgagtttgttctccctgaagtctgcctctgttactgctttggttt

SEQ ID NO: 330487 - DNA, 201 bp, Homo sapiens
cagcaaacttcaatctctcccaaaacaagggttccatggacatacatggatgggatctgcctactgtctcctcagtttcagcaggagcactgtgtgtgtgttgtgtgtgtgtgtgtgtgtgtgtgtgtgtgtgtgtgtgtgtgtatggggaagatgatgaggacaggtagcaggggacttaaatacataattactatctct

SEQ ID NO: 330488 - DNA, 201 bp, Homo sapiens
ccgtaaatgaatacctgaggctggataattcataaagaattttgagataaagagattcatttggctcatgattctacaggctggtgtacaagaagcatggyaccagcatctgcatctggtgagggcctcaggctgtttctactcatagtgcaagtggaaggggaggcagcatgtacaaagatcacatggtgagagaggaag

SEQ ID NO: 330489 - DNA, 201 bp, Homo sapiens
gcacaagtatcttttttctataataactcttttcctctaggtagataccgagaagtgggattgatggattaaacagtagatctacttttagttctttaagkaatcgccacactgttttccatagtggttgtacaagtttacattcccaccaacggtgtaaaagtgttcccttttcacagcatccatgccaacatctattat

SEQ ID NO: 330490 - DNA, 201 bp, Homo sapiens
ccctgtttgctccgaggctgcaaggaagatttactggctgccagtggcagctgttggtggtgcagcagggacacaacatccacccctacagggcagttccrttcctaataaggaaaattcactttacacacgctttaggggaaatgtcctgggatggagccagagccagatgggctctgagcttatgaaaagcatgcttgt

SEQ ID NO: 330491 - DNA, 201 bp, Homo sapiens
catcactgaagcagttctggcagccatagagtcaggggaaaacacatagttttaatttctaggtcacgatatgtatgctttttctctgtaaaaaatggcartggtgctctctctgtctcctctgcagcctctcttcctggctctgtctcttactgtgaaatgaggacagaccttactgtttttgcagctggggtgttcacc

SEQ ID NO: 330492 - DNA, 201 bp, Homo sapiens
aactatgattagagtgcagggctggggtcagggtgttatcgttttaaacaaggatgagatcagtgctggtctgagccatattgaagtctgaggcaaaaggraaaaatcaataagactgatcttgcctttatttaaagttttaaagttttgttcatcctagggtttttggcattaaaacttctgaatttttaagtacattac

SEQ ID NO: 330493 - DNA, 201 bp, Homo sapiens
tgtgtgaccttgggcaagttacttaacctctctgtgcctgctttttcatctataataggcagcacatataaaacagacaaggttcacaccccatagggttyttatgggattacataagttaattcatgagcagtgctgagaagagggcctggtaaagagtatattctacattaataattttaataatgttacaaagatggt

SEQ ID NO: 330494 - DNA, 201 bp, Homo sapiens
tgtctgttttgttatctgaccattgctctcttccctggcaaggtggcaaatcacatagtgaatttcatttctgaatgggtagttaatttttttacacgttycatcaaaaaaatggcacataaaatgcccaagatagttgtcatcactgaagcagttctggcagccatagagtcaggggaaaacacatagttttaatttcta

SEQ ID NO: 330495 - DNA, 201 bp, Homo sapiens
tccagtctcctgccagggcccctcattggccaaacccaactagcagcctgagagtaagggagccactgctgaccctaaaggccggcctcccagaggagaawcaggtgggaaagagtggaggcaggagctaggggtaactctgaatgtccacacaagcagggctctgaaggatgcatggaaaatgaattaagcatgattaaa

SEQ ID NO: 330496 - DNA, 201 bp, Homo sapiens
ccctagccatctgcccctcaggctgaatccagactcagcaaccttcctcccaacttcaggattaattcccagatgtcctttttctcaaatgtagggagtgsttctggttgtttttttttttttttttttttttcagacatcaggcacaaatgatccaagcagagcctgcagagtacattagactcggtctgaaggcactag

SEQ ID NO: 330497 - DNA, 201 bp, Homo sapiens
catgaacttcaggaggccagaagagagccaatttgtctatgtttttgaaatcgcggagccagccccaggaagagactgtgctgcaggcacagggaggactygcaacctctggtggggacttagactccaagccaaaccactttcaggtttggcagttttcactcttcctggaagctcagtcgggggatgttttgcagggac

SEQ ID NO: 330498 - DNA, 201 bp, Homo sapiens
gattttgtttgtactgagggtaaggaaacagtgatctcttaaaatattcaggactactaaaatacaacaggtgcattgccagtttcctaatagtatatctygaaaccagaacaacacacccgctgataggagtcatgagtttttgcttttgagtagtgatatgaacctaagtgtgagttgcattgaaaattaatgcgctgc

SEQ ID NO: 330499 - DNA, 201 bp, Homo sapiens
ttctcaatgtgcctggctttatggagtagcttcattcctacaagtgtattctgtagatcaatatcaatccccggtgcctattgactttacagcacagttcyagtattgctttatctttacagagcaaatttttattatcagaggcttctaatcctttagctttaaatgtctctattcctgcacttcagcttttctgaaatt

SEQ ID NO: 330500 - DNA, 201 bp, Homo sapiens
ccttgtctcctatggcctgccactgctgaataagcagttcacaacacagtttgcatcttcaaggttggcaggaaagtgcctcacttactttaaatctcccyatcctgagaaggcctagactctcttttaaaggtcaagcctattcagtataacatgcctttttattaactgaaagtcaacggattaagaacgttattcaca

SEQ ID NO: 330501 - DNA, 201 bp, Homo sapiens
caaaagaagaaaccactccacatagtctgagaggtagtatagtaagtgttgtgcgtagagacctcattaatggccaacacctgttttatttgcaactcacwatctttctagttaagaagagttcagagcctgacctgcacactatattgggagataaaacaatgagatgctcattctcaatgtgcctggctttatggagta

SEQ ID NO: 330502 - DNA, 201 bp, Homo sapiens
gagatacagagaaattgccaggttctttttaacaagctcttacaggaaccaatagagcaataacttgctcattactatgaaggtggtaccaagccattcayaagggatctgcctctatgacccaaacacctctcattagaccccacctgcaacattgcgaatcaaatttcaacatgaggtttgaagggtcagatattcaaa

SEQ ID NO: 330503 - DNA, 201 bp, Homo sapiens
tgatcagtagctgcattagattctcacaggaggtcaaaccctattgtgaactgcacatgtgagggatctaggttgcatgctccttatgataatctaatgcytgatgacctgtcactatctcccatcgcccctagatgggaccatctagttccaggaaaacaaactcaggactcccattgattctacattatggtgaggttg

SEQ ID NO: 330504 - DNA, 201 bp, Homo sapiens
ctctaactctgacccttctgcctcccacttttcagaatgtttgtgattgcatttggcccatctggataatctaggatgatctccccatcgtaagatccttsacataatcatatctgcaaaatatattttgccatataaggtaacacattcacaggtttggtggattagaatatggacattttgggaagaccattattcttt

SEQ ID NO: 330505 - DNA, 201 bp, Homo sapiens
atatccagactagctaggacatgtgggagacttcagagagaagactgggtgcagatagatgttctgagtttgaagaggccaaggctgtatataacctccaygaaaaccactgtctgcagtgcccagccataggccacccccttagacctcctaactccctagtcacaagaggctgtgttagtttgtacaacaccagacaca

SEQ ID NO: 330506 - DNA, 201 bp, Homo sapiens
catgtatactttggggtttgtgtgcatgtgtaatggcattgccccaattcacttgtcaactgtcatgaattcaagggtttccctgaggtcatgtcagcatragcttacagatctccacgatattttccaatatcttgagccctctgccctttttgcctgtgatgtcaaaaacctccaccacagttatttatattcttgttt

SEQ ID NO: 330507 - DNA, 201 bp, Homo sapiens
ctgagtctggccaacctgtaaggtcatgaacctacccaggaacagggtaccaggattggtgccccccagggccatatggaaatgcagtaggcacagttatycaaaggaaaggaagggtgctgttaccaagggaagagggataaataaatatatgctgggcaagataacaacagatgcctgtacccacactctaccctttgc

SEQ ID NO: 330508 - DNA, 201 bp, Homo sapiens
cttataaagtactgataatttgagaaaagggctcttgtgttaccaggctctgctatttttttcattctctgaataatgagcacccatttagccgaatcacraatgtgaaggaagagccgtaatttccaattcctccctgcccactctctcctcaggccacaaactgaaatcatccctcataggtgtagatttaaaaattgg

SEQ ID NO: 330509 - DNA, 201 bp, Homo sapiens
aataacttaattgtacattttaaaataaccgaaagagtgtaattggattgtttgtaacacaaagggtaaatacttgaggggatggatacctcattccctgytttgtgattatttcacattgcatgcctgtatcaacacatctcatgtagcccaaaaatatatacaagcattatgtacccacaaaaatttttaaaaaggaaa

SEQ ID NO: 330510 - DNA, 201 bp, Homo sapiens
attttgatcttgttgatttccttttttttgtctttttttcactctcatttttaacattccctttcatttactttcaatttaatttgttttttattttatcttcttaagatgaaatcttagaccattgcttttatagcttttattttcctttctaatgtagacatgtaacactataaatttcccccagacgaactgctttaa

SEQ ID NO: 330511 - DNA, 201 bp, Homo sapiens
atgacttgcttcccttgagggcaaaacaaccagagagagactggaaagagaaaattaatgacgattcacacacacacacacacacacacacacacacacasacgagagagagcgagagagcgagagagagaacaataggaacctagttttccagtttctctgctcaaaaaaaaaaaaaaaaagaatgtcttccagagtttg

SEQ ID NO: 330512 - DNA, 201 bp, Homo sapiens
gattaacatcttcatgatgttttctccatccctttccttttgacctgtgtctttgtgtttaaagaatattccttataaacagcatatagttgactcttgctttttttttttttttttttccgagacagagtctaactctgtcacccaggctggagtgcagcggcgcgacctcagctcactgcaacctccgcctcctcggtt

SEQ ID NO: 330513 - DNA, 201 bp, Homo sapiens
gcattcgccaccatgcctgtctacgttattgtatttttagtagagacggggtttcaccatgttagccaggctggtcttgaactcctggcctcaggtgattygcctgccttggtctcccaaagtgctgggattacaggcgtgagtcacttcgcccagccagactcttgctttttaaatataatctgacagtctttgcctttt

SEQ ID NO: 330514 - DNA, 201 bp, Homo sapiens
aactgttttttttttcttgttaacactttttgctttgctctccccaaatcctgaagcctcttcttccagtctcctgttttctgtttccttccacctcttcrctgactttccagattaaactctgcattgcggatctctgacagtttctctcctgctttgctaaccactttaaaaaatagacatttaaaggccttctgtgtg

SEQ ID NO: 330515 - DNA, 201 bp, Homo sapiens
tttgttttagtttgtatgactccttttattcttgtctgcgagtttactaatattactttggcattgtccatctactgataaggctatacaattccttttgtttttttttttttttttaaatgagatggagtctcactctgttgccaggctggagtgcagtgacgtgatctcggctcactgcaacctccacctcccgggttc

SEQ ID NO: 330516 - DNA, 201 bp, Homo sapiens
gactccttttattcttgtctgcgagtttactaatattactttggcattgtccatctactgataaggctatacaattccttttgtttttttttttttttttwaatgagatggagtctcactctgttgccaggctggagtgcagtgacgtgatctcggctcactgcaacctccacctcccgggttcaagcgattctcctccct

SEQ ID NO: 330517 - DNA, 201 bp, Homo sapiens
ctgagtaacaaagaagctgatgggaggttattttaggattatttcttgaagaagttgaggtttaggattattttctggagaacttgaaacattttgttttraatgggtctatatatgccaaatctttgaatgtgagcacattagttcgaagtagggaagaaatgagattaataacgtatagagtgaagatggcactggggg

SEQ ID NO: 330518 - DNA, 201 bp, Homo sapiens
actaatattggcagaaccactattactagctgctggtattgattgtttagttcatgtttaaactttacaatagccttcaattcttaccgaaatcatgtggrtaggcattatttatcatgcctatagaggtgaacagactgagactcagtgatattaaataatttagttaaagacagaaagcttgtgggtggatgagctagg

SEQ ID NO: 330519 - DNA, 201 bp, Homo sapiens
cacatggtgagagaggaagcaagagatacagagaaattgccaggttctttttaacaagctcttacaggaaccaatagagcaataacttgctcattactatraaggtggtaccaagccattcataagggatctgcctctatgacccaaacacctctcattagaccccacctgcaacattgcgaatcaaatttcaacatgagg

SEQ ID NO: 330520 - DNA, 201 bp, Homo sapiens
taacactgtttttagaaaagggtttctggcccatcttattaaagccattctccttgacagacaaaactctaccatggatatggatataatgaggtaggtgttttagggtctaatatcataaaatatttaaatcattcaattctttttgctggaagtccatacttgagtaacttttgattaaaatgtagatttccctataat

SEQ ID NO: 330521 - DNA, 201 bp, Homo sapiens
tccccatgcaatccaccaaacgagttgatagcctatgatagacatgtaaacagattattaacgattgcatataattgttggtttaatgaaagtgtaaattsagctctatggaagcaaaagtaggaacactgagaaagcctcccaaaatgggtcacatttaatcaggccttaaagaatgaactgaattcagccacatagaac

SEQ ID NO: 330522 - DNA, 201 bp, Homo sapiens
tacatgtctgttttgttatctgaccattgctctcttccctggcaaggtggcaaatcacatagtgaatttcatttctgaatgggtagttaatttttttacaygttccatcaaaaaaatggcacataaaatgcccaagatagttgtcatcactgaagcagttctggcagccatagagtcaggggaaaacacatagttttaatt

SEQ ID NO: 330523 - DNA, 201 bp, Homo sapiens
ctgcagcctgtttgttttggctctagcactatacgtattttatccttaggagtggtgttacatgtctgttttgttatctgaccattgctctcttccctggyaaggtggcaaatcacatagtgaatttcatttctgaatgggtagttaatttttttacacgttccatcaaaaaaatggcacataaaatgcccaagatagttg

SEQ ID NO: 330524 - DNA, 201 bp, Homo sapiens
gttcagtgctttttgcttaattctgaatggcccactttgaaagagtatttcaattgagctagaattttaatcagctggctagaagttgggagaacaagagraataatcctgagggtaaatgtttaaaaatgcatcaaaggctgttggaaaataagctcttaatctgtgtcatgttggagggaaagaatgttgacaagagga

SEQ ID NO: 330525 - DNA, 201 bp, Homo sapiens
aacaggtagtatttctcgaattggactgtactccaaagcccctcctgatgtcttactttatgacatcaattgttttgctacaaaattgtatgtaaaccttygtgtttgagagtagaattttgtttcaagttatcttaagaataaaacttgcattttaatgagccctgtggcatattgaataactctctccattggaggtag

SEQ ID NO: 330526 - DNA, 201 bp, Homo sapiens
tctgtcggtgtatctctttgtctgagagcaccagtcattggattagggccagccataatgacctcatcttaactaattatatctgcaaagaccctatttcytaataaggtcacattctgaggttctgatggacatcaaatttgtgcggtgggtgtgggtgtttctatgcaatccactctacccaccatcatttctgttttg

SEQ ID NO: 330527 - DNA, 201 bp, Homo sapiens
aatcagggtattgagctgcatggtttccaaagaaccattccagctctgatatttttttgtgagcttgctaagattggtttggaagttatagttagcagcaytaaggaatagaatattgatttcatccacaggataattttattatgttctcaatatcagtgtttgtaagtggaggcagtgatgcaagtctctctctctaga

SEQ ID NO: 330528 - DNA, 201 bp, Homo sapiens
ggctctttcttctagcaattgctagtatggaatcaatatgttggggactattgtgttcactgctgtattccaagtgccagaaccagaactgacatctagcmggtgccaaaattctatcattagaaacgcttttgattacttctgattcccagtgatcttttccttatcccaactaatgtagttgggttctaaattgcattg

SEQ ID NO: 330529 - DNA, 201 bp, Homo sapiens
ggctatatcagaagacaatacttgttctttctagtgatacaagaattatcagtaatttggagcagggcagggataagcatgggataagcaaggagcttgcyttgggtgcaaatttaagagggtgccaccaggaaactcctaaatcaagatatgtaatattttaataaaacatttttaaaaaatcaaacttcatgcaaaaaa

SEQ ID NO: 330530 - DNA, 201 bp, Homo sapiens
attttcaattttaacttttataatttctaagaaaaatatttaaaattattttaaatatacgttatactagcttaggctaataaaatagatctctagcatctttattttatgtataagtaagaatagctttttattaacacaggacactataaaacacaagttctttttaaaatggtagaaatggaaagctcaaaaatgcat

SEQ ID NO: 330531 - DNA, 201 bp, Homo sapiens
ttttcaattttaacttttataatttctaagaaaaatatttaaaattattttaaatatacgttatactagcttaggctaataaaatagatctctagcatctttattttatgtataagtaagaatagctttttattaacacaggacactataaaacacaagttctttttaaaatggtagaaatggaaagctcaaaaatgcatt

SEQ ID NO: 330532 - DNA, 201 bp, Homo sapiens
ctcatttggtccacacaatggatctggaagcagtcggagcaagtgagatttttttaatcaccattttacagaagaaaaaactgtgaccaggagagctttastaacttgtctaaggtcacagagctaataaattacagagctgtaactcagtccttggactccagttacagcggtcatgtcctctccaccacactgactctc

SEQ ID NO: 330533 - DNA, 201 bp, Homo sapiens
tttcaattttaacttttataatttctaagaaaaatatttaaaattattttaaatatacgttatactagcttaggctaataaaatagatctctagcatctttattttatgtataagtaagaatagctttttattaacacaggacactataaaacacaagttctttttaaaatggtagaaatggaaagctcaaaaatgcatta

SEQ ID NO: 330534 - DNA, 201 bp, Homo sapiens
caaacatttaaagacgaattaataccagtccttgtcaaacactttgataaagttgaagaggacagaattctcccaaactaattttacaatggcagcatgaytttcatatcaaagccaaataagaacactaagagaacagaacattacaggccaacatccctgctgaacatagatgcaaaaatcctcaacaaaatactagca

SEQ ID NO: 330535 - DNA, 201 bp, Homo sapiens
gtttggcctcctgaagaatgattccaacggaactgcctgtgccctgtatttcaggtcccccaggcccagttggcactacctcattccaaagatgaggggcrggggagagcataggcttgattatatggagctatgacttttcttactttcatcttaattcctcttttaatacaactttgtattagtctgctttcatactgc

SEQ ID NO: 330536 - DNA, 201 bp, Homo sapiens
aatggcagcatgactttcatatcaaagccaaataagaacactaagagaacagaacattacaggccaacatccctgctgaacatagatgcaaaaatcctcarcaaaatactagcaaattgaattcaacagcacattaatagaatcatacaccctgatcaagtaggatttatcactggaaagtaaggatggtttaacatacag

SEQ ID NO: 330537 - DNA, 201 bp, Homo sapiens
cttttgcttgtcctgaattatttagaaatgcattttaagcatgatacctgtttcctccatcctttcaatactgtttattgactgccttctgtataccaggmacttggatacaacgaaacaattggatagaatacacaccaacagagagggagtagtttttcaccttgaggaattgaggaggtaaataaaaggagtgtaggt

SEQ ID NO: 330538 - DNA, 201 bp, Homo sapiens
tgaattatttagaaatgcattttaagcatgatacctgtttcctccatcctttcaatactgtttattgactgccttctgtataccaggaacttggatacaaygaaacaattggatagaatacacaccaacagagagggagtagtttttcaccttgaggaattgaggaggtaaataaaaggagtgtaggttgtgaaaaaaaaa

SEQ ID NO: 330539 - DNA, 201 bp, Homo sapiens
ctttgccccaacccccaccccaggtccacagaaatattgtcttccacaaaactggttcctcgtgccagaaatgttgatgatatggtttggctgtgtccccrcccaaatctcctattgaattgtagttcccataatccccatttgttgtgggaaggagcccatgagaggtaattgaatcataggggtcgttacccccatgct

SEQ ID NO: 330540 - DNA, 201 bp, Homo sapiens
caaaatgtgttattcacataatactgcttgcagctcagctctcttaccatccatctaaacatgggagagaaaagaaaaaaacatgagctaagttttacagrctagctccacctgtcaagcagcctgagacaaatggttttacattagttaaaaaggtaagactggtagatctcctggacagcggcagaaacagtcacacac

SEQ ID NO: 330541 - DNA, 201 bp, Homo sapiens
gcaactattaatacacagctatatcatctctatatattatatgttactggcatatataaatatatcattagaagtctgtttctgttatataggtaaaagcytaaggggaggagaaaacctaacttaaggaaaaagcatccatcctccaagactgtctaggaaaagtgaatgtggacaggggccaactatgccccaccagtt

SEQ ID NO: 330542 - DNA, 201 bp, Homo sapiens
ggactaactccaggtggttcttcaagtatctcagagtctagctagcaaaatcaaagaaagaaaatcacattcacccagcaatggtaaggctatttgcatgmaaatgcatcctagtatgtcatgaaagagcaaggtccgtgccatctaactcatggggataatcaaaggtggccttctagacaaagtaaaacttgagctgga

SEQ ID NO: 330543 - DNA, 201 bp, Homo sapiens
cattaaggaatagaatattgatttcatccacaggataattttattatgttctcaatatcagtgtttgtaagtggaggcagtgatgcaagtctctctctctwgatttctgatttttcatctctaagaggaagcaagcagaatttaatggatatattctctcagtatgagagggtgatgttacactgactcaccctcaattag

SEQ ID NO: 330544 - DNA, 201 bp, Homo sapiens
agaatagcctcccaaagatgtttgtgtcctaattctaatgccaggaacctatgaatatgtttattttacatggtaaaagggatttagcattcatgattaargatcttgagattgggagattatcctagattatctgggtgggccaaatgtaatcacaaaagtcattataaaagaggggcagaatgatcagagtcagaaaaa

SEQ ID NO: 330545 - DNA, 201 bp, Homo sapiens
ttcaattttaacttttataatttctaagaaaaatatttaaaattattttaaatatacgttatactagcttaggctaataaaatagatctctagcatctttattttatgtataagtaagaatagctttttattaacacaggacactataaaacacaagttctttttaaaatggtagaaatggaaagctcaaaaatgcattaa

SEQ ID NO: 330546 - DNA, 201 bp, Homo sapiens
tcaattttaacttttataatttctaagaaaaatatttaaaattattttaaatatacgttatactagcttaggctaataaaatagatctctagcatctttattttatgtataagtaagaatagctttttattaacacaggacactataaaacacaagttctttttaaaatggtagaaatggaaagctcaaaaatgcattaat

SEQ ID NO: 330547 - DNA, 201 bp, Homo sapiens
agagttttatattcagacactgccattcttgcatttatttttactaggaaaatattacctttttatggctaattgggagaaaataacccttcatctcatcwgtctgaaacggtatcagtaatatattattataggactttttataatatatcacacaataatatatcagtttcacaatacatttacagtcttgatttttaa

SEQ ID NO: 330548 - DNA, 201 bp, Homo sapiens
tattttattaaatctgatcctattcacttgatatcttctgaaaactcctcaaaattcctggtcttacaagtaccacttgttcatatttattgaagttgttwtgtattcatttcttttctaatatcttttctgtaataacatgtgggaagcatgcatggaggagacagtaaatatgtgtgccctgaatgataataagccaaa

SEQ ID NO: 330549 - DNA, 201 bp, Homo sapiens
ccaccctgagggctcctatacctgcctgttgaaatctgactcattccacacaagccagctttagattaccccctttcatggctccttgatgtttcagctgraaatgatcaaattcaattctgaattcttaaactttctttgtactctttacgatagacatcacattataggaatttgtgtgtacagactgtcaagtcctag

SEQ ID NO: 330550 - DNA, 201 bp, Homo sapiens
ttcttattttattatctacccaatttcattaagccagcattattttttaaaaagagattttatgctgttttcaagtggctaaactagtgaccaatgaagtrcaaagaggcttcttaagtgggtaagagggaacagttattagaacactgcatataaaacactttcctctaacatcttaggacagtattattttggtagctt

SEQ ID NO: 330551 - DNA, 201 bp, Homo sapiens
aacttctaaaacttcaccttttttaatgcaattcaagatattggcaataatgagtactctcttacactttcagagtcacaaatcacttctacatgcactaycttattggattctcaaatcagcctgtggaaaatgctaacaccattacagaaagatatatgatgtgcttgctgtgacattgtttataagagacaaaaaaat

SEQ ID NO: 330552 - DNA, 201 bp, Homo sapiens
acctcaaattggtgtaagagaaaaggctatctgcatagacctgagagagagaaaaatacacacacacacacacacacacacacacacacacacacacacamaataatcagttgttgagcttaaccatagaatctcatggtaggatttggcctgatttacttttctatccaaaaatattttcttattgttgttttaagtgag

SEQ ID NO: 330553 - DNA, 201 bp, Homo sapiens
ttgagggacacttaggttgatttcacgtctttgctgttgtgaatagtgctacaatgaacatacaagtgcatgtgtctttttggtagaattatttatattcatatatatatatatatatatatctccagtaatggaattgttgactgaattgtagttctaagattcttcaagaagtttccaaactgctttcacagtggctaa

SEQ ID NO: 330554 - DNA, 201 bp, Homo sapiens
ccagctggtcactctctgattaaaccagtgccagattttacaagcatcagaacactggtttgggagtgaggatatctggttttttttactagctctaggaygtagtgccttagcttttttatttataaaccagagagcattatttagaaatcctctaagcccattcaaatcctaagcttatgtgactctgtgactccctag

SEQ ID NO: 330555 - DNA, 201 bp, Homo sapiens
tatcattctgtgtgactatttagagcttttatttgtacttgaaatcagatatagctttactgaagagcagtttagttatctgttgatactttgtaagggtragtagtgctcactgggtggttgtatgataatgggattgtttacagaatacacagcaggatgctttaacctcaggttattcctttttgtcaagcagaagaa

SEQ ID NO: 330556 - DNA, 201 bp, Homo sapiens
tcaaccaagcaatcccattgctgggtatatctccaaaggaaaataaatcatttttcccaaaaagaaacctatactcagatgttcattggagtggtattcamaatggcaaagacatggaatcaacctcaatgcccatgattggtgtagaatttcaaaatttctgtgattcgctttaattcttaaaaaatgccattccattta

SEQ ID NO: 330557 - DNA, 201 bp, Homo sapiens
atacttaaccaatatgtaaattatttagttttcctatgctgttccctccaaaagacaattatacattaaatactttacgcaccccattccctagtgattgytgtctaatacgttatcttctcaataaaaatagttcttatgtttttatctaggcatgtattctgaaccatctcacttaaaatttactttcagtttcctcta

SEQ ID NO: 330558 - DNA, 201 bp, Homo sapiens
ctgagggtgtccgtggggaccagtgaatttgtatccagctcatcaaaagtgacagtggcccaagagacctccaaacttgtgactggcatcttaagtgagargagtttgtggaaaactatgcccttaactgtgaagctgggactaactccaggtggttcttcaagtatctcagagtctagctagcaaaatcaaagaaagaaa

SEQ ID NO: 330559 - DNA, 201 bp, Homo sapiens
agctgttatgtgaactccagtccacctttaagcaaggcatggagacaatatactattttcagagtcttcttcctgctcaagggatggaatatttcctaacytagtaccttcctggggcattgttggctcagacatgggagcagtagtccttaaccagaatgagtcagactaggattaatgacagttgaaatgggcttagtg

SEQ ID NO: 330560 - DNA, 201 bp, Homo sapiens
tgagggacacttaggttgatttcacgtctttgctgttgtgaatagtgctacaatgaacatacaagtgcatgtgtctttttggtagaattatttatattcatatatatatatatatatatatctccagtaatggaattgttgactgaattgtagttctaagattcttcaagaagtttccaaactgctttcacagtggctaaa

SEQ ID NO: 330561 - DNA, 201 bp, Homo sapiens
tttcacagtggctaaacaaatttacatttctatcaacagtgtataaatgttctcttttctctgtagcttcaccagtatctattgttttttggctttttaayagtagccattctgacacatcagatggtatctctgtggttttgatttgaatttctctgatgattagtgacgctgagaattttttcatatgtttgttgtctt

SEQ ID NO: 330562 - DNA, 201 bp, Homo sapiens
acattttggttttcacaactggttcagaggctgttacgggtacctaatggatagatccaaggatgctgccaaacatcctgcaatgcacaggacattccccmcaacaaagggttattccactttaaattcaaggtggagacattttgcactaaagaaataaaaactgccaggtgcactgactcatgctgtaatcccagcact

SEQ ID NO: 330563 - DNA, 201 bp, Homo sapiens
tcagcacaatgtctgcacatagcacataatcagttaaggttggttgaatctgattcactaggggaaactagaatgtttggggaatattttaaaggtaatargaagggagataatcatgtcttttcatagcatcatcttcagagacagtttactgggtcttgcccatatgttcctttaataattttttaaaaattaagaaat

SEQ ID NO: 330564 - DNA, 201 bp, Homo sapiens
gcacattccctaacttgtctatgacaagaggcacatgaattactttccaaggtacagattttcaggttcctcacctaaatccatgaatttgaatcacctasattggggccaaggaagctgtgtgtttcacaaacagctgcagtggttcaacaggaaagcttgggaatcccgacatagaagtctgactccaaatgtgaagtt

SEQ ID NO: 330565 - DNA, 201 bp, Homo sapiens
catgagagcacagagaaaagatgcccaaaggagataggatgagttttggaaaacagataagttaaccacaccatacagtttgttgaaagtttcattggaayacttgcacattatcgtgtaaccaatagggagtcattgaagggctttgcagagagacttgaaagatggtcaatgagtttggacctggctgtgtaaatagct

SEQ ID NO: 330566 - DNA, 201 bp, Homo sapiens
tagcattttcttttagcacttcctggaactcttatacattttctaacatctcattaaccagaacttattcacatgtccacacctacctacaaaggagatakggctaatatagtctgtattctgtgatgtcttactaaaaccagagttttccttgttaaggaagaaggggaaataaatattgggagatttagtagcactatt

SEQ ID NO: 330567 - DNA, 201 bp, Homo sapiens
tgtttcctgcatgagttccctgaatcagtttttttcctgctgcaagtcttatattctgttccccaagtttcttcagtgactgtactttgactcacaaatgkcacgaatgtcctcagaggctctttaagtcttttttcagtcagggagggctatcttttttcttccacaagttggctcacaatttagaggagttttcttggt

SEQ ID NO: 330568 - DNA, 201 bp, Homo sapiens
tctactctaaaaaagaaataattacatcagaaagataactgaattcatatgtttatagcagtactgttcacaatagcaaagatatggaatcaacataagtmtctatcaatgggtaagtgcgtaaagaaaatggggtatatccataccgtggaatactactcagccataaaaaagaatgaaatcacatcttttgcagcaaca

SEQ ID NO: 330569 - DNA, 201 bp, Homo sapiens
tctcgttttgtttttgcttatctgtttgttttgtttgctttgtttttacatcatgaatattttagcctgatatgtttgagttttaaaataattttccttarcctgccttgctaaggtatatttctcttttcctgtaaattatctagagaaaagagcccagatattacttaaggaaaagccattcacaactgtttcaaaaat

SEQ ID NO: 330570 - DNA, 201 bp, Homo sapiens
ttacagaaggaaaatgttggtagtagctttgtcatgtggaagatatattgactgaatttcatttggtggcatttgctttcaggaaaacattggcgctttgkagcttagtgttttgttaaccaaaggttccaacacttcctctaacccacccccaaatttctccttgggcctatttggatatattgcttaaagtacagacac

SEQ ID NO: 330571 - DNA, 201 bp, Homo sapiens
tatagcttctggagctgagtgccaagcactgtgaaagatattatagcttcaaaggagaataagagagtaagactcaaagctgacagtcaagaagttcatasataccaggcttatatttaactgattttcagttgtctcttcatatcaaatcctacccaaatttatattgtttgttttgaacaatgggagttaggatgtcaa

SEQ ID NO: 330572 - DNA, 201 bp, Homo sapiens
cacagagcctgatgaactgtgtatggtgggggtgagggagaatggtgagtcagaaggagcccagggttctggctcatgcatggggtggaggatggcagtgrcatccatggtgccagggcacagtggaagaggcagctgtcatgcataacctgagctctgctttgagtcacacagagaattgcaaaatactgtgaagggaag

SEQ ID NO: 330573 - DNA, 201 bp, Homo sapiens
agaaacaaggtgttaaactcatgtgtggatttattgctttcactacacctgcatgaaaccaggatattcagaaaccataggtcttgctctcaaccttcatmttcatcacaggcttcgtcacatcagtggcccagggcttgaggacttccttaaaatgttgctcacatcatgaagtccaagatataattcccaatagtgatt

SEQ ID NO: 330574 - DNA, 201 bp, Homo sapiens
catagcatgccctataaagctatggctcaggaaaagctcttggtgattcttggatcaacagggcaatctcctaggaggggctgctaactgtataagtatartcagtcattgacagaattctatcactggctttgattcaatgtgattcttctggctgtcaacatccttataaggagaggctaagacagagtatcataactg

SEQ ID NO: 330575 - DNA, 201 bp, Homo sapiens
caggtaatcagtctcccatggttcttgtcataagtctaacctcaacctgctctatttagactctggcttctgtgttagtttagttttcaattcctttgtaragctagtttgtctgctccacacacacataccaaccacccaggggtcaacctgagctttgttctatatcatagtttaattatcaaagcagttgttacgctg

SEQ ID NO: 330576 - DNA, 201 bp, Homo sapiens
tgacccagtgttttgatgacagcacagccataggaggttcacattagcttacacaaatcatttgctcaagtcactttagagtgtgatcctgccctcaggtkatttgtggactgccagctctttcatgatgggcaaaatagcatagcatgccctataaagctatggctcaggaaaagctcttggtgattcttggatcaacag

SEQ ID NO: 330577 - DNA, 201 bp, Homo sapiens
cttttcttttctttccttttttttttttttttttcatcttagcaggtaatcagtctcccatggttcttgtcataagtctaacctcaacctgctctatttaractctggcttctgtgttagtttagttttcaattcctttgtagagctagtttgtctgctccacacacacataccaaccacccaggggtcaacctgagcttt

SEQ ID NO: 330578 - DNA, 201 bp, Homo sapiens
gtaaaatccatatatatgtttgtgattacatactaaaaattctagaaggatacataccaaattgataacagtaatcacttcatggttggggtaaggttatsatgagggaacagaataggtaaaaggaacttgagccttttaattactgtctgaattattgtgagcatgtgttcacatcttattgtataattgcaaataaat

SEQ ID NO: 330579 - DNA, 201 bp, Homo sapiens
attcaaggtggagacattttgcactaaagaaataaaaactgccaggtgcactgactcatgctgtaatcccagcactctgagaggccaaggcaggaggatcmcttgagctcaggagtttgagaccagcctgggcaacatagagagacctcatctctaccaaaaaaaaaaaaaaaaagatgaaaaaaaagtagctgggtgtgg

SEQ ID NO: 330580 - DNA, 201 bp, Homo sapiens
caaacacgtttttggtcattttaggcagtgaaatgtgtatttacatcattgggtgggctgaagaaaaacactaggctggacactcagagtgactcccagamcaacactgtggaaaccaggagagctgcttctactgccacagtcaaaaggagcagaaccaaaggcccaccccagccagcacaattgcctctcagcacaccc

SEQ ID NO: 330581 - DNA, 201 bp, Homo sapiens
gcagccttgaacgcttgaactcctgggctcaagtgatcttcccacctcagcctctcaaatagctgagcatgagccagtgtgcagttacatcccctttcccaaatgtacaagttgcagtcctaacccccggtacctcagaatataacctcacttggaaaaagggttgttgcaaatataattattcaagttaaatgagaactc

SEQ ID NO: 330582 - DNA, 201 bp, Homo sapiens
ttagctgtgaatctctctggtttggggcttttttatgtgactgattcaatttcagaactcattattgatttgttcagggtttcaatttcttcctgattcartcatgggaggttgttcatttccaggaatttatccatttcctctaggttttctagtttgcatgcaaagaggtgttcattatactctctgaggatctttttc

SEQ ID NO: 330583 - DNA, 201 bp, Homo sapiens
ttattgatttgttcagggtttcaatttcttcctgattcaatcatgggaggttgttcatttccaggaatttatccatttcctctaggttttctagtttgcakgcaaagaggtgttcattatactctctgaggatctttttcatttccatggtattggttataatgtcacttttgttgtttctgattgtgcttatctggacct

SEQ ID NO: 330584 - DNA, 201 bp, Homo sapiens
cagagcaattaggaaaaagaaataaaagattcaaattggaaaggaagaagctaaatggtctctctctgcagatgacataatcttatttatagaaatgctaraactccaccaagaaactgttagaactaataaatttagtaaagttgcagtatataaaatcaatgtgcaaaaaattttgtttctgtacattagcaacaaaat

SEQ ID NO: 330585 - DNA, 201 bp, Homo sapiens
caaattccatttgcttttaaggagctaaaaggcaattgaagaggaaactaacaacatccatgcaacttacatcaagtcatcagcttcatgacccaaccccrgcatgatgtcagttccaaagacaaatggcagcaacaaaaaataatcaagtattgtctcagaggttttgttcttagaaaaagtgtcattatacgtctatat

SEQ ID NO: 330586 - DNA, 201 bp, Homo sapiens
tctcgactaaacttctcagtcacaactttttcatatgttaaaagacaacaataacacctaaatacatggtaataagcacactggcttcttgcgatgcttayatgagggaatgtggaaatgtctacggagtccctgaatgtccatcagaggagcttaatggatatacttcctttccctttttgaaacttttctaatttctga

SEQ ID NO: 330587 - DNA, 201 bp, Homo sapiens
aggttcttagatactctgggatgtttgggttctcagggacacctgctctttggctggtcaccgtgacctcagctcaccaaccagccggctgtcaagatgcrggcagtggatatacacccttaagtaacctgatgggggatccttcacactacagtagcactggaaaagtcagtcactaagtacttatcaatgagacactag

SEQ ID NO: 330588 - DNA, 201 bp, Homo sapiens
agcagcatgtggaacgttttctgtgtctggttttgcccatcttttgaaattcgtgattacatgatcctgcctgttccaaaggaagtagaattgtagcactrtggagcattagcctaatgatggaattgcttactttctaaacaaagcataatctgtgaaacctggccaccatgatgaaagcattttattgacagatttgta

SEQ ID NO: 330589 - DNA, 201 bp, Homo sapiens
ttttcttttagcacttcctggaactcttatacattttctaacatctcattaaccagaacttattcacatgtccacacctacctacaaaggagatatggctaatatagtctgtattctgtgatgtcttactaaaaccagagttttccttgttaaggaagaaggggaaataaatattgggagatttagtagcactatttttgc

SEQ ID NO: 330590 - DNA, 201 bp, Homo sapiens
tttttcttccacaagttggctcacaatttagaggagttttcttggtaactaaaaatagactaccattcaatctgcagtcacagtattgggtatctactctaaaaaagaaataattacatcagaaagataactgaattcatatgtttatagcagtactgttcacaatagcaaagatatggaatcaacataagtctctatcaa

SEQ ID NO: 330591 - DNA, 201 bp, Homo sapiens
atagggcctgtgagatatgcacttaggtgtatttttatggtagcaggtgtcattaatttgtctccatgtttataattcccttaagggtctcttgtaagcckgttctaatagtaacaaattccttcagcacttgtttgtctttaaaatattttatttctccttcacttagaaagcttaatttcacaagttgtgaattcttgg

SEQ ID NO: 330592 - DNA, 201 bp, Homo sapiens
aacctagatcagtctggctccaaagcccgagcttgcttcactatatcagtctgcccatgtggaaacatctaaggtgtgaggcagcgcccatgccagtgtgragtcatgtcatccacctaaccacccaagtgctggggggactgcctcttgcggtaaggagaaacttgggctatgaacttgaaacaaatgagagccttggaa

SEQ ID NO: 330593 - DNA, 201 bp, Homo sapiens
catgccagtgtgaagtcatgtcatccacctaaccacccaagtgctggggggactgcctcttgcggtaaggagaaacttgggctatgaacttgaaacaaatragagccttggaagaagaaatgcgatgaactgcacccttcattttgtgtatatgaatcaccaacagtagttcccagctttgtgactaaagacaaacgtcaa

SEQ ID NO: 330594 - DNA, 201 bp, Homo sapiens
ggcactgggaaaactggctagccatgtgcagaagattgaagctggaccccttccttataccatatacaaaaaccaactcaagatagattaaagacttcaaytgaaaatctaaaactataaaaaccctggaagacaacctaggcaataccatcctagacataggaacaggcagagattttgtgacaaagacaccaaaatcaa

SEQ ID NO: 330595 - DNA, 201 bp, Homo sapiens
ttttcttgtcgcaatattgaacctcctgctcctgccactaccatactagtagctttcacacacacaaaccccatcacacctcagtcattttgcacctcccrggtaaaacgcccctgtgattaataaggtattttactagaaactctaggttccccttgaaccattttgctttgtagaattaattacaagttaaatgatttc

SEQ ID NO: 330596 - DNA, 201 bp, Homo sapiens
gtggtactaacttaggcctcactgatgcattttctatgctgattcattggccatttaggagagattcctattcaagacttatttccctttatctgaccacrtggattgacttgccttttattttctctgaaaagaaatgcaacctcaatatccacatccacctcattagagaaagcagagatgtatgaggtttagtagaaa

SEQ ID NO: 330597 - DNA, 201 bp, Homo sapiens
ccaatcccaaaccacagggagagaggtggtcgctagtgtaagtcccagagtctaaaatctgaaggcccaagaaccaggagctctgatgtccaggggcaaaraaagagggatgccccagctcaaggaagagagaatcctccacctttttattctattcatacctgcaatagattggatgttgcccaccctcgctgataaggc

SEQ ID NO: 330598 - DNA, 201 bp, Homo sapiens
agagcttgctaattgtgtgggatctcgactaaacttctcagtcacaactttttcatatgttaaaagacaacaataacacctaaatacatggtaataagcamactggcttcttgcgatgcttacatgagggaatgtggaaatgtctacggagtccctgaatgtccatcagaggagcttaatggatatacttcctttcccttt

SEQ ID NO: 330599 - DNA, 201 bp, Homo sapiens
gatttaagcataactactaattagcaaagcaaggcaggggctaggtaatggagacagaaagagcagcgtatggaataacttccagattcatccttgtcctrtcggaatcgatgatgataacaacaacagtagtagtggctacatttacttggactattttttatgtgaaacatgcttactgtttgttgacttatgcagtac

SEQ ID NO: 330600 - DNA, 201 bp, Homo sapiens
catgtgagctagctacaactacatatatttaaaaggactccaaaaaacttagttttatatatatatatatatatatatatatatatacacacacatatatrtatatatatatatacatatatgtatatatatatatacatatatgtatatatatatacatatatgtatatatataaaaaactaagtttttatatttatata

SEQ ID NO: 330601 - DNA, 201 bp, Homo sapiens
cagatagtgtggggcactatctaaatgttagaatgtaggaccacacataatacagagagtgcacagaagaaaaataccttccgggtgttgtaaaagtcaascacctgaggaagggcattatccccgttagtctagtgagtgccatgcagctcaatggggcagtcatttatgtttcttctgacgatccatgcacttctcaat

SEQ ID NO: 330602 - DNA, 201 bp, Homo sapiens
gcgaagatttccatctctattctctgaaaaagaatatgctaaatggatattgtacagctcttaaatatttgatagtattcaccagtgaagccatttgtgcytaagaaatatttaattaaaattaagtttctaaaatgtatacagggttggtcacactttccatttcctgttctattagttttgctaagttttgtttcatgg

SEQ ID NO: 330603 - DNA, 201 bp, Homo sapiens
tgtttgtatgtaatgagtatgcaattgaaaacagaaacgtgcaaaagtgaaatatgtgaagtccagttgatgtacatgttgtgtaacaggtttggtgttcmtggttcaaaagatggaattctgaagtcagactaactgggttaagtccgtgctctgatgctcactagctgtgtgaccttgggcaagttacttaacctctct

SEQ ID NO: 330604 - DNA, 201 bp, Homo sapiens
atgactaatgatgttatgaacatttgtgtggacatacatttttatttctcttgggcatatacctaggagtggaagtgttgtatcaaaaggtaactctatgyttaactttttgaggaacttccaaactgttttctaaagtggctgcaccaacatacatttctccaagcagtctatgaggcttccagtttctccgcatcctca

SEQ ID NO: 330605 - DNA, 201 bp, Homo sapiens
tgcagcatgtgctagagtgttgcatgcaaaggaggtggccttggagaagctgctacttgccaggatttgttgatggaacatagaagaaactcatgatgaawtactaagctttcatctataagctgcagctataatctgttagtacacaataaattacaaataaatatagcatcaaagcattaccatgatgtaaatgtctct

SEQ ID NO: 330606 - DNA, 201 bp, Homo sapiens
gacagtcaagcccctactaaccacacttaattgtggagaaaacccatcagcctgaggtcctgcaaggaatcgccctcccattcctggcctccaggtggtgmccttccctgcccccagatggcagtttattattgcaaagaagacccgcaaatagaatattcctcattccttgtgagtttgaagcaaagccctgagctgtct

SEQ ID NO: 330607 - DNA, 201 bp, Homo sapiens
agggaggaaggaaattatttttctagggcaagtcacaatacttggccctttttatacactgccttaaatctcacaaacccctgtgagaagacaggtattaytgtacccattttacaggtgacaaaggtgaaaggatacagaatttgcccaagattacataaattgcaaatgacggaactcagttttttcagtcaaactcaa

SEQ ID NO: 330608 - DNA, 201 bp, Homo sapiens
ggatatattggcagatttttatccatgttgatacccctatgttacctccaccagatccagacacagaacattcccagcaccctgcaaggttccactaatgytccccatcagccatagccgctggcactattaagacctcaatcactattttgcctgttcttgaatttcacataagtgaaatcatgtagtctggactctttt

SEQ ID NO: 330609 - DNA, 201 bp, Homo sapiens
atgtggcctagagagaaacacttgcccaagaccacagggccacttaaattacaaagtcaactctcaaaccaaggtcttttgacttaacgccttgtgcttgkaaccattgtttcaattgtgtgcttttacatgaagcctgggctctttcaaagtattggttatgtcatatttagtatagaatctccagtgtttggtgggagt

SEQ ID NO: 330610 - DNA, 201 bp, Homo sapiens
tctctgttctggtgtcagtagacatatgggttgttcagtctttggctatgataaataaagctgatgtaaacattcttgtacatgtgttttagtagacatgygcactaatattttttgcatctatacctaggagtgaaattattgtcatagagtagatgaaatttgtagtttttatcaactgtagaagataaggccaaacac

SEQ ID NO: 330611 - DNA, 201 bp, Homo sapiens
tgctgacttcaagaatgaagccacagaccctcacggtgagtgttacagttttcaaagatggggtgtccagagtttcttccttctggtgggttcgtggtctyactggcttcaggagtgaagctgcaggcctttgcagtgagtgttacagttcttaaaggtggtgcatctggagttgttcatccctcctggtgggttcatggt

SEQ ID NO: 330612 - DNA, 201 bp, Homo sapiens
cttcccagtctgtgagcatattaagctctttcctgcttcaaattctagtaccatctattttcctgcctgtgacccttttttttcttattatctatacatgrcgtcttcctgctaataatgcaggtctgagcttaaatgacatcattctgactgcccagtccataggagccaccctgccaccctcacctcttgctattattt

SEQ ID NO: 330613 - DNA, 201 bp, Homo sapiens
tcccctacagtcaatccactgcgggtttaatggctttgaaataaaccagtgtgtgtttctgcttattaagtatcatactttatgcaattaatgtgtacaamaccaagcctagttttgtgaacagtttatccaaatcgctgcgcagcttcatttatgagaggagagaaaaccctcctctgttatctaatagatgttatgtgt

SEQ ID NO: 330614 - DNA, 201 bp, Homo sapiens
gggagttagaatacatgggaaagtaatttgaaattccacaagtggaggggacaggattcaggaaagcagagctgctggtgtcagggtggctaaggagggaytttggagagcaacaatgtctgtggattttaaattttagtggaaacaatatgcactccaaaatatcctttacaatgactcaatcactcttcagtatggaag

SEQ ID NO: 330615 - DNA, 201 bp, Homo sapiens
gcagaatttttgatgctcccctttcattctcaaatgtcacactgtttggataatgaatcaatgctgacccttataggctttattggagtatattgacatcycatgttggcccatttttctccctggcaaatctgagatctcttagaccagtgatattttcaacgtgcctgacttccaatatttgctcaataaatgtttgct

SEQ ID NO: 330616 - DNA, 201 bp, Homo sapiens
tccaggttattgcaagtgctgttaattcattccttttatggctgggtagtattccatcatatacatattatatatatatatatatatatatatatatatawtaaaatatatatataaaaatatattaaaaatatatatatacacctaatattgatttttaaaaagcaaatacaattattcatttcaaagtgcctgatagaa

SEQ ID NO: 330617 - DNA, 201 bp, Homo sapiens
ctgaagctggctggactgtgagcaagacacacagataccacccctcactcccagcttgagtagttagggtgcgtaggattccttgaccgtgaagctagggrccatgtcttacacaaatagcacacaagtgttttgctccttaaattctgggagctgctgttggctgaattacctctcagccgtcctgttgacagatggtgt

SEQ ID NO: 330618 - DNA, 201 bp, Homo sapiens
ctgtaccaaaaatacaaaaattagctgggcatggtggtgggcacctataatcccagctactcgggaggctgaggcaggacaatcactgaaacttgggaggyggaggttacagtgagccaagatcatgccactgcactccagcctgggcgacagagcaagactccatctcaaataaaaaataaggaaaaaaaaagatatggc

SEQ ID NO: 330619 - DNA, 201 bp, Homo sapiens
aagactttggatagaaaaccaaaagcatatttgcaaatggctttgaccaacctcagaaatgagatgcctcaagggaggggagagaaagagaaagcatacakagtagaacttcaaccctatctgtaattatttttttcaagaaataaatcttagtacatttagcaaaatatcaatggctcttccagaaggatatttgagaca

SEQ ID NO: 330620 - DNA, 201 bp, Homo sapiens
aaggtctttgcttctgcaattatatcttcctttattcctgaatcatcacattatccctttcaactagtccatttccattattatacaaatacgctcttggwtctcctattaaaaaattgatctcttatttccttccaactaccactctcttcactccgttcacataaaatcttgagcttattatctacaatcattattttt

SEQ ID NO: 330621 - DNA, 201 bp, Homo sapiens
tgtgactaaagacaaacgtcaatgccaaaatcaccctagttcatcctagctgcagcatcaaacagtcatggccacctaatccagtagggaagctagcaaakgttgagtttccctaatttaagggtcagcagtctcgggcacaggcacagactactgagttgctctgattaggagggagcttacccagactcactcttcagc

SEQ ID NO: 330622 - DNA, 201 bp, Homo sapiens
gggcgataataaagtctacttccaaggtgattaaaagagcaaatttccccttgagggctttttgaggaaaggggcagacactgtcctctatcaagtatgastgaagtacctaactacctgaagacatgaggaggagccagataacctctgacagtcttgtgcccccaagaatggtccaacagcttaagggttcctaggatc

SEQ ID NO: 330623 - DNA, 201 bp, Homo sapiens
gctgtggacgactgggagagtgactggcagggagttgatcctggagcaagtgccagagcttgtggtcactgaaaagccttaattatctaaccacaggtggwtcccaaagaaagaaaacaataacgctatcctcctgcgctaaatagtggagaagtcttacttagggctgtgtacaaaaattaccagggaagatggttttac

SEQ ID NO: 330624 - DNA, 201 bp, Homo sapiens
gagaggtggtcgctagtgtaagtcccagagtctaaaatctgaaggcccaagaaccaggagctctgatgtccaggggcaaaaaaagagggatgccccagctsaaggaagagagaatcctccacctttttattctattcatacctgcaatagattggatgttgcccaccctcgctgataaggccagatcttctttactcagcc

SEQ ID NO: 330625 - DNA, 201 bp, Homo sapiens
cttttcagtatttaatgtacaacttttttctctaaagctttaaatgcattacagaaattttaatatgaggtgtatcagtcagtttccacaaaagaaactckgtgtgtgtgtgtgtgtgtgtgtgtgtgtgtgtgtgtgtgtttgtgtgtacatacagagagagagtaggggcaggaaattggctaatgcaatcgtgggttc

SEQ ID NO: 330626 - DNA, 201 bp, Homo sapiens
tgtcctgcaagagtgatgcccagtcattaatattttcttttctcctccaggtttctgattcatcaaacccatttcttaatcgaatgctcaacagagatacwatcacaagaataacatataaaagtaagtttggttcaatttcctccacagcaactattctataaaggttagacctgcctgaaggcgggaagccagaactga

SEQ ID NO: 330627 - DNA, 201 bp, Homo sapiens
  misc_feature (1)...(201): n = A,T,C or G
ctaagagcctatggttgaccggaagccttactgataacaaatagttcatcaacacgtattttatatatttattaaatactgtattcttacaataaacaaanagaaaataaaatgttattaagaaagtcataaggaaaagaaaatagatttactgttcattatgtggaagtggatcataataaagatcttcatccttgtctt

SEQ ID NO: 330628 - DNA, 201 bp, Homo sapiens
ccttagggacacattctctttctcagggatgttccttgctgagaaaaagaattcagcgatatttctcctatttgcttttgaaagaagagaaatatgactcygttccgcctggctcacaggcagccagagtttaaggttatctcccttgttccctgaacattgctgttatcctgttcttttttcgaggtgcccagatttcat

SEQ ID NO: 330629 - DNA, 201 bp, Homo sapiens
aaattttgatcttgttgatttccttttttttgtctttttttcactctcatttttaacattccctttcatttactttcaatttaatttgttttttattttatcttcttaagatgaaatcttagaccattgcttttatagcttttattttcctttctaatgtagacatgtaacactataaatttcccccagacgaactgcttt

SEQ ID NO: 330630 - DNA, 201 bp, Homo sapiens
ctaatttttaagtcttctttccttctctagatgatgcatatttactacaggggcttaatatagaggaactatatccagagacctctagtttcatcacttaygatgggtcgatgactatcccaccctgctatgagacagcaagttggatcataatgaacaaacctgtctatataaccaggatgcaggtgagtttctctctgg

SEQ ID NO: 330631 - DNA, 201 bp, Homo sapiens
aattttgatcttgttgatttccttttttttgtctttttttcactctcatttttaacattccctttcatttactttcaatttaatttgttttttattttatcttcttaagatgaaatcttagaccattgcttttatagcttttattttcctttctaatgtagacatgtaacactataaatttcccccagacgaactgcttta

SEQ ID NO: 330632 - DNA, 201 bp, Homo sapiens
aaaaagaaaagtttggaatgacaggttgggacccacagacatggctatgctgctacctatgaagctgaaactccagaactctgggcagttctaacaattcyaccactaagagcactaactgcacagacacagtgttcaagtcttaagagttgtcatcatccactggttcagctgtgggagcatgaaggtctctggctctga

SEQ ID NO: 330633 - DNA, 201 bp, Homo sapiens
cttgacttcattccctgctcattgaatttaaaccttaatgatacatctactgatagaatggatttaagtttttgattggattacatcagcttttctgagthtgaaacagcactaacatgcatttttctaatataaataatattaataagttcatgttgaacaaaatataaaaaatcccaggcattctttaagttatttagt

SEQ ID NO: 330634 - DNA, 201 bp, Homo sapiens
tcatggccgcgctcagcctcacctccccgcccgggcctcctgcctccgcccccgggtgccgggctgcggagctgacgctgggacgcccggcggcggcgagracgctcacctggccaagcctccttctcctcctccccctcccgcccccacctgtcctcctcctctctgagttgggaagcgtagggatccgtaggcgaggaa

SEQ ID NO: 330635 - DNA, 201 bp, Homo sapiens
gccaatgcatgtgaaagtgttcagcacaatgtctgcacatagcacataatcagttaaggttggttgaatctgattcactaggggaaactagaatgtttggrgaatattttaaaggtaataagaagggagataatcatgtcttttcatagcatcatcttcagagacagtttactgggtcttgcccatatgttcctttaataa

SEQ ID NO: 330636 - DNA, 201 bp, Homo sapiens
taagtgaaattcttcgttacccttaggatggaatcaagaccccctaccttggcctgccaagctctccatggtcttctcctgccttccaatacaatttctcstcatatcaccctcccttacttaggagttgttcaataaacacatgttgaatgattggatctatgaatgactgtataatcatgggcaagacatagctcctct

SEQ ID NO: 330637 - DNA, 201 bp, Homo sapiens
ccaattatttcccacagccagttgaattaccaaaatttgttaaatagcctattcttaagtccatattaattttaatgccacgttcttcgtattccaacttygcacataatgcatgtgattctaggctttcccttctgccactggtctagttgtctataacttatacttgtatgggtcctgatgtcagctggcatgattagt

SEQ ID NO: 330638 - DNA, 201 bp, Homo sapiens
ttagatatcatggcttaatgagtatggcatggacatggcaaggcccttcctcaccacagctgtcagtgtcatctgcacatgaagtggaggtggggacactytggggacatccctagccatctgcccctcaggctgaatccagactcagcaaccttcctcccaacttcaggattaattcccagatgtcctttttctcaaatg

SEQ ID NO: 330639 - DNA, 201 bp, Homo sapiens
tgctttatacacctgtggatcatttgacctgttaccatacatacattacttcctttggtttttttctttgtttgttttaaagaaagaaactgatctcaaawtctagttccctaacctactggccaggtgaccttagaaagtcatttaacctctttgagtattattttcctcacctgtaaaataataataatgaggaggatt

SEQ ID NO: 330640 - DNA, 201 bp, Homo sapiens
taggtgataagtcaaaatgccaaattacagatggaacctgagattcatagtgtttatctagttcacgttgacacagttaaaaacataacgttcagagagcytgagtaacttgcccgagggcacacagcccttaagtggtgagggtatatgcacaccatggtcgtctttgtacctctcagaaaagggcagattcttctccct

SEQ ID NO: 330641 - DNA, 201 bp, Homo sapiens
tttgtcaggtgctggactctgcactacattttccatcatttttctcattgctgtcagaaaccctaggtgataagtcaaaatgccaaattacagatggaacytgagattcatagtgtttatctagttcacgttgacacagttaaaaacataacgttcagagagcctgagtaacttgcccgagggcacacagcccttaagtgg

SEQ ID NO: 330642 - DNA, 201 bp, Homo sapiens
aatttttcattataaggttatttttaaatggtacctgatattatttttaatatggaagtttaattccaattttcatcctgattactggtatatttggtcawacttccaccactttctatcatatttttgtttgtcatgatttatctttgcttcctctagtttcctagagttctatttatattcacttaataaatagttaaa

SEQ ID NO: 330643 - DNA, 201 bp, Homo sapiens
acatcaacagatatgaggcataagatgtgcataaagatgacccctttcaatctacagtctgggttccttttggcccactaatttttatggctgtgtcagcrtctggttagcagcaaagtatgtaatatacagaaagcagtcaataaatgtttattgaatgaaataataaatagatgaattctaaaataccccagatcctgg

SEQ ID NO: 330644 - DNA, 201 bp, Homo sapiens
agtaatttgggattgccttatggtcatttgagtattatatattagactctggtcctgttaaaatcctctagagaagatttttcttttcttttctttccttttttttttttttttttcatcttagcaggtaatcagtctcccatggttcttgtcataagtctaacctcaacctgctctatttagactctggcttctgtgtta

SEQ ID NO: 330645 - DNA, 201 bp, Homo sapiens
ttcaatctacagtctgggttccttttggcccactaatttttatggctgtgtcagcatctggttagcagcaaagtatgtaatatacagaaagcagtcaatamatgtttattgaatgaaataataaatagatgaattctaaaataccccagatcctggaattacatatagatgaaaaaagggaaaggaactaaatatattgag

SEQ ID NO: 330646 - DNA, 201 bp, Homo sapiens
tcaggtacgggacgcgccgaagtcactggctgatttggattatgttgtgatgtctggggtgtatggggttttattgtatatagccgcggggcagagagagrggtggcgagaccctttgagttctgcgggtttgccgccttcagaatcaaaaatcttctcagcccaagggtgtgtgaatgtgtgtgttttgcgggggggggt

SEQ ID NO: 330647 - DNA, 201 bp, Homo sapiens
ctcaggttcatgttctggagtcagacttcttgggttcaaattctggcaacttgcaagctgtggaacttgggacaagtcatttaacctctctgtgcctcatmtacattacaggaacaatggcagtaacagcctcatcaggttcttataatgattaagtgagaaaatgtatatgggaactcagcacagagtaaaccctcaaac

SEQ ID NO: 330648 - DNA, 201 bp, Homo sapiens
gacttgcttcccttgagggcaaaacaaccagagagagactggaaagagaaaattaatgacgattcacacacacacacacacacacacacacacacacacacgagagagagcgagagagcgagagagagaacaataggaacctagttttccagtttctctgctcaaaaaaaaaaaaaaaaagaatgtcttccagagtttgag

SEQ ID NO: 330649 - DNA, 201 bp, Homo sapiens
tgaacctagtagggatgtctccatttattgaggtctctttgatttctttcatcagcaatttgtaatttaatatacagatcctgtgtttttcactttttttwaaaaaaagtttgtacttcagtattttattttatttctccataacttgttggggtacagttggtgtttgattacatgggtaagttctttagtggtgatttg

SEQ ID NO: 330650 - DNA, 201 bp, Homo sapiens
gtaccatagggcattcatcatcatccctggcctctgcttactagatgccagtagcacccacctggggtgacagccaaaaatgtccccagatactttcaaaygtccccaggcaggaggcgggggtggagctgcttctagatgagcactgctgttttagtctctttacctaattgttggtgtttagtactgtctctggaatgt

SEQ ID NO: 330651 - DNA, 201 bp, Homo sapiens
atccaggggagggagagctagcattcagttggaaaacatgactgtagagattttatcacatgcttatacagagaccatgctgatctgtcaattttttcagytggactcatgccggtgtctagtctggggtattttatgctttgtgtttgcagaatagtcatgcggatgagattaggagggtatgagcatgcacagttatat

SEQ ID NO: 330652 - DNA, 201 bp, Homo sapiens
ttattaatgcatatttattaataatttaatactaataaaattttgcccaccttacttcaatgttgagttaatgaatgtgacaattgaagtaactgaggccycaagaggttaaggtcttgccgaagatcatgcagctagaaatgaagtcacagaccagattaattaaaatgacaaataccaaagcactctgagctctggaaa

SEQ ID NO: 330653 - DNA, 201 bp, Homo sapiens
tttgtactgtctcctctcctacttcctttatgggcatttcactgattagcacaacttctacttgtaaaactcagacctgttaggttatcatttatactaattttttttttaattaggaaaacattttagcaaaaattctgtttggatattatagaatttcataaatgttttcttaatattaatgtgaaatgatagacacag

SEQ ID NO: 330654 - DNA, 201 bp, Homo sapiens
tttccttctccatcaattaccttatcacctaaacatttcttgaatccatccagagatctccagctttgctctcaatatcttcttcaaggcctcaacatccrtggattagtgtagccagtggggtgctagtaaatgtttaccaatcaactggagaaagcacagcagaagccttggtttgtagtgtttgccaatttcagtggt

SEQ ID NO: 330655 - DNA, 201 bp, Homo sapiens
ctggggagtaaaaagcttccatttatcttctaatcatgctcatgcttttgtctacttcctgaacatatggaaaatcatgataatagcaatctcaatgtttstgtctgctaattgtatcatttgtgttgtttctgcttttgttgccattgattggtttttctcctgggcacaggttatcttttcttgcttctttgtatgtct

SEQ ID NO: 330656 - DNA, 201 bp, Homo sapiens
tcagaattttttttttttttttttcgagatggagtctgtcatccaggctggagtgcagtggcacaaccttggctcactgcaacctctccctcctgggttcmagcgattctccgacctcagcctcccgactagctgggattacaggcacccaccaccatgcccggctaatttttgtattttcagtacagacgtggtttcgcc

SEQ ID NO: 330657 - DNA, 201 bp, Homo sapiens
taatatacagaaagcagtcaataaatgtttattgaatgaaataataaatagatgaattctaaaataccccagatcctggaattacatatagatgaaaaaarggaaaggaactaaatatattgagtacttactactgccatttatacatacatattttatctcatttagttccccaaatgacctcagatggccagttttaca

SEQ ID NO: 330658 - DNA, 201 bp, Homo sapiens
gtattttcagtacagacgtggtttcgccatgttggccaggctggtctcaaactcctgacctcaggtaatctgccatgctgggattacaggcgtaagccacygtgcccaacctgtgttcagaaattattatagggtgatcttgttttttgacttgacccattggaattgcagtggccttgtctggtgtggttggagaaaata

SEQ ID NO: 330659 - DNA, 201 bp, Homo sapiens
gctttgccagctactgaggagtttgtcagtcctgcagcatccgtcgtctgtatcatatgatggtcctcgataccaggatgttgcagagaagctgctggatrtgctacaaagagcatgttagtaaagcccaagagatcttaatttaaatcctggctctagcactgtccttctgtgggacagagacaagtcatttaacctttc

SEQ ID NO: 330660 - DNA, 201 bp, Homo sapiens
  misc_feature (1)...(201): n = A,T,C or G
tgacatttagtatactttacttttagacatgtgtaattttgcttagttgagacatgctatatggacaattttgctcgctttttccacttacaatattatangcactttccaagctattgttgtattttaatggctgcattatattccatctagcagatgcattatagttcacttgagcctttcctgtcattggtcatttat

SEQ ID NO: 330661 - DNA, 201 bp, Homo sapiens
agatccttataatccttttataaccctctacaaattttgctaaagagcagattagtgccttaagaaaaccttgttgtgcttttacttcaatgttccatttrcagaaaaaccatataatacccttttgaattaaaaccatataatacccctttgaattttgtcaatgtgcaaacacagaatttcttttacaagattaattct

SEQ ID NO: 330662 - DNA, 201 bp, Homo sapiens
ggagcaacaaatagctttacattgcaaaggccttttaatgaggagaagatttttcattttgatgaaatataatttattcatttttcaattaatggttaatscctattgtgttctgcctcagatattattgcctaccttaagaccaaaaagatctttttgtacattttttgtatactttttatagttttagttatcctggtt

SEQ ID NO: 330663 - DNA, 201 bp, Homo sapiens
taaaagcaagatattgaatcacatatacagtattattaaattttttatattctctcataactatagaagaaaaactctggaaggaaagctgcaaaaaatawgtatttatctctggatgatagttattgtctttttgtacatttctacattttctatttttaaaaataatttgcatgaattacttttgtgtgaaacttttct

SEQ ID NO: 330664 - DNA, 201 bp, Homo sapiens
atattgttgactgtattagcagttcattcctttatattgctgaatagtgatttattctatacatacatcacaatcacatattgatgaacagtttgagttgyttctagattttgtttatctgaaataaaacttatgaacattcatctgcaaagtccgtgtatgaacatatgttttcatttctcttgattaaatacctaggag

SEQ ID NO: 330665 - DNA, 201 bp, Homo sapiens
ctatttccatgctgttaatctttattgttatggtatcttatagaacatatctttctgtagcttgttttctttttccacttaatatgtttgttgagacttayttattttgatagatccattgggttttagttcatttaactgctgaatagtaccctattaaatggatttactacaatttatttttccattctgcacttcatg

SEQ ID NO: 330666 - DNA, 201 bp, Homo sapiens
tataaagctatcattttctatacgattttagtacctccttaaatagttctttgaaatattgcagagctctcggcaatgaatgtttttatatatttttttcygaaatgggctttatttaacctttatttataaaatgtgtttttactagataataaaatctaagtaggttgatggttggttttctgtatttgatattgcatc

SEQ ID NO: 330667 - DNA, 201 bp, Homo sapiens
tcaaaattcaattgtctattgattcgttgatgggcgtatgggttgtttttagttatgtctattacaaataaaggactacgaacatttgagtaaaagtatcrtataaacattagcttttctttctctaggataaatatctatgagcaaaatggcgacgtcatatgctttatatatattaatatttaattttttaaaactgcc

SEQ ID NO: 330668 - DNA, 201 bp, Homo sapiens
agtatggcatggacatggcaaggcccttcctcaccacagctgtcagtgtcatctgcacatgaagtggaggtggggacactctggggacatccctagccatytgcccctcaggctgaatccagactcagcaaccttcctcccaacttcaggattaattcccagatgtcctttttctcaaatgtagggagtgcttctggttgt

SEQ ID NO: 330669 - DNA, 201 bp, Homo sapiens
acatggcaaggcccttcctcaccacagctgtcagtgtcatctgcacatgaagtggaggtggggacactctggggacatccctagccatctgcccctcaggstgaatccagactcagcaaccttcctcccaacttcaggattaattcccagatgtcctttttctcaaatgtagggagtgcttctggttgttttttttttttt

SEQ ID NO: 330670 - DNA, 201 bp, Homo sapiens
aattttgtattagagttagtcctgcatcatagactatgaaagtatacaaagatattacgatttttattattataattttgctttaggctatttaaagttgyataaaagcaacctgatcaattgtaccattactgagttcctgatccttctgagttccatctgatccagggaggcacgtgtaaggcttttcagtatgtgcca

SEQ ID NO: 330671 - DNA, 201 bp, Homo sapiens
cttctcaccatccccacctcaatcagaataccaatttacggtctctgttggagttagaaatattaaaaggggtgctatccatgcctaagaaaactatgggrtggtgccttttatatacatgagatttatgaaaaatgaggccccctgcagtgagatgcaaaaatgataatctccatttcagagcatctgggcctgaggatt

SEQ ID NO: 330672 - DNA, 201 bp, Homo sapiens
cttcttggatagacaatagtactgttctgcttatcttctagaaaaaaatgaactacaggcaaaaataaaaggctatatgccagattaatccactgaaaacwcaacacaaatctatcttctctctagacatgatctagcatttggatatcatttattacattttagaaagcctttccaggtgtcatctttcaaaataatttt

SEQ ID NO: 330673 - DNA, 201 bp, Homo sapiens
tctaaacgagacattttttcccccagtttggctctcagcaaactgcctttcagatgcttcagcaaaataaaaccaaaaacaaatgtttttttttttttttwatttttgtgggtgtgggagattggatggagccattggtgtatagatgagaagcaagtcttgaaaattcatttgttttcatctaaataagaccaaatgaaa

SEQ ID NO: 330674 - DNA, 201 bp, Homo sapiens
ttttctgtttcttcgcagtccccaggctctgtacttcctgccacagactctctcttgatcttgctgtagataaaatggtgctaattcagctggctgatggmggtcagcaccttccaggaggtagaagcctgagttcctgggtccaactctgacccaagaacacgaggctccagtgtttctatttcctcagcagtttccgct

SEQ ID NO: 330675 - DNA, 201 bp, Homo sapiens
agacattttttcccccagtttggctctcagcaaactgcctttcagatgcttcagcaaaataaaaccaaaaacaaatgttttttttttttttttatttttgkgggtgtgggagattggatggagccattggtgtatagatgagaagcaagtcttgaaaattcatttgttttcatctaaataagaccaaatgaaactttttca

SEQ ID NO: 330676 - DNA, 201 bp, Homo sapiens
ttgtttggtggacgaagaattagaacaaaaggtggagaaaattgagagcaatggtgggtcccagtgaaattttactaaccccaccaggagatactgttctgtaactctctcaaggggcagggcaggaggcaacatttgaatgtttgtttctctgttccatactttcttattgaccctttagtcgatgtgtttttcccttta

SEQ ID NO: 330677 - DNA, 201 bp, Homo sapiens
ctgcaacatttttggaaatctaaaattagtccagattttttgttattttaagttctgggacacatgtgcagaatgtgcaggtttgttacataggtatacaygtgccatggtggtttgctgcatccgtcaatccgtcatctaggttttaagccccgcatgcattaggtatttgtcctaatgctctccctcccctttccccct

SEQ ID NO: 330678 - DNA, 201 bp, Homo sapiens
aagccaattaattagagctcttttttatagacatcacacacaacacatatataactacacagacagaagaagatccagtagctataaaatttttcatttgycaatctcaattctcagggtggagaaaaaagaaaaaaaatcccaatctcaacaatcccaattggattatttgcctcaggatggagccctttaagagcatgc

SEQ ID NO: 330679 - DNA, 201 bp, Homo sapiens
agaattcccactgagtgctcataagtccttcttgcatagacacaatgattcactacaaccagctgaggtatctgcatgaattgcctggggccatcccttgkctctaccatctgggacatcaaggttcctgcttaccaaatgccaaaggagaatgaactcaagagaggatccagggctggctggggctagggggttcatttt

SEQ ID NO: 330680 - DNA, 201 bp, Homo sapiens
gttgagacatgctatatggacaattttgctcgctttttccacttacaatattataggcactttccaagctattgttgtattttaatggctgcattatattmcatctagcagatgcattatagttcacttgagcctttcctgtcattggtcatttatttgctttctattagcttctattgtaaataatagcagtaagctttt

SEQ ID NO: 330681 - DNA, 201 bp, Homo sapiens
acggccacgtgataaaatgttaagtgaactgctggaaatagaggtggtccccccagatttattgtgccaatttaccagcagcggaagagcacaccactgckgtgagaaaagccatagaaaagaaagaatgacaggtagatgtatggattaattagtataatgcagataatagcatcttttccaatattaatacttcttcag

SEQ ID NO: 330682 - DNA, 201 bp, Homo sapiens
atttgattgatctgagaatggggcccaggcacccataagtttggaagttctccaaaggattctgatgtatagccacagctgagaaccactgccttatcttrtcaccctggttattgccttcacagcactgtaattgtcttcgttactcaattgtttactcagtatttgtccttctcaggaattataataaaatctccctta

SEQ ID NO: 330683 - DNA, 201 bp, Homo sapiens
gtgccccacagaggagcccagcaatatggaatggaaagttcaggaaaagtactgtctctcccttccctagttctccaccctcaaagtgggaaaatttgcarttaaggaacttaagaccttctggcaaaaagagggttaaagaaagtgctataaatctatgctttaaaacccttatggttgattttgcattctctaaggtaa

SEQ ID NO: 330684 - DNA, 201 bp, Homo sapiens
ttttatcttcttaagatgaaatcttagaccattgcttttatagcttttattttcctttctaatgtagacatgtaacactataaatttcccccagacgaactgctttaactgcattctacaaattttaatacatagtgtttgtattttccttatgttcagtaatttttaaaaatttccattgggcttccttgtctgacacat

SEQ ID NO: 330685 - DNA, 201 bp, Homo sapiens
ctttgcttttccgaataagtaaatcagttattcaggctcagcctttcatcctttattgttctataaacatatatacatatatatttttaattaattttaayagtataaaagtaaccattttaaagtgaacaatttaatggcacttagcacagtcaaaatgttatgcaaccacatttatctagttccaaaacactttcacca

SEQ ID NO: 330686 - DNA, 201 bp, Homo sapiens
aaaagagggttaaagaaagtgctataaatctatgctttaaaacccttatggttgattttgcattctctaaggtaataaaacaaagacaagttactaaatartaaaatataaatagcatcacatacgtatttaattagtaaaaatgagctagaaagttttcaggccccctcctccattttcagtgggatgtgtgtaacttta

SEQ ID NO: 330687 - DNA, 201 bp, Homo sapiens
acatgctggagggctgcgtattcgtcatctgtgttccccacatggactgagggattttcagttatagccagaagcaacagaagtaaaatattttttaaacrgctttgcttttccgaataagtaaatcagttattcaggctcagcctttcatcctttattgttctataaacatatatacatatatatttttaattaatttta

SEQ ID NO: 330688 - DNA, 201 bp, Homo sapiens
  misc_feature (1)...(201): n = A,T,C or G
caaactgagtcgtagaggatagccttatgctcctaaactgactaaagctggaacttaaaaatcagcattgtacacatttctccttttcctaaaatgtagtntttctttgcttattccttcacaccacccaaaaaaggtagaaataaaccaacagttttccatgatttcaaaataggcagacatttttttggtggctatatt

SEQ ID NO: 330689 - DNA, 201 bp, Homo sapiens
aactgagttattaataactttcatagttcctgatttttacctgaaatccctggaccagcaaggccaagttaatgaccacatacacatgctggagggctgcrtattcgtcatctgtgttccccacatggactgagggattttcagttatagccagaagcaacagaagtaaaatattttttaaacggctttgcttttccgaat

SEQ ID NO: 330690 - DNA, 201 bp, Homo sapiens
atcaaatgaagaaaccaggagtcacaaagtggctgccaggagaccctgggactaagctgcacattcatattttttggccatggcctttgcctagccttctyctctgttgagacaagcagcctggtcccatagtcatccatttgcaaccccaggcataaacatgctgcctactgaaactttggtttaaatatttggtttcaa

SEQ ID NO: 330691 - DNA, 201 bp, Homo sapiens
gtttgtgtccatgtcccccacccccaccaataaatggtaaactctttgagggtggagaatgactgtagcatacaaataagaaatgcaattgctttggaacrtgaaggaatgaatgaacggagaaagcttaagtctacagtcaatccttgtccttctttcccttcattctattattagtctctcccaaagcttagtttccta

SEQ ID NO: 330692 - DNA, 201 bp, Homo sapiens
atgagatggagtctcactctgttgccaggctggagtgcagtgacgtgatctcggctcactgcaacctccacctcccgggttcaagcgattctcctccctcmgcctcccaagtagctgggattacaggctcccaccaccatgcccagttaatttttgtatttttagtagagacggagtttcaccatgttggccaggatggtc

SEQ ID NO: 330693 - DNA, 201 bp, Homo sapiens
ccatgtgttgtattatgaatatagaaaaataggaaggaagctgtggccatcattaagggacagggcatgtgcattgtgcgaaggagcaaaacaaaagaggygaaggcatttatttctagtctcgtagtcccatttctgtcagggctttgcttaaggcaagtcacttcctctcccagagccactgtgtcctcttcaataaaa

SEQ ID NO: 330694 - DNA, 201 bp, Homo sapiens
tgtggctagaaatctaagtgtgtatgagatgcttctggcagtaaaaaggaggcctttaaagatgagaataatgactgaataattgttagggaggtcaccckaacaattatcctcatctttaaagacacctattctatagtttatagaagaaaatgccaatgtctctaattgctgtgggagctggctttgctgtgacctctc

SEQ ID NO: 330695 - DNA, 201 bp, Homo sapiens
acaattcttgtagccactgtattctgagtcattaaatcttctggttgactatgtggcaaatactttttccttttctctggccaaaagcccttccaaaaatrtgtttccttttctctggctaaaaagcccttccaaaaatgtgtttccttttctctggctaaaaagctcttccaaaatgtgtaactccattgctcctctttg

SEQ ID NO: 330696 - DNA, 201 bp, Homo sapiens
aggtttataaataagcacatttctaatccaatgctctttccactacaaatatgtataaatttgattaacaggtgatacttcttggatagacaatagtactrttctgcttatcttctagaaaaaaatgaactacaggcaaaaataaaaggctatatgccagattaatccactgaaaactcaacacaaatctatcttctctct

SEQ ID NO: 330697 - DNA, 201 bp, Homo sapiens
aggctggatttatggtttaaattgtttgatgacagtcagtaatcctgactggataaaacttggtgtgagtttttataaaactctgaagtttttgcctgttrtaaggaaaaccagtcctggcttatctctgatgcaaaactgttaggtgatgtttatagttcaatgcttttaagatcttagaaacatgcatttttcccaggc

SEQ ID NO: 330698 - DNA, 201 bp, Homo sapiens
ttatagttaaagcactacattaaatttttaaagtgatgtgtaaacactgtaaaaatttttttgtaaaataattaggtaaaaagcttaatgtaaaacaaaawttgagtgctaagtgtatatttatttggggtaatgaaacacatgcaagataatgcagcttccccaatgactgtctcgtagaataaagagagaaggctggat

SEQ ID NO: 330699 - DNA, 201 bp, Homo sapiens
ctaataaataactatatcagttctccaaagtgacctcatgtcagagctgaaggatagttggttccagtggcaactgagatgctgcatcagttgaacagatrggaaagaatcaaagtgtatgcttcagaagaggtccgtataacattcagtgtcagagacaacagtagatgttaatccagcagagcgaattctgtagtgggg

SEQ ID NO: 330700 - DNA, 201 bp, Homo sapiens
cacttaggataatggcctccagctgcatccatgttactgcaaaagacatgattctgttcttttttatggctgtgtaatattccacattgcatatatacagkgtcagcatttctatcctccatccatatctaacaagaatccagagtagcacccatgcagaaggtgaaattcttaaaaattacatgagcagttgtgagttgg

SEQ ID NO: 330701 - DNA, 201 bp, Homo sapiens
aagagagcatcagacaaacataaactgagggacattctacaaaatatctgataagtacccgtcaaaagtgtgaagatcgtgaaaagcaaggaaagactgakgatctatcacagattggaggagactgaatagagatgacaactaattgtatgtgagatcctggattatatcctgcaacagaaaaaggacagtagtagaaaa

SEQ ID NO: 330702 - DNA, 201 bp, Homo sapiens
actgtctctcaggacttctgcaaaccttcagtcggatgtgtcctgcccaaaactccttatattagagttgaaaaaattaaagcctagaaaagaaacgtgayttgactaaggtcacgtgcaaatttggtctcttgccagatctatgttcctttcattataccatgtagggtcttaatacatcattatccttggaagtctaag

SEQ ID NO: 330703 - DNA, 201 bp, Homo sapiens
gaggagactgaatagagatgacaactaattgtatgtgagatcctggattatatcctgcaacagaaaaaggacagtagtagaaaaagtagtagaaactgaayatagtctctaatttagttcatagtgttgtgccaatgttaacttcttagtttcaataaaaaaaaaaagttaagggaagatggatgaaagttatatgcaaac

SEQ ID NO: 330704 - DNA, 201 bp, Homo sapiens
gtttttcatatatatttttaatccacactctcataaaattaaattgaagaataagactttctagatgtcataaaaggatatttgagaagattgtgctttartaggatttaaatgaagtaaagacttagcttgggtagctcagaattggacaagttttgcccagccttgcatagtatctttttaattaaagaggctatgaaa

SEQ ID NO: 330705 - DNA, 201 bp, Homo sapiens
attaatcactggtatatttttaaataatcaagttgtaaaaagtataacaataaaaatattttataaaaatgtaagaaaaacacgtatataacctgtagttggaaaggccatcttaaatgagagagaaaacccagaaaccttataaagaaaattatcaacaaatccaaccatacaaaatggtaaaatccttatatagcaaaa

SEQ ID NO: 330706 - DNA, 201 bp, Homo sapiens
ctgggtaatttataaaggaaagaggtttaattgactcacagttccacatgactgagaaggtctcataatcatggctgaaggtgaaggagaagcaaagtcaygtcttacatgacagcaggcaaaagagcttgtgcaggggaactcccgtctataaaaccatcagatctcatgagactcattcactacaagaacagtatggtg

SEQ ID NO: 330707 - DNA, 201 bp, Homo sapiens
atcctacaatgtacaaggtagcccccacaacaaagaactatccagcccaatatatgaacagtgccaagattgagaagccatcccttatatcaaccaatgcyatgcatggctaaaattggttcccctctaattttcccacctgctattctgatgccaacagcagcactgatggcatcagaaaatcagttcgtgttcattgaa

SEQ ID NO: 330708 - DNA, 201 bp, Homo sapiens
actcagttaaggtcaatattggtgtatttcttgcacacttctgtaatcttcctatcctatctttttgaccttgaaaattagagtacaacatttgcatcagyagcatgtggaacgttttctgtgtctggttttgcccatcttttgaaattcgtgattacatgatcctgcctgttccaaaggaagtagaattgtagcactgtg

SEQ ID NO: 330709 - DNA, 201 bp, Homo sapiens
cttttctctggctaaaaagcccttccaaaaatgtgtttccttttctctggctaaaaagctcttccaaaatgtgtaactccattgctcctctttggtaatcrgaacacattagtgagaacagaattgtgtttagatggctacagttcctggggccttgctgccatcatttcgaatgttggtcctcactgttttatcttatgg

SEQ ID NO: 330710 - DNA, 201 bp, Homo sapiens
gaggaaatagaggggagcttttaggcttcttcaagtatgtgatctttattctacaaattgccttttaatgattcacagtttctgaatctaaaaggtaaggttttttttttttttaaccaaaatcttaatagcagtgaggaaatagccctatgccaagcagtttgggtccatgctgttcaatcaattcgacgtattactagc

SEQ ID NO: 330711 - DNA, 201 bp, Homo sapiens
ataaaggaaagaggtttaattgactcacagttccacatgactgagaaggtctcataatcatggctgaaggtgaaggagaagcaaagtcacgtcttacatgrcagcaggcaaaagagcttgtgcaggggaactcccgtctataaaaccatcagatctcatgagactcattcactacaagaacagtatggtggaaactgcacc

SEQ ID NO: 330712 - DNA, 201 bp, Homo sapiens
cacagttccacatgactgagaaggtctcataatcatggctgaaggtgaaggagaagcaaagtcacgtcttacatgacagcaggcaaaagagcttgtgcagrggaactcccgtctataaaaccatcagatctcatgagactcattcactacaagaacagtatggtggaaactgcacccatgattcaattatctccacctggc

SEQ ID NO: 330713 - DNA, 201 bp, Homo sapiens
aagtacacacggatcattcactttctcctttgccaatttatgacaaatgatattccatcacatattcatgtaatcattcattcattcaaaatcattgggcrtgtttgatgccatgaaaaaagaatggcccttggaatcaaatggccctgggctggaatcctgactgctatgccacctctaggagctttacatgaagttatt

SEQ ID NO: 330714 - DNA, 201 bp, Homo sapiens
tagaaggaagaacaaaacaattaagtgaagctgtgcaccatcaggaacagctgattcagaagagggacatcagctggtgtgtttccctgctctttcgttgttatcagttaccattggtagaaggatattttgtttataatcaaaattaaactaaatctttggagattaagttttctgaaagagcttaagggcaggatcaag

SEQ ID NO: 330715 - DNA, 201 bp, Homo sapiens
tacagagagtttaagtaatttgcccacatggagatagtacataggtgatggtactagtacagttcagctctaacacggtgctttttttttttttcattacrttgcattattacctcttaagaggcccctgggagatacctacctgtgtacataaattaaaatcaaagtcctgtggtttactgatttcccaaagccaaaaca

SEQ ID NO: 330716 - DNA, 201 bp, Homo sapiens
gtgtgttcattagtgagaacacccactaagttccagaaaggaaatgtgggtcagagaaaaagcaacagatggagagcaatgagataatcaagctgtagtgkacactcaggcctgctgctttctttatgtcagcctatgtacccctatattggcagccaggtgaaccttagtacccatgctttctagctcatggtgctttcc

SEQ ID NO: 330717 - DNA, 201 bp, Homo sapiens
aggaaagtaaggaaggatgctccaggcagtgcagccactgcaggcaaaggcttgttggtggaactgccaggagccccgaaaggctgggcatacatttgggtacaaggtgttgaggagtgccagaaattcactaaatctattttcctgctagagtcattttgaatacaagagattttctttaaaaaccctttagagatattt

SEQ ID NO: 330718 - DNA, 201 bp, Homo sapiens
ggctacttaatgcaacatagctaggctaaagggcatgatttgggagttcctctggctttccgttaaactcagatctcacttttctgaaaatgtaaggcatscagggtctgtgaagagatcagagacagaaagagagagggagagagagagaaccagaatgatttttccgtgtactgcaagagcaccattcccttcctacca

SEQ ID NO: 330719 - DNA, 201 bp, Homo sapiens
atttactcatgactgagctctattgaaaggaacataaccctgtgatcatagaatctactaaatcttaaattaaaaaaattaaaaacaaagcacctctttakcatcttggaatgaattttcctgaccactaagtgggtgctaatccttacagagttaccagacattgatacttgaagcattgatagagttggcttcattatt

SEQ ID NO: 330720 - DNA, 201 bp, Homo sapiens
ctgtctccatgatttgcagttttaatttactcatgactgagctctattgaaaggaacataaccctgtgatcatagaatctactaaatcttaaattaaaaawattaaaaacaaagcacctctttagcatcttggaatgaattttcctgaccactaagtgggtgctaatccttacagagttaccagacattgatacttgaagc

SEQ ID NO: 330721 - DNA, 201 bp, Homo sapiens
gatttctttaaatgataattaaatgctgagctattcctgagattgcagtatggttccttttcaaatatatctgatctgagcatttcagcaaaaggcataaragggaaaccaacaagaaataggacagatgataaatactgtattgatgttaagtaaagacaagcaaactgtgacctgagtatgtctgtctctagggagcct

SEQ ID NO: 330722 - DNA, 201 bp, Homo sapiens
gcagagagaggggtggcgagaccctttgagttctgcgggtttgccgccttcagaatcaaaaatcttctcagcccaagggtgtgtgaatgtgtgtgttttgsgggggggggtggttaggatctgtgtgcagtcctagaagggtgaaggaaaaagtggtgggggatgagaaagaagaggcagatgggtgttgattttcaactg

SEQ ID NO: 330723 - DNA, 201 bp, Homo sapiens
gctgggcaagataacaacagatgcctgtacccacactctaccctttgctctagtaagtaagcctagtgattagggaagctagctagcctttggtcctaggsttaagtgacaactaaggagtgatatttttcaaaagatatagaaccaaaatttgtattttttcaggccctatttttgtcaaatgacttaccatcatcaatt

SEQ ID NO: 330724 - DNA, 201 bp, Homo sapiens
catctgtggaacatgtcattgatttgttagccaacaggtgtgaatgaatgaggtgctttataatgtctcttaatgattgttcttgacaagatgcttttttwaaacagggtcccaagggtctgctcctattggatgcccatatctatcttaatatggttttctaatcctgatgccttttaaagtttattcggatgttaaaac

SEQ ID NO: 330725 - DNA, 201 bp, Homo sapiens
atttccctataatttttaataaattttagggcaagctgacaagagtatttactataaatcaataaattggtctatatgtatatagtttattctaaatttartctgtgtagatcagatactcaagtccagatctctgtagcattgatgagaagtttctggacttccaaaattagaaaccagatactgaactatagtaaattc

SEQ ID NO: 330726 - DNA, 201 bp, Homo sapiens
agtgaagcaaaaaaaaaaaaaaaaaaaaaagcaaaatgttgttcagtctttggcataatctaacacaaatttagttggtcccatgattgcatgaacttcargaggccagaagagagccaatttgtctatgtttttgaaatcgcggagccagccccaggaagagactgtgctgcaggcacagggaggacttgcaacctctgg

SEQ ID NO: 330727 - DNA, 201 bp, Homo sapiens
gtgaagcaaaaaaaaaaaaaaaaaaaaaagcaaaatgttgttcagtctttggcataatctaacacaaatttagttggtcccatgattgcatgaacttcagraggccagaagagagccaatttgtctatgtttttgaaatcgcggagccagccccaggaagagactgtgctgcaggcacagggaggacttgcaacctctggt

SEQ ID NO: 330728 - DNA, 201 bp, Homo sapiens
gggatttgtaatttatggtaagaatggcagtagtgccattgggaaatactttggcaagataacacatcgctgtgatgcagcagttaagttccatggtttargctgtgtgaaaattaatttgcaaaaatatttgggtctgttttgtgttctagtttatatgtaaattagaagattgtacaaaaaggatgccaaggatgatgg

SEQ ID NO: 330729 - DNA, 201 bp, Homo sapiens
gattcctttccaaagcagcgtccaaccacgagtagaggacaccagcaaagccgtcgcccttggctggaactggagggctgctccttactctgaactgcagygacttgagtgcatacacccaccgtggcttcctggagtctgctgatctgtcctggcccagccatgtggccctttgctgaggttctgatgtgaccgcctggg

SEQ ID NO: 330730 - DNA, 201 bp, Homo sapiens
taagcaaaaactgaacatgagggaccagtagccacctgctggcagacaagcatttgcaggaattagtaggcctgggggctgtgtgtgtctccggttgcaasaaggggaggaggttagttcaaagaaagctagaaagcactatggagactcctcaaaccaccttactatccagcaaccccacttctgggtatatacccaaag

SEQ ID NO: 330731 - DNA, 201 bp, Homo sapiens
agtctaccaacatgcaataaagcaatagattttttctgtatttttaaaaatgatgactgttttttcttatgctctcgagggatgtcttcgctgaagctaarcaaaaactgaacatgagggaccagtagccacctgctggcagacaagcatttgcaggaattagtaggcctgggggctgtgtgtgtctccggttgcaagaag

SEQ ID NO: 330732 - DNA, 201 bp, Homo sapiens
caagtgtgtttcagcttcagggaaccgagagatatttctggcaacctgtgagagctaattcaccttcaggaggtgagtagccaaatatttataccttatcrgattctgactcattctccacctttaaaagtatgtgtcacagtgcctaaagcttaggctgggtatcagggacatctaaggtgccagactgactctgcagtc

SEQ ID NO: 330733 - DNA, 201 bp, Homo sapiens
ttggctattaatgcacatcagcaagtgtgtttcagcttcagggaaccgagagatatttctggcaacctgtgagagctaattcaccttcaggaggtgagtarccaaatatttataccttatcagattctgactcattctccacctttaaaagtatgtgtcacagtgcctaaagcttaggctgggtatcagggacatctaagg

SEQ ID NO: 330734 - DNA, 201 bp, Homo sapiens
ttcatctggtaccaggtgcatgcagaagcaagggcagaatttcaaatggaactgaatttctaattgtaagttggaattgcctggatggtagtgtttgtgcrtcagagaacacagtgcctttgagatcacacaggactgggtctgatcccagcccttctactttattcattcatttactcactatttattgaacacctgcta

SEQ ID NO: 330735 - DNA, 201 bp, Homo sapiens
agtgggaacctgcattaggctactagtagctaggttcaatattcaaagcattcaaagctatcacccagatttgatcatggtaagatttgggagatgacagwtatatatatatataatgcctgcaagatttccttcctggctaataggaagtgtaattatacaaaagtctaacaggaaagttaagaggacaagtgaaatgtg

SEQ ID NO: 330736 - DNA, 201 bp, Homo sapiens
tggatgaataatggcagactctgccatttcctaccattttggctattaatgcacatcagcaagtgtgtttcagcttcagggaaccgagagatatttctggyaacctgtgagagctaattcaccttcaggaggtgagtagccaaatatttataccttatcagattctgactcattctccacctttaaaagtatgtgtcacag

SEQ ID NO: 330737 - DNA, 201 bp, Homo sapiens
ggaagaggaagcaagtcaccttcacagggcagcaggaaggagaagagctgagtgaaggaacaactggatgcgatgaaaactcactcactgtcaagagaacwgcatgggagtaactgtccacatgattcaattatgtcccaccaggtccctcctacaacatatggggattatgtgaactacaattcaagatgagatttggct

SEQ ID NO: 330738 - DNA, 201 bp, Homo sapiens
acacacacacacacacacacacacacacacatattcatccactttccttccctgcacacctgctcaacaggcacaatgcctgtgttaattcattcatatayaataaatttatcttctttcctcccctggtaagtggatgaataatggcagactctgccatttcctaccattttggctattaatgcacatcagcaagtgtgt

SEQ ID NO: 330739 - DNA, 201 bp, Homo sapiens
atgttcactagtgcaagaagagctctgggaattaaggccttggagagcagcaggggcctgattatggagggccataccaactgggagtttggattttaccygaaaggaactagaagtttggattttaccctaaagaatcaaaggagaggttgaaactcttacagaattcaaagtcagagaagagggccatatgagctaaga

SEQ ID NO: 330740 - DNA, 201 bp, Homo sapiens
agggttctctgaagggacagaactaataggataggtgtatatatgaaggagagtttattaaggagtactgactcacacaatcacaaggtgaagtcccacartagaccgtctgcaacctgaggagcagggaagccagtcccagtccccaaatctcagaagttgggaagatgacagagtgcagctttcagtctgtggctgaag

SEQ ID NO: 330741 - DNA, 201 bp, Homo sapiens
tcatgtggctgggtcctcccattgttcaggtctcagcaccaagatcccttcccagagaagcattccctaatcatcttatctgaagtagcctgaactctaascccccagagctctctacatcactcactgattttattatctctacagtactcttcactctctgaagttatcttttctattttttatttattgtcttcccca

SEQ ID NO: 330742 - DNA, 201 bp, Homo sapiens
aaaccatcagaccttgtaagaacttactatcatgagaacagcatgggagaaaccaccccaagatccaattacttcacctggtctctcctttgaaatgtggrtattatggggattataattcaaaatgagatttaggtggggacacaaagcctaaacctaccgtaccactttgggtccctcccaatcctcatgtctctgaca

SEQ ID NO: 330743 - DNA, 201 bp, Homo sapiens
aatccctgactccctccccaaatttgtttcttacctccatctaattcagtcatacctaccttctttctgcctggggaacactccaagccattccctacctkaggacatttgcatatgctattctgtctagtaagttccacttctagtctaggttgctttgcaaccctggctgcacattagaataattttaagccttacctt

SEQ ID NO: 330744 - DNA, 201 bp, Homo sapiens
ctgtaagcaggcagcctcattcctccacattggtcaaaggagagaacaaaggcgacagcactgtactggtcaacatgaccttctaagaatataataagagttttttttttttaagagccatacattacatacatcaagggttatctcagattgcctggggctttctcagttttaacactgaaattcttgcatcctagaaag

SEQ ID NO: 330745 - DNA, 201 bp, Homo sapiens
gggcaagaaaagaggatctgtggaggacacaacagataatcagacagtgggaacaccaagtcacagagttcttgcagctgtgtgtcctgtgcagacaaagmcactcaccctcctcctgcctttatggaaggaaggtcgtaggcaatgttactttgtttttggcaaacccccaaaagaagaaaccactccacatagtctgag

SEQ ID NO: 330746 - DNA, 201 bp, Homo sapiens
acttacgatgggtcgatgactatcccaccctgctatgagacagcaagttggatcataatgaacaaacctgtctatataaccaggatgcaggtgagtttctmtctggtcatttagctaatggagaagaatgatgttaaaaaaaaatcactgaaatgtggagtgcctattataatagtttactaggaccactataacaaagtc

SEQ ID NO: 330747 - DNA, 201 bp, Homo sapiens
attaattgagtatgcctcgttttatgttgtatgtgtgattttttttttctttctctctctttgcagtaaatgaatggctcctcaagtagggaacaaagccmagaagaatcccacctcagtgaaatgctacaactgtgaattgacgtaacctagaatgtcccccttcttgcttctctctccttctttcccccaagcctcatt

SEQ ID NO: 330748 - DNA, 201 bp, Homo sapiens
cagacattgagacctatggatccaagaaataaatgcacatggctcattgaaagtatggaattaagcaattaatcccttgacctagactcccatcagagtgmcctgttctgaaaccaggctgggttgggtgggcatctgaaagttgcctccctgtacccttctgcctggatccttcaccctcgactgtttctgccctgagaa

SEQ ID NO: 330749 - DNA, 201 bp, Homo sapiens
tcccatatgggttccatctcttccctgtcaccatcaattctgtctttatctacagcttgaaaagtaatcatcaaatccatttgtatcaacaaagttgcctrtcacttgctgaaaaggctggtattttatgcatgttttacttctctacaatcaaaaatatcttaagttaaatgaagacagaaaaggcattcatgaatagaa

SEQ ID NO: 330750 - DNA, 201 bp, Homo sapiens
gatgctatcctaattattgttccatttatagttttatttttataaattctgcaaggagcttgtcatggcttctaagtacatttctctttaaaaaggtgaawtatttaaagtcgtgaacacgtgtgagttcgctggtcagtatttaagaaggaaaagttgtagttatgattaaatattcagtcattctttctttcttggaga

SEQ ID NO: 330751 - DNA, 201 bp, Homo sapiens
attccttcttctctctccatctgagcacattcttgcttgcatctaaactaagcttctcccatcaccaccgaagtccattgtcttagcaagagcaatcatckccttctcagtcatatctcccatgtttgaaaccagtgtgtctctacccacccacctgaatgtggcctcatcaggtatctagagaaggtccaaccttgtaaa

SEQ ID NO: 330752 - DNA, 201 bp, Homo sapiens
taggtgtagatttaaaaattggtgttctgcagatttcttttgtctgtaattccttcttctctctccatctgagcacattcttgcttgcatctaaactaagmttctcccatcaccaccgaagtccattgtcttagcaagagcaatcatcgccttctcagtcatatctcccatgtttgaaaccagtgtgtctctacccaccca

SEQ ID NO: 330753 - DNA, 201 bp, Homo sapiens
tcattgttcagtaataggtcttaagattgaagggtgcataaaggaaaggattttatacctaattcaacatttattgaggcctgtaattcactagggtacayggcacatgcttaaataattcccctacaagatgctatggagggaactgcagcttaatgaaccccaagttcataccttggtaagtggtgagacagtatttga

SEQ ID NO: 330754 - DNA, 201 bp, Homo sapiens
cctctactgagttggttctggtgaccagcctcttcctgaggctatctagggtccccaccttaagtcacctcattagcataaactcagatatgattaaaagkgttcattatgaataacaaaagatactcttattcaggcatgtccactgcttccagtatataatactgtgctataaaaggaagtgcagaagacttcctcact

SEQ ID NO: 330755 - DNA, 201 bp, Homo sapiens
catgtctacttggctatcttttactgttgagtaggttgttaaaggtaaaaaaaaaatgcacatgcagaaaattgtgttcaaaggtaatttagctattgtthagagaaatggaaaataatttgtgtgcaaaaaattgaggttaaaattattgacaacttttgataataccagcggctgattcttcagggtttgggtcattgg

SEQ ID NO: 330756 - DNA, 201 bp, Homo sapiens
tcaagctaattgacatatccatcacctcacatcatttttttatggtgagaatgttaacaatctattagcaattttaaagtatacatacattattattaacwgtggtcaccatagagcagagcataatagatcactaaaacctattccttcagtctacctgaaattttctaccctttctccttccctctctccaccaacctc

SEQ ID NO: 330757 - DNA, 201 bp, Homo sapiens
agcaggggcctgattatggagggccataccaactgggagtttggattttacccgaaaggaactagaagtttggattttaccctaaagaatcaaaggagagrttgaaactcttacagaattcaaagtcagagaagagggccatatgagctaagataggagcagtgaggggcctagggatggttcagcttctagagttaggga

SEQ ID NO: 330758 - DNA, 201 bp, Homo sapiens
gtgtaaggttgcagcaggactagggcaggggcgaggaatatgcagaatatgcatgaagcttctaggccttctttgggtgcaccaccgtctcagcacctcartatgttcaccaatcgggaagctcatcaaatctcgcgaagactttttttaaaaataattatgacccctcaccagatggataggatttttttttttaattca

SEQ ID NO: 330759 - DNA, 201 bp, Homo sapiens
tatctcttcccaccacctattcctccaggatatacctcaggccttccatgcaccaggggctcaatgtttgccaaacaaacttgggtcagaatagacagcartattccttaaagaaaaagacaaaggcttgactcgggagacagagtgaagggctgttcctcaacccttaaattgagttataaaataataatagtaacaaac

SEQ ID NO: 330760 - DNA, 201 bp, Homo sapiens
attgttaagagaaatggaaaataatttgtgtgcaaaaaattgaggttaaaattattgacaacttttgataataccagcggctgattcttcagggtttgggtcattgggctctgttctctcttcctttgtgcagtctgttcaccataaataccatgaagtttgtaagttaactttttccccttctgatgtattgaaatatat

SEQ ID NO: 330761 - DNA, 201 bp, Homo sapiens
gcgacatggaacaggtacacagtgtaaggttgcagcaggactagggcaggggcgaggaatatgcagaatatgcatgaagcttctaggccttctttgggtgyaccaccgtctcagcacctcaatatgttcaccaatcgggaagctcatcaaatctcgcgaagactttttttaaaaataattatgacccctcaccagatggat

SEQ ID NO: 330762 - DNA, 201 bp, Homo sapiens
gcaccaggggctcaatgtttgccaaacaaacttgggtcagaatagacagcagtattccttaaagaaaaagacaaaggcttgactcgggagacagagtgaarggctgttcctcaacccttaaattgagttataaaataataatagtaacaaacacatcagtacaatctgtagtacatgctataaatggaaagtactcaaggt

SEQ ID NO: 330763 - DNA, 201 bp, Homo sapiens
tgggattgagatggaaaatgtgtcaaactaacacaaacaatggatatataatttttactttccatcagaatgtcttaaaggaaaaatgttgatgtgaaagaaaaaaaatgtcaacacagcttctccctaaaatttattgggaaagaagagattgggagatagtctagtgttaaaaatcactcacatattatgacttgggtt

SEQ ID NO: 330764 - DNA, 201 bp, Homo sapiens
ctaggttgagtaagcacatgcccaggattgactcatccctcacattcttctttccttgggctcttattgggcaactgtcccatttggtccagtcccacacrtgggaagcaggcagcatcttgaaaggctcattaataaagctgagtgttgttggtctaattacacttttccaatctttgcctcaacaggagggaaactaac

SEQ ID NO: 330765 - DNA, 201 bp, Homo sapiens
ggaattggctcacaattatggaagccaagaagtcccacaatgtgcagtctgcaagctggagaaccaggaggtgctgatggtgtaatccccaatcccaaacyacagggagagaggtggtcgctagtgtaagtcccagagtctaaaatctgaaggcccaagaaccaggagctctgatgtccaggggcaaaaaaagagggatgc

SEQ ID NO: 330766 - DNA, 201 bp, Homo sapiens
gttctcaccacaaacaagtatacaaagtaatgcatatgttaattagccagatttagtcaatccacaatgtatacatatttcaaaacattatcacattgcayacaataaacatattgaattttcatttgtcagttaaaaatataaataaattttaaaatgctaaaggaaggaagaaagggagggaaaaaagagaaagaaaag

SEQ ID NO: 330767 - DNA, 201 bp, Homo sapiens
aaagaggacagcaatagttgcaagaaccatgaagtgtattacaaaaattcacagaacttcatgactaatgagctctcatgaataaggaagacaaaagagtytcagtaggcgcccaagtctataaatatagcactgggaggatgatggccatgttagaggggatgaaggaagaggaggagatttggagtagagttcagggtg

SEQ ID NO: 330768 - DNA, 201 bp, Homo sapiens
attgactcatccctcacattcttctttccttgggctcttattgggcaactgtcccatttggtccagtcccacacatgggaagcaggcagcatcttgaaagrctcattaataaagctgagtgttgttggtctaattacacttttccaatctttgcctcaacaggagggaaactaacttgaggaggagtctatattttacaga

SEQ ID NO: 330769 - DNA, 201 bp, Homo sapiens
tgtgtctccggttgcaagaaggggaggaggttagttcaaagaaagctagaaagcactatggagactcctcaaaccaccttactatccagcaaccccacttytgggtatatacccaaaggaaataattttttttttttttttgagatggagtttcgctcttgtcacccaggctggcatgcaatggcatgatctcggctcact

SEQ ID NO: 330770 - DNA, 201 bp, Homo sapiens
cttgatcctccctgtcacagttcaagttctcccaccaactacatgtgctagtctaggttgagtaagcacatgcccaggattgactcatccctcacattctyctttccttgggctcttattgggcaactgtcccatttggtccagtcccacacatgggaagcaggcagcatcttgaaaggctcattaataaagctgagtgtt

SEQ ID NO: 330771 - DNA, 201 bp, Homo sapiens
agcattcagtcttcacaacaatccatgaggcagggctattgctatccccacattacagatgaagaaagagaagtgaggaaacccttgcccaggtggcactsggggtgtggaagagccagattcaaacccaggtctctctgacaatgggttcaactgaaggccctgaagcacctagaagttggcctggggaaaacaggaatg

SEQ ID NO: 330772 - DNA, 201 bp, Homo sapiens
agatgatatctgcgggagcactcagtagatgccgtcttgtcctgcatggtacccatcaccacatcccaggcaccaatcccaggcaccagtagcacttaccragtgttcacatcctaggttctgaaccacgtttctcatacggaatccatccttttcttgaaccttttggcttcaacttcatgattcatcctccaatttcat

SEQ ID NO: 330773 - DNA, 201 bp, Homo sapiens
cctcttctaggagcggagtcccattgccagatcttgtcaacgagggagcaagcttggagtgggattttggtaggcatcagttgcctatctagcaacccctyccctcccttctttcttaatagtagaatctgaatgtctttgccccctgtaataaagcatggttggtctaagctaaccatgactatcacattcttccttgtc

SEQ ID NO: 330774 - DNA, 201 bp, Homo sapiens
aggcttctttctgcgtgtctattctttaagagcagttctattggagggggtatttaagaagaccctaacttgaagacaaatctatacaaagacttgtgggtttttttttttcatttttttcctttccagattttcaagaataagattgtattagccgaagttctctactgaaacagacttataggatatatatatgaggag

SEQ ID NO: 330775 - DNA, 201 bp, Homo sapiens
tttattttctctgaaaagaaatgcaacctcaatatccacatccacctcattagagaaagcagagatgtatgaggtttagtagaaactatatgatatcatayaactcatgccagctggtaggaggcatgatgcatatgcctctttagtcaccagcaaatgaagagggagcagaagaatttgctaatacctgaaatttaggca

SEQ ID NO: 330776 - DNA, 201 bp, Homo sapiens
agttggtataatatacaacttcactaccacgtttatcaggcattcacccaatatttttctggcacttattatgtactaagcttttgcataaataatggaattttttttttttttttgacggagtctcgctctgtcccccaggctggggtgcagtggtgtgatctctgctcactacaacctccgtctcccgggttgaagcga

SEQ ID NO: 330777 - DNA, 201 bp, Homo sapiens
gattggtctataacaactctatttagtatcggtcctttccaaggtactaaaacaacccaagcacttttttttttttttatccctgtgttgacttatctttktaacagtcccagatgtaggacactttccaaaaaccttttgaatatttaagtctgagatatccccactgggatagttttcccattattaatgttttgaaaa

SEQ ID NO: 330778 - DNA, 201 bp, Homo sapiens
ctaagaccttgattttctctaagaccccttctaagattctatgagatgcagaattggtattcattcagcaaatgcttgccaacatctcctctgagccaaakcccatcaccagggatgtgatgatggatatccatgcccttgagatgtttacccaaaagtagacacagactcaaagagaatagtttcaaaatagcatgtgct

SEQ ID NO: 330779 - DNA, 201 bp, Homo sapiens
aactttgcctctggtcctaagaaaattctaggacataagtgaaattcttcgttacccttaggatggaatcaagaccccctaccttggcctgccaagctctycatggtcttctcctgccttccaatacaatttctcctcatatcaccctcccttacttaggagttgttcaataaacacatgttgaatgattggatctatgaa

SEQ ID NO: 330780 - DNA, 201 bp, Homo sapiens
ccgaggtgggaggattgcttgagcctgagaggtccaggctgcagtgagctgagatcatgccactgtactccagcctgggtgacagggtgagaccttgttcaaaaaaaaaaaaaaaaaaaaaaaaacgagagaagaaataaaattttatcttcacataaaacctacacatgaatgtttatagctgcattatctatatcactg

SEQ ID NO: 330781 - DNA, 201 bp, Homo sapiens
aaagtgctgggattacaggcataagccactgtgcctggccccatttccctttcttgatatggagcctgttaggtgtgcaccatcatgttcagccaatcttyctagctccctgtcatccacacccagtcagggaccgtcttatccgggcaaaggagattggtctataacaactctatttagtatcggtcctttccaaggtac

SEQ ID NO: 330782 - DNA, 201 bp, Homo sapiens
atgacaagtgtggcttgtgtcaacttggaagcctgcttgcagcaggtctgcttatttaacacagaggagtacttgtctgttagcttgaaagctgagttacyggtcaccaaaggccaatggttttcaggcttccacttcaattaagtgcataggagaaactttgcctctggtcctaagaaaattctaggacataagtgaaat

SEQ ID NO: 330783 - DNA, 201 bp, Homo sapiens
  misc_feature (1)...(201): n = A,T,C or G
caagaatccagagtagcacccatgcagaaggtgaaattcttaaaaattacatgagcagttgtgagttggttcctgaaacccttattctaagaagatgggtnaagggcccttctaatgctgttttcttatcagtgtcaaggcatcctgctgtaaggctgccaggagaaaaagcctcctccttctttcccttttgccttccgc

SEQ ID NO: 330784 - DNA, 201 bp, Homo sapiens
gagcatcacgctgagaaaggtgatctaaggtctgagaacacagcctgttgccctcctgaggcatgaggggtgagtgagcagcccccggcatgcactagtgyatcaccttgctaccacaaaatgaaaactctgagacctgtgcaactgaagctgctcccagcttaacctatgacaagtgtggcttgtgtcaacttggaagcc

SEQ ID NO: 330785 - DNA, 201 bp, Homo sapiens
tactgcatgccaggccttgggctaagtgcttttttatattcggttttatagaatcatcacacagtgctatgagtattagttatgaattattactatccctsttatagatgagagacttgctcatgtaaggggacccaagggtgaaaccaggctttgcaacccacgcagcccaatgtgatactcagtgtcttggttcccatt

SEQ ID NO: 330786 - DNA, 201 bp, Homo sapiens
actagagggtgtgtacactatgaggtaggaatgttgggggctgtcttattccatttgtgtttccgtaaatgaatacctgaggctggataattcataaagarttttgagataaagagattcatttggctcatgattctacaggctggtgtacaagaagcatggcaccagcatctgcatctggtgagggcctcaggctgtttc

SEQ ID NO: 330787 - DNA, 201 bp, Homo sapiens
ccatcaacccaaaaagtttctgtgttcttctgtagtccttccctcctaccctagccccggcaatcactgatttgcaatcactagagttttgcctttcctgkatttcaatccgtggacttatacagtatatagtctttttttttttactttgttttttaagttatacagtagaattaacttttttattttggcataaagttc

SEQ ID NO: 330788 - DNA, 201 bp, Homo sapiens
atagtactggagtggtcatgagcaattaagcaagagaaagaaagaaaatgattatccaagttggaaaggaagaaatcaaattatccttgtctgcaaatgarataatcttaggttttaaaaaaacctatcattcccatggtaaatggtaaatagatagatagatagatagatagatagatagatagatagatagatagatag

SEQ ID NO: 330789 - DNA, 201 bp, Homo sapiens
acagactcaatgtcggatccacaaaggagacctgcacatacctaacccctatttctgcagaagctgaaggctgtattatctattgcttgcataataaataytgcataacaacaacaatagtagcttactatggaatggttactgcatgccaggccttgggctaagtgcttttttatattcggttttatagaatcatcacac

SEQ ID NO: 330790 - DNA, 201 bp, Homo sapiens
tatggacattttgggaagaccattattctttttttcatacttacattatctccaaagctaatggaagcacaattaacccatcacatgaacatatgattttrtagttgtcagtactggtttactcatgttacttcattcatcccttacaaaatttgcactcatactcccctttttccagatgagaaaacaaagcaaattaga

SEQ ID NO: 330791 - DNA, 201 bp, Homo sapiens
actgtgttcttctctgcagactgtgtgtgctcttatgcatgaagacaaacttgttaatgactttctataaataagttctagcttatagttgttccagcaamagctgctgaaatgtgatctcccctcaaatacagaacacctttccttttctctttactttcctgtagaaagaaactatttgcatatgctaatgtgaaatga

SEQ ID NO: 330792 - DNA, 201 bp, Homo sapiens
agcccagcctcagttgaaggacccgttttgatgatcatggctgaggttagggggcttctttctccccaccaacccgcttcatgacttcttatgaatagackccatggtgacttatgatttttgcattccaattccaaattgccctgcaagctgccttcttccctcactgaacagaattgggtcatcacttcctgccaaatg

SEQ ID NO: 330793 - DNA, 201 bp, Homo sapiens
tgtggtggctggtaaacatcaaactgtgttcttctctgcagactgtgtgtgctcttatgcatgaagacaaacttgttaatgactttctataaataagttckagcttatagttgttccagcaaaagctgctgaaatgtgatctcccctcaaatacagaacacctttccttttctctttactttcctgtagaaagaaactatt

SEQ ID NO: 330794 - DNA, 201 bp, Homo sapiens
ttttgctcttgcccgacagcacattgagtcttcaggactcttatttccaacagtcagcttgccaccaacatgtggatgactggcagccatctgaaacttascatgatccaatgaaactcttgtgttctctcctcaaacatcacccatacaacaactttccccaaccaagtaagtgaccccaacagccaactgactgctgat

SEQ ID NO: 330795 - DNA, 201 bp, Homo sapiens
cagactcttctgggaaaggcaggaaatatattaaagaagaaaaaaaactataaggataactgttatgggaaaaacaccttcatccccaaactaggaaggtrtcaagagaccgaagaatgatttggacaagtgcagcttggcaagcagatgagttaagatttacatatagggtactcctggatggcaggcaggaaggcacct

SEQ ID NO: 330796 - DNA, 201 bp, Homo sapiens
tggggagattcaaatagtcatgtgtcacttatcagtggggatatgttctgagaaatgtgctagactatttcattgtcatgtgaacacaccatagagtgcayttacacaaacctatgtgacattgcctactgtacacctaggctatgtggtatagcctattgctgctaagctacaaacctacacaatatatcgctgtcctga

SEQ ID NO: 330797 - DNA, 201 bp, Homo sapiens
ccaaagtggtgatgatgactaactttaacaatgatattcagcactcatgtgactgtactgggcgtctatggtttacatctgttctgatcacccggtacccrtcccattttggttgcaaagtattttgaattttgattagtcagggttctccagacaaacagaatcagtaggctatatacatagatatataagaggagattt

SEQ ID NO: 330798 - DNA, 201 bp, Homo sapiens
cacatgacagctgacagagtgacggatacactgggaagccaacaacaaattactggtgtgtttcacaagctcctacagaaacgttcattcctaccgagctsgtgactagcagctggggtttgcaagtcccagttgcttgcccacaggctgttgaaagaaacttaggctgtagaccctgaggtcagtgaagggataataact

SEQ ID NO: 330799 - DNA, 201 bp, Homo sapiens
agaggctgcctgttaaatgcagactgaaaaaaaaagttcagactgagggaaagtttccccccactcccccaagtggtcctaggcattttatcatagtgtasgtctcctacaaaaagaaaaagtcagcttgggagttgtaaccatgactaagaactcagtataagataaatcacaggttcatcaagaacatgtcaaaaaacc

SEQ ID NO: 330800 - DNA, 201 bp, Homo sapiens
acacctgaccttcagtgagggaagcaaccagctcagggcaacccctaagggtggagctggggaacaaggctctgactgcactcctttcctcccctcttatggaaagaaggcagaagccaaaggagcttgttgaatcagtccatgcaagccagcctccaagcccctaagcaaggtaaagatggatccaaatggacgatcgga

SEQ ID NO: 330801 - DNA, 201 bp, Homo sapiens
gtataagataaatcacaggttcatcaagaacatgtcaaaaaaccaaaggttcagctgtcaacttctgcagtcatttgaaataataaaattgggtgataaamtacacacatatattctacacttattgattattcaagatccaaggggtcctcctttactataaagatacagccaacacatacaaaattacaacactgtcat

SEQ ID NO: 330802 - DNA, 201 bp, Homo sapiens
gtgtttgaatcctggctctatcagctgtgaccctaggcaatttattcaacctccttgtgccccaatttcctcattaatgggacaaatatgagtgatgtccwttctacagggtggtttcccccagttttgttgaggtatggtttgcatacaaaaaaaatttaagaatttaaactgtacaatatgatgctttttcacaaatac

SEQ ID NO: 330803 - DNA, 201 bp, Homo sapiens
ctccactagggccactatcatcaaggtcaccactgatctatgtattgccaaatctagagggttttcccttgttcttgtctaccatgaccttacagtagcaycacatatagtcaggccctgcctccttgaaacacttctttgagttcacaagactccatatcttcagtcttcctctgacttaactggccacttctcaaattc

SEQ ID NO: 330804 - DNA, 201 bp, Homo sapiens
gaataaaatcaatttgaaaaagaggtgttaaataagaatgacctatattcgttgggactctgatactatcagtggccaatgaaaatttgtagaggttccaygaaaggtcacatctctcacttccagacatagacctggacttggaaaggacaagtctactccaagtgtccatctaaagtgacagtgtcagaggaggaactt

SEQ ID NO: 330805 - DNA, 201 bp, Homo sapiens
gtatagtcataatggcaaacctaataaagttgtcaatattaacagaggttctagaattttttatgttaaattattcacaaatacaaggtaagtaaattcgkagtacctgggagaaataatggaacaattgagaacctgtgtaccagaaaaattcatttagattcctcatttcagccctggaattactcctaggatcagact

SEQ ID NO: 330806 - DNA, 201 bp, Homo sapiens
gcccctggatatttgaaaaatcacattcctctccaatttagttatatctataccagtgaagctataaacctttatgaataactataagaggataaaacttygcattgtggtctcccgaaatatcattcaatcacattgccctctggacaccacattgctgaagctttcagagcctttctcagcatcacagagacatgcttt

SEQ ID NO: 330807 - DNA, 201 bp, Homo sapiens
tactgaatgagggaataaatgaccttggtaaacctcttaaggacaagacctattcatctttgcatgccatgcacctagcacagtgcctgacatacagtcartgcttaagtggtgtttgtggaatgagtcattaaaccactgaatcaacaactcagtcaaccatttgtgtcccaggaacaaaaatcttataggcattttttt

SEQ ID NO: 330808 - DNA, 201 bp, Homo sapiens
tttatgcaattaatgtgtacaaaaccaagcctagttttgtgaacagtttatccaaatcgctgcgcagcttcatttatgagaggagagaaaaccctcctctsttatctaatagatgttatgtgtctaattttccatgaatatatcagttaggacagtagccacctaaagtgactcttctgaattaaccctgagtgaataaga

SEQ ID NO: 330809 - DNA, 201 bp, Homo sapiens
tggcctctatttttggctatcctttgagaggacccaagtagacacttctagcaagaaagcatgtgtttattttgttgacagtgaatgatcacattgccatmtgccctatctatcactgctgatcgtgataagtcaattaatgccaggcattttccttggcacagtgcaacagtcgttatctgaagagctatagattaattg

SEQ ID NO: 330810 - DNA, 201 bp, Homo sapiens
tctatgagaaagatgatagcggggatcaatctggattgaacatctagaaagatctcttgaggacattgaacataagccaaaacttaaaggctgagcaggtwccaaccagacagagggattgaaagtcatgaagcttaaggtacaatctagtctctgtcacctagaagctctgaacccctagcctacatctgttggctgtga

SEQ ID NO: 330811 - DNA, 201 bp, Homo sapiens
cctgggcaggctctggaagggcaggaataggggaaagttggcaggcagttggtaatgtgatttctggaagaatcagacaccacattgagaaaaggcgctayagtaaagggtcacttccctctagagttttcaatcgagtgtcagaaacaaacctgctgtcatcaacattccctacccctgcacgtacaacccccttctcca

SEQ ID NO: 330812 - DNA, 201 bp, Homo sapiens
tttatgctccttggcggccacttactttacaactatctgtccttttatattgtttctagactccttgtggtctcatgtaaagcatttggagaccaggggakttgttgttgttgttgttgttgttgttgttgttttactgaaatgtctccctcaccagttttcatgtggatgaccccttaaataaccagaattaacatcggg

SEQ ID NO: 330813 - DNA, 201 bp, Homo sapiens
gctaaaaaggggggaaggcacacacattggtaattgtcccctggaaatggcaaggctgggatgctatctagactaatgagacttggagaacagcttcccawgtagggtggtcacacacacacatccactgctccaatgtaggcttgagcactggcctcagcataggtataatctaccttgccctgggtagatgcagtcatc

SEQ ID NO: 330814 - DNA, 201 bp, Homo sapiens
tgttaatcatgactctataaacaatagggttgagctgtagtatgggtctccctcctggatctgtagggaaaaaaaatactaggattgattagggatgtctkccaaaggcattgtaatgccaggctcccaagttgcagattctgaactagagtacaacaagaaatgtaatgaaagcaggacagaaagtcacaatttgagcat

SEQ ID NO: 330815 - DNA, 201 bp, Homo sapiens
tcagtcacaggaccaaagatccctctgtaaaacaaaatccactaggagagaaaagaatcagctgcatcctgcacagaagtgacattcaatgaccacacagrgtgcagcaggaaggatgttctaacccaaggtcattttttttttttttgcttgctcagcagaaatatgtagcacaaggagctatcaatcattcttccaatt

SEQ ID NO: 330816 - DNA, 201 bp, Homo sapiens
aattgccctgcaagctgccttcttccctcactgaacagaattgggtcatcacttcctgccaaatgcccttgtcgcctttccaatcaccaatcaccagtgastctcattttggacacctcctcttcctttctggaagagtgcatatttctagatttgagggttcctttgcagcccgctgtgcctgctcttcctcatgtcacc

SEQ ID NO: 330817 - DNA, 201 bp, Homo sapiens
cagtttcatttataggacaagagctacagtttaaacagttgtcatctgtggtgtgacacttcacaagtagggtgtaggtaatttgatctgttttacccccrttatactggagggtgtttatgaactagagatcaggggtccttacaggctaaatgccctgtgactaggtttctgcttaagagtcctcaataactgatgtta

SEQ ID NO: 330818 - DNA, 201 bp, Homo sapiens
cacccccaactcacctttcagtcacaggaccaaagatccctctgtaaaacaaaatccactaggagagaaaagaatcagctgcatcctgcacagaagtgacrttcaatgaccacacagagtgcagcaggaaggatgttctaacccaaggtcattttttttttttttgcttgctcagcagaaatatgtagcacaaggagctat

SEQ ID NO: 330819 - DNA, 201 bp, Homo sapiens
atcacttcctgccaaatgcccttgtcgcctttccaatcaccaatcaccagtgactctcattttggacacctcctcttcctttctggaagagtgcatatttmtagatttgagggttcctttgcagcccgctgtgcctgctcttcctcatgtcacctcctaaaaggtagacttccagagcctcttcatctgccatctcctctt

SEQ ID NO: 330820 - DNA, 201 bp, Homo sapiens
  misc_feature (1)...(201): n = A,T,C or G
cattgtcacctctcaatatcaggacagtacaccagacaaaacagcagcttgaccaagtctacagatcgaaattagactgtgtttgagaatcagagacctgnatttaagtctagatctgttgataaacaaccgagtgactttgggtcctcagctcctcctgtctgaaagacagtttcaaagcatcctggcctaattcacaga

SEQ ID NO: 330821 - DNA, 201 bp, Homo sapiens
aggtcccaaagcatggacaatgacatggagggaagcctcagccaacctggaatgatcatgtgtgtgagcaagaaatacattcttattgcttaaaacaaccsagatctgggggacaactgcttgttactgcagcctgttctgacagatagagtcttctggaattccaaaagaaatacatatatatctgtgtgtgtatatatg

SEQ ID NO: 330822 - DNA, 201 bp, Homo sapiens
cctcaagtgtggccagagtggatgcagaggccgaggaggtcccgagagcgagcaagggttgctagcacattgtcacctctcaatatcaggacagtacaccrgacaaaacagcagcttgaccaagtctacagatcgaaattagactgtgtttgagaatcagagacctgaatttaagtctagatctgttgataaacaaccgag

SEQ ID NO: 330823 - DNA, 201 bp, Homo sapiens
tggcgccccctccacagctgctggcccaggtgctaagcccctcactgcccagggcctgtgatgccggccggccgctccaagtgtgggcgcgctgagcccaygcccacccagaactcgcgctggcccacgagtgcaggcacagccctggttcacacctgcgcctctctctccacccctccccacaagcagagggagctggct

SEQ ID NO: 330824 - DNA, 201 bp, Homo sapiens
gtatagcctattgctgctaagctacaaacctacacaatatatcgctgtcctgaatactgtaggcaactgtggcataatggcgagtatttgtgtatccaaayatatctaaacatagaaaaggtccagtaaaacatatggtattccagtataatcttataggattatggttgtatatacagtccaccactgactgaaacatct

SEQ ID NO: 330825 - DNA, 201 bp, Homo sapiens
ctacaaacctacacaatatatcgctgtcctgaatactgtaggcaactgtggcataatggcgagtatttgtgtatccaaacatatctaaacatagaaaaggkccagtaaaacatatggtattccagtataatcttataggattatggttgtatatacagtccaccactgactgaaacatctatatgcagcacataaatgtat

SEQ ID NO: 330826 - DNA, 201 bp, Homo sapiens
gtatccaaacatatctaaacatagaaaaggtccagtaaaacatatggtattccagtataatcttataggattatggttgtatatacagtccaccactgackgaaacatctatatgcagcacataaatgtattctgttttagtcatgctaattttgatgcacttgtgaaactttcaaaagaaggcatcttgttggcaggaga

SEQ ID NO: 330827 - DNA, 201 bp, Homo sapiens
ggctgtcagtgacactgatacgtcactgctaccatcactgctctaccactgctgggtcaagctgatgtctgccaagccaccatttgctatcacatactcargatgcaacatcctgcctccctgctgaaccaggaatattggaaggatctaagctccaagtttccagagtggaggacaggcattgagaattgctttcctgcc

SEQ ID NO: 330828 - DNA, 201 bp, Homo sapiens
attaacatttgcatcagtaaactttgagtaaagcagattatctgtataatatgtgtgggccttatccaatgagttgaaggccttaagagaaaaagaccaakgtccccaaagaaaaagggagttctgcctccagaagccttaggccaggagcagcaatatcaacatttccctaggcctcctgcctatcggcttacgctgtag

SEQ ID NO: 330829 - DNA, 201 bp, Homo sapiens
ctccatctcaaataaaaaataaggaaaaaaaaagatatggctattgtcctaatgtatttcctctaaggaaataaaaccacaccactgaaggcatctggagragagctttcagattcagcgctttgacacgtggcacaagccctttaaagcatctttttcagtcttacctgtttataactttgctttacttcccccaacccc

SEQ ID NO: 330830 - DNA, 201 bp, Homo sapiens
ttaggctcatttgcacacctgcatattttcccccaattttccagcgtaaccctgtgtgaatcattgcagttttgctaattgaatctgagagcacctgtttyttaatcaatattaatgcatcacatggacgcagaatttgtaatgagtcattctagggggaagaatgatgaaattcaaaaaaagtattcactattcatctgc

SEQ ID NO: 330831 - DNA, 201 bp, Homo sapiens
agttttctggttacataatcccacagataaaactaacaggcatttggccaggagcagtggctcacgcctgtaatcccagcactttagcaggccaaggcagrcagatcatggggtcaggagttcaagaccagcctggccaatatggtgaaaccccgtctctactaaaaaattacaaaaattagccaggtgtggtggtgcgca

SEQ ID NO: 330832 - DNA, 201 bp, Homo sapiens
ttacataatcccacagataaaactaacaggcatttggccaggagcagtggctcacgcctgtaatcccagcactttagcaggccaaggcaggcagatcatgrggtcaggagttcaagaccagcctggccaatatggtgaaaccccgtctctactaaaaaattacaaaaattagccaggtgtggtggtgcgcacctgtagtcc

SEQ ID NO: 330833 - DNA, 201 bp, Homo sapiens
gtaatcccagcactttagcaggccaaggcaggcagatcatggggtcaggagttcaagaccagcctggccaatatggtgaaaccccgtctctactaaaaaawtacaaaaattagccaggtgtggtggtgcgcacctgtagtcccagctactcgggaggctgaggcaggagaattgcttgaaccagggaggtggaggttgcag

SEQ ID NO: 330834 - DNA, 201 bp, Homo sapiens
atggttaagaaaactgaagcttcaagaaattcagtaaactaccctaggtcgcaagaggcagactgagaatcttttgactccagggcccctgatttttccamctacttgtgccagtgtgtttcccaagtactgggaaaattcacacaagcataaaatgtagtcagtgccttgattcaatgggcaataattttcttgagaaca

SEQ ID NO: 330835 - DNA, 201 bp, Homo sapiens
ctaggaggaggagtcttacagcccaatacagagaaattaaaattaatacaatatagtggggtgacacctgccaacccaggggtaaaatgacgtagtctccrcatccacctcaaccacaattagctatatgaccttcaaccaagcatgtagcctctctgacctcagttttctactggtagaatgaagaaggggcacttccag

SEQ ID NO: 330836 - DNA, 201 bp, Homo sapiens
taatgaaatatctctggattcgtgaaaagatttatccatgaggatgtttattacagattttttttacaataatgaaaagtgaaagggctgtaaagattcarcaatcagctaaacatttttacaaggaaatatgatgtagatatttcaaagtgatattgctaaagaatagttaatgacatggaaatatctatatgttagaat

SEQ ID NO: 330837 - DNA, 201 bp, Homo sapiens
gctggttaagtccaggttttctgctctttttgccaaagcggtttgaaaaagtagccaaaataataaatcaacccatactgtgtgctttgcttggagggagyttctgcccatgtttacttggtgattttgaagactaaccaaggtttctttgaagtgaaatgaactctagtccaatttctcttgaaaccttgtacatacatc

SEQ ID NO: 330838 - DNA, 201 bp, Homo sapiens
attatgacatttagcaagcaacattatattccaccaggctctgggaattggggaagacatggggaagaaagatcaacgagaatccttcaatatcacctagrcacccatgccataatagccaagagtaagggaaggaagagaatgaacacgtgtgaccatcacatatattagttaattatcacaacctcgtgagggcaattt

SEQ ID NO: 330839 - DNA, 201 bp, Homo sapiens
tctggataagttactgaaccttcaccagcccccgcttacttcctttgctggtaaaatggacatcacacccatctcacaccttattttgcagtgaattaagrtaaaacaaaaagaactgtgaggcagccagaggcaacctggatatcccctgcagcttcaacttctccattctgttttgtttcctggtctgtataatataac

SEQ ID NO: 330840 - DNA, 201 bp, Homo sapiens
ctgccatctggtcccgcgcctgcactcctcagcccttgggcagttgatgggaccgggcaccacaaggccatgcgggagcccacggcggggatgaggttgcrgggtcttgggcatggcaagctgcaggtccccagccctgccccacagggaagtggctgaggcccagcgagaattcgagcttggtgcaggcaggccagcagt

SEQ ID NO: 330841 - DNA, 201 bp, Homo sapiens
ccccctgtggcacccagtaaagttctaaccaagatgccatctttatgaacaggattgtggctgaatttcaaagaatgaaaatttttcctaccttaaaaatrcattgaccaaatttatttccctctaaacatgatagtgtcaccagaatgaaaaaagatgaccccatttattagaggccccaaatcactgactgctgcaaag

SEQ ID NO: 330842 - DNA, 201 bp, Homo sapiens
agtaaaaagcttccatttatcttctaatcatgctcatgcttttgtctacttcctgaacatatggaaaatcatgataatagcaatctcaatgtttgtgtctkctaattgtatcatttgtgttgtttctgcttttgttgccattgattggtttttctcctgggcacaggttatcttttcttgcttctttgtatgtcttgccat

SEQ ID NO: 330843 - DNA, 201 bp, Homo sapiens
accatattgtgtccaaaattggcgggttcttggtcttgctgacttcaagaatgaagccacagaccctcacggtgagtgttacagttttcaaagatggggtrtccagagtttcttccttctggtgggttcgtggtctcactggcttcaggagtgaagctgcaggcctttgcagtgagtgttacagttcttaaaggtggtgca

SEQ ID NO: 330844 - DNA, 201 bp, Homo sapiens
tatgccctgtgggaggccttccctccacatatgggtttagcctaatatcttcccactgagaataagcaaatggtgctgggtttggtgagggagaaattgtratgattaacagagaaaattcaggttcagaatttaccgccaccccctgtggcacccagtaaagttctaaccaagatgccatctttatgaacaggattgtgg

SEQ ID NO: 330845 - DNA, 201 bp, Homo sapiens
tcctctctgccacttattggctgtgtgatcttggaaaaggcagaattcagtaaactgctttggctttttgagtctcttaaactgggagatggagctaattgtgctggttctatatatatattatagggtaattgtgcaatgcaaagaaaactcttctgtgatagggctttttaagccataaagtgctgtacaagtcagtta

SEQ ID NO: 330846 - DNA, 201 bp, Homo sapiens
ttgactgaatacccactgtgtgtcagttggggaggttcactgtacatgcacaagaaaagaacgcattggagtgggaaattgtgtaggtgcaaacaacattytaagaactcacagttgaagggggtattacccgggggcggggggcggcgctcaggttcatgttctggagtcagacttcttgggttcaaattctggcaactt

SEQ ID NO: 330847 - DNA, 201 bp, Homo sapiens
  misc_feature (1)...(201): n = A,T,C or G
tctctagagaaccctgagtaaacagtaagtaatcctaaacatcctgagctccaaactactgtgaggctcctacactctcaacccacctcttgaagaaaatnctgtaatattacattgttaaataaccagctgtggctgggagtggtgactcatgcctgtaatcccagcactttgggaggccgaggcaggtggatcacctga

SEQ ID NO: 330848 - DNA, 201 bp, Homo sapiens
caggaaagaccctgtgcaggttcccttatctgcacaaaaacatctggtgtaaacacttgtggggcaggtcagaaattctctggggacccttccttatctgyctcctgcatatatcagtggcagagcatagcattagggggccccagtggatggagaatggctgggatgcaatgacttagtttttagaatcactgacattgg

SEQ ID NO: 330849 - DNA, 201 bp, Homo sapiens
tttctttataattgttctatcattcagatgtacatcttttcaaactggttctccttctatgtgactgacatttggaaaacagtctttgtgtagctgacttytaaaattatgtgatgtaggaaatatatagataaaatgcatatgtgtttgtatcatatataatatacatatgtgtatatataatatatacagatatagata

SEQ ID NO: 330850 - DNA, 201 bp, Homo sapiens
ctgggatgcaatgacttagtttttagaatcactgacattggtcaacactaatagctctttccagagaaacacaggtagtctggagccaggacctgataggwagaaggacaatttttgaattaattataatattataattaggtcgtattagtggaaggagtggggtaagatacacacaaggccagaaagaagactaccaaa

SEQ ID NO: 330851 - DNA, 201 bp, Homo sapiens
tctaccctaaagatgaagttcagacaggttaactcaatgccctaagtcacagttatgaagtggcaaggctagggttagatttgtaactcttcttactactyacaggctatggaggaactgctacaagcagagaagctatcattgaaagcacagtcaagcccatattttaatgttactttaatgttacaagatttcaaaagg

SEQ ID NO: 330852 - DNA, 201 bp, Homo sapiens
tagtggtccaaaaggagcagaaatctgagggtgtagttaaatttgaatttggtggcatatctggatataagcctcttccccaaacatctaggaaataaggrtggatgcagtgaattggtgaatatgataaagaagcttcattcaggagactcacttgtagatgttttagcttaatctttctagaatgttttagaattcagc

SEQ ID NO: 330853 - DNA, 201 bp, Homo sapiens
cctggtttattgaataagagcttgatgatctctgaagtcctttagctttagaatccatacgcccctaagtttgctaatctgtgtgtctgctatgctgcacygaagccaatgatttgactccagtttttggtactaatttttttttcttgcgtcgatgcttccagagtgcccatgtgagcaggcagcacactggctttttgt

SEQ ID NO: 330854 - DNA, 201 bp, Homo sapiens
atatcaaggagtttggctgtagagcaagagtcagcaaacattttctataaagggccaaatataactattttttggcattgtggccagcgtggtctttttcycacctattcagctccactgttgttatcctaaaagaagcataggcaatatgtaaatgaatgggcatggctgtgttgtaatgaaactttactaacagagaca

SEQ ID NO: 330855 - DNA, 201 bp, Homo sapiens
gcatgggaatcaagaaatgagctttttctgaatttctgaagccctttctgagacactggagaggactcttaaaataatgcaggctatctggagttcacttkcattctggcttctggttaagagccaggatctgatattgggctcctggggtccaaattctagctcttcaacttattagaaaagtgagatattgggtaaact

SEQ ID NO: 330856 - DNA, 201 bp, Homo sapiens
ctgagtgcctggggatttgtcctaatggtatttcagagtgtaaggctgctgatacaatctaatctgagcaggtactgggacctgtatacattacttattcrttcatttgctgatggagatggaaacccaagcatgacatcagtagatccacaagacaatccttcacatcttctatctctttaaatctgggttcttgcttgt

SEQ ID NO: 330857 - DNA, 201 bp, Homo sapiens
gttgtggggagaatcaactagaaaagggcaagcatggaattagagaaactgcttagatgtcgattacagaagtgcttttgagaaataacagtgactagacytggagagtcaggagtaaagagagcgataaatggactgactctggaaatgttttggagacaatgtctacagaacatactgatgtattgaatgggggaaaaa

SEQ ID NO: 330858 - DNA, 201 bp, Homo sapiens
catggaattagagaaactgcttagatgtcgattacagaagtgcttttgagaaataacagtgactagacctggagagtcaggagtaaagagagcgataaatkgactgactctggaaatgttttggagacaatgtctacagaacatactgatgtattgaatgggggaaaaaaaagcaacgaaggatgaatcttaagtttggat

SEQ ID NO: 330859 - DNA, 201 bp, Homo sapiens
aaatccatttcttgggcatgccttggaataaactaagttggtggagttcttccaagtctcccctcctgcaaagccactggaactccctccccactagaaarcagccagagctcagggaactcattttaacttttccgggagaagactgagactgacagggtgagggatctgggctggtagaattcatttatgttcaattca

SEQ ID NO: 330860 - DNA, 201 bp, Homo sapiens
ctaaacgagacattttttcccccagtttggctctcagcaaactgcctttcagatgcttcagcaaaataaaaccaaaaacaaatgttttttttttttttttwtttttgtgggtgtgggagattggatggagccattggtgtatagatgagaagcaagtcttgaaaattcatttgttttcatctaaataagaccaaatgaaac

SEQ ID NO: 330861 - DNA, 201 bp, Homo sapiens
tcttaatgtactacccattattctttggacaaactctaatgtgttacttttacacttagcatatgattaaaagaaatgaatattctaacttaaatataggrtgaatgagtcaattacttcccatgacaaagaaattgatttctattaatgcagcttaaggtggtattagcttttttcaaatgtgtagagatttaatttcta

SEQ ID NO: 330862 - DNA, 201 bp, Homo sapiens
tttacctatataataaatattcacatgtacccctaaatataaaataaaagtttaaaaaatattaagatgtttattttgtattactaagatatttgttctgrgtacaagttctttgtcagatatatgttttgcaaatacttttttctatctgttacaggcttatttctcattaaggctgtgtcataagtgggggaggaaata

SEQ ID NO: 330863 - DNA, 201 bp, Homo sapiens; identical to SEQ ID NO: 68997

SEQ ID NO: 330864 - DNA, 201 bp, Homo sapiens
gcacctgtagtcccagctactcgggaggctgaggcaggagaattgcttgaaccagggaggtggaggttgcagtgagcagagatcgtgccactgcactccarcctgggcgacaaagtgagactccatctcaaaaacaaacaaacaatcaaacaaagagaacaactaacaggcattttacaaaacaaccagcctcttaaacat

SEQ ID NO: 330865 - DNA, 201 bp, Homo sapiens
gaattgcttgaaccagggaggtggaggttgcagtgagcagagatcgtgccactgcactccaacctgggcgacaaagtgagactccatctcaaaaacaaacraacaatcaaacaaagagaacaactaacaggcattttacaaaacaaccagcctcttaaacataggcaacaaaatgtgttattcacataatactgcttgcag

SEQ ID NO: 330866 - DNA, 201 bp, Homo sapiens
acagagaaattaaaattaatacaatatagtggggtgacacctgccaacccaggggtaaaatgacgtagtctccgcatccacctcaaccacaattagctatrtgaccttcaaccaagcatgtagcctctctgacctcagttttctactggtagaatgaagaaggggcacttccagcagctttctttccagttcttacacccc

SEQ ID NO: 330867 - DNA, 201 bp, Homo sapiens
tgctcttcaggcctgtcacccacctctatgaaatgaacactcctcttctttattgagagggggataaattacatgagtttgctccagctctgacattctaygactgtgggagtctataacaaattaaaggagagatgagcaaaggaagcagaagccaatatccttgacgggatatgtgttcccacctgaccaccatttgaa

SEQ ID NO: 330868 - DNA, 201 bp, Homo sapiens
gatgagcaaaggaagcagaagccaatatccttgacgggatatgtgttcccacctgaccaccatttgaacaatttgaagttccttaacctatctgtattgawtgggacccactgggtgacaggcaacagtaactccccacttaagcttagaaaaagcatttatttgagagctacgagggcatcttagagaatttaaaatcag

SEQ ID NO: 330869 - DNA, 201 bp, Homo sapiens
ggaggatctaggctagagctcagtctttctgcttagacctgttcttaaaggcctggcattatcttccattataggaatgatgactgtaaatgacaatagcyatcacactccatttgcatggtgatgaaggtctaaagttttgatatatgtgatacagatacctgtatgaatgcatctaggtaggttggtaggtaggtaagt

SEQ ID NO: 330870 - DNA, 201 bp, Homo sapiens
gctccccaaataggagggctgtggttattaccagacagcttttagaagcagcctccaccactactccttgatcctccacttcattcctcctacttcccccwtgttcccttcttttttctctctcagatacacttgcatgcccaaactacatattttccacacccttccagccggaactaccagaaaagtaaatacctaact

SEQ ID NO: 330871 - DNA, 201 bp, Homo sapiens
ccaggtacccagatgatgctcaaagcaaaaccttatccattttcatccaacaaatggaaaccaaacattgttcaggtgctgagatatggcaggaatcaagrctggtaaatatacatccaatcatgcctatattatccttaccaaaaaaaatatattaaatatagattattatatataataaaatattaaatattttatata

SEQ ID NO: 330872 - DNA, 201 bp, Homo sapiens
ctgacatatgatgctgtggtttactgtatacttgtttgtgtccatgtcccccacccccaccaataaatggtaaactctttgagggtggagaatgactgtarcatacaaataagaaatgcaattgctttggaacatgaaggaatgaatgaacggagaaagcttaagtctacagtcaatccttgtccttctttcccttcattc

SEQ ID NO: 330873 - DNA, 201 bp, Homo sapiens
gaaaggataaaaaaaaagtcactctatattactgtaccccttccccactgcactgaagaactgtcagactcagctcaaatgaacatcaaaggaagctcagragaggaagacatcagattcctgagtcccacctcagacctactgaggcagaatggggggtggagcttggaccaggtacccagatgatgctcaaagcaaaac

SEQ ID NO: 330874 - DNA, 201 bp, Homo sapiens
ttggatagctgctgtattggacaggactcttgtagcacacatcccaggttataccatcagatgtgattgtctacagagtctttcatttcattttaaaaatsattctgtttatttttaaaattcaaacaatatgaaagagcacaaaatgaaaagtaagtctcgcatcccatcccctccttttcctgcatttctctctgttcc

SEQ ID NO: 330875 - DNA, 201 bp, Homo sapiens
gtagatggtagtgatattgatggattattattattagtatatctagatatgatctctagttagaaaatgcagtctccttggttgcttgcttctagaaaggwtgcatgcagtttctagaaactggtgtctttttctatggtcacacctcacttgttaagggcttcagttgtaaatagcatcagtggtaaatccaataataag

SEQ ID NO: 330876 - DNA, 201 bp, Homo sapiens
caaagaatctgtcacacagtgggtgtttggcacctactgtcaccgatcttctgtgcaaacccctccccgcagctgctcctgttccaatcactctgggaacrctggactcatgacaattgccactccctttgtgtgccttatatttgcccattcccaagtcttcactgattttattccctattctaggcatctccagatgcc

SEQ ID NO: 330877 - DNA, 201 bp, Homo sapiens
gttatttaacccctcagagtctggtgttccttatttgtgactcagagatagtaatacttcctaccatacagattttggtggaaagtaaataatagaactaygtgaagccctagcaaagaatctgtcacacagtgggtgtttggcacctactgtcaccgatcttctgtgcaaacccctccccgcagctgctcctgttccaat

SEQ ID NO: 330878 - DNA, 201 bp, Homo sapiens
ttttcttgggttttgatttttatgttttattcctattaggcaaagaccaggcaagagggagaagaccattgaaagaggtgcggtgggagtggaggtggggrtgcacatcacagaggaggcaccaagagtgggggcttgcctcgatatagaaatgtagcaactctggagaattggtgtcacagggcagagcataaaagcagg

SEQ ID NO: 330879 - DNA, 201 bp, Homo sapiens
gctccaccgacttccctcagtaggcatttcactatattaaagacgcaaactggctgatgtaaccattgctttgaagccatgaaatggaatgtcagttgcakaaagtgagccacatatttctgagatattgattattgcaatataaatcttctcacccctaaggtaaaatcctagctggtgctgtgagctacttgataatca

SEQ ID NO: 330880 - DNA, 201 bp, Homo sapiens
atggttggatctcacggccacttctctctcctcagatgcattccttgcgcctgctcagccagaaccagccatctcagatctttctgagcatgagtgacaayttcaggcctgtccagccactcaacaaccgctgcatccgcaccaatatcaacttcagtttacaggggaaggactgtccaaacaaccgagcccagaagcttc

SEQ ID NO: 330881 - DNA, 201 bp, Homo sapiens
cggaaagggtgttaaaatgggtcagatgatttcatttggaccctctgggtttatgattgtcttctgtgtatagaaaacaggagcacagaattgcatttaaytgtctctaattcatctggtgaacatgctttcctgatattagctggatcaattgtacaaataacttcagaaccactcaatacttttgtcatggatgagatg

SEQ ID NO: 330882 - DNA, 201 bp, Homo sapiens
tttcgggaggagggaggcagggacttgcaggcaagagttgcacctggtctaggaacctgcagagaaaagaactctggggtaagtagtgttctggcactggmacggaaaggggtaaagggtggggggcatgagagggacgaaatggagagggcagggaatgaattatgcaaaaaaaatctccaatatttcgcagcggaggga

SEQ ID NO: 330883 - DNA, 201 bp, Homo sapiens
cttatccgaaatcattctgtgtggggcttggctaccctattaagaaatttgtctctgtgatacatcagtgagatgtgttgtgtacctggcagacaagaaawtgtgccctggggtcaccccaactcctctagtgggacttctattattccattctgcatctaggagtgaaaattctcaagtgacttgtaaaggtttatatca

SEQ ID NO: 330884 - DNA, 201 bp, Homo sapiens
tagtttagaaaaattcaactgatattcattatattgtctcatatattcttattttatgtttttattctttaatttcttattttttatttacagtttacctyatagtagtttgaaattttcaccttacatttttgttctgctagtgaacatccttaaacttgccgaaatcagaaattgttttcctgtccaaataaaaataaa

SEQ ID NO: 330885 - DNA, 201 bp, Homo sapiens
cacataagcagaactaaaaaactacatgatcatctcaatagattcagaaaaggctttcaataaaattcaacattttaaaaaaacaacaaaccagacactgwgaaaacatattttaaaataataagagccacttatgacaaacccacagccaacatcgtactgaaaatgcaaaagctggaagaattccccttgagaagcaga

SEQ ID NO: 330886 - DNA, 201 bp, Homo sapiens
gaggctccctgtaggagctccttccctgcagaaggcttctgcctgggcacccaggctttccaatacatcctctgaaatctacaggcttggcagcttccacygctcttgcattctaggagcctacagacttagcaccaagtggatgctgctgagatttatggcttgcaccctctggagcaccagctgaaatagtatgtgggg

SEQ ID NO: 330887 - DNA, 201 bp, Homo sapiens
tcatttctgaatgggtagttaatttttttacacgttccatcaaaaaaatggcacataaaatgcccaagatagttgtcatcactgaagcagttctggcagcyatagagtcaggggaaaacacatagttttaatttctaggtcacgatatgtatgctttttctctgtaaaaaatggcaatggtgctctctctgtctcctctgc

SEQ ID NO: 330888 - DNA, 201 bp, Homo sapiens
ggaaaaaaattattccccatagaccaaatttttgtttactaaattttgaaactgtaacttttccaatttgtactgtaaaaagaaactttatatcttaaatrtttctccatgttgcttcctagttgtgtcagttcagcatatcctggaccctgacacatacaccccacaatctcagtgacataacacaatggaggcttactt

SEQ ID NO: 330889 - DNA, 201 bp, Homo sapiens
ttttcccagtgttaaatgtatttgttaatttattgcacaaatgctaacaaatgcctcctatgaggtgggcactgggccaggcataagataaaatgtagtaraaaaaacagcaatggtctttgccctataaaatgtgtgtagtgacacacaaatgtgtgagtgttttttttcccattacccaacccagtgcctggcatttag

SEQ ID NO: 330890 - DNA, 201 bp, Homo sapiens
agtacatgttgtaaaatagaaatgtgtataaagtatactggaagtataaaggaagagcaattaactctgtcgtttgtagatacaagtggagaagggaaaakgtttatagaaaacatttgacctagacctagaagaacacatgagatttcaaaagaacagggagaaagaagacatatcatgtggcaagaatagtatgttcat

SEQ ID NO: 330891 - DNA, 201 bp, Homo sapiens
atttaatttttacaatgcatcctacttcctccttatgtaactttacttctttgtcagtttattcataataataacatcaataaccatttgaattatgtggyattttcacacattgtacatatattgcacatatttaattcatctattcttagaatttgtgggataatcttatagatatagcaaccaaagcccacagagctt

SEQ ID NO: 330892 - DNA, 201 bp, Homo sapiens
aagctgaatgaaaccagtcaacattggctgaagctggctaaaaccagtcaaaaccagctggaaccagttgagccctgctgaaactagtccaaattggctgwaactagtccaaattggctataactagtaaaaatctgttataacccatggaaattcgcagaagctagttgaaaccagtcaaaaccaaatgaaactggctga

SEQ ID NO: 330893 - DNA, 201 bp, Homo sapiens
tgaaaccagtcaacattggctgaagctggctaaaaccagtcaaaaccagctggaaccagttgagccctgctgaaactagtccaaattggctgaaactagtmcaaattggctataactagtaaaaatctgttataacccatggaaattcgcagaagctagttgaaaccagtcaaaaccaaatgaaactggctgaaactggct

SEQ ID NO: 330894 - DNA, 201 bp, Homo sapiens
cttcttcatagaattgttatgaggaatcactcaaaaagtgtgcaagaaattacccatgctggaccaaattctgtaggtgggaaatgggatgaaggagagargataaatgcaggactagagagggtaaactagtgtgttggagaggcaggaaatacaggatggagcaccatagtgaaaatgaagaataaatgagtgtggtta

SEQ ID NO: 330895 - DNA, 201 bp, Homo sapiens
agggagctaaacagcccacgatgagatagaagaaagttactccagcagagtggctttatttttctctcattacagagataatgaacagaaaacttctctgrtacagatattgcttcccaccccttctccccccaaccccaaaatgattttgctttattgcaaccagataccatttgatgggtgaacagtcttattctgctc

SEQ ID NO: 330896 - DNA, 201 bp, Homo sapiens
ggggtggcgagaccctttgagttctgcgggtttgccgccttcagaatcaaaaatcttctcagcccaagggtgtgtgaatgtgtgtgttttgcggggggggktggttaggatctgtgtgcagtcctagaagggtgaaggaaaaagtggtgggggatgagaaagaagaggcagatgggtgttgattttcaactgctttcctgg

SEQ ID NO: 330897 - DNA, 201 bp, Homo sapiens
gtgtgaaactcccctcttcttctattagtagctaaccatgtgattaagctaaactccctgagcctcagttttctcatctctaaatacaggcataattaaaycctcctcatgcaattattataaagatcaaatgagagaacatttaaaatgaacttgcagttagtaaacactcagtgcacaatagttggatttagtcaatgg

SEQ ID NO: 330898 - DNA, 201 bp, Homo sapiens
gggtggcgagaccctttgagttctgcgggtttgccgccttcagaatcaaaaatcttctcagcccaagggtgtgtgaatgtgtgtgttttgcgggggggggkggttaggatctgtgtgcagtcctagaagggtgaaggaaaaagtggtgggggatgagaaagaagaggcagatgggtgttgattttcaactgctttcctggc

SEQ ID NO: 330899 - DNA, 201 bp, Homo sapiens
taaatattttttgcattatgcaagtgtaaagcatctgtgtcattactatatatgatccatacttaagatatagttatagaagcaaagttgagatacatacmcatagtttagaatgatataaagtaatatgagtaatgtttatttgttaagatattattataaatgcaaagttgtaatgctaaaatgcattgtgatataaag

SEQ ID NO: 330900 - DNA, 201 bp, Homo sapiens
tacatgacttgcagtgtagcctcacagggtttgtgccacattgtttaataagcataagcaaagttttctataaagttaaagcagcagcaatggagagaagktaactgtcatcactgtggacttgatatagtgccaggaactgaaatttaaagtcaggaaccctggcctcataaatgtctctccccatgtaagcagatgaca

SEQ ID NO: 330901 - DNA, 201 bp, Homo sapiens
tctacatatttcactacgtccctttgcaaacctctgtcttagcacttaccattttgtacagaattgtgtatttactcctcagtccccacaagagagatgastctctcttttatctttgtattatatttctagttctagcacactgcctggcaccttgtgattgcttaagaaatgctgggtgagtgacccagtgtgcccagt

SEQ ID NO: 330902 - DNA, 201 bp, Homo sapiens
caatgctgggtgtggcatgggaaaactccattgtcttaattctgggaggtgatataatagggagaagtcttagcactgggcaagcctggcttggtgacctrattttatcaccatcttgctctgtgattttggacaggtcaatcatcctccattataaggagcaccttttcacatctataaaacaagtgtaacattagtgat

SEQ ID NO: 330903 - DNA, 201 bp, Homo sapiens
aggctttgtcctcacctgtgagatgggatgcctgctcctacttcagagattcctgtgtgggaaccataggagaatgagtgtgtgaacactctctgtaaaayggtaaagagccatattgatgttagccagcttggtattggtcaagcctcgcctcactggtctcctcccctcctgccccattctgccactcagaacctagga

SEQ ID NO: 330904 - DNA, 201 bp, Homo sapiens
ttataaaacctcactggctatgcagaaagcaggtctttccagggcacattcgtttcattgtgcagccctcttaggaagtcctcttaggaaaccctgtatcmtggagatggtctttgggttccctaaagtgtttgccatttcctgctaaattgaattctagtgtatacagcaaggtccccctccaacagcaatgttcattgt

SEQ ID NO: 330905 - DNA, 201 bp, Homo sapiens
aatccaggatacttttgtgtgtccatgcctgagatttgtgctgggcaaatttaaaggtgttattttttccagagtcttaaataagctctttgtctctcttytatttgtttttaaagtcccctaagcccactgtcagttccagaaggagtgggcttcagtttcactcatcctatgtcagaaaatctccttcaaccacaaaga

SEQ ID NO: 330906 - DNA, 201 bp, Homo sapiens
gcagcacagtggccaatgtgcgggagtgagaaattaggctcagaaacggtcaatgtcctttgggctttcttgctcccatctataccactgaaaattaaatmttaatgttgggaaaactcattatttttaccactgagaagttgttagggtcctcagtgaaatctagttcactggttcggggaagctcagcacacagtggga

SEQ ID NO: 330907 - DNA, 201 bp, Homo sapiens
ctgagatttataccaacaatggtgattctggtctctttcttctcagtaattggtttagacattgtgatggctaatttgatgtgtccatttggctaggtacstacccagatattagaccaaacatgcctggatgttgttgggcaggtactttttaagaccagattaacatttgcatcagtaaactttgagtaaagcagatta

SEQ ID NO: 330908 - DNA, 201 bp, Homo sapiens
ggaagctcagcacacagtgggaggttttgcctttttaaaaatttttataccatttttatcctaatcataaaaaatacacattacaaaaagttggaaaatartggttagaaaattaacttcacttcatcatcataacacttgaaaataacctcacttaacatttggttgtatttccttccagatattttttccttctcaaaa

SEQ ID NO: 330909 - DNA, 201 bp, Homo sapiens
ataaacagttctattcatgccatgtaaggagaagccttctgaataaacttgggtacaaaagacacactaagatggcaaaatggagagttgagaaaaacccrtatcttctatggctcacttaagggttgaattcaccatggaactgcctcaccacttattgtgttaagtgacgtaacaaacttcttactgcttgagccactt

SEQ ID NO: 330910 - DNA, 201 bp, Homo sapiens
gtatattatgacaaatataataatttttgttacaattagccaattttcttagtaattgttaaatagtccacttctttgctgtagattttgatatttacacygttatatcttatacaaaaatatgctagggaatatttcagcatcatcaatgctgtttaattgatctgtcaattacttatcaatacctcatcatattagtta

SEQ ID NO: 330911 - DNA, 201 bp, Homo sapiens
cctggtctggggctgaacaatcaattcatgttgatcaaccgttttaggatgcactggtgagtgcccaggaagtagtgtttaactcactagctatattgaayacactttttctctggtctagttcaaacagaaggatgactggaaatatatctttgatgcactgtgctggtctcataggatttatgtgagcctgaatccacc

SEQ ID NO: 330912 - DNA, 201 bp, Homo sapiens
aatatttcagcatcatcaatgctgtttaattgatctgtcaattacttatcaatacctcatcatattagttattataactttataaagttttgatatctctrcaagtaagtctttttaaaaaatcttgtttgttcttccatgtaattttggaaacagttttaagttactgaagaatcccttaatgttactgaattaggattt

SEQ ID NO: 330913 - DNA, 201 bp, Homo sapiens
gatttttccaacatccgtacagacaatttccacccacgcagaaccagtgtggtttcatgttactctcaatccttcatggtggctttatttttattttttcrttaggatatcacatatttgtttatgtattttgattatagtctttttatctgttagcctgtaacttgatattatgcaacttataaaaacaataacaataat

SEQ ID NO: 330914 - DNA, 201 bp, Homo sapiens
aagcttaaagcacagcctcagccctgtacttgccagctcctttcttacagttcctggctcccaaaagaaccccaccctgagaggcagcccatggcccaggrgacttcttcctgcctttttctgccttgcaagctggacagaaggatcactccactggattgcctttcatgtccctcctctgttcagaacatgctttaactt

SEQ ID NO: 330915 - DNA, 201 bp, Homo sapiens
atacttcttggatagacaatagtactgttctgcttatcttctagaaaaaaatgaactacaggcaaaaataaaaggctatatgccagattaatccactgaaaactcaacacaaatctatcttctctctagacatgatctagcatttggatatcatttattacattttagaaagcctttccaggtgtcatctttcaaaataat

SEQ ID NO: 330916 - DNA, 201 bp, Homo sapiens
cagtgaaggtagcaaaccactgggttagatatggtttctttttctcaaagttcaaggaaaagcatcttttttgatcatcacatttctcaacttctaaaacwtcaccttttttaatgcaattcaagatattggcaataatgagtactctcttacactttcagagtcacaaatcacttctacatgcactaccttattggattc

SEQ ID NO: 330917 - DNA, 201 bp, Homo sapiens
tacttcttggatagacaatagtactgttctgcttatcttctagaaaaaaatgaactacaggcaaaaataaaaggctatatgccagattaatccactgaaaactcaacacaaatctatcttctctctagacatgatctagcatttggatatcatttattacattttagaaagcctttccaggtgtcatctttcaaaataatt

SEQ ID NO: 330918 - DNA, 201 bp, Homo sapiens
ccttttttaatgcaattcaagatattggcaataatgagtactctcttacactttcagagtcacaaatcacttctacatgcactaccttattggattctcaratcagcctgtggaaaatgctaacaccattacagaaagatatatgatgtgcttgctgtgacattgtttataagagacaaaaaaatggaaacaacacgaaag

SEQ ID NO: 330919 - DNA, 201 bp, Homo sapiens
acttcttggatagacaatagtactgttctgcttatcttctagaaaaaaatgaactacaggcaaaaataaaaggctatatgccagattaatccactgaaaactcaacacaaatctatcttctctctagacatgatctagcatttggatatcatttattacattttagaaagcctttccaggtgtcatctttcaaaataattt

SEQ ID NO: 330920 - DNA, 201 bp, Homo sapiens
taaaatcacagccctgagatgatgaattttaaggaaagatcatcatatccatttttcagaggaaacaattgatcccagtgatgtggggtaacttgatcatrtggctaaaaattgctggagcatctgtttgaacatatatgtatgtttatacacgatttttaaaaatgaatttaaaaaaattaagtaacaggaaaaaggctc

SEQ ID NO: 330921 - DNA, 201 bp, Homo sapiens
ttcttggatagacaatagtactgttctgcttatcttctagaaaaaaatgaactacaggcaaaaataaaaggctatatgccagattaatccactgaaaactcaacacaaatctatcttctctctagacatgatctagcatttggatatcatttattacattttagaaagcctttccaggtgtcatctttcaaaataattttt

SEQ ID NO: 330922 - DNA, 201 bp, Homo sapiens
ttaattactgaaacaattactattgcctgggaaacaaatttgaaaatgacttgaataaaagagcagataaaggagagctgagttttcagtttttgtttttkttttttttttttaataattactccaagagtagatgctcagatgagaaatttttaatggaattaataagatgatattaggggttggacaaaacctccacta

SEQ ID NO: 330923 - DNA, 201 bp, Homo sapiens
agtaagtaggaggagacataggattccagcagcaatgcagagcactccacgaggcatcacagggatggtaattgaaccctgattctgcagagcacgtggcsacagatgaggcacatacactctgtgagaggctttgtcctcacctgtgagatgggatgcctgctcctacttcagagattcctgtgtgggaaccataggaga

SEQ ID NO: 330924 - DNA, 201 bp, Homo sapiens
tcttgattactatagctttataagccttgaagttacataatttaaatattccagctttgtttatctttttccaaagtgttttggctattttagttccctartatttttatatggattttagaaacagcttgacaatttctatttaaaaatttgctgggatttttattaggattatattgactctatagatcagtttgggga

SEQ ID NO: 330925 - DNA, 201 bp, Homo sapiens
ttcctcacaattgctctgagcatcatctttctctctcgctctcccgttccttcataagcctccctggtaataagattacccacactgactttatgacattytgaggaaactccacatctccctaacagtcaacaacgacaacataaaatctccaaccaatcacattctaatttgtttaaaaaaaaaatactaattaccttt

SEQ ID NO: 330926 - DNA, 201 bp, Homo sapiens
gtcaacaacgacaacataaaatctccaaccaatcacattctaatttgtttaaaaaaaaaatactaattacctttaacattttagcagatgtagagagaagyaggtatgcaaattttttaataaaaaaagaaattgcttttctaattagaaaaataaaaattaaaaaaaagcaatgtgtggcagttccaaacattagcagtc

SEQ ID NO: 330927 - DNA, 201 bp, Homo sapiens
cagcactttgggaggctgaggcaggtggatcacctgaggtcaggagttcaagaccaggctgaccaacatggcgtaaccccatctcaactaaaaatacaaarattacccaggtgtggctgggcgcgatggctcacatctgtaatcccaacactttgggaggccaaggcaggtggatcacctgaggtcaggagttcgtgacca

SEQ ID NO: 330928 - DNA, 201 bp, Homo sapiens
aggtggatcacctgaggtcaggagttcaagaccaggctgaccaacatggcgtaaccccatctcaactaaaaatacaaaaattacccaggtgtggctgggcrcgatggctcacatctgtaatcccaacactttgggaggccaaggcaggtggatcacctgaggtcaggagttcgtgaccagcctggccaacatggtgaagcc

SEQ ID NO: 330929 - DNA, 201 bp, Homo sapiens
gtggtcatcgttatcccatagattggtaatgagccaggggactctgctggctgacacgctccaccgtgtcagctggtcacagttggggctttgccaattaygggattgagaaagccctcatcaggtactatggatccaatcgcaacatttacagaagccctcggctagaccatttctctgtgtgtggctgggtctcctttc

SEQ ID NO: 330930 - DNA, 201 bp, Homo sapiens
atctgtaatcccaacactttgggaggccaaggcaggtggatcacctgaggtcaggagttcgtgaccagcctggccaacatggtgaagccccgtctctactaaaaaaaaaaaaaaaaaaaaaaaaaattaggcctggtggtgggcacctgtaatcccagctattcgggaggctgaggcaggagaatcgcttgaacctgggag

SEQ ID NO: 330931 - DNA, 201 bp, Homo sapiens
gcattttaatgagccctgtggcatattgaataactctctccattggaggtagtcagtcattaactgtgtaaggtcatatttcagccattgagttttctttyttttttttctttagcactttttttttattatactttaagttctagggtacatgtgcacaatgtgcagttttgatacatatgtatacatgtgccatgttgg

SEQ ID NO: 330932 - DNA, 201 bp, Homo sapiens
agctttaagtacatggaaccttcatggaacatcatcactttttgcatttgggcattatttcattagttgctgattagttcccactggattattttataacytctctttttttaaaaagaacatttttcacatgattatattttaaaaatttaacactaacataatccaatttaaaataattgggaaaaaagagaaaaaaca

SEQ ID NO: 330933 - DNA, 201 bp, Homo sapiens
gcaacttagcctctgaaaaatatgattactgtaaggcatcctgtctcctctagagtataatgcacaccttgaggtgggagaaggtgctaaggttgaagccaaaaaaaaaaaagactccagttaaaggctggttctgtctcaaatcctctcttatctaaatgaatagagctgttaatttctgttgtaacatattcttgttac

SEQ ID NO: 330934 - DNA, 201 bp, Homo sapiens
aataagcattggtgatggcctgggtgaatagaaggatgaatggcctctttcaggagctgtgacggggcagagggagtggcaagaaagatgttctggagccrgatcttgagccatgttaaggtgtttatgcagaaggcaggcagacatttaaacacccttttcacctctgaagacacattcctagaaatgcaaatagaagac

SEQ ID NO: 330935 - DNA, 201 bp, Homo sapiens
caacttagcctctgaaaaatatgattactgtaaggcatcctgtctcctctagagtataatgcacaccttgaggtgggagaaggtgctaaggttgaagccaaaaaaaaaaaagactccagttaaaggctggttctgtctcaaatcctctcttatctaaatgaatagagctgttaatttctgttgtaacatattcttgttact

SEQ ID NO: 330936 - DNA, 201 bp, Homo sapiens
aaatttgtcaaatgcatagagcagtcggaaaaatggaaaacagtgttctgtaaatgttgacatgagaattgagcagtttctgatatgcaactgtttttttkttcttgttaacactttttgctttgctctccccaaatcctgaagcctcttcttccagtctcctgttttctgtttccttccacctcttcgctgactttccag

SEQ ID NO: 330937 - DNA, 201 bp, Homo sapiens
ccagaaggttagcccagtggcaggcaggggagtctggagtaggagtcattcactagaacacagccagtgggtgggaaacataagactggaagtccctcccraggctttccaacaggcagcaggttaggccagcactggcccataaattcaggttaagatgaagacaactcagggggccctatcagggtatcctgcttctgt

SEQ ID NO: 330938 - DNA, 201 bp, Homo sapiens
tgaatgttgcaagtgacaaaccgggtgcttctgccctgattctaacactggccctggaaggtttaaaggctgcatgatgctggctgggtcctgggtggaargtgttgcctttgtatttcttctacttaattgtatgacccaaaggagaagagcagcagattttttttaagccctttcaactagaagtctttattatgtgtg

SEQ ID NO: 330939 - DNA, 201 bp, Homo sapiens
cattaggtatatctcctaatgctatccctccccctttcccccaccccacaacagtccccagaatgtgatgttccccttcctgtgtccatgtgttctcattkttcaattcccatctatgagtgagaacatgcagtgtttggttttttgtcctagctatagtttactgagaatgatgatttccaatttcatccatatccctac

SEQ ID NO: 330940 - DNA, 201 bp, Homo sapiens
gataaactgtgagtttgttctccctgaagtctgcctctgttactgctttggtttcaatgctggtctgttttgtttaagatatctgtagccacagccacactttttttcactgtggttttgatatcgtattttcatactcaaaacttcttggccttccgctcatagtcagtttcctagagatgatagcttctccatttgtac

SEQ ID NO: 330941 - DNA, 201 bp, Homo sapiens
aaaataaaaataaatatagtatatatttatcatatgtaatattgtgttttgatttatgtatacattgtgggatagataaatcaagctaattatacatatgyattacctcacattcttatttttaaaaaacacttagaatctactcctttagcaattttcgagtatacaatacatagttattcactatagtcaccatggtgt

SEQ ID NO: 330942 - DNA, 201 bp, Homo sapiens
tgttgcctgactttaagcaagcttctaaacacctccccgatctgtaagaggaagatattaatgctgacgttgagatggttggcatgagaatcaaacaaggkaatgagtcaaatgcctgaacaatgagtggtataaactaggtgtaaaatgaacgtgtatttctaagttgtcttaaggtacctggctatcaaatccagcttc

SEQ ID NO: 330943 - DNA, 201 bp, Homo sapiens
tctccagagtcaaaaacacaggaaagagtcttaatttctccctccctctatctatcacctaccaactctgtgttattatagatataagaaactatagtacgtgtgtgtgtgtgtgtgtgtgtgtgtgtgtgtgtattaaaggttgggattgagttcagagttcaagtacattacaaaaatctattgttgggacagaaatgc

SEQ ID NO: 330944 - DNA, 201 bp, Homo sapiens
gtatatactacataactatcacaccaatcaaaatatggaacattttcatcactccataggttcacccccatcccttcccagtcaattaccaacacccttcrccctcacccaatagaggaaaaaaatattctgacctttataactatgaacttgttttgcctgttttaaaacttcatataaataacatcatgcagaatgtac

SEQ ID NO: 330945 - DNA, 201 bp, Homo sapiens
tttctgacttatttcaattaatgtagtgttctctaggtttatacatggtgttgcaaatgacagagtttccttctattttaaggctggatagtattctattygtgtgtataccacatttctttattcattcatcaattgatggacatttagatggattccatgttttagctactgtgaacagtgctgcagtaaacatgagaa

SEQ ID NO: 330946 - DNA, 201 bp, Homo sapiens
ctccagagtcaaaaacacaggaaagagtcttaatttctccctccctctatctatcacctaccaactctgtgttattatagatataagaaactatagtacgtgtgtgtgtgtgtgtgtgtgtgtgtgtgtgtgtattaaaggttgggattgagttcagagttcaagtacattacaaaaatctattgttgggacagaaatgcc

SEQ ID NO: 330947 - DNA, 201 bp, Homo sapiens
acacttgttatctttcatctttttattaagagacattctaacatgaataaggtgatatctcattgtggtttaaatttttatttcatttcactaatgattartgatgttgagcattttttcttatacctgttagctctttatatgctttcttttgaaaaacgtctattcaggtcctttggctatttttaaagtgagttgttt

SEQ ID NO: 330948 - DNA, 201 bp, Homo sapiens
tttgtgtttccccagtagtcaggaatgaatgtggtcagtatacttagctattcctattggctccctcccattttattttggtgtagagctagctaataccaaaagtgtctaaagtggaagtcaagaataagaagatgtggagttgaatgctgtcagaggaaaactcggcttcttaacaaaatcaaatctagcaggcaggaa

SEQ ID NO: 330949 - DNA, 201 bp, Homo sapiens
gaacatcaggtcagtaccagggatctccgattcattctttctgagaactgccatcaaattgacttgtcttcattcaccttccattcatatttcactccacytataattcagattcctgggagactgagtctggccaacctgtaaggtcatgaacctacccaggaacagggtaccaggattggtgccccccagggccatatg

SEQ ID NO: 330950 - DNA, 201 bp, Homo sapiens
tacagcccccacggctgctctcacaggttggagtctattgcctgtggctttttcagactgagggcataagctgtcagtggctctaccattatttggtctgragggcagcatgacccttcctacagctccactaggcagtgtgctggtggggactttgtatgggggctccaaccccacacttcccctctatactgccctagc

SEQ ID NO: 330951 - DNA, 201 bp, Homo sapiens
agttgcataaaagcaacctgatcaattgtaccattactgagttcctgatccttctgagttccatctgatccagggaggcacgtgtaaggcttttcagtatktgccaactacagcgtattgtacttaaagacactacctcatgtaagtgtatataaacctgcatatatatttcagcactgagagggtttgggtcacgttgca

SEQ ID NO: 330952 - DNA, 201 bp, Homo sapiens
taggtacaggttgcagagctgttggctgttagatatcatggcttaatgagtatggcatggacatggcaaggcccttcctcaccacagctgtcagtgtcatytgcacatgaagtggaggtggggacactctggggacatccctagccatctgcccctcaggctgaatccagactcagcaaccttcctcccaacttcaggatt

SEQ ID NO: 330953 - DNA, 201 bp, Homo sapiens
cttttctgcagacctactgaaattattccaaaatatcaagtttgttttacaaatttaagaggctcaaagccagaggtcactgaggatgaagtactaaaaakaatgtgagatatggaattcacctaaggatgaatgaagtatgagtgtgaaactcccctcttcttctattagtagctaaccatgtgattaagctaaactccc

SEQ ID NO: 330954 - DNA, 201 bp, Homo sapiens
gaaattattccaaaatatcaagtttgttttacaaatttaagaggctcaaagccagaggtcactgaggatgaagtactaaaaagaatgtgagatatggaatycacctaaggatgaatgaagtatgagtgtgaaactcccctcttcttctattagtagctaaccatgtgattaagctaaactccctgagcctcagttttctca

SEQ ID NO: 330955 - DNA, 201 bp, Homo sapiens
tactgaaattattccaaaatatcaagtttgttttacaaatttaagaggctcaaagccagaggtcactgaggatgaagtactaaaaagaatgtgagatatgraattcacctaaggatgaatgaagtatgagtgtgaaactcccctcttcttctattagtagctaaccatgtgattaagctaaactccctgagcctcagtttt

SEQ ID NO: 330956 - DNA, 201 bp, Homo sapiens
aagaatgcagcagggttaaaactgtaattagtaaaccattactaataaatcatagtaaatcatgctactataaagacacatgcacacatatgtttattgcrgcactattcacaatagcaaagacttggaaccaacccaaatgtccatcaatgatagactggattaagaaaatgtggcacatatacaccatggaatactatg

SEQ ID NO: 330957 - DNA, 201 bp, Homo sapiens
caactacctcatttccccagcactcagcactcttcctaccaacttctgacttcttctcttttaaagagctatagaatgtgcagtcaaataggcctgggctmgaattctgggactgccaatttctaactgtggtgctttaagtaaaaatcctttaacccctttgagcttctgtctcctcatatgcagaatatggataatgcc

SEQ ID NO: 330958 - DNA, 201 bp, Homo sapiens
cagaagctgcaaagagtccaaatggattggtggtagtttctatatttataaaagtaagtctcttgcattccttcattcttctcaccatccccacctcaatyagaataccaatttacggtctctgttggagttagaaatattaaaaggggtgctatccatgcctaagaaaactatggggtggtgccttttatatacatgaga

SEQ ID NO: 330959 - DNA, 201 bp, Homo sapiens
atttgggttgtttctaccttttggtattgtgaatagtgctgctgtgaacatgggtgtacagttttcagtttgggtacctattttcaattggcagccggtgggggggggggtgtatacctaggagtggcattgttgggttatatggtaattgtatgtttaactttttgaggtaccaaattgttttgagtgcttaccccgtac

SEQ ID NO: 330960 - DNA, 201 bp, Homo sapiens
tttgggttgtttctaccttttggtattgtgaatagtgctgctgtgaacatgggtgtacagttttcagtttgggtacctattttcaattggcagccggtgggggggggggtgtatacctaggagtggcattgttgggttatatggtaattgtatgtttaactttttgaggtaccaaattgttttgagtgcttaccccgtacc

SEQ ID NO: 330961 - DNA, 201 bp, Homo sapiens
ggggaggaggcaggttgctatgatgccaaataaaaattatgttgaaggtaaatgcaatacaggacacagagtcaacagaatttgcttgttttaaatgaaayaccgctcctgtgcttgaatccatgcagtggatggtgatgatttaatgagattctactactttactttccttgcaagcttagatttcatatgtctgagtga

SEQ ID NO: 330962 - DNA, 201 bp, Homo sapiens
ttgggttgtttctaccttttggtattgtgaatagtgctgctgtgaacatgggtgtacagttttcagtttgggtacctattttcaattggcagccggtgggggggggggtgtatacctaggagtggcattgttgggttatatggtaattgtatgtttaactttttgaggtaccaaattgttttgagtgcttaccccgtacca

SEQ ID NO: 330963 - DNA, 201 bp, Homo sapiens
ctcatccctcggccagccaggctttgggaccctgccatgtgttctccaggtctcctggactggccacagtgatgggtgctcatggtatgcctggggatgtsatacctctagagatatagatctggaatcactgggatgcagaaggcaagtgaagccatggatgtagatgagctactctcagatgagaggatagagtaagaa

SEQ ID NO: 330964 - DNA, 201 bp, Homo sapiens
ccttggaggatcttcctgaaggcttggagcttacatagcactaacctcaatcttttcactgaccttcccaagttgtgtgtatgtgtgtgcatgtgtgtttktgtgtgtgtgtgtgtgtgtgtgttgtctgaactcaaatcaatgtatacatattgtttcttatggcattataaatgctcatacaatatttcactcccacat

SEQ ID NO: 330965 - DNA, 201 bp, Homo sapiens
acggcgtgaacccgggaggtggagcttgcagtgagccaagatcgcaccactgcactccagcctgggcaacagagcgagattccatctcaaaaacaaaaacaaaaacaaatacaaaaaaaatgacccaaatgtgtgaaactgtgagtcatgttcagggggcatcaaaaagccccttcagcagtaggtgtatgttgtaaagga

SEQ ID NO: 330966 - DNA, 201 bp, Homo sapiens
acattcagagacttttctgggatcccagtgcactcttcatgctcagtcacctatgtgtaaatactctcttgacttttttcttttttttctttttctttttytttttttttttttttgagatggagtcttgctctgttgccagcctggagtacagtggcgcaatctcagctcactgcaacctctgcctcccgggttcaagcg

SEQ ID NO: 330967 - DNA, 201 bp, Homo sapiens
cggcgtgaacccgggaggtggagcttgcagtgagccaagatcgcaccactgcactccagcctgggcaacagagcgagattccatctcaaaaacaaaaacaaaaacaaatacaaaaaaaatgacccaaatgtgtgaaactgtgagtcatgttcagggggcatcaaaaagccccttcagcagtaggtgtatgttgtaaaggag

SEQ ID NO: 330968 - DNA, 201 bp, Homo sapiens
ctgcctcccgggttcaagcgattctcctgcatcagcctcccaagtagctgggatgacaggcatgcgccaacacacccggctaatttttgtatttttagtaragatggggtttcaccatattggccagaatggtctcgatctcttaacctcgtgatctgcctacctcagtctcccatagtgctaggattacaggcgtgagcc

SEQ ID NO: 330969 - DNA, 201 bp, Homo sapiens
ggcgtgaacccgggaggtggagcttgcagtgagccaagatcgcaccactgcactccagcctgggcaacagagcgagattccatctcaaaaacaaaaacaaaaacaaatacaaaaaaaatgacccaaatgtgtgaaactgtgagtcatgttcagggggcatcaaaaagccccttcagcagtaggtgtatgttgtaaaggagg

SEQ ID NO: 330970 - DNA, 201 bp, Homo sapiens
gggtttcaccatattggccagaatggtctcgatctcttaacctcgtgatctgcctacctcagtctcccatagtgctaggattacaggcgtgagccaccgcrcccggccttttgagctatttatgtctatattgacccctttctttctgtgggttgggctacttctaaacttcataacaaagtttgaaacaccttatgttct

SEQ ID NO: 330971 - DNA, 201 bp, Homo sapiens
accacctttcaatttctgcgctaagcaccttgttcatttagcacgtcatgttatatccttacctacatccaacatggttttgaggtactgaacggcatacrtaaaacattttcatcagaagggaagtgaggctggagtttggggagtgaggagcagaaagagagaatgaaagtaaatataccaaaacccaggctaaaatga

SEQ ID NO: 330972 - DNA, 201 bp, Homo sapiens
gcgtgaacccgggaggtggagcttgcagtgagccaagatcgcaccactgcactccagcctgggcaacagagcgagattccatctcaaaaacaaaaacaaaaacaaatacaaaaaaaatgacccaaatgtgtgaaactgtgagtcatgttcagggggcatcaaaaagccccttcagcagtaggtgtatgttgtaaaggagga

SEQ ID NO: 330973 - DNA, 201 bp, Homo sapiens
ttctaagaccaacattttttcacattttaacatctttagtgatacattttataataggcttcttacagtttaattgtgtgtgtgtgtatgtgtgtgtgtakgtgtgtgtgtgtgtgtgtgtgcgtgtttctctcctagtggtgcatagtatgcacaaaagcaaatgaaatgctctgagaagtcctgcagattgaaaataaa

SEQ ID NO: 330974 - DNA, 201 bp, Homo sapiens
gtgaacccgggaggtggagcttgcagtgagccaagatcgcaccactgcactccagcctgggcaacagagcgagattccatctcaaaaacaaaaacaaaaacaaatacaaaaaaaatgacccaaatgtgtgaaactgtgagtcatgttcagggggcatcaaaaagccccttcagcagtaggtgtatgttgtaaaggaggagg

SEQ ID NO: 330975 - DNA, 201 bp, Homo sapiens
cagtaaaagagccatgaaacctaactcatatgttcattcatctaccaacaaatatttattgagcacctattatgttattgaggcataggcaatataagttaacaaaacaaaacatctctattgttatgatgttttcatcttagtttgagagagcaatgatcagtaaaaataatatgaaatatcatgtagcctagttatggt

SEQ ID NO: 330976 - DNA, 201 bp, Homo sapiens
tgtgttagatggcagcttttgattggttcagttaaagttccatgtttcttaatgttggcatttataagaaatagctcaagttaagttccacttgtggttgygattcaaacaagtttaaggtcactttcaaggcctatctctgtcttctctagaatttttcatgcctggtctccattttagtttattttaacaacattgcat

SEQ ID NO: 330977 - DNA, 201 bp, Homo sapiens
acccgggaggtggagcttgcagtgagccaagatcgcaccactgcactccagcctgggcaacagagcgagattccatctcaaaaacaaaaacaaaaacaaatacaaaaaaaatgacccaaatgtgtgaaactgtgagtcatgttcagggggcatcaaaaagccccttcagcagtaggtgtatgttgtaaaggaggaggtgag

SEQ ID NO: 330978 - DNA, 201 bp, Homo sapiens
agtaaaagagccatgaaacctaactcatatgttcattcatctaccaacaaatatttattgagcacctattatgttattgaggcataggcaatataagttaacaaaacaaaacatctctattgttatgatgttttcatcttagtttgagagagcaatgatcagtaaaaataatatgaaatatcatgtagcctagttatggta

SEQ ID NO: 330979 - DNA, 201 bp, Homo sapiens
aagtgtgtgcgagtgtgtatgtgtgtgtgccgtgtcgggctccccccttccccccgttttcccgtcgagtgatgcacttggaatgagaatcagaggatggraatagtctgggaggtgctttttcttcttcaagccaatttcatcgtctgcatatcaggtacgggacgcgccgaagtcactggctgatttggattatgttgt

SEQ ID NO: 330980 - DNA, 201 bp, Homo sapiens
gtttacttataccctgccaagttcctgaaagactgtgtcattatcttgtttcactctcatgacaattcttagatagatgcatccctatattatgcataaaraaataatcagaggggataagtagccccacattacttggacagaagaggtatctgactaggctcaaggtcttgcattttccagcatgatcctgcacccaaa

SEQ ID NO: 330981 - DNA, 201 bp, Homo sapiens
gtaaaagagccatgaaacctaactcatatgttcattcatctaccaacaaatatttattgagcacctattatgttattgaggcataggcaatataagttaacaaaacaaaacatctctattgttatgatgttttcatcttagtttgagagagcaatgatcagtaaaaataatatgaaatatcatgtagcctagttatggtaa

SEQ ID NO: 330982 - DNA, 201 bp, Homo sapiens
taaaagagccatgaaacctaactcatatgttcattcatctaccaacaaatatttattgagcacctattatgttattgaggcataggcaatataagttaacaaaacaaaacatctctattgttatgatgttttcatcttagtttgagagagcaatgatcagtaaaaataatatgaaatatcatgtagcctagttatggtaaa

SEQ ID NO: 330983 - DNA, 201 bp, Homo sapiens
cactgcaacctccacctcccaggttcaagcgattctcctgcctcagcatcctaagtaactgggattacaggcacacaccaccacgcccagctaattttttytgtatttttagtagagacggggtttcagcatgttggtcaggctggtctcgaactcctgacctcgtgattcgcctgccttggccttccgaagtgctgggat

SEQ ID NO: 330984 - DNA, 201 bp, Homo sapiens
aaaagagccatgaaacctaactcatatgttcattcatctaccaacaaatatttattgagcacctattatgttattgaggcataggcaatataagttaacaaaacaaaacatctctattgttatgatgttttcatcttagtttgagagagcaatgatcagtaaaaataatatgaaatatcatgtagcctagttatggtaaat

SEQ ID NO: 330985 - DNA, 201 bp, Homo sapiens
ttgagccaacctaagtggagtaagcaagtgaacagcaggaagttgattattgagccaaagagaacagctgctcaaagaccatcaggtggtacagacttggyacattccataaacaggaagaaggtcactatgaacagaggacagtgagcagagggcgaattcaggttacagaaaaatggtcaaaagtctgattgtcaagag

SEQ ID NO: 330986 - DNA, 201 bp, Homo sapiens
atccaggttattgcaagtgctgttaattcattccttttatggctgggtagtattccatcatatacatattatatatatatatatatatatatatatatataataaaatatatatataaaaatatattaaaaatatatatatacacctaatattgatttttaaaaagcaaatacaattattcatttcaaagtgcctgataga

SEQ ID NO: 330987 - DNA, 201 bp, Homo sapiens
gaggcaggacaattgtgtgaacccgggaggcggagcttgcactgagccgagattgtgccactgcactccagcctgggcgacagagccaagactccatttcaaaaaaaaaaaacaaaaaaacatgaggatttgaacctgggtctgatttcagagctggagagtttaataggaagccagtgggttttgaagctttaatgcatg

SEQ ID NO: 330988 - DNA, 201 bp, Homo sapiens
gcagccttaggatgtataggaaatgcaatgcactaaggttgaatatttgtggctttgagagagtttagtggatctttcatttctgtctccatgatttgcarttttaatttactcatgactgagctctattgaaaggaacataaccctgtgatcatagaatctactaaatcttaaattaaaaaaattaaaaacaaagcacct

SEQ ID NO: 330989 - DNA, 201 bp, Homo sapiens
caggacaattgtgtgaacccgggaggcggagcttgcactgagccgagattgtgccactgcactccagcctgggcgacagagccaagactccatttcaaaamaaaaaaacaaaaaaacatgaggatttgaacctgggtctgatttcagagctggagagtttaataggaagccagtgggttttgaagctttaatgcatgtagg

SEQ ID NO: 330990 - DNA, 201 bp, Homo sapiens
tggcttgaacccgggaggccaaggttgcagtgagcagagattgtgccactgcacttcagcctaggtgacagagccagaaccagacactgtctcagagaagaaaaaaaaaaaaaaggcaggaggtgtgatgagggaccccaccctcctttgtatgggagccaaaggaggaaggagcaggtgctgattgcctaacagatgtcc

SEQ ID NO: 330991 - DNA, 201 bp, Homo sapiens
gatgatgctcaaagcaaaaccttatccattttcatccaacaaatggaaaccaaacattgttcaggtgctgagatatggcaggaatcaaggctggtaaatakacatccaatcatgcctatattatccttaccaaaaaaaatatattaaatatagattattatatataataaaatattaaatattttatatattacatattta

SEQ ID NO: 330992 - DNA, 201 bp, Homo sapiens
aacattggctgaagctggctaaaaccagtcaaaaccagctggaaccagttgagccctgctgaaactagtccaaattggctgaaactagtccaaattggctrtaactagtaaaaatctgttataacccatggaaattcgcagaagctagttgaaaccagtcaaaaccaaatgaaactggctgaaactggctgaaaccaactg

SEQ ID NO: 330993 - DNA, 201 bp, Homo sapiens
tataataaaaaaatcagccactcatattagccaagaaaggggactgtttggtcatttttatagtgtggatgatgttcatgctttttgtttgcattcagaattttttttttttttttttcgagatggagtctgtcatccaggctggagtgcagtggcacaaccttggctcactgcaacctctccctcctgggttccagcgat

SEQ ID NO: 330994 - DNA, 201 bp, Homo sapiens
gtccttccctcctaccctagccccggcaatcactgatttgcaatcactagagttttgcctttcctggatttcaatccgtggacttatacagtatatagtctttttttttttactttgttttttaagttatacagtagaattaacttttttattttggcataaagttctctgaagtttaacaggtatatagatttggatgac

SEQ ID NO: 330995 - DNA, 201 bp, Homo sapiens
cttaaaaatcagcattgtacacatttctccttttcctaaaatgtagtgtttctttgcttattccttcacaccacccaaaaaaggtagaaataaaccaacagttttccatgatttcaaaataggcagacatttttttggtggctatattagattgcaagtctaggagagagactgagaagccgggatttggagagaagaggg

SEQ ID NO: 330996 - DNA, 201 bp, Homo sapiens
tgcaatgtatcctgtacccacatcatgttcttcctggagccattaaaaatgtttggtgatgcgcagagttggcataaaattttaattatgaatcttggttrcccaaattagtgtactagcataactttaattaaaacttactgctttatattcctctcaagtcctgccctgataaaatgttttattatccctccaagtctg

SEQ ID NO: 330997 - DNA, 201 bp, Homo sapiens
ctcccacccacacaatgaagcttcacattggcctttttcagtaaatgaaactgagccatagagaagttaaaacttctggaaaatctggaagtgaacccagsctctttcctgatgccatcctgcattctttgtggtctctttctcccaaagcagaactagcaaaaacagttctgatcaactgagagtcccagataattccct

SEQ ID NO: 330998 - DNA, 201 bp, Homo sapiens
tccaaaatatcaagtttgttttacaaatttaagaggctcaaagccagaggtcactgaggatgaagtactaaaaagaatgtgagatatggaattcacctaakgatgaatgaagtatgagtgtgaaactcccctcttcttctattagtagctaaccatgtgattaagctaaactccctgagcctcagttttctcatctctaaa

SEQ ID NO: 330999 - DNA, 201 bp, Homo sapiens
catctgcccctcaggctgaatccagactcagcaaccttcctcccaacttcaggattaattcccagatgtcctttttctcaaatgtagggagtgcttctggktgtttttttttttttttttttttttcagacatcaggcacaaatgatccaagcagagcctgcagagtacattagactcggtctgaaggcactagcctgagg

SEQ ID NO: 331000 - DNA, 201 bp, Homo sapiens
ctggggctactcacaccaggtcaggctcatgcaccactatgcccagctaaatttttgtatttttagtagagacaggcttttgccacgttggtcaggctggyatcaaactcctgacctcaggtgatctgcctgcctcagctctaatccattctttacacaacagctagggtgacctttgtgaaagccaaatctcagtgtatc

SEQ ID NO: 331001 - DNA, 201 bp, Homo sapiens
ctgcccctcaggctgaatccagactcagcaaccttcctcccaacttcaggattaattcccagatgtcctttttctcaaatgtagggagtgcttctggttgkttttttttttttttttttttttcagacatcaggcacaaatgatccaagcagagcctgcagagtacattagactcggtctgaaggcactagcctgagggga

SEQ ID NO: 331002 - DNA, 201 bp, Homo sapiens
tgaggcaggagaattgcttgaacctgggaagtggaggttgcagtgagctgagatcgcaccgctgcactccaccttgggcaacagagcgagactccacctcaaaaaaaaaaaagaccttaaatgaagcaaggtttccactcacccctcccaccaatctagcattatattgctaccccactcacagaatataatagccaaaca

SEQ ID NO: 331003 - DNA, 201 bp, Homo sapiens
gagtctcaatttccacatttgtaaaatgaggctaataccatgtatctcacatgacagttatgacaattaagttacataactgtgttagctggcctagttcaaaaaaaaaaaaatgcttctctcttttccctctccttgtcttctctgttcccatggcaattgtaggccttccctcattttaacctggtggctgtggtggct

SEQ ID NO: 331004 - DNA, 201 bp, Homo sapiens
ggcggggcggggagggtgtcaggaatgcattttacaatgtgcagctactgtgcattcttatgaattaaaaacagacaggcacacccaaatagctctagggaaaaaaaaaaaactacagaggctatttttaaaaggtttaacctcagtcctataaaagagcaacagagatatagaatcttagatttgggaggaagcctccta

SEQ ID NO: 331005 - DNA, 201 bp, Homo sapiens
ctccttttttggatgctgcatttgagggtgagagagcgcaagtgacttgttcagaggcatacacaagctagtaagctagaagaaaggctggcttcatgtgkggaggtataatgggccttcagctcaactgaacccatggaaaaaagggactctgtggggcttatacagccctttcctcatacagccaataccacctagctt

SEQ ID NO: 331006 - DNA, 201 bp, Homo sapiens
tgctatgagtattagttatgaattattactatccctcttatagatgagagacttgctcatgtaaggggacccaagggtgaaaccaggctttgcaacccacrcagcccaatgtgatactcagtgtcttggttcccattagagataacctttggaattccagactgttctttaaccagttcagccaagcgccttgttctctct

SEQ ID NO: 331007 - DNA, 201 bp, Homo sapiens
ctcctgtgctcttctgttgctcctagatgttctgttgcctggggaaatctcctggtgcctcttcagcacacaaacatacacattctgtaaactgcaaaggyctatagagcacatctctgccttaataaccatcatctgaaattaaataccccccaacctccacctctattttctcctggctccaatctaccctcttacagt

SEQ ID NO: 331008 - DNA, 201 bp, Homo sapiens
tttgtgtgacttataagcacaaaacaagtaaccacaaggatgtacactaaactgttaatagttgtatgtatagcatggactagaattagaaagaggtggtggggggggcatcacgttttttacttctatattttaatttgttaaaaaattatgcttctggccgggcgcagtggctcacacctgtaatcccagcactttggg

SEQ ID NO: 331009 - DNA, 201 bp, Homo sapiens
tggaagcagacaaatctgttgagattttgtctttcccctttcgttcccagccctcttaggcaagcagttctgagcacagggttttcttcaattcccctgcrtccacactgcaaccgggtgcaagtctttcctaggttatagacagcccgcctccccacgagaccttctgcggactggctgcccctggcctcggcctgggtg

SEQ ID NO: 331010 - DNA, 201 bp, Homo sapiens
gaggttcactgtacatgcacaagaaaagaacgcattggagtgggaaattgtgtaggtgcaaacaacattctaagaactcacagttgaagggggtattaccygggggcggggggcggcgctcaggttcatgttctggagtcagacttcttgggttcaaattctggcaacttgcaagctgtggaacttgggacaagtcattta

SEQ ID NO: 331011 - DNA, 201 bp, Homo sapiens
tgaggcaggacaatcacttgaacctgggaggcggaggttgcagtgagctgaaatcgcgccactgcactccagcctgggtgacagagcgagactccaacttaaaaaaaaaaaaaaaattaggcttccatactgttaagaaaaaactgttttaaaatcacagccctgagatgatgaattttaaggaaagatcatcatatccat

SEQ ID NO: 331012 - DNA, 201 bp, Homo sapiens
cactgtacatgcacaagaaaagaacgcattggagtgggaaattgtgtaggtgcaaacaacattctaagaactcacagttgaagggggtattacccgggggsggggggcggcgctcaggttcatgttctggagtcagacttcttgggttcaaattctggcaacttgcaagctgtggaacttgggacaagtcatttaacctct

SEQ ID NO: 331013 - DNA, 201 bp, Homo sapiens
gcacaagaaaagaacgcattggagtgggaaattgtgtaggtgcaaacaacattctaagaactcacagttgaagggggtattacccgggggcggggggcggsgctcaggttcatgttctggagtcagacttcttgggttcaaattctggcaacttgcaagctgtggaacttgggacaagtcatttaacctctctgtgcctca

SEQ ID NO: 331014 - DNA, 201 bp, Homo sapiens
cccatcccccagcactggtctgattaatattaagtgatgtggcttgtgccaccaagggaggagcaagagaggggagggagaggaaggggaggcagggaagraggaaaagacagatggaagggaggaaaggaagaaagggagggagggaaggaaaagcattccaagtgtggggagccacatgcacaaaacctggagagcact

SEQ ID NO: 331015 - DNA, 201 bp, Homo sapiens
ttacaaggtaacaaaatatcacaaggtaaatggaggcagggtgagatcacaggaccacaggaccagggcgaaattaaaattgctaatgaagtttcgggcaygcattgtcattgataacatcttatcaggagacagagtttgaaagcagacaaccagtcttaccaaaatttattaggcgggaatttcctcatcctaataagc

SEQ ID NO: 331016 - DNA, 201 bp, Homo sapiens
ggcttgaacccgggaggccaaggttgcagtgagcagagattgtgccactgcacttcagcctaggtgacagagccagaaccagacactgtctcagagaagaaaaaaaaaaaaaaggcaggaggtgtgatgagggaccccaccctcctttgtatgggagccaaaggaggaaggagcaggtgctgattgcctaacagatgtcct

SEQ ID NO: 331017 - DNA, 201 bp, Homo sapiens
aactcaaatctccatgacttaggattgaaaatcacttctaaagatatctttaaaatcccaccctggaagaggctcccgtgtggctgcctcatcagcaaactgaggtggtgcagggagctgctgcacacatggaggcagcggggtgaaatcacaacatggcagctggaagagacacagtccatttgcccggtttgtaggatt

SEQ ID NO: 331018 - DNA, 201 bp, Homo sapiens
ttggtataaatgacatatagccacaatgttggtatgttacttatctttgtaaccccagcattgaacacagtgcctgacacataataggtgtttagaaatgyctgtggaataaatgaatgggaatgatcacatctaccttcatcagggagtgtttatgagaaaactgatttcaagggtctaataagcaataggtcaaaataa

SEQ ID NO: 331019 - DNA, 201 bp, Homo sapiens
agttgcttacctctttcttgcccactttcatgtagagttttgcttttgtttttgttttcacttgtagtttgtggggtcccactaggtgttggcttgtctgttttttttgagagtcctgttgcccttgagaatgggttatgtttttttctcaaatatagaagaaaattgaggcagacagaaactcctataccttttcactgc

SEQ ID NO: 331020 - DNA, 201 bp, Homo sapiens
actcaaatctccatgacttaggattgaaaatcacttctaaagatatctttaaaatcccaccctggaagaggctcccgtgtggctgcctcatcagcaaactgaggtggtgcagggagctgctgcacacatggaggcagcggggtgaaatcacaacatggcagctggaagagacacagtccatttgcccggtttgtaggattg

SEQ ID NO: 331021 - DNA, 201 bp, Homo sapiens
gggaagtgataagtgtccatgaaatcttcacaatttatgttcagagattgcagtaaagatgggcatgagaaattataaaagtattaatttggggaactaakaaatgtccatgaaatcttcacaatttatgttcttctgccatggcttcagctggtccctccattcggggtccctgacttcccgcaacatgtatcctttctg

SEQ ID NO: 331022 - DNA, 201 bp, Homo sapiens
atggcagctggaagagacacagtccatttgcccggtttgtaggattgggcacagaatgaatgaccaggaaaaaaaaaagggggggaactgtgcaaaatcaytcttttgagccagttacaaaaaaaatcaatgccaggaaattcatacaaggaggaaagagggagaatctcgccaagaggattgggaattttggaggctaaa

SEQ ID NO: 331023 - DNA, 201 bp, Homo sapiens
tgcttctggttgtttttttttttttttttttttttcagacatcaggcacaaatgatccaagcagagcctgcagagtacattagactcggtctgaaggcackagcctgaggggaaagaatttccccatgtgaaaagtgtctttcttctacagattccaggtattgactctgccaggcatttatgaagatcacatgagttaga

SEQ ID NO: 331024 - DNA, 201 bp, Homo sapiens
gaggacttacatagacaaattattttaccttttattttttacagagaatagatagaaatcaaatgccatattatcttacagaagctaaggaaaaagcagtwtaagaagatgagctccatggtattcaatcctcagagagcaagtacagtaaggactgagtgaaggacattgggtcctcaacatcagaaaactctgtgaagg

SEQ ID NO: 331025 - DNA, 201 bp, Homo sapiens
tgatcatgctactccttggcttcaatcccttcggtggttccgcattgcctccggatgaagtccaaactcccagtagtgctgggaagaccttctggtgtggyctgtgctgaccccaccagccacatttctcacagcagccctccctccccttccatctccacatcgccctgcacctcacactccatctgtccccaagtacac

SEQ ID NO: 331026 - DNA, 201 bp, Homo sapiens
acagggaggggtggatatttgaactgtgatcagtagcccctagatgctagtcgtggatgtgtggtagattagctactcttgtcaaatatagatttcgttctttttttttttttttttttttttttgagatggagccttgctctgtcacccaggcaggtgtgcagtggcgcaatctccgctcactgcaacctctgcctccta

SEQ ID NO: 331027 - DNA, 201 bp, Homo sapiens
tgaaagttaaggatgttgtagctcttacaaatggcatctgcctcacctgtgattttaaaaagtgtaagggtttttttcttttcatttcttgcttttgtaaycatatgctggcatgtaacatttataacaaaaacacagtgttcttggcattctcagaaatttgagaaaacctattgtttgagggggaaaatgcctattttg

SEQ ID NO: 331028 - DNA, 201 bp, Homo sapiens
tattcacttgatatcttctgaaaactcctcaaaattcctggtcttacaagtaccacttgttcatatttattgaagttgttatgtattcatttcttttctartatcttttctgtaataacatgtgggaagcatgcatggaggagacagtaaatatgtgtgccctgaatgataataagccaaaactaagtgagtcctcttttc

SEQ ID NO: 331029 - DNA, 201 bp, Homo sapiens
ctaaatattaatattttctggatttgattgaattgaatcatatcgaattggactgaaatgaaataaattgtatacaatatggtaagaaacttcagagattataatagagctttcttttatctggagaaaccacggaaggtttttagaaggtagtgtttgagcaaacacttgaaatattggtttactttggatatacagtaa

SEQ ID NO: 331030 - DNA, 201 bp, Homo sapiens
tccttcttaactccattgtttcaatgccttgccaggtctgagaggcaaaagtcaatggctactcatcagggttggtgaatgcctgtctttttttttttttwaaaaaaaaaaagccttttaagttcaggggtacaagtgcaggtttgtttgttacctaggtaaacttatgtcatggggggttgttgttcagattatttaatc

SEQ ID NO: 331031 - DNA, 201 bp, Homo sapiens
taaatattaatattttctggatttgattgaattgaatcatatcgaattggactgaaatgaaataaattgtatacaatatggtaagaaacttcagagattataatagagctttcttttatctggagaaaccacggaaggtttttagaaggtagtgtttgagcaaacacttgaaatattggtttactttggatatacagtaaa

SEQ ID NO: 331032 - DNA, 201 bp, Homo sapiens
aaatattaatattttctggatttgattgaattgaatcatatcgaattggactgaaatgaaataaattgtatacaatatggtaagaaacttcagagattataatagagctttcttttatctggagaaaccacggaaggtttttagaaggtagtgtttgagcaaacacttgaaatattggtttactttggatatacagtaaag

SEQ ID NO: 331033 - DNA, 201 bp, Homo sapiens
gtaatcccagcactgtgggaggccagcgtgggtggatctcctgaggtcatgagttcgagaccagcctgaccaacgtggtgaaaccccctctctactaaaartacaaaaattagccaggtgtggtggcgcacgcttgtagttcccagctactcaggaggctgaggcaggagaattgcttgaacccaggaggcagaggctgca

SEQ ID NO: 331034 - DNA, 201 bp, Homo sapiens
gacaggaggacaatctcatgaagaggttatttaagaaaaatatatatgttataagtaaatgtatataataaatgccatgagagcacagagaaaagatgccyaaaggagataggatgagttttggaaaacagataagttaaccacaccatacagtttgttgaaagtttcattggaacacttgcacattatcgtgtaaccaat

SEQ ID NO: 331035 - DNA, 201 bp, Homo sapiens
gcaaaccaaattcaacagtatattagaaagatcatacatcatggccaagtgagattatccctgggatgcaaagatggttcaacctaccaaatcaatcagtrtaatacatcatgtcaacagaatgaaggacaaaaacaatatgattatttccaaaaatgctgaaaaaacattttataaaattcaacattccttcatgataaa

SEQ ID NO: 331036 - DNA, 201 bp, Homo sapiens
tttttaaatttatacaaataaacattttttaaaaagagatgaaataattcgcccaaagtgacacaattagtagcaaatttgtgatttaaccccagggtgcyatgtattttccatcatttcacactgcctcccaaaccaacaattctgctggatttctttcttttcgttgcatttagccttgctgaattcaagcttaagaga

SEQ ID NO: 331037 - DNA, 201 bp, Homo sapiens
ctctgagacattcaaactcttccaacatttgtcagttaccaagtcccaaagctgcttccacattttcaggtatctttatagcagtgctccataccacagtrtgaattttctgtggtagtctgctttgcatggctataaaggaatatttgaaattgggtaatttataaagaaaagaggtttattttgctcacagttctgcgg

SEQ ID NO: 331038 - DNA, 201 bp, Homo sapiens
ctgccttgtctttgtaaggcccaggggctaagaatggttgttacattttcagatagttggggaaaaaaatcaaaagaggaaataatatatttcatgacacrtgaaaattatatgaaaacaaattttggttcatgaattgtgtttgattgaaaacaaccacactcattcatttatgtactgtctagtatctattttcgatgg

SEQ ID NO: 331039 - DNA, 201 bp, Homo sapiens
ttccctgcttcttagcatactgtggtcaaataatgaggggatctcagaaacagtgtggtggccagaaagaggcactgggagctggaagccaagactcggaraatgtgctgtctcatctttagttctctcatcttacctcccaagtagcactgagcaagtctctccaccttgatgagcctgcatgccttcctctgcaccatg

SEQ ID NO: 331040 - DNA, 201 bp, Homo sapiens
tccatttgtcacccaaacaaagggtaattccaggaaagcatttgctggaggggatgcatttttcaagacctgctgcagcaccttcagattaggctcatttkcacacctgcatattttcccccaattttccagcgtaaccctgtgtgaatcattgcagttttgctaattgaatctgagagcacctgtttcttaatcaatatt

SEQ ID NO: 331041 - DNA, 201 bp, Homo sapiens
aactgtcagactcagctcaaatgaacatcaaaggaagctcagaagaggaagacatcagattcctgagtcccacctcagacctactgaggcagaatgggggktggagcttggaccaggtacccagatgatgctcaaagcaaaaccttatccattttcatccaacaaatggaaaccaaacattgttcaggtgctgagatatgg

SEQ ID NO: 331042 - DNA, 201 bp, Homo sapiens
agagaataagaggagggggaagagtgctacataaagcaagaaacactcagtgggttgatttctaatcttgggtttgctacttgtttgcataatcctggacractcactcaaccactctgtgtctcagtttcctggtttattgaataagagcttgatgatctctgaagtcctttagctttagaatccatacgcccctaagtt

SEQ ID NO: 331043 - DNA, 201 bp, Homo sapiens
tatcggaaacctcacataatctttgtgtcacatcaagcaagtagctacttattgaatcttttggaatttctgaaggtaagatttcctctagcttagctttmtgcagtaaacatccaccctacaagcgctatctccattaaaccaaaagacctttgacatgtgtattttgtgaattggtctttataaaaagatatacctctt

SEQ ID NO: 331044 - DNA, 201 bp, Homo sapiens
gtacactatttgacctggaatttgcataatgaaatatctctggattcgtgaaaagatttatccatgaggatgtttattacagattttttttacaataatgaaaagtgaaagggctgtaaagattcaacaatcagctaaacatttttacaaggaaatatgatgtagatatttcaaagtgatattgctaaagaatagttaatg

SEQ ID NO: 331045 - DNA, 201 bp, Homo sapiens
agcatgtttccaaggttcatccacattgtagcatgtattgtcatttcttccttttcatggcaggataatattccattttgtgggtataccacaaattgccyattcattcattgatggacatttgggttgtttctaccttttggtattgtgaatagtgctgctgtgaacatgggtgtacagttttcagtttgggtacctatt

SEQ ID NO: 331046 - DNA, 201 bp, Homo sapiens
tccagttctccaaacaccagctgacggttctacaatttaattcaattctaagatttatctacctaaagttaacatcagatcgcaagagttaaagtgtttasttacatcagactcctcctacttcagaggccaatcataagtctaggcctcaaactgactaagcaactataaatcctacaacccctcttcatgtttgataat

SEQ ID NO: 331047 - DNA, 201 bp, Homo sapiens
ccggctgagaggctgcaggctgcgcgcggacctggggagcagggagggtcggcggaggctgccggcggctggcggtttcgggcaataatccctgcctctcyttctctgtgtgtctgctgtgtctgctccttccccgccccccggaagcaggagaagaactgccccggagcgcagcagccaccctccgaccatgccccggtg

SEQ ID NO: 331048 - DNA, 201 bp, Homo sapiens
agaactgactgatgtgggaaaagtaggagcaaactcagctgacatcggcttacctggcaccttcagaaggcccacataatgcaagagcctcagccccctgragttttctgtccctaccccagaacgagtccgtgttgatttaatctgaatttagcattagatgacaaaatcgaatgtgtgccatcgttttcggtttttctt

SEQ ID NO: 331049 - DNA, 201 bp, Homo sapiens
agaaaacaaccttcaacttccagacaagactatgtcgtgctccctgttagacattctcccagcatcccacgcttctttgctttgtccttattgccatgtarttgtgcatttcattgttaaatgcctttctccaccactaaaatacatacttgatgaggactcttatttaaaacctgggccctgacacatagtagatacaca

SEQ ID NO: 331050 - DNA, 201 bp, Homo sapiens
gaatttggtgactccataaaggtgactcacattcgaatgagcaggggaaactgtcagttttaatgtatcttctgatgctgaaattctatacaatccataattttttttttttttttgagatggagtctcgctgtgtcacccaggctgaagtgcagtgccatgatctcggttcactgcaacctccacctcctgggttcaagc

SEQ ID NO: 331051 - DNA, 201 bp, Homo sapiens
ttctctctctttgcagtaaatgaatggctcctcaagtagggaacaaagccaagaagaatcccacctcagtgaaatgctacaactgtgaattgacgtaacckagaatgtcccccttcttgcttctctctccttctttcccccaagcctcattcattcttgggattggccctttcttcatgaaaagtgtctgcaaaaccatgg

SEQ ID NO: 331052 - DNA, 201 bp, Homo sapiens
gattattctctgaagttactccatcaagccatccctctgaagtcaagctgctgctctctgacatccagctgctcctcctctctgctggctgactctggggwctttataggcacaggatgaggcatggtggggccatgggtggtttatgaaaaggaaacattcaagtggaaaaacagcgatagaatttctcactttgggctg

SEQ ID NO: 331053 - DNA, 201 bp, Homo sapiens
acactgaatgcacagttgacaaagaaaggtcagaaatgagatggtaaggaaagaaagcacaaggaacaccaaacatctgtctgaaagacacaagggaaaaraaattgtctctcctctacagataccatgtgggtctctatactaatttaccaatcaacagctgttcagcgattctactgtccattgtgcaggagacaagtt

SEQ ID NO: 331054 - DNA, 201 bp, Homo sapiens
ttgatagatccattgggttttagttcatttaactgctgaatagtaccctattaaatggatttactacaatttatttttccattctgcacttcatgaaaacttatttctaatttttcgctatgataaacaatatgcaatgaatgttcttttgtattcttggatacacatgtgggtttatatcaggaatttgacttccggatt

SEQ ID NO: 331055 - DNA, 201 bp, Homo sapiens
tgtctcttattagaaaactgtaattgggccgggcacggtggctcacgcctgtaatcccagcactgtgggaggccagcgtgggtggatctcctgaggtcatragttcgagaccagcctgaccaacgtggtgaaaccccctctctactaaaagtacaaaaattagccaggtgtggtggcgcacgcttgtagttcccagctact

SEQ ID NO: 331056 - DNA, 201 bp, Homo sapiens
tgatagatccattgggttttagttcatttaactgctgaatagtaccctattaaatggatttactacaatttatttttccattctgcacttcatgaaaacttatttctaatttttcgctatgataaacaatatgcaatgaatgttcttttgtattcttggatacacatgtgggtttatatcaggaatttgacttccggatta

SEQ ID NO: 331057 - DNA, 201 bp, Homo sapiens
agctcaagtgatctgcctgcctcagcctcccaaagtgctgggattacagccacgagccaatgcgtcctccctgaccttatatttggaaaagcctaaagaccacacacacacacacacacacacacacagacacacaaagatgttagaacgcattaaaaaatcagtaaagtagaaggatacaaaatcaacatacaaaaatca

SEQ ID NO: 331058 - DNA, 201 bp, Homo sapiens
gctcaagtgatctgcctgcctcagcctcccaaagtgctgggattacagccacgagccaatgcgtcctccctgaccttatatttggaaaagcctaaagaccacacacacacacacacacacacacacagacacacaaagatgttagaacgcattaaaaaatcagtaaagtagaaggatacaaaatcaacatacaaaaatcag

SEQ ID NO: 331059 - DNA, 201 bp, Homo sapiens
ttttaaatttatacaaataaacattttttaaaaagagatgaaataattcgcccaaagtgacacaattagtagcaaatttgtgatttaaccccagggtgccwtgtattttccatcatttcacactgcctcccaaaccaacaattctgctggatttctttcttttcgttgcatttagccttgctgaattcaagcttaagagag

SEQ ID NO: 331060 - DNA, 201 bp, Homo sapiens
tttgactttttaataacagccattctgattggtgtgagatggtatcattgtggttttgatttgcatttctttagtgatcaatgatgttgagctattttttrtagacttgttggccgcatatatgtcttctgtcgaaaatgttcatgtcctttgcccgcttcttcatggagttttttttttttcttgtgaatttaagttatc

SEQ ID NO: 331061 - DNA, 201 bp, Homo sapiens
gacatgagattaaccccacaattgactgacccattgattttaggaattaccagtagtttatttccaattgtagtttaaaaatggagttattagtatgctcstagcattctgaatatagcacatacacattttccttattgctatgatttatgggaggctgcatgaacctaggcatggacttgtactcttgggatctgaagt

SEQ ID NO: 331062 - DNA, 201 bp, Homo sapiens
cccatatgggccaccaaaatgatgcaggattttttgctccttagcttggctaaaatctaggtcttgtctcaagaccaggaaaaattaggcacacagacacrttgaagggtgaggaaagtggttgtattaggcgaaaataaatctctcagcaaagaaagaaggggccctgccaataggctcccacctcgcagattgaatacc

SEQ ID NO: 331063 - DNA, 201 bp, Homo sapiens
aacagccattctgattggtgtgagatggtatcattgtggttttgatttgcatttctttagtgatcaatgatgttgagctattttttatagacttgttggcygcatatatgtcttctgtcgaaaatgttcatgtcctttgcccgcttcttcatggagttttttttttttcttgtgaatttaagttatctatagatgctggat

SEQ ID NO: 331064 - DNA, 201 bp, Homo sapiens
ttgactgacccattgattttaggaattaccagtagtttatttccaattgtagtttaaaaatggagttattagtatgctcctagcattctgaatatagcacrtacacattttccttattgctatgatttatgggaggctgcatgaacctaggcatggacttgtactcttgggatctgaagtttcatccatctgtttaaaaac

SEQ ID NO: 331065 - DNA, 201 bp, Homo sapiens
atactactgagctctagtaaccaaaacagcatggtactggcataaaaacagacacataggccagttgaacagaacaaagggtactctatttttggtttttwttgaggaacctccaaactgttctccatagtagttgtactaatttacattcccaacagtgtaccagggttcccttttctctacatcttcactggcgtttgt

SEQ ID NO: 331066 - DNA, 201 bp, Homo sapiens
gagtgcagtggcgggatctcggctcactgcaagctccgcctcccaggttaacgccattctcctgcctcagcctcccaagtagctgggactacaggcgcccrccactacgcccggctaattttttgtatttttagtagagacggggtttcaccgttttagccgggatggtctcgatctcctgacctcgtgatccgcccgcct

SEQ ID NO: 331067 - DNA, 201 bp, Homo sapiens
cttgttggccgcatatatgtcttctgtcgaaaatgttcatgtcctttgcccgcttcttcatggagttttttttttttcttgtgaatttaagttatctataratgctggatattagacctttgtaggatgtgtagtttgcaaaatttttctcccattctgtaggttgtctggtttctctgttgatagtttcttttgctgtgc

SEQ ID NO: 331068 - DNA, 201 bp, Homo sapiens
ttcttcttcctttcttcctcccttcccactcttcatttcctccattcttcatttttcccctccctccctccttcctttccttcccttccttccttccttcrttccttccttccttccttccttcccttttttttcttttctttcttgtcaaaacatacatttcaacccaggcactaaacagggtctgggtgtatagcagtg

SEQ ID NO: 331069 - DNA, 201 bp, Homo sapiens
cccccaattttccagcgtaaccctgtgtgaatcattgcagttttgctaattgaatctgagagcacctgtttcttaatcaatattaatgcatcacatggacrcagaatttgtaatgagtcattctagggggaagaatgatgaaattcaaaaaaagtattcactattcatctgcaacctgataacttgtggccagaattccat

SEQ ID NO: 331070 - DNA, 201 bp, Homo sapiens
gctcatctctgagtcccatgcctcgcacaaggcctgggaaaatgtaggcactttaccagtttgagttgaacaaatgattgacactgaattatttcctctgygtaaaggtgttagatgtgattttacagccatcaggactattaccatgtggtcaaggtgtgttttctgcaatcccatctaagttaatggaacaaaacctac

SEQ ID NO: 331071 - DNA, 201 bp, Homo sapiens
ctactagggaggctgaggcaggagaattgcttgaacctgggaagtggaggttgcagtgagctgagatcgcaccgctgcactccaccttgggcaacagagcragactccacctcaaaaaaaaaaaagaccttaaatgaagcaaggtttccactcacccctcccaccaatctagcattatattgctaccccactcacagaata

SEQ ID NO: 331072 - DNA, 201 bp, Homo sapiens
agcataatacattaattaatataaacttttattgaagtacattaaacataaaatgcactcattttaattatatggtttgatgagtttggggtaaaaaagayagtcctataaccaccaccgcaactaagatgtggaacatttttatcactccccaaatttctgtatgtttctttgtagtcagtccctctccaatccttgtgc

SEQ ID NO: 331073 - DNA, 201 bp, Homo sapiens
gtatgaatatttttttcaactacaagttttatgaaatttaaacacagatcaagtactaataagaaaatctggtactcaagttgagatgtgctggattttgsagactttgtattaaaaatgcatgtaaaatattaataatttttattttgactacctgttgaaatgatcatctttgggatagattgagctaaatggtctata

SEQ ID NO: 331074 - DNA, 201 bp, Homo sapiens; identical to SEQ ID NO: 69025

SEQ ID NO: 331075 - DNA, 201 bp, Homo sapiens
gggagccttggacgctgtgcgggagatgaacgacctaccggagtaaggagagaggggggcgggcggagtcctgggcgggctcctggctcccggcggtaacsgcgtccttctccgcagcacgcaggtcttcatctgcaccagccccctgctgaagtaccaccactgtgtgggtgagaaggtgtggctgccccgcccctactc

SEQ ID NO: 331076 - DNA, 201 bp, Homo sapiens
ccctactccgcacgtggagctgcctaaatcctgattttaaaaagaaaccaccagaaacccagaaggtgggggtggggggctctcaagggcttagagccaastccctatccctgaattccggcttccatcaggccctactcacagactgtgttttctacacagtaccgctgggtggagcagcacctggggccccagttcgta

SEQ ID NO: 331077 - DNA, 201 bp, Homo sapiens
tggccgagagggagaagcgaagcatgcactgcaccacgggcgtggcggtcagctctgggagaaagctgcggcccggcgggctcaggtgcatgagcgtggtratggcagacagcaccgtctcctcattggggctggataggcagttgatgatgagtgggacacctcctgcgtgcaggatgtgctccttgttggccctgtctg

SEQ ID NO: 331078 - DNA, 201 bp, Homo sapiens; identical to SEQ ID NO: 68999

SEQ ID NO: 331079 - DNA, 201 bp, Homo sapiens
ccgtaaagtgggaggcggctgatggggacaaaggctgggtcccgaagaagcgcagggtcagaaaagtgccccccaaagccgtccctgcacccgaaccctasgaaggcctcgcgcaaccgcagggccgtcggcactggtttacgacctgggcggggcggcccggacactctatgcaaatcagcccggcggactccggaagca

SEQ ID NO: 331080 - DNA, 201 bp, Homo sapiens
ttctccgcagcacgcaggtcttcatctgcaccagccccctgctgaagtaccaccactgtgtgggtgagaaggtgtggctgccccgcccctactccgcacgwggagctgcctaaatcctgattttaaaaagaaaccaccagaaacccagaaggtgggggtggggggctctcaagggcttagagccaactccctatccctgaa

SEQ ID NO: 331081 - DNA, 201 bp, Homo sapiens; identical to SEQ ID NO: 69002

SEQ ID NO: 331082 - DNA, 201 bp, Homo sapiens; identical to SEQ ID NO: 69003

SEQ ID NO: 331083 - DNA, 201 bp, Homo sapiens; identical to SEQ ID NO: 69030

SEQ ID NO: 331084 - DNA, 201 bp, Homo sapiens; identical to SEQ ID NO: 69005

SEQ ID NO: 331085 - DNA, 201 bp, Homo sapiens
taaagtgggaggcggctgatggggacaaaggctgggtcccgaagaagcgcagggtcagaaaagtgccccccaaagccgtccctgcacccgaaccctaggawggcctcgcgcaaccgcagggccgtcggcactggtttacgacctgggcggggcggcccggacactctatgcaaatcagcccggcggactccggaagcagcg

SEQ ID NO: 331086 - DNA, 201 bp, Homo sapiens
gcctgtcctgctgaaagaacccgcctttcagatggctgaaaaggcaccaatggggcagtatgtgctccccgttccctgcgtccacatcaggactgtggtcyccagcagtaggggtgccacggtctcgcagtctccatggatcagcgctgccgtggggccacgctcctcggcagtgggatacccagggcagagtgcgcctgc

SEQ ID NO: 331087 - DNA, 201 bp, Homo sapiens
atacccagggcagagtgcgcctgccggctgcgggcctcggccacctggcggggggagcagaagtcctccaggaagatctgtgccaggttccggagcctggygctggccgagagggagaagcgaagcatgcactgcaccacgggcgtggcggtcagctctgggagaaagctgcggcccggcgggctcaggtgcatgagcgtg

SEQ ID NO: 331088 - DNA, 201 bp, Homo sapiens
tggtgctcaacctcacgtatttcagatctttactcaaaaatcatcttctcagcaaggctttaccctatcacctgtttaaaatcacagacacaaacacatacacacacacacacacacacacatacacacacatgcacacacagcacttgtcttctctttctggcttttctccgtagtatttatattatatatcttacatgc

SEQ ID NO: 331089 - DNA, 201 bp, Homo sapiens
ggtgctcaacctcacgtatttcagatctttactcaaaaatcatcttctcagcaaggctttaccctatcacctgtttaaaatcacagacacaaacacatacacacacacacacacacacacatacacacacatgcacacacagcacttgtcttctctttctggcttttctccgtagtatttatattatatatcttacatgcc

SEQ ID NO: 331090 - DNA, 201 bp, Homo sapiens
gtgctcaacctcacgtatttcagatctttactcaaaaatcatcttctcagcaaggctttaccctatcacctgtttaaaatcacagacacaaacacatacacacacacacacacacacacatacacacacatgcacacacagcacttgtcttctctttctggcttttctccgtagtatttatattatatatcttacatgcca

SEQ ID NO: 331091 - DNA, 201 bp, Homo sapiens
tcttcaccacttccttaggaaagtgctgtagcctctgtctgcatttcttatatagcgtatgtgaagtgcctggtaagttgccttgtgattcccttggttgygtatctttcgtccttgccctggcgctcgcatgtcacagggagacagtgaaaagtcaaggtgagaacccttttcttaaaaaaatacaatcaatatatgctt

SEQ ID NO: 331092 - DNA, 201 bp, Homo sapiens
taccaaagagtgacacagaaacacaaagtgaacacatgctgttggaaaaatgacactgtagacttgcttgacgcaaggttgccacaaaccttcaatgtgtaaaaaaaaaaaaaaaaaaatgcagtatctgtgaagtgtgataaaataaagtatgtctggagtcatgcaacccccagcacaatgatggtagggcattgttgt

SEQ ID NO: 331093 - DNA, 201 bp, Homo sapiens
tgaaaaaatctgagtttagcttattataaaaagcctgttgggagccaagcatcgcacatgtcagaggaacatgctgcttcccttcaccatgtctgagatakggtacctacagttgggctgtttgtgggatgaagaagtgcttctataacatcagcaggcgtgtgaccagtggcttgtgggagacaagcacttatgggaata

SEQ ID NO: 331094 - DNA, 201 bp, Homo sapiens
tagaagttacactgagtcactttgactgcattcttttagttacaagtgattcatagaccagcactgattcagagagatggaaatgagaccccactccttgrtgggggagtggcaggtgcacactgaagaggatcatgtaggatgcaatattgtggtggtcatcttgggaacttatgcaaaagggaaactcagtcatcttga

SEQ ID NO: 331095 - DNA, 201 bp, Homo sapiens
tgcagcctcgaccccctgggctcaggtgatcctcccacctcagcctcccaagtagcttggaccacaggcacatgccaccacaactggctaattttattttwttttttttagagacagggtctcactcaggctggcctcaaactcctggcttcaagcgatcctcctaccacagcctcccaaagtgctgggattataggcgcg

SEQ ID NO: 331096 - DNA, 201 bp, Homo sapiens
acttgttgtctgtgtttctcctactagagtggaaactccttgagggcaagggacctttgtttgttcataacgtttcccaaatgccaagaacagtgtttggyacaaagccagcactcaataaatatctgttgagctgaattgaatacagaatgccgcatatttatttgttcaacaaacgagctcttactctccgtctgacca

SEQ ID NO: 331097 - DNA, 201 bp, Homo sapiens
ggactgaagggtcagcttcaaaactctggaattaaagccttgttagaattggtaattggtatggcagcctgactcttggaataaggatagcatcctgcttwttaataaggggatttggtaattagcttgcaggtagaatttgtccatgtttttatttctggataactttaatgaaataaaatacagtataattagatgtgg

SEQ ID NO: 331098 - DNA, 201 bp, Homo sapiens
ataacaggtataaatgaaatttgaagaaaggagcagtctcagaggcttttgttgttaggaaaggaggtggagcttgaactaggggcttgagggaatgcagratttgtataagttaagcagaaggaacagggcattttagatgggccaaagcttagcagactttatcatcaaggtgtactttcagtgcacatgaaatatatt

SEQ ID NO: 331099 - DNA, 201 bp, Homo sapiens
gagaagacttactgtatattctccacagttactcaagatcaccaaatgaccagatccgcagcttccaatactgtggactcactctcccagcacctctctcygtacacgcctgtaaatgtttagcatccttgttcttttcctgccctcggaccactcttgcacctgtcatactagttattattctctctgcttattccagtg

SEQ ID NO: 331100 - DNA, 201 bp, Homo sapiens
ggagggaagttttggggacacttgcccttcccggggtacctgttctgtgattaaatcccaacactgtgctctcttgtcacatcttcctccctccttccttygtaaacccatggagtctctgaaagcatccccttgtatttaaatagcaactctcagggtcatctcagcagatgttctgctgaagaggggtcacgagtaact

SEQ ID NO: 331101 - DNA, 201 bp, Homo sapiens
tacatcattcccaaaatattgaccatctgggagtgagactcaggaatttgcattgtggtgagcacattcaggttttgagaacttctcttttgagggtagarcagagcaggccctcttctgagttcatgctctttccctaagcctctctcctctgtctctcacagggagagtgtgagtgactgctcagactcaggcatgcac

SEQ ID NO: 331102 - DNA, 201 bp, Homo sapiens
ccatgaaaccattcttcctgcctaggcctcaggtctgtgataggaggggctgtcaggaaggtctctgaaatacttttcaggccttttccccattgtcctgrctattagtatttgccttttagttataaaatttctgcagcctgcttgaattcctcctctgaaaatgggcttttcttttctaccacatggccaggctgcaaa

SEQ ID NO: 331103 - DNA, 201 bp, Homo sapiens
tcattccagcattaactcaaaagtccaaagtttgatctgaacaaggcaagtcccttccacctataagcctgtaaaatcagaacaagttacttacttccaarttacaatggggatatagggattgagtaaataatcccgtttcgaaagggagaaatcagccaaaagaaagggactacagggagcagtgtccaggggctgtac

SEQ ID NO: 331104 - DNA, 201 bp, Homo sapiens
atgaccttgttttgagaaagagaaatgaagtccaattactgaatagaatatgaatatataaatatatttatgtatgtgtatatatgtaaaaaatagctgtyatgtagtcattatttttgtgacagtgtattgctaaaaagatcttcataataattttgaatagaacactgggggtgctagatttagaaattaatgatttta

SEQ ID NO: 331105 - DNA, 201 bp, Homo sapiens
aggggctagattatgaatttagttcttgggtaggcttatcacctaggaacaacacaactttataggactgaatgttaaccagacaagcctgtgatttgtgwgcacagataacagaaaccataaccaccagaaaggcagcccagtgataccagtgttgggtcagccacacattttattagtcagatgcttggagcacctacc

SEQ ID NO: 331106 - DNA, 201 bp, Homo sapiens
tttaatcaaatttcagtttttaaaactaaaattttactgtattaatatcagtaatgaatattctacagagtttgaaaagatttactcttctgagtgtattygcaatgaaaaatattttaagcattctttccagtttattttgtgaatatatgtaatactttttacataataaattattttctaaaataaagcttcataaat

SEQ ID NO: 331107 - DNA, 201 bp, Homo sapiens
attgctgacttcgaagatgccttctgccttgttgctgccataatttttcagtgttttgtccccattattacattcttaaatggacacatttatgaaattcyactggaggttggaatcattttagctgtacctagaaaaagaaatatttccagttcattaccacagattggatgggagttaatatactttgtcttttttatt

SEQ ID NO: 331108 - DNA, 201 bp, Homo sapiens
gtaagatgataatgtgctagaagtcaaatggttggaatttagtcatttctgacttcagtgaactaatgctgatttcactgaaattcattgtgtacaagctrgataatcccaaagtgggcgttacctgtctgagaaaggaattagatgggttaaaattagtaccattagtccagactttaaaaacctccatagttttttttt

SEQ ID NO: 331109 - DNA, 201 bp, Homo sapiens
aaatcgtaaagattaagagcaaaccaaataatgtagtgctaggttgacacaaatcctgtgtctctctctcagagactgatggactgatgggtagcaggtgyatgctctttaaattgaaaatgcccaggaagggataggctgttccctatgagcattgctgatgaagcctctgttgcttttgaccaattagtgtggtcacag

SEQ ID NO: 331110 - DNA, 201 bp, Homo sapiens
ccattagtccagactttaaaaacctccatagttttttttttaatcaaacataatagaacttgtttgcaccattgtatcttttatagtagacatagaaatamgttttaagagaatttgttatttatgatgggtcccaagtatcatataaagttgaaaagatccagtgtaaatatttcaattttgagttgatttgatgtaatg

SEQ ID NO: 331111 - DNA, 201 bp, Homo sapiens
ttttattggctgcaaagcagtaacatgaagatttcagtcgttacttgtttgtaaccttagttatgcagtgtgtactcattttctcctcaactggactgcamaaattattagaggttgtcattcccatttatttttttaggtcattttttttttctcttccacattgacaaggatgagtcttctagccaagaagcttgtgcc

SEQ ID NO: 331112 - DNA, 201 bp, Homo sapiens
tggttccaagtctttgctattgtgaatagtgccgcaataaacatacgtgtgcatgtgtctttatagcagcatgatttataatcctttgggtatatacccartaatgggatggctgggtcaaatggtatttctagttctagatccctgaggaatccccacactgacttccacaatggttgaactagtttacagtcccaccaa

SEQ ID NO: 331113 - DNA, 201 bp, Homo sapiens
agaaattacagcaaggtcttctttcataagagagtgcatttacctttttgaagagaaatgatcagttctgataggggctgctattaaaattaaacaattgygtgatttccatgcatttacctttttctaagagaaatgatcagttctgatacatgctgctattaaaattaaacaagtgcatgatttctatagcaagaacat

SEQ ID NO: 331114 - DNA, 201 bp, Homo sapiens
ttagatcccatttgtcaattttggcttttgttgccattgcttttggtgttttagacatgaagtccttgcacatgactacgtcctgaatggtaatgcctagrttttcttctagggtttgtatggttttaggtctaacatgtaagtctttaatccatcttgaattaatttttgtataaggtgtaaggaaggcatccagtttca

SEQ ID NO: 331115 - DNA, 201 bp, Homo sapiens
gctcttattattttgagatacgtcccatcaatacctaatttattgagagtttttagcatgaagggctgttgaattttgtcaaaggccttttctgcatctaytgagataatcatgtggtttttgtttttggttctgtttatatgctggattatgtttattgatttgcatatgttgaaccagccttgcatcccggggatgaag

SEQ ID NO: 331116 - DNA, 201 bp, Homo sapiens
tattattttgagatacgtcccatcaatacctaatttattgagagtttttagcatgaagggctgttgaattttgtcaaaggccttttctgcatctattgagrtaatcatgtggtttttgtttttggttctgtttatatgctggattatgtttattgatttgcatatgttgaaccagccttgcatcccggggatgaagcccac

SEQ ID NO: 331117 - DNA, 201 bp, Homo sapiens
gaggcaggggccctgaaaatggagtaggtgttgatgagtgcccataactctccaggcccagccagggcaccattaaccatcttctgctttggcaagaatartccagatccacctggagaggcttttgggctagggaggactttatatgcagcaggactgcattaatgactttcaggcccttttcctttgtaggctccttcc

SEQ ID NO: 331118 - DNA, 201 bp, Homo sapiens
tgttgaattttgtcaaaggccttttctgcatctattgagataatcatgtggtttttgtttttggttctgtttatatgctggattatgtttattgatttgcrtatgttgaaccagccttgcatcccggggatgaagcccacttgatcatggtggataagctttttgatgtgctgctggattcggtttgccagtattttattg

SEQ ID NO: 331119 - DNA, 201 bp, Homo sapiens
aaccatcttctgctttggcaagaatagtccagatccacctggagaggcttttgggctagggaggactttatatgcagcaggactgcattaatgactttcargcccttttcctttgtaggctccttcctccataaaaaaaaaaaattgaaaattatattttatgactgtgttggtcagatctgttaatattatatattaaaa

SEQ ID NO: 331120 - DNA, 201 bp, Homo sapiens
aaggaatggtaccagctcctccttgtacctctggtagaattcggctgtgaatccatctggtcctggactctttttggttggtaagctattgattattgccrcaatttcagagcctgttattggtctgttcagagattcaacttcttcctggtttggtcttgggagggtgtatgtgtccaggaatttatccatttcttctag

SEQ ID NO: 331121 - DNA, 201 bp, Homo sapiens
gatgagattagtttcattgggtttttgagagaattaattgaagtcatgcaagtaaagcacagctttcaataattattagcaattttttttttggtattaaygtacagcataacaaaagtctagatttacttcaggagttgtgcccttgaagtagaatttggttgtttgctttacctgccttcataatgactgcacgaaaga

SEQ ID NO: 331122 - DNA, 201 bp, Homo sapiens
gcaggcacctgtagtcccagctactcaggaggctgaggcaggagaatggcgtgaacctgggaggcggagcttgcagtgagccgagattgcgccactgcacyccagcgtgggcgacagaggaagactccatctcaaaaaaaaaagttcatcttctccataaaactagttcatcaaaattccttccttcagcatatcaccact

SEQ ID NO: 331123 - DNA, 201 bp, Homo sapiens
taaatgaatctttaatttttttttattccaatgatatgtattcatgtcaatattttattccagatgatgtttaagcaaatataagtgaaaatactgtgtgrgctgatttgatactgtttgtcattcctattgtatgtttgactccctacctccctttcgtgggttttctgtctctctatttaaactttttattatgggaaa

SEQ ID NO: 331124 - DNA, 201 bp, Homo sapiens
agacggggtggcggccgggcagaggctgcaatctcggcactttgggaggccaaggcaggctgctgggaggtggaggttgtagccagccaagatcacgccaytgcactccagcctgggcaccattgagcactgagtgaacgagactccgtctgcaatcccggcacctcgggaggccgaggctggcggatcactcacggttag

SEQ ID NO: 331125 - DNA, 201 bp, Homo sapiens
caataaagcaacagtatctcccctggccattctggaagccacctgttgctttcaagagttacatggaaggggctgctcctgagatattaaagactcttcasaatgtgggggccacatactggagccatgtgacccagtggggagctggtgctgatgaggtcaaggtctcaggctgtcctcctttgtgtagggagctttgca

SEQ ID NO: 331126 - DNA, 201 bp, Homo sapiens
aggaggctgaggcaggagaatcgcttgaacccaggaggcagaggttatagtgagctgagatcatgccactgcactccagcctggtaaacagagctacactscatctcaaaaaaaaaaaaaaaaaaatgcagtgcgtgtgtgtgtgtgtgtgtgtgtgtgtgcgcatgtgcatgctttggaaggaatcatacaagtatgtag

SEQ ID NO: 331127 - DNA, 201 bp, Homo sapiens
actatgggatcaaagggtattgaacatacaatttcattgtgccaagcacccacatgtcttgctttgcccaggacaatccaggtttacatcttttgctgtgmcaagattattaatagtgcctcctttaactctcaaaggcatctcagcttggacgataaataatatggtcatcttacttgtaatcttcttttcacaaactgc

SEQ ID NO: 331128 - DNA, 201 bp, Homo sapiens
ctgattgtttgcagatcagtaaacagcaaacataagaatttacaacgaaaaaggatttggctttacaatttgctgactcactcctggtcagaggtgggggstacactataaatttcctgtaaactcaagaaaatatatcacagcagattaagccctgtggtaggaacaaatgctcactttgctttaattttattagaggca

SEQ ID NO: 331129 - DNA, 201 bp, Homo sapiens
ggggagtcaaaagttacatgcagatttttgactgcatgcagagtcaatgcccctaacacccctgttgttgaagggtcaattatatttgcaaatggaaaccygagagccttataactttttgttttgtattagtctgttctcgtactgctataaagaaataactgagactgggtaatttagaaagaaatgggctcatgctta

SEQ ID NO: 331130 - DNA, 201 bp, Homo sapiens
catcaccagacttttctacttttccttagcttattgaaaataacggtcgacttttgagattatttacaaaggctcattactggattttagagaagaagccrttatgtttgtcatcttaagtaatctagtaaatgaaaacatcactttcattttctctttccataattcatttcatcactctattcaatataatctatgctt

SEQ ID NO: 331131 - DNA, 201 bp, Homo sapiens
agtgggtggcagtgttttaagtaacctttgctcttttcaagtcttttgaagcaatgaaatatgaacactgctacaacaaacacccccacctctttcagagtttttttttttttttttttttgagacagagttttgttcttgttgcccaggctggagtgcaatggtgtggtctcagctcactgcaacctttgcctcctgggt

SEQ ID NO: 331132 - DNA, 201 bp, Homo sapiens
atttatttgtccctttgttttcatgaatacaggctgagcatctgtaattcaaatatccaaaatgttccaaaatctgaaactttttgggtaccaacatgatrccacaagtggaaaattccataccctaacagcacctttgctttcagtgtacataaactttgtttcgtacacaaaattattaacaatattgtataaaattac

SEQ ID NO: 331133 - DNA, 201 bp, Homo sapiens
tgaatagaatatgaatatataaatatatttatgtatgtgtatatatgtaaaaaatagctgtcatgtagtcattatttttgtgacagtgtattgctaaaaaratcttcataataattttgaatagaacactgggggtgctagatttagaaattaatgattttatggaagaaagatctgcctgtaaattttgctcctattatg

SEQ ID NO: 331134 - DNA, 201 bp, Homo sapiens
ttgagtgatgaccaacctttgctgcttagcctgccccacgacccatctgttaggttctctggattctcactgcaatcaggagcctcatccaggagctttcttttttttttttccccaaggacctttgatgtttgattcttatgctattatagttctcaatattaataattcagagtcaattgtttttaataacctaactat

SEQ ID NO: 331135 - DNA, 201 bp, Homo sapiens
atcttttataatgtggtaaaacaaaattaacataagctgagcaatgcataacattagtgaacattcttctcgctatgaggttcatgcttttgataaaggtmtagaagttgcttcagacgtcattgaaatttttatatttattctcaccttgcctatttatttatttaccttgcagtcttttttatttttaaggtgagagat

SEQ ID NO: 331136 - DNA, 201 bp, Homo sapiens
gttgccacctgtgagtgagaacatgcggtgtttggttttctgtccttgcgatagtttcctgagaatgatggtttccagcttcatccatgtccctacaaagkacatgaactcatcctttttaatggctgcatagtatcccatggtgtatatgtgccacattttcttaatccagtctatcattgatgggcatttgggttggtt

SEQ ID NO: 331137 - DNA, 201 bp, Homo sapiens
attttgacattatttgggtcaggccaggtttcacatagggaaaaggacaatgcttctgctttgccttcccatccaccactaacagctttgtgaaaggagakagaagtagaaggaaaggatagagagagaaggagggacgcctcattcagcttacatttcagaagcagggaatgcaataaataacatgaagaaagtccaggc

SEQ ID NO: 331138 - DNA, 201 bp, Homo sapiens
tcaaagggaatgcttccagtttttgcccattcagtatgatattggctgtgagtttgtcataaatagctcttattattttgagatacatcccatcaatactgaacttattgagagtttttagcatgaaaggctgttgaattttgtcaaaggccttttctgcatctattgagataatcatgtggtttttgtttttggttctgt

SEQ ID NO: 331139 - DNA, 201 bp, Homo sapiens
aagggaatgcttccagtttttgcccattcagtatgatattggctgtgagtttgtcataaatagctcttattattttgagatacatcccatcaatactgaayttattgagagtttttagcatgaaaggctgttgaattttgtcaaaggccttttctgcatctattgagataatcatgtggtttttgtttttggttctgttta

SEQ ID NO: 331140 - DNA, 201 bp, Homo sapiens
actttaatattatagcaccagcacggtacagttgactcagtaaacctgccacactgtggaacagaggtttggggaagaatgtggaatgtgaaatataagaytattcagccccttaaaacaatgactatccaaatatgttgcttttgagctggtagtttctcacttattttgtttaaaaaaatataacatcctttgttgggt

SEQ ID NO: 331141 - DNA, 201 bp, Homo sapiens
tcaactagctgtggggattctgatgactagaagctggagggttcacttccaggatggcttccatactcacatgttgggtacctttgcagggatagcaggamtgttgggctcagctgagagtgtcagccagagtgtctatgtgtagcctctccactcatgatagttccagatagttggatgttccccagagtaagcctccca

SEQ ID NO: 331142 - DNA, 201 bp, Homo sapiens
cattcagtatgatattggctgtgagtttgtcataaatagctcttattattttgagatacatcccatcaatactgaacttattgagagtttttagcatgaarggctgttgaattttgtcaaaggccttttctgcatctattgagataatcatgtggtttttgtttttggttctgtttatatgctggattatgtttattgatt

SEQ ID NO: 331143 - DNA, 201 bp, Homo sapiens
tatgtcaaagaaaatattctaaaagaagtaaattaataccatccatgtaaagaatcagtggcattgtggcatcaaatgagtgtgcttcatataatgctatsatctttttaattaagaggaaaagtccaaataattgatgatgaacatttacaattactttgatatcaattacttaaagagacctaaaccataaatatatta

SEQ ID NO: 331144 - DNA, 201 bp, Homo sapiens
gcctatatagttggcctacagaaaaagtatactccttatgactggccttttttggagtctggttgaggggacacctgttttcttggaggtgcttccctcaragtgaggaagagtcacctgaggtattggcacatgcataagtgttcttcttgggaatcctcattgcaaagattctgtgaacatggacttctgaaatggtat

SEQ ID NO: 331145 - DNA, 201 bp, Homo sapiens
ctgcatctattgagataatcatgtggtttttgtttttggttctgtttatatgctggattatgtttattgatttgcgtatgttgaaccagccttgcatcccrgggatgaagcccacttgatcatggtggataagctttttaatgtgttgctggattcggtttgccagtattttattgaggatttttgcatcaatgttcatca

SEQ ID NO: 331146 - DNA, 201 bp, Homo sapiens
agataaaagataaagatagttaaaatccttgatttttcctctttggtattcaaggctgtatggttacttatatctttggcttccttctctcttttgtgatygtacattatccatgtgtcatcctgtacctcaaagggtggaggaacaacttatgtgttctttatctccccacctccccttgcctgtgttctttgtcgtacg

SEQ ID NO: 331147 - DNA, 201 bp, Homo sapiens
agtaccacccttaattaaacattatttttcatttgtcatcagatttggggagttttcagccattatttcttcaaatattctttctgtgccttcctctcctytcattgtggaactcctattatgcatatattggcataattaatggtgtcctaccagtttcttagactactcattttccttcatttctttttctttctgctc

SEQ ID NO: 331148 - DNA, 201 bp, Homo sapiens
tttattgaggatttttgcatcaatgttcatcaaggatattggtctaaaattctctttttttgttgtgtctctgccagactttggtatcaggatgatgttgrcctcataaaatgagttagggaggataccttctttttctgttgattgtagtctcagaaagaatggtaccagctcctccttgtacctctggtagaattcggc

SEQ ID NO: 331149 - DNA, 201 bp, Homo sapiens
tgatcgtacattatccatgtgtcatcctgtacctcaaagggtggaggaacaacttatgtgttctttatctccccacctccccttgcctgtgttctttgtcrtacgagcccctgggagactcatagtttcctcagtaggttgcctggcagtaactggagaatgagatagctatgctataaaaggctcttccttccctggccc

SEQ ID NO: 331150 - DNA, 201 bp, Homo sapiens
aattctcataccatacaatctattttttaagggcatacaatccattagttttattgtatttatagttatgcaaccattaccactatctaattgcagaacaytttcatgtctcttttcataccttgcccaatcacagttactcccagtccctggcaaccactaaattactgtctctctgaatttgccttccctaaacatttt

SEQ ID NO: 331151 - DNA, 201 bp, Homo sapiens
ctggtcctggactttttttttggttagtatgctattaattattgcctcaatttcagagcctgtcattggtctattcagagatttaacttcttcctggtttrgtcttgggagggtgtatgtgtccaggaatttatccatttcttctagattttctagtttgcaaatgattttttttacttttattttaagttcagaggtcac

SEQ ID NO: 331152 - DNA, 201 bp, Homo sapiens
ataatgccagacttctattttcttatgtgaatcattcaaatgtctcattatttgaaaatttgatattatgtagaaaaaatttggatgagtacgtgaatatycccctttttacctatgtatattaccatctgacagataacttttgcatgactgaatcaaaggagcactgttcaacacagtcttggttcatacccttaatct

SEQ ID NO: 331153 - DNA, 201 bp, Homo sapiens
tatttatagatattttattctttttgtggctattgtgaataggattgtattcttgatttggctcttagcttggttgttgttggtgtatataaatgctattkatttttgtacgttgattttgtatcctgaaattttgctcaaattgtttatcagatcaaggagatttgggacagaaactatggggtgttccaggtatagaat

SEQ ID NO: 331154 - DNA, 201 bp, Homo sapiens
attaccatctgacagataacttttgcatgactgaatcaaaggagcactgttcaacacagtcttggttcatacccttaatctgagaaactaaagtaaggctrtaagattgtgccaggttattataaggaagaacagattatcactgtgaactttacagtcagcaaggcatttaaaccaggaagacaaaaggagagagatgtt

SEQ ID NO: 331155 - DNA, 201 bp, Homo sapiens
tttcccagtctcctgtactgggcaggaggatttctcaccatctccaaatcttggaggcctggggaagttgagtccttctgaaacttgaagaaaggagaatkctctctgtatcctgacataggaactatttgagtatgaagaaggtgctgcatgcatacattcaaaggaactagtgaatagctggcatgcattttgatactg

SEQ ID NO: 331156 - DNA, 201 bp, Homo sapiens
ctcttttttcttctctattagtctagctagcagtctatccgtcttatttattcctacaaataaccaactcctggattcattgatcctttgtatgtttttcrtgtctcattttcatccagttcagctctgattttggttcttttcttctgctagctttggtattggtttgctcttgtttttctagttcctcaaagtgtgatg

SEQ ID NO: 331157 - DNA, 201 bp, Homo sapiens
gttgttttaagctaccagtctatggtaattcgttatggctgccagaattaggatagctcttaatttttagttgaatctgaatttatatgtatttcttaggyctggatttgaaaaccattctgctatgtggtttaggtagtatcagctgttagcatacgcattgtctcaaggactaacttttcaatatctatctttatttca

SEQ ID NO: 331158 - DNA, 201 bp, Homo sapiens
agagcatatagtttacaaaggctgtacatttaaacaggtactatatataaattatacatattcttataaaattatcagctatccatattttgttctctaartagtgtgatatcataccataagtcatgtacagaccatgttatgttaaggtacttttaatactgttgatatagctacctcttgaatgaggtcccaaacgca

SEQ ID NO: 331159 - DNA, 201 bp, Homo sapiens
tcttaatttttagttgaatctgaatttatatgtatttcttaggcctggatttgaaaaccattctgctatgtggtttaggtagtatcagctgttagcatacrcattgtctcaaggactaacttttcaatatctatctttatttcaggttagtaacatcctttgtttgggaataacatgcatattatttcatctgatgttttc

SEQ ID NO: 331160 - DNA, 201 bp, Homo sapiens
tcctttaaggttgattccagcaccactttgtgagaagaaactgtcatagtttcacattgcctctaagaaaatgaaacgtacctaagtattattggacagcmggagtattttacagtggttgctgctcaggaaatttgagtgaaggactgcaaaagaggagcaaagcagacccgagagagaaggcagcagtgctcccctgtg

SEQ ID NO: 331161 - DNA, 201 bp, Homo sapiens
tgcttctttcttattctctcttgccaccaccatgtaagaaatgcctttcaccttctgccatgattgtgagacctccccagccatgtggaactgtaagtcawattaatcctccttttattcccagtctcgggtatgtctttatcagcagcatgaaaacagactaatacactcgatatgttgaaataatttagaacatagttt

SEQ ID NO: 331162 - DNA, 201 bp, Homo sapiens
ccttgatccttcaatctgtgctgtgggcacagaggcggctgtgccagcttgtgctggctactttgaaagaaaaacagatgtgttcatcttcatccatatgwttatggagactagtgatagaaacctgggcgcttcatgagtgtgggccccgtttgaaaccccaagtactccttgagccacaccctattggagggcacggga

SEQ ID NO: 331163 - DNA, 201 bp, Homo sapiens
tagggctaaatgttagggatttttatatggagattttatgtgagattattcatctacctacagaaatatttaattcagatattttctttgaaatcaatgtygatcattctagttttctttgtagttatattctgacactggacagacatcagatggggccataccatcatttatgtaattctgcggcatgaaataacttta

SEQ ID NO: 331164 - DNA, 201 bp, Homo sapiens
agcaccactttgtgagaagaaactgtcatagtttcacattgcctctaagaaaatgaaacgtacctaagtattattggacagccggagtattttacagtggytgctgctcaggaaatttgagtgaaggactgcaaaagaggagcaaagcagacccgagagagaaggcagcagtgctcccctgtgacgtgctccatcaccggg

SEQ ID NO: 331165 - DNA, 201 bp, Homo sapiens
tactgccttaatttccttgtttacccaaaagccattcaggaacagttgtttaatttctatgtaattgtatagctttgaatgattgtcttggctttgatttwtatatatatatatatatattttattttattattattacactttaagttttagggtacatgtgcacaatgtgcagcttagttacatatgtatacatgtgcc

SEQ ID NO: 331166 - DNA, 201 bp, Homo sapiens
taagagctctattactctttagttgcttaaccctttgtcttttctatttgttgcaggatttctctcatttatttatgcttttgtttatattttgttgatcrgaaagttttttaatgtaataaaatattttgttcatgctttatgcctgtagttcagtgtgaagaaaattcttcctcaaccccaggttgaggtataaatagt

SEQ ID NO: 331167 - DNA, 201 bp, Homo sapiens
ttgtttacccaaaagccattcaggaacagttgtttaatttctatgtaattgtatagctttgaatgattgtcttggctttgatttatatatatatatatatwtattttattttattattattacactttaagttttagggtacatgtgcacaatgtgcagcttagttacatatgtatacatgtgccatgctggtatgctgca

SEQ ID NO: 331168 - DNA, 201 bp, Homo sapiens
tcgtgaagaaaaaaggaaaccaaagaacaatatagattgcttgattgtatttacattaaaagtaaaataaaatacctatttgtaatatatatataatgccragaaaaagacaaaactcattgtttagggggcagctgtgagattaaaggggagactttcacattttactttaattacaatactttaattgcattcaacaga

SEQ ID NO: 331169 - DNA, 201 bp, Homo sapiens
gtttacccaaaagccattcaggaacagttgtttaatttctatgtaattgtatagctttgaatgattgtcttggctttgatttatatatatatatatatatwttttattttattattattacactttaagttttagggtacatgtgcacaatgtgcagcttagttacatatgtatacatgtgccatgctggtatgctgcacc

SEQ ID NO: 331170 - DNA, 201 bp, Homo sapiens
tttgtaatatatatataatgccaagaaaaagacaaaactcattgtttagggggcagctgtgagattaaaggggagactttcacattttactttaattacawtactttaattgcattcaacagatggttatggagcccttactctgtacctggcactgttctaggctctgaggatacagcagtgatcagaagacaaaaattc

SEQ ID NO: 331171 - DNA, 201 bp, Homo sapiens
atgccagtaacacccccatcagccatgacaataaaaaagtgtccccagcattgccaaatgtcccctcaggagcagattatccctggttgagaaccactggyatagccaatgcagaggaagcaggattggtcagatcggagtttgtatttgacttttatatggtctattttcaagtaatttgtcttcagagcaagaataggc

SEQ ID NO: 331172 - DNA, 201 bp, Homo sapiens
atcaacaggctaaagaagacaaagctcgtggttgtatcagtagatgcaaaaaaagtttgacaaaattcaactcccattcatgacaaaaattctcagtgaastaggaatagagaggaccttactcaacttgataaggaacatctacaaaaatcatactgcttacatcatatttaaaggtgagaaactgaaagcattcccgat

SEQ ID NO: 331173 - DNA, 201 bp, Homo sapiens
gggcacagtaaaaaaaaaaaggcttggaaaacagatttgtgatgctatactgagattatctgttcatgttactccatgaattgtaaactccttaagaaccrggaccattcttatctttttagccctagtgttaagcaaagctttagtcaataaaaacttgttaaatggaatctgctaattcttgaaaaagcaaaggtgagg

SEQ ID NO: 331174 - DNA, 201 bp, Homo sapiens
ttagggtacatgtgcacaatgtgcagcttagttacatatgtatacatgtgccatgctggtatgctgcacccattaactcatcatttagcattaggtatatygcctaatgctatctctcccccctccccccagcccacaacagtccccagagtgtgatgttccccttcctgtgtccatgtgttctcattgttcaattcccac

SEQ ID NO: 331175 - DNA, 201 bp, Homo sapiens
cttttgtcaaatgtgtatgtgcagattctgcaattacataggcgaaagtgagctcttttttatttgtttagggaaaccgagctcctaccacattaggctawgtgaatggcttttcctgcaaccaggatggtggaggaaggaaagagtggcaggtgaaaggtttcctatcaacttcccattaccttttcctgctggcaggct

SEQ ID NO: 331176 - DNA, 201 bp, Homo sapiens
tggcacaagacagggatgccccctctcaccactcctattcaacatagtgttggaagttctggccagggcaattaggcaggagaaggaaataaagggtattyagttaggaaaagaggaagtcaaattgtccctgtttgcagatgacatgattgtatatctcgaaaaccccattgtctcagcccaaaatctccttaagctgat

SEQ ID NO: 331177 - DNA, 201 bp, Homo sapiens
cttaatttggggacctccacttaatacaggaaacaagttttagtgtcatagaccacgtatctaaaaatgatagtgttccttaagggggcatgcctaacttwtctttatccctgtaggcatagcatggtgctgtgcatagaaaaatgagctcaataattgtttgttgtccagctagattgaattaataaagattaagtgtga

SEQ ID NO: 331178 - DNA, 201 bp, Homo sapiens
tgatcttatttctcccttgcttatgaagcttagtttggctctgccacgaaattattggttggaatttcttttatttaggaatgctgaatataggcccacartctcttctggcttgtagggtttctgctgacctgcctttaacttttttttttttttttcatttctaccttggagaatctgatgactgtgtcttggggatgt

SEQ ID NO: 331179 - DNA, 201 bp, Homo sapiens
tatccttgtgcttcttgaagtcagacacttcatttgtgaaaagttgattctctgagtctaaatgagttattaactgtgagaacaattatcctctgtactarctctaaaacccttccattgacaaatggcctcctgagtgttgctttaggtatagtcaaagccacctaacaggaattaccccaagaagacttgagtgccagc

SEQ ID NO: 331180 - DNA, 201 bp, Homo sapiens
atctcttctggcttgtagggtttctgctgacctgcctttaacttttttttttttttttcatttctaccttggagaatctgatgactgtgtcttggggatgycatcttgtatagtatttcacaggtattctctgcatttcctgcatttgaattttgggctctccagtgaatgatctctttaaactacataaattgctagaaa

SEQ ID NO: 331181 - DNA, 201 bp, Homo sapiens
tgcttaaaaaatataacagatatccatccatgtaatcagtgtagctctgtatcattgttttaagggttgcatggtgttttttgtaaggttattccataatytttaagctatgtttaggttgtttctatttttttagcattataaaataattttctaattaaggtctcttctaggtagcttgatttgtgcaaataacttaat

SEQ ID NO: 331182 - DNA, 201 bp, Homo sapiens
cctcagagacataatgtggtggtggaaaggatagaagtggatgggtttcagcggggatttaggaggtagtgtcaatggaaggaacagaaggaagagtgggytggtcaaaaatgtgcctaggctttagaaaaatggatagtggaactcatgctgagatggagaactccaccaaagaccagctatgtctagtttgctacattc

SEQ ID NO: 331183 - DNA, 201 bp, Homo sapiens
tctaaaatgtctcaaagaaccaaaaaaagttcttcccttgagcttcagattacactaaggcagagatagaaagatggacccttgacatacagacttgtcayggggtttgtttggggccagctccccagggaagtcttggtgacctttccaagtaataagggagagtgagtctatgatttggttccttattcgcttactcat

SEQ ID NO: 331184 - DNA, 201 bp, Homo sapiens
caaattcccattgattaatagattccctcaaagtgctaccaatagccactgaaaaaacttaatgaactcgcaaagtagctcctcagtggctgaaaagcatrgctgtaattccctgagtgcctaacttcttggcagccatatacacttgtggaagatggatccaaggaaaatgggtgaaggatcttttgtgtcagaagagag

SEQ ID NO: 331185 - DNA, 201 bp, Homo sapiens
ggacccttgacatacagacttgtcacggggtttgtttggggccagctccccagggaagtcttggtgacctttccaagtaataagggagagtgagtctatgmtttggttccttattcgcttactcatggcatagctcagtgaagcccagaatcactcagatttcaggccattgctcttttagttagtaggttcagctgcttt

SEQ ID NO: 331186 - DNA, 201 bp, Homo sapiens
cagttgggctgtttgtgggatgaagaagtgcttctataacatcagcaggcgtgtgaccagtggcttgtgggagacaagcacttatgggaataaaagggaayctggcacaggccttgggcctctggcatcattagttacaggtctgccaagatgctttgggaaacattttaatttaaatgccaagtctatttcaacgaagct

SEQ ID NO: 331187 - DNA, 201 bp, Homo sapiens
ggatcggaagaattaaaacgcccccaagaataacatgaaagtatttgatgttgcttcaggggcaagggcgagtatgtatatgtacgtaaatccatttcctyagaggctccttggcagtctgttacaacaccacgctaatgaaagccaggtctttaagttcaccccgcctctggactattagtttctcctttgcgccctgcg

SEQ ID NO: 331188 - DNA, 201 bp, Homo sapiens
ctcctttcattccatttaacagaatgcggtggtgtcattcaaggagctgtgtggcctctcctctgtggccaatctcatgcagtgcatgttggcggtgtctycccgctttctggggcccgataacacacccctagtggtcctaaatctcagcgagcagtaccccacaatggagctgcagggaattgtgccggaggttctgaa

SEQ ID NO: 331189 - DNA, 201 bp, Homo sapiens
acaaatgctcctttcattccatttaacagaatgcggtggtgtcattcaaggagctgtgtggcctctcctctgtggccaatctcatgcagtgcatgttggcrgtgtctccccgctttctggggcccgataacacacccctagtggtcctaaatctcagcgagcagtaccccacaatggagctgcagggaattgtgccggagg

SEQ ID NO: 331190 - DNA, 201 bp, Homo sapiens
tgtgaacctccgtccctggcctgaaattgttcttcttgataaatatgaattgcaattattcaataatgatttcatacctgttggtattaggctgtcaactscaaggccaattctgagctttagagatgaatgagtatcattcatcacaggaatctagaataggaaatcttaatagtatgatttttttctaggaaattaaat

SEQ ID NO: 331191 - DNA, 201 bp, Homo sapiens
ctatacgggatgccacagatctgagagaaaacatgcaggtgcgtgcttgtgtttaatcatttactcaatggttttcctactttgtacatgtccatagtttrtaaatatattggttttttaataatagtatatttaagtagtttttaaattctgattagttcttagaatgtttgccactagtctgttttttatcatttaact

SEQ ID NO: 331192 - DNA, 201 bp, Homo sapiens
ggggcctttctgtgagaaaagggaagaaatccagggaatatgcatctttgagaacactgtggattaaaaccgtggatgaggtattcaagaatgcccagccycctatacgggatgccacagatctgagagaaaacatgcaggtgcgtgcttgtgtttaatcatttactcaatggttttcctactttgtacatgtccatagtt

SEQ ID NO: 331193 - DNA, 201 bp, Homo sapiens; identical to SEQ ID NO: 69044

SEQ ID NO: 331194 - DNA, 201 bp, Homo sapiens
tgtttaaaatcacagacacaaacacatacacacacacacacacacacacatacacacacatgcacacacagcacttgtcttctctttctggcttttctccrtagtatttatattatatatcttacatgccatgtattttacttgtattttgaaatattgtgttggttttttattataagtgccctgaagggtgaagttttt

SEQ ID NO: 331195 - DNA, 201 bp, Homo sapiens
tgaagggtgaagtttttttctgctttgttccttgtatatccacagcacctagaacattgcctggtacatgttcagcactctataaacatgtttggaatgawtggatgtgttttttggcttccttccagtctcctactctcagtttgtgctcctatagcaccacctctcttgtgacttttgatatattctggatttactata

SEQ ID NO: 331196 - DNA, 201 bp, Homo sapiens
tctagtgtagagcataatagcagcttattaggcgcctttattataatagtttgggacccttgtgagggatcagaattcctaattacagaatccaaaggatrtagctttcttgactgttcaaactggcagaagggtctgagaggcccagatgggataagacttgttgttagggcttctaggtcatggtgatgctcagacaca

SEQ ID NO: 331197 - DNA, 201 bp, Homo sapiens
ctcctcacttctcagacggggcggttgccaggcagagggtctcctcacttctcagacggggcggccgggcagagacgctcctcacatcccggacggggcgrcagggcagaggtgctccccacatctcagacgatgggcggccgggcagagacgctcctcacttcccagatgtgatggcggccgggaagaggcgctcctcac

SEQ ID NO: 331198 - DNA, 201 bp, Homo sapiens
agggcatcaggagacttaggccttcccgtaggcgagactgacaccacatcctgccctggactcagggccttcctacccaggaaggaagagagtagaccacyctcttcccttccagcctccagctggacacctgtaggcaagttaccttatctctctggaactgaagatcttgataatactcgtgttataggattgttgaat

SEQ ID NO: 331199 - DNA, 201 bp, Homo sapiens
ttttaaaacaggtggtgagttgtatttgcacacaaaggggaaatgcagatgattatcagttttgtacatatttgtatttgttctgtctgcagcccaggaaygtgcactctcaggccgcagggccttctctaaggaggtgctggctcccctcacaacagaggcaggctagcttttttctgatccttcccccaggcttgtgag

SEQ ID NO: 331200 - DNA, 201 bp, Homo sapiens
ccctcgcttcccagacggggtggcggccgggcagaggctgcaatctcggcactttgggaggccaaggcaggctgctgggaggtggaggttgtagccagccragatcacgccactgcactccagcctgggcaccattgagcactgagtgaacgagactccgtctgcaatcccggcacctcgggaggccgaggctggcggatc

SEQ ID NO: 331201 - DNA, 201 bp, Homo sapiens
aattatatctcaataaaactattgtttttaaaaagcatttcttagtattcattcactactttcatttaatgaaatggaagagactttagaggtacagagcrtggtcagtgacagaggtaaatacacagtgagtacttgaatttactaatctgaggaaagttctcagcatctctttgaaactctatttagatgggaatgaat

SEQ ID NO: 331202 - DNA, 201 bp, Homo sapiens
aaaacaaaagagacttcttccgtttgttgaccttttaaaacaggtggtgagttgtatttgcacacaaaggggaaatgcagatgattatcagttttgtacawatttgtatttgttctgtctgcagcccaggaatgtgcactctcaggccgcagggccttctctaaggaggtgctggctcccctcacaacagaggcaggctag

SEQ ID NO: 331203 - DNA, 201 bp, Homo sapiens
acgccactgcactccagcctgggcaccattgagcactgagtgaacgagactccgtctgcaatcccggcacctcgggaggccgaggctggcggatcactcayggttaggagctggagaccagcccggccaacacagcgaaacctcgtctccaccaaaaaaatacgaaaaccagtcaagcgtggtggcgcgcgcctgcaatcg

SEQ ID NO: 331204 - DNA, 201 bp, Homo sapiens
cttgtgaacatgtatgtgcaaagctcttctctataatagaaaatgaaagatagaattgctgggtagaaggtgtgtccatttctacttcgatactgccaggwtatcctctcacaggtgccactgcgctctccctctggcagtttccctacacacttgctaatgtttgatattgtcaaactttatctgtggtataaaaaaata

SEQ ID NO: 331205 - DNA, 201 bp, Homo sapiens
aatccttttctctgcaataattaacacaatcatatggtttttatcttttaatttgttaatgtagtaatgaccttcatagatttttttctcttctaaaaccrccattgtatttctgcttgttctagatatattgattagccaggattttatttaggccttctgaatctttgttcataagtttggatgatctatggttttctt

SEQ ID NO: 331206 - DNA, 201 bp, Homo sapiens
atttatatttactagaaatatgctcattaatcaataatatattgatcaagtagcaaaaatggaagcaagtacattttcccccaggttactttccattttamtttaagtgaattttatatcagttaagtttttttgtttctcttttaaaatcacaacatacgtcaaaggtttatattgatggtctagaaaaagagtcaacag

SEQ ID NO: 331207 - DNA, 201 bp, Homo sapiens
aaaaatggaagcaagtacattttcccccaggttactttccattttaatttaagtgaattttatatcagttaagtttttttgtttctcttttaaaatcacarcatacgtcaaaggtttatattgatggtctagaaaaagagtcaacagtaatctaatgactaaaattgcaaatccatcttcattttcactgactaggagaaa

SEQ ID NO: 331208 - DNA, 201 bp, Homo sapiens
taaaaaataaagtcactgtgggtaactgcaaaccttccacttttactccctttcaattcatgcattagattttatctgactctcttttccacacctggaarctctacattggtatttgttttctataagtatttgtttaataaactgttgagaatgcacatctgtgtcaggagcaatgatgaaggctgggtttgcagaact

SEQ ID NO: 331209 - DNA, 201 bp, Homo sapiens
tttcattagtgcgtattaccttgtacacatattaagcatagttgttactaaaggatgtgttttgttttctttagggttagacttgtcatgattcagcagtmcctaactaatccattttcctttggatttacaatgcctaaccaagtttaaacgtctataatttatggccatggttcaaagcagagtaagtgactcttgtgg

SEQ ID NO: 331210 - DNA, 201 bp, Homo sapiens
aatttactgaacaactttctttactgttacccttgatctttattttacgaaattcaaaggtctcttgttcattatttcttgcgttgacctttccacagcastaatgttgctgactctgccctttatgataatttttattccttgtggcttttatcgcattatctgtctcaattctcttccacctttcatagtcttcctagc

SEQ ID NO: 331211 - DNA, 201 bp, Homo sapiens
ttcattagtgcgtattaccttgtacacatattaagcatagttgttactaaaggatgtgttttgttttctttagggttagacttgtcatgattcagcagtccctaactaatccattttcctttggatttacaatgcctaaccaagtttaaacgtctataatttatggccatggttcaaagcagagtaagtgactcttgtggg

SEQ ID NO: 331212 - DNA, 201 bp, Homo sapiens
ctcacaagcagcagatatcacctctatgctgatggcttcctcattgtggtcctatccttgaacacctacttggtcgtcaataccatatcccatctgtgttyagaactttttcaaccagatgtcccactacagtgtctcttccagcttgagaacctgtaattctttaggtgtaagaaggtccaccgggtgctgtggctcatg

SEQ ID NO: 331213 - DNA, 201 bp, Homo sapiens
gtaaattgttctttacactcaagacaggaaatgggataattctatggttctgccagaagctatgttattatgtcttttggttcatgaacgcgtggagggtrtttctttactaatatgcaaagcttaaataacatagccccagttgacaggtggtgttacttatttttagtagaaatgaggaatagcctaaacagagctaat

SEQ ID NO: 331214 - DNA, 201 bp, Homo sapiens; identical to SEQ ID NO: 69045

SEQ ID NO: 331215 - DNA, 201 bp, Homo sapiens; identical to SEQ ID NO: 69046

SEQ ID NO: 331216 - DNA, 201 bp, Homo sapiens
aaaagaagccttgcccttcagaagaatttgacttatttgcattttcagtacttttgataaattggtgttacaaatgtccataacagcatttactttggatracagccatttttcccaggataaaacaatcattagccaattctgttataacactgttaataacttttgtaccaggtggttcaagcataatcagatatatca

SEQ ID NO: 331217 - DNA, 201 bp, Homo sapiens
cctagagtcctctcctgctagaacctagagcacaaaagctgcacatagcaaccctaggtagggaaattgtagcagggctggaagggggcctcatgcaaatrgaggcttacagggcatttaaatgaggcgtctttgtccccttaagctcagtgtccttaagtacttcatcccatgattttggggctcaacctgtgagggctc

SEQ ID NO: 331218 - DNA, 201 bp, Homo sapiens
gtcagaggaacatgctgcttcccttcaccatgtctgagatagggtacctacagttgggctgtttgtgggatgaagaagtgcttctataacatcagcaggcrtgtgaccagtggcttgtgggagacaagcacttatgggaataaaagggaacctggcacaggccttgggcctctggcatcattagttacaggtctgccaaga

SEQ ID NO: 331219 - DNA, 201 bp, Homo sapiens; identical to SEQ ID NO: 69034

SEQ ID NO: 331220 - DNA, 201 bp, Homo sapiens
gaatctggtagaaaatatgaatatatctgaaacccaaagctcaagaaaagttagggaacttctttgtaaacctatgctttacgcaaaagaatactactacrttttttataaaactaagatattcgaagtactgtagtcttttttcttcctatgcaaaagtagaggagttacttcctatgttcccatcaaattccacatcga

SEQ ID NO: 331221 - DNA, 201 bp, Homo sapiens; identical to SEQ ID NO: 69037

SEQ ID NO: 331222 - DNA, 201 bp, Homo sapiens
tgtatctttaaaattctgttagtgctctggagataatatacacagttcttttggtcaactggcagtttccaaagctgcgaggaagcacttagcttccttayccccatttattcagtaaactttttgtcattactagactttgaataaataaactttaattgagtggaggaggcaatgctggctgacttctcatttctgtgg

SEQ ID NO: 331223 - DNA, 201 bp, Homo sapiens
ggaatgatgccttctttttggaatatttactcattcacagcaccagcaatttgtttttattactgttgttgccttattgacttttggatggtaagccgctrgaccattctaagcccaagtagggatctctaaatttgattagtatttcaaaatcacctcatgatgtgacttacgtattataggccacatgtattttgtggt

SEQ ID NO: 331224 - DNA, 201 bp, Homo sapiens
agggactcatattagtctatcatattgtatccttttgctgatagaatgatcttatcaaattcccattgattaatagattccctcaaagtgctaccaatagmcactgaaaaaacttaatgaactcgcaaagtagctcctcagtggctgaaaagcatagctgtaattccctgagtgcctaacttcttggcagccatatacact

SEQ ID NO: 331225 - DNA, 201 bp, Homo sapiens
aagcagctctccccacctctcctgtagcaccagttttcactctctactggattattcccatcagcatcaaacattctgagatttctttcatattttcttgwtgcaacttctcctgctggctactgcacaatttctttgccccctttgcagcaaaaacaatttgaagagttgtcagtgctcactgtcttcaattccttgctc

SEQ ID NO: 331226 - DNA, 201 bp, Homo sapiens
ccctcggaccactcttgcacctgtcatactagttattattctctctgcttattccagtgattctggagcatcatgcaacattcattcatctttaaaatttstccctcagaaatgtagacattctttcatctcagccactacctctgtggagaaaattttcaattatccagtgccagaagcaagctgtcacataatttccgg

SEQ ID NO: 331227 - DNA, 201 bp, Homo sapiens
cagcaaagttttctcaagctgtccctatcttgattgtgacacaattgttaacacatatacctttgacaggcagttttatttacgtattctaaatgggaggygtagtagaaatgaactttaatattctttggggagagaaaatctacagccttttttttttggaacattcagtactcagtaatatttaccaagtgaagaata

SEQ ID NO: 331228 - DNA, 201 bp, Homo sapiens
acagggtctagtgtttatggaattaaagcaatgttttctaaatgaaatatatgctgttgaggtatatgtcctcgtgtttcagtggagatggagaccccacrctttccttaggataaccttctaacatttaaaacataaaacgatttcattgtatactcgtggtatttagtgtataccactagcaaatgttgagactgggac

SEQ ID NO: 331229 - DNA, 201 bp, Homo sapiens
gtaaattagaaaatgagctgatgataaatcataattgacatggaaagtcagaaaaaagaggatgtcaccaatagcaaaaaaggattatgacttaagggttrttatttaagaatcagacctggccaggtgcgctggctcacgcctgtaatcccagcactttgggaggcccaggcaggcagatcacgaggtcaggagatggag

SEQ ID NO: 331230 - DNA, 201 bp, Homo sapiens
aggtgaaccctctcatgttcagagcactgcagggtgcccagcatctcagctcctgccgggaggaatctgggactgatgagcaagctgaatggcagttgaargatccaatatccacagggattatggggaagctcagggagcatggacgcccaggagtaggtcagaatagcaccaactacagggataagtagacattttcct

SEQ ID NO: 331231 - DNA, 201 bp, Homo sapiens
agacagtggagcttgctacactgatggactctttgtttcaccacagatttctctgtagcgtgcaatgctgttcagtagcattttacccacagtagaacttstttgaaaatcagtcttctcaaaccccgccattcctttatcaattaagtgtatgtaatattctaactcctttgctgtaattacagcaatgttcacagcatc

SEQ ID NO: 331232 - DNA, 201 bp, Homo sapiens
caacctttgctgcttagcctgccccacgacccatctgttaggttctctggattctcactgcaatcaggagcctcatccaggagctttcttttttttttttycccaaggacctttgatgtttgattcttatgctattatagttctcaatattaataattcagagtcaattgtttttaataacctaactataaataattagtg

SEQ ID NO: 331233 - DNA, 201 bp, Homo sapiens
actcgggacgctgaggcaggataatgatgtgaacctggaaggcggagcttgcagtgagccaagatcacaccactgcactccagcctgggcaacagagcgakactacgtcttaaaaaaaaaagtccctattatccctaacactaacaatttcatgaataaatagattacttgaaagaagctaagataactgttttcatgaag

SEQ ID NO: 331234 - DNA, 201 bp, Homo sapiens
cctccagcttgtcttctgcaactttcttacctctcttagacttcatagaattgaagagagttagggccttgctctggattaggctttggcttaagagaacrttgtggctggtttgatctcctattgagaccactcaaactttctccatatcagcaataaggcagttttgctttcttatcattcatgagttcagtagaatag

SEQ ID NO: 331235 - DNA, 201 bp, Homo sapiens
cctgggaagcattctctgaattttaaggctgggaatggtagctccactccgggtgcctatagctccctgggcatacctctatattagcttctaattacatwgtcttgaaattatttatatctttcatctccactacatgcttttctagtacttccatagtacgtggcccacaacgcttaatcattttttattgaattgaag

SEQ ID NO: 331236 - DNA, 201 bp, Homo sapiens
aaataaaatgaagagcacaaaaaggaattactagggcctttctaaaccaaaaagaaaaattaacgaataaaagatttggaaaaaaattcctcaaagtattraaatctccttcttattcctaaagataattggagctagtagtgaaaagcaaagaatacgtgtgtgtttatacatacacatacatacatatgtacatacaca

SEQ ID NO: 331237 - DNA, 201 bp, Homo sapiens
aaaagggactctatgaggaggacatagtgttattgcctctatattacctgtgcccaggcactgccaagagaagtgaaaactgtgcagttcctaggagatcrcctttcactttatattaacttattcttagtagaaggcataggtgtactatattcacctttagtaagagcacatgggaattaagcatgggatagtgcacag

SEQ ID NO: 331238 - DNA, 201 bp, Homo sapiens
acaattgaccaaaaagagagacctattagagaaacgtaggatggggatcaagctgacgatagcccgtcaagtgtaccaggagtccttgttacatacagctyctaaatatttggtatacctaatacatgtttatgatttacagttcatctatctctttgctttataaatagagaagccatttgatatagaaagctatgtatt

SEQ ID NO: 331239 - DNA, 201 bp, Homo sapiens
tccattttgcctttccccagcagtgttgcaagggttttagttgcaccacatccttgtcaacacttggaattatcagttttgtcattccagtaagtggatgsgggttgagcatctttgtgtgtacgtgagttttaaaaaatatctgactgactctaatgtggttttctttatgtttcttctgcttggggttggttgagattt

SEQ ID NO: 331240 - DNA, 201 bp, Homo sapiens
gagccccttaacacagtgggatatgacttcctttttaaacagcattgaccgctcctgcgtcatagccaaattttcttctctttcctttactgaaaagagaraagctgttctacagctacgtattttcttatttgaaaaataaaggaaaaaaaaagctatattcttagttgtttctaaaaattaaatcccttcttccttctt

SEQ ID NO: 331241 - DNA, 201 bp, Homo sapiens
aaataatccccatttgcatctcttccccatttgtgggctatacaggcatcgtgatgagataggtgagaaggccagagtatggaagaggcaagagctgagaytggagaatctgaattagagtgtccaaaggtgtgtggtgagcacaggccagtgcctgcagggctccccttcttggaagccaagcaacagcaggatcctgca

SEQ ID NO: 331242 - DNA, 201 bp, Homo sapiens
cattgcagcctcaaccttctgggccgaaatgatcctctcatctcagcctcctgagtagctgggaccacaggcacgtgctaccatgcctggataatttgtaygttttttgtagagactaggttttgccatgttccccaggttggtttcaaactcctggcctcaaacaatcctcccacttcagcctcccaaggtgtaagaatt

SEQ ID NO: 331243 - DNA, 201 bp, Homo sapiens
agaaactttccttctcactcctgcatcaacccctggattgcattttttccctcaaccccaagcagtgccagagttaaagattaaaaaatgaggaaaataatttttttttcaaagttatcctgaaatagtgaagaaccagcacagtgtaggggaaagaaaattaatgattgagaagttactcttagaattgatcatattttt

SEQ ID NO: 331244 - DNA, 201 bp, Homo sapiens
tactccatgaaacagaatgctcactccgtttgcatctctctggtttggttgtgtttgagatagaactttcaggacttttatgacttgccaacatgacttcygtgagttttagttcatagaatgattataccctttttttagttttgctgctgtttgtggctttttgcttggctttgtttttgctcatttcatcaggaatgt

SEQ ID NO: 331245 - DNA, 201 bp, Homo sapiens
ataatttctattgacctatctgcaagtttacagattcttttcttgactgtatttagtctgcttattaccctatcaaggaattcatcatctctgatgtgggktttttttttaacagtatttcctttggaccatattttataattcccatctttctgtggaaatataccatctgatcatgcatattgtccactttttccacta

SEQ ID NO: 331246 - DNA, 201 bp, Homo sapiens
tcctaaaatggtagaatctcatactagaagagtcctgttttcattggtctgttttggttaccaagagtagaaactcactctggccagctcacagaggagtsgccacagatgctggctcacacaagggatcatgagagggacagggacctcagggaacttggagaccggaaactgcagtccagcctcatgacaatagcaagc

SEQ ID NO: 331247 - DNA, 201 bp, Homo sapiens
tcctgattacaagaggttctgctaccccctggggcaatggatctttgcctggttccagaggtggatgggttctgcttctacccttttcccagtggccctgytctacccccagtttttctcaggagcacccatggagaagatttacaaatgagtgcaaactcttcctgtgtctggcactcccggttaccctagatggataca

SEQ ID NO: 331248 - DNA, 201 bp, Homo sapiens
ttcagattaaataacttgattcaagcaaaccagagagataaatggctgctttgttttcatactacaccctctccccattctgagccaccccatgcccacaccctagccccacaccagaatgactgcttagacttggtgactgttttgccagggtattgaatctggatattgaaacatcattttctcatgatgttttttgag

SEQ ID NO: 331249 - DNA, 201 bp, Homo sapiens
agattcattctctttaggaacctaaaacttctgccaaaacataaatcaataaaccagatggtttttgcacctggtagacatttgtcttgattttcttcatytttacctgaggtacagtgcttatcttgaagacttaaagactggcatttgtttcctttttgaaattaccatgatggttgatgtatgactccttttattgag

SEQ ID NO: 331250 - DNA, 201 bp, Homo sapiens
tttcaatagatggaaaattaaagtaaatgtaataatttaaaaagtaaatatactatgccagttcttggccaaataaatgaagctattagctgtgtgctttrtaaggattttgatggtaaaaatataaatgaacgagcaagctaaacattggtatttcattagtaaccagagaaccatggatttgtcaagcctgggatccga

SEQ ID NO: 331251 - DNA, 201 bp, Homo sapiens
attgtcagcagtatgaaatttatcatctttacaacattgttgaattactgaaaaatacgtgacatttattaatacaggctctactcaagtggctctccagsagttcaaagatctgtgtttagaattggacaatacatgaaaaactgacactaaataagattcaaaatatgccagtaagttttctaatgactaaagagacaa

SEQ ID NO: 331252 - DNA, 201 bp, Homo sapiens
ctgaaaaaacttaatgaactcgcaaagtagctcctcagtggctgaaaagcatagctgtaattccctgagtgcctaacttcttggcagccatatacacttgyggaagatggatccaaggaaaatgggtgaaggatcttttgtgtcagaagagaggaaaatatggaaatgaaagcttttggcaggtctaacttgccacattac

SEQ ID NO: 331253 - DNA, 201 bp, Homo sapiens
ccacggtggttacgtgaacccacacatgtgatgaagtcacacagaagcataggcacactttgtacccccatcagtgtcttggttttgatattgtgctatarttatgtgagacataaccattgggggaaatttgggaaagggtatacaagacctctctgtactatatttgtatccttctgtgagtttatacttatttcaaaa

SEQ ID NO: 331254 - DNA, 201 bp, Homo sapiens
catgcagatctataaatagaaagggccagaaaggcagcatactcttggagtgtggtgttgaaactgggaaaacaaactcactttttattaaaattgacctrttcagatgcagtgccaataagaaataattatgccttcttgtggaatcagaatacttctatttcagtgaaagatagatattgttgaagtataacactaagt

SEQ ID NO: 331255 - DNA, 201 bp, Homo sapiens; identical to SEQ ID NO: 69039

SEQ ID NO: 331256 - DNA, 201 bp, Homo sapiens
aactgtttgtttactctgtgctccacccagtctaaaacacagccatgtggttgcagacttggggaaggccctgtggtaacttggaaggtgttttttccccsctgagttgcagagtttaagagatcattcttataacttctgaatcctgtttcctttctttagcaactcagataaattatttttgcaagctgttatctgaaa

SEQ ID NO: 331257 - DNA, 201 bp, Homo sapiens
ttggtttcttgttcctcttctccagagcgagctaaatcgattgaatcagtgccagacactttgttgccagccgatgaaatgaggttcacctattccttatcccgtttcaggatgagaatttatgaaattacccatgcccatttatgaaattgccactacctaagtatcccagatggtaattttagtggcctcctattttta

SEQ ID NO: 331258 - DNA, 201 bp, Homo sapiens
aatgggcagccccacctgttcagagattatacgtgaattcattcttgtcattgcagttccattctctgtactttccctttgaaattaattttttcagtcatttttttttgcaacttcacaaaagtcttgattttaattgccttcaggtttaattaagaaagcatactctgaggaatccatttccccagtagaaaatagtac

SEQ ID NO: 331259 - DNA, 201 bp, Homo sapiens
tgaataatgaggtaatgatttttctccacagctgatgtatttctataaataaagtttgacatttcataagctttgaagctcatattttgttgttacgttayatttgacctcatgttcataagagatacaattcagcattgcctctcattttcacatgagtgggaagactcaccgtcaccctcaccaaacctctcagagcag

SEQ ID NO: 331260 - DNA, 201 bp, Homo sapiens
atgagtgggaagactcaccgtcaccctcaccaaacctctcagagcagcgcacgtgtctggagggtgagtcccttctgcacagtaactgctctgtcagtggkgactgtgggaactgtcactcgttagtttatttaacagctcctgtttttcattctcttcacttctattcccccagattgctgtgaaataattaatgccact

SEQ ID NO: 331261 - DNA, 201 bp, Homo sapiens
caccttcatccccttggagaaaagacttgatgtaaataggcagtaataaaagtggtactatgtttaattcaaattgtatccttttaaatttaattaatttdgtaatagttttaaatgagcatgtcagaactaaagggtccttagtgacttgaaagagttaacgtagcatccagaagttcctaatgtactcttcagaagtag

SEQ ID NO: 331262 - DNA, 201 bp, Homo sapiens
atagaaaacaaagtctttaacatcaaatttcataaagcaacaaatactgcacagatagttttgtcatgtgaatggcagaaattatgtttcacttttgtttaaaaaaaaaaagaataaaaagctaaagcagaagcccatgtgaaaaagcaatagtgacatctttccttggtttccttattttttttaatataagggatgaat

SEQ ID NO: 331263 - DNA, 201 bp, Homo sapiens
aatacttgagcacaaggcacacataaatttcatgctgtctgggatgggataaggatgtcgtgtaaacatatcattaatgtagcttagaaaagctgaaaagyggctgggagaggatggggtttgtgtatgtgtacatccttgaggtgaccatggtgcaaagcaatttatcatgtgctgtaaagtagattgtttaatgtgaga

SEQ ID NO: 331264 - DNA, 201 bp, Homo sapiens
agggatgaatgcagtcaggtggtctctgagtagaggcaggagtagattagtaagcaaggtgataattggggacttgagggaatagcagggagtgaatgctrcctggggaactgaggccggtatttatggggttgtattagttgaaatgctgggcttctgaactgtgcctctctcctagctttcatcttcattacagtcttg

SEQ ID NO: 331265 - DNA, 201 bp, Homo sapiens
tggcagaaattattatatagcttttctggatagttttataattgcagcagagttcctttgcagggtagtttaggttctgttttgttgctcaattttcaccttttttttttttttttttttgcttttcctatgaatatcaaattgttcaggaccagaaactacaagatcaaattcaaaactccttccattttttgaaattct

SEQ ID NO: 331266 - DNA, 201 bp, Homo sapiens
aggcagaggttatagtgagctgagatcatgccactgcactccagcctggtaaacagagctacactgcatctcaaaaaaaaaaaaaaaaaaatgcagtgcgkgtgtgtgtgtgtgtgtgtgtgtgtgcgcatgtgcatgctttggaaggaatcatacaagtatgtaggtgttagtctgcctctaccctcaaccttcattaat

SEQ ID NO: 331267 - DNA, 201 bp, Homo sapiens
aaatttcttacctggtttaaaagcacagtttttggtgacataaaccaccctagtgcattcattgttttgattcccctaagctctgcctctgtgattttgtygattttttttcttttaatcctgtagatgtgcttttttattttttgcccactatcctctttgtgctgtttttccttatctttgctcctttttcctctcctc

SEQ ID NO: 331268 - DNA, 201 bp, Homo sapiens
gaaactctacctgtgaatgggcatagaatactttcctagcccatagtaataaaaataaaaatattattaagaaaaaatatattaagaaaaaaataatgttagagacagctaaatataccacctcaaaagagggtaaagtacagggtttaataaaagacaacccttccctcacccaccctccatcaaggcatccattaatac

SEQ ID NO: 331269 - DNA, 201 bp, Homo sapiens
aaactctacctgtgaatgggcatagaatactttcctagcccatagtaataaaaataaaaatattattaagaaaaaatatattaagaaaaaaataatgttagagacagctaaatataccacctcaaaagagggtaaagtacagggtttaataaaagacaacccttccctcacccaccctccatcaaggcatccattaatacc

SEQ ID NO: 331270 - DNA, 201 bp, Homo sapiens; identical to SEQ ID NO: 69047

SEQ ID NO: 331271 - DNA, 201 bp, Homo sapiens
ttggtgtgtgaggcactggggagacattggtgtttgtgtagaacaggagagggactgagctttcaggtactgaccataatagctgtgtgcagagaatgtcyatgggcagacctgatgggaggcagttggcaatagataaggaaggtgcttctggagagtgagggaggaagggaagggatggtgaaccatctaccctctgct

SEQ ID NO: 331272 - DNA, 201 bp, Homo sapiens
taatgtacaaatgaacctttgtttctttctagttctaaattttaagattgtcaagaaatgcaaaatttcagggttgatatggaggtaggttctttggaagmcggttttcttgcagtccggacattgtttgtgtattctttctcttgaggttactaagttctaatagagtagcagaattgcaccaagtttcccttctgttgt

SEQ ID NO: 331273 - DNA, 201 bp, Homo sapiens
tgagctatgattgcaccactgcactccagcctggctgacagaacagaccgtgtctcttaaaaaaataaaaagaaaaaaaatgaggcagaaatgaaaggaatggttgggtgtttattacttaaaatatgatggtcatgtaaaatagatgagtaatattataatgcaaaatatttggatatttaaatacaaatatgtaaaatt

SEQ ID NO: 331274 - DNA, 201 bp, Homo sapiens
tatctggtgaaggtcttctgagtggctcctcacgtggtgggagacagaagggcatgctagctgaatgctgtgtgaaacctcttttataaggaccttaatcycattgactaggaaggagccatcatggcttcatcaccttttaaaggccctgcctgttaatatgatcacattgacaatacttgaattttgaaggggacacat

SEQ ID NO: 331275 - DNA, 201 bp, Homo sapiens
atagctcacaggttacaatagcaatcccacctttttagttattctttgtgcatctgttttatttctgtaccatagtcccagtgcagcaattgttctttttyttatatatatactttaagttctagggtacatgtgcttcattctcagcccttagctcagggtctcacacatagagggcctcagtaaacgattgtcccaaga

SEQ ID NO: 331276 - DNA, 201 bp, Homo sapiens
ttcatttgttagaaatgtataaaagttgggaaaagatttgtcaaattctttcagggccaaagtcttttccactttctaatatcagggccaaagtcttttcygctttctaatatctatgtttttgtctctttaaatgccaaaactgcagcccatttttggattataatttcctttctagtcactgaattggtatgcttaata

SEQ ID NO: 331277 - DNA, 201 bp, Homo sapiens
tcaggtgatcctcccacctcagcctcacaagtagctggtacttcaggtgcacaccaacatacccagctaatttttgtatttttatatagagatggggtttygccaggttgcccaggccagtcttgaactcctgaggctcaagccttagcctcccaaagtgctgggattacaggcatgagccaccacacccagccaatttat

SEQ ID NO: 331278 - DNA, 201 bp, Homo sapiens
tttttggattataatttcctttctagtcactgaattggtatgcttaataaaggataggaagacgatcaagaaggaaacccaaatgctttccctcagtgagmtaggtgtttctatcaggtaattttaaatggaaaataaattgttctctggaggaggaaaaaaacaaatcaatgacatcctgttaaagatggtgaattaaca

SEQ ID NO: 331279 - DNA, 201 bp, Homo sapiens
ggaagaaaagagcatggaccttccctcctgtccatgctcttttctatcaatatgttcccccttggagagttctcacaagcagcagatatcacctctatgckgatggcttcctcattgtggtcctatccttgaacacctacttggtcgtcaataccatatcccatctgtgtttagaactttttcaaccagatgtcccactac

SEQ ID NO: 331280 - DNA, 201 bp, Homo sapiens
tgttaggagggaggatcaaactaaatgaaagatgacccagccctctccacacctctttaaatggaaggttctttgctaaaagctccagcgtattttcatgyatggccagggttgcatcttcactgagtaaagtgggatcaaagaaaataactttccaaataataaaagctttaattacccttcattttaatcaatttaatg

SEQ ID NO: 331281 - DNA, 201 bp, Homo sapiens
ttacataaaagaggatgaggccccgacacactcctgcatggggaaaaccagcagaatgtcaggccagacctacatgacctggatttaattgctcagagacttttttttttttttcaaactcctcagatctcagtgtgctcctaggagctgaggttatcagataagtaagccatcaccacctgtcacttggttcatgcacat

SEQ ID NO: 331282 - DNA, 201 bp, Homo sapiens
taagttaagcagaaggaacagggcattttagatgggccaaagcttagcagactttatcatcaaggtgtactttcagtgcacatgaaatatattgtcctggstgaagggaaatatttgcttcaggaaacagtaaaaattaggttggaaatacaggctgggcccaattatggaagccttttaactcaagtctaaaacatttgg

SEQ ID NO: 331283 - DNA, 201 bp, Homo sapiens
ggatcagctgttcactgattctttcccttcttcaagcttgggctcttaaaacaagcacatgcaatttggaacaagaattcaaatttgaacattttaaaaamcattaataggaacataaaaatactagttttagaggtactattagtgatgaatggtatcaaataaataaatgctattttttaattctcattgtatgtttta

SEQ ID NO: 331284 - DNA, 201 bp, Homo sapiens
gagttcaagaccagcctggccaacatgacgaaaccccgtctctactgaaaatacaaaaattagttgggcatggtggcgggtgcttgtaatcccagctactwgggaggctgaggcaggagaatcgcttgaacccaggaggcggaggttgcagtgagccaagatcatgccactgcactccagcctgggtgacagagcgagact

SEQ ID NO: 331285 - DNA, 201 bp, Homo sapiens
gctacattctgaaattgaggtgcctttgagactaacaaaaagaaatgtccaggaggcaccttaacatacaagtaagatgctcttgagagctccagacttaygtttcccaaagggacatgatctctcctgcctgggtcttcacagcactttgtatgtctcttgctgccaccattaatggtttctgtttaggatcatgattat

SEQ ID NO: 331286 - DNA, 201 bp, Homo sapiens
aagaattaccaaagagtgacacagaaacacaaagtgaacacatgctgttggaaaaatgacactgtagacttgcttgacgcaaggttgccacaaaccttcartgtgtaaaaaaaaaaaaaaaaaaatgcagtatctgtgaagtgtgataaaataaagtatgtctggagtcatgcaacccccagcacaatgatggtagggcat

SEQ ID NO: 331287 - DNA, 201 bp, Homo sapiens
tggaacattgtcatctcttaaaggaaaaagggtcattaggtaatcattttacccttgagagagtggggagatggagggagggacagtgttgtccttatttktggggcttatttatttcaatctttagctacttcttgaactttgagtcttccattggcccacactagggtggcatttgggtggctgacctgtcatagatca

SEQ ID NO: 331288 - DNA, 201 bp, Homo sapiens
ctagagtgcagtggtgcaatctcggctcactgcaactcttgcctcaggttcaagtgattctcctgcctcagcctcccgagtagccagaactacaggtgtgygccaccactccctgctgatttttgtatttttagtagagacggggtttcaccatgttggccaggctggtctcgaactcctgaactcaagtgatcccaatcc

SEQ ID NO: 331289 - DNA, 201 bp, Homo sapiens
aacacttgacctcagaaagggagaaaggctcctcgtctgagataatacagaaagccgtgacatttagaaaaattctgaaaaagagaggagtgttttccatygacgaggtaaacagggaagtagtgtcataggagaacaccaactttgggggtgaggaagtgaaagcggggattcaagacaggggcaagagtatggggactt

SEQ ID NO: 331290 - DNA, 201 bp, Homo sapiens
accacaccacactagcttcccttcatagtcactctggaagcattttcactctcatgacattccttttacttgaaatgccttttcttgccagttccttcctsttttaatccattcagatctattattccatggaggagctcaggtcccccactctctctgaattctgaacatcacagccctttcagaaacctcttttactta

SEQ ID NO: 331291 - DNA, 201 bp, Homo sapiens; identical to SEQ ID NO: 69036

SEQ ID NO: 331292 - DNA, 201 bp, Homo sapiens
caaaaattaatcgaagatttaaaacaaatgatggcaagacagattaaaagatattgtgacttatgtatctgtggtcctcaatttcatcaacactcacaagytgagtaagatgctttgctctggaggctggtaacagcaatccaaaactttatttttcttattactcacagttctgtttcagttagctgccacttaggaact

SEQ ID NO: 331293 - DNA, 201 bp, Homo sapiens
ttgtgacttatgtatctgtggtcctcaatttcatcaacactcacaagctgagtaagatgctttgctctggaggctggtaacagcaatccaaaactttattyttcttattactcacagttctgtttcagttagctgccacttaggaactccttgtctggtgagatgagaggagagaaagagaaaggcatataatgggaagta

SEQ ID NO: 331294 - DNA, 201 bp, Homo sapiens
tctactctctacctccatgagtttaagttttttagctctcacctatgagtacatgtgacattcgtctttctgtgtctgatttatttaatgatgtcctccarttccatccatgttgctgcaaatgacagtattttgttctttttatgggtgaataatattccattatgtatacttaccatattttaaaaatctatccatcca

SEQ ID NO: 331295 - DNA, 201 bp, Homo sapiens
taggactcaatatggctatttatgtttttaatgctaaatatgagtcgtataaacatttctatttttcctgaatttgctgtggtgcagaatgtttccctagyctctttctagttcattgctttatctaaaatcattcccggtatgaaattgttattctgttggctaatgtacaaatgaacctttgtttctttctagttctaa

SEQ ID NO: 331296 - DNA, 201 bp, Homo sapiens
aggctgtcaactgcaaggccaattctgagctttagagatgaatgagtatcattcatcacaggaatctagaataggaaatcttaatagtatgatttttttcwaggaaattaaatttctattcataatcttgaacatagaaacctatatttatgttattctaatatacggtctttttttcctctcaggatggtacaaaacaga

SEQ ID NO: 331297 - DNA, 201 bp, Homo sapiens
aaacctgtttatctgaaatgtatcatttataacaaattagaaagtgtaacagaatattaatcagcctgtaaaaatgaaagaataaaagattacaatgttgrgaaaatactatatatttcttaatggatcagtggataaaccacatccatatatttttgtaattgttctactagtgtcatctttgagacacgatatataaag

SEQ ID NO: 331298 - DNA, 201 bp, Homo sapiens
tcagagctcaagcattgtcttttccaaagcctcatctgcactgaacctgacaaagcagtcggtagtgatactgaatgagcacctgccatgcacaagcaatmtaggccatgaagatgcagtggtgaacaaacagattgactgcctgcctttaaggggcttgcatgctagttgggggcaggcagtgggaaggggaaacagaca

SEQ ID NO: 331299 - DNA, 201 bp, Homo sapiens
gggaactgaatggtctgagaaggaaaactagtttgggaggaagttcttctgtgctgtagttgtggtgtttaattttcagtctcttcttctgtaaattttartcttctctggttaatgaaatttcagagaggagatcagaggcatttgtgcttctctttggtgggtccagtttctagttagatcagggtacttgaacagcct

SEQ ID NO: 331300 - DNA, 201 bp, Homo sapiens
gggccctttagcagccatgctatgtgttgtcataatgttttaaatttgtggctctaaaatgcaattcagttgtgtttagccagtgttgatctttttctttyttcttaatttgggactttcagtgtatgccattacttatgagaagtgctttagttatgagttgtggagagagaaagtagttggagagaaaattaaggtaac

SEQ ID NO: 331301 - DNA, 201 bp, Homo sapiens
cagaagttcctaatgtactcttcagaagtagcttgctcactgaataattgggtttaaccagctcaagttcccctgtcctcccacgggaatgattcagagcrggttttgaaccattctcatcagttttttggagacactaccctccattcaggatgtagcgtctgaactcactatctttaatgtttccaagaccaagggaga

SEQ ID NO: 331302 - DNA, 201 bp, Homo sapiens
tcctgaagcttgaagacctttgtgtgagtttattttaacatcactccatattccagagcagcatttgtcatgccccactttgttatttatacagagcatgrttactccatttcataaagtcaggtttaaagttcaaaatgaaaagcaaaaggtaagttctcccatcatcttgctaagcaagttgtctctctgctctgaaag

SEQ ID NO: 331303 - DNA, 201 bp, Homo sapiens
ctggactgcacctggctgctcacagtacctgttgaaagttccttctaagttgctaaatcccttcacctacccacatcccttcctcctttcatgtctgcagrgaatacttgagcacaaggcacacataaatttcatgctgtctgggatgggataaggatgtcgtgtaaacatatcattaatgtagcttagaaaagctgaaaa

SEQ ID NO: 331304 - DNA, 201 bp, Homo sapiens
tacccacatcccttcctcctttcatgtctgcagagaatacttgagcacaaggcacacataaatttcatgctgtctgggatgggataaggatgtcgtgtaarcatatcattaatgtagcttagaaaagctgaaaagtggctgggagaggatggggtttgtgtatgtgtacatccttgaggtgaccatggtgcaaagcaattt

SEQ ID NO: 331305 - DNA, 201 bp, Homo sapiens
tgcgcattggacacacagcacctgtggaaagtaggaaccaaaggcaataaactggttcttttgactacatgatactatttatttcatgaatgttatgctgwatccaaatggttattgagtgaatgcaggagacacccatattacacttgtatatgataagcatatgcctgtatcttatgtttgtatggtgattacattcag

SEQ ID NO: 331306 - DNA, 201 bp, Homo sapiens
aaatcttaatagtatgatttttttctaggaaattaaatttctattcataatcttgaacatagaaacctatatttatgttattctaatatacggtctttttytcctctcaggatggtacaaaacagaagagggaacggaaaaagacagtctcattcagcagcatgccaacagagaagaagatcagcagtgcaagtgattgta

SEQ ID NO: 331307 - DNA, 201 bp, Homo sapiens
aaagggtggaggaacaacttatgtgttctttatctccccacctccccttgcctgtgttctttgtcgtacgagcccctgggagactcatagtttcctcagtrggttgcctggcagtaactggagaatgagatagctatgctataaaaggctcttccttccctggcccagccttttcctggtacttagcccctttctgtcctt

SEQ ID NO: 331308 - DNA, 201 bp, Homo sapiens; identical to SEQ ID NO: 69033

SEQ ID NO: 331309 - DNA, 201 bp, Homo sapiens
aaattttttggaaatattttgaagtattctcccttctatagtaagttctactacaaatacttgttttgaaaattcaaacttgcttgaatgcagtttatatgttaggtaacaatttgagcataccaaaaattttgcatttgcgtgtgcacaagtttgtgtgaactgaaattacacacacacccctcaaacatccaccatatt

SEQ ID NO: 331310 - DNA, 201 bp, Homo sapiens
ctactctatgtaagaggcaattgtgaaactgcatttccctttgtcatctgtttgcgcagtttatgtctgggcaaggacacaatttgaagggtttggagatsaagtgtattaactacctgcagcacacacgtagagataaactaaggaaagtaaagtgtctttttgctgcatacatagcttttagtgacttacgttttcttt

SEQ ID NO: 331311 - DNA, 201 bp, Homo sapiens
tttcaaagggaatgcttccagtttttgcccattcagtatgatattggctgtgagtttgtcataaatagctcttattattttgagatacatcccatcaatactgaacttattgagagtttttagcatgaaaggctgttgaattttgtcaaaggccttttctgcatctattgagataatcatgtggtttttgtttttggttct

SEQ ID NO: 331312 - DNA, 201 bp, Homo sapiens
ttatgccttcttgtggaatcagaatacttctatttcagtgaaagatagatattgttgaagtataacactaagttatgtcatatctaatactgtttaattgmatgttttgttatagggacaagcagatcttttgaaatatgctaagaatgagacattggagaacctgaaacaaatccattttgctgctgtttcatgtggact

SEQ ID NO: 331313 - DNA, 201 bp, Homo sapiens
ggtgttatcaacttatgcagtaatctagtgaaatataccatcttgctactctatgtaagaggcaattgtgaaactgcatttccctttgtcatctgtttgcrcagtttatgtctgggcaaggacacaatttgaagggtttggagatgaagtgtattaactacctgcagcacacacgtagagataaactaaggaaagtaaagt

SEQ ID NO: 331314 - DNA, 201 bp, Homo sapiens; identical to SEQ ID NO: 69041

SEQ ID NO: 331315 - DNA, 201 bp, Homo sapiens
ttccaagtactgtgaaaatgtctgatggtgttatcaacttatgcagtaatctagtgaaatataccatcttgctactctatgtaagaggcaattgtgaaacwgcatttccctttgtcatctgtttgcgcagtttatgtctgggcaaggacacaatttgaagggtttggagatgaagtgtattaactacctgcagcacacacg

SEQ ID NO: 331316 - DNA, 201 bp, Homo sapiens; identical to SEQ ID NO: 69042

SEQ ID NO: 331317 - DNA, 201 bp, Homo sapiens
aactactacgaatttcacaatgccatgaaaacagcaagaattttggcaaaatatttacaatttcttcaataatattgcttgtggaatatgaggaatggacrgcaaccacttagtgactgcagagagacaagcaggaatgaggaaaaacaattacttactacgctatttgtgatgaaaaaatctgagtttagcttattataa

SEQ ID NO: 331318 - DNA, 201 bp, Homo sapiens
ttgcaccacatccttgtcaacacttggaattatcagttttgtcattccagtaagtggatgggggttgagcatctttgtgtgtacgtgagttttaaaaaatwtctgactgactctaatgtggttttctttatgtttcttctgcttggggttggttgagatttttagatatgtgaatttgtagtttttaacaaatttggaaac

SEQ ID NO: 331319 - DNA, 201 bp, Homo sapiens
gatgtcctccagttccatccatgttgctgcaaatgacagtattttgttctttttatgggtgaataatattccattatgtatacttaccatattttaaaaayctatccatccattaatggactcttagattgagtccatattttggctattgtgaatagcactgtgataaacatggatgtgccggtatttcttcaatgcact

SEQ ID NO: 331320 - DNA, 201 bp, Homo sapiens
tatggtcctatgatttcacaattagagatacccttgttttaaaggcagatgtaacccattacatatttgaattatttggaacctttaacctgactttgaargcttcctgttacagaaattggaaatttgttttcttcacatgtagctgttttgggtgctgtaggtttatccacattgcaaataacaggagagtgtgaaatg

SEQ ID NO: 331321 - DNA, 201 bp, Homo sapiens
gcctcacaagtagctggtacttcaggtgcacaccaacatacccagctaatttttgtatttttatatagagatggggtttcgccaggttgcccaggccagtmttgaactcctgaggctcaagccttagcctcccaaagtgctgggattacaggcatgagccaccacacccagccaatttatttctttttttttttaaggcgg

SEQ ID NO: 331322 - DNA, 201 bp, Homo sapiens
aggttgcccaggccagtcttgaactcctgaggctcaagccttagcctcccaaagtgctgggattacaggcatgagccaccacacccagccaatttatttctttttttttttaaggcggagtctcactttgtgagacagagtgtcgctcttgttgcccaggctggagtgcagtggtgtgatctcggctcactgcaagctcca

SEQ ID NO: 331323 - DNA, 201 bp, Homo sapiens
taaatataactgggatggtacgaattttaagctgttttcctaaaactaagccctgtctttattgttaaacgttagaattctccatagccaaaattttttgkccaacatatatcgtaatatgtgtttattcttttaaaataccaactacacttgatttttcatgttctttcctaaaaagtgcatgtcgcatatcaaactata

SEQ ID NO: 331324 - DNA, 201 bp, Homo sapiens
gatggtacgaattttaagctgttttcctaaaactaagccctgtctttattgttaaacgttagaattctccatagccaaaattttttgtccaacatatatcrtaatatgtgtttattcttttaaaataccaactacacttgatttttcatgttctttcctaaaaagtgcatgtcgcatatcaaactatattatctcaagtac

SEQ ID NO: 331325 - DNA, 201 bp, Homo sapiens
tccttgtcttattccagttctcaaggaaggaatgcttccagcttttgcccattcagtatgatgttggccgtgggtttgttatagatggctgttattatttygaggtatattctttcaaagcctagtttatggagggtttttaacacgaaggatgttggattttattgaaagccttttctacatctaatgagatgttcatgt

SEQ ID NO: 331326 - DNA, 201 bp, Homo sapiens
ctgcaaagctacaggaaataaaacagtgtgaaaagaatagacaaatagatcagcagaacaggatagaagagcccagaaatagacccacacaaagcagttamtcaatctttggcaaagaggcaaaggcaatacagtggaatagagacttcatcttttcaacaattcatgctggaaaaactggacatccacatgaaaaattca

SEQ ID NO: 331327 - DNA, 201 bp, Homo sapiens
acaggcatcgtgatgagataggtgagaaggccagagtatggaagaggcaagagctgagattggagaatctgaattagagtgtccaaaggtgtgtggtgagyacaggccagtgcctgcagggctccccttcttggaagccaagcaacagcaggatcctgcacagctaagcaggtggtcacattgtcctccccacaagatcca

SEQ ID NO: 331328 - DNA, 201 bp, Homo sapiens
aagccagacttcacaagcaggtagaagtgggttcctggcctgggtagcatggactcccagactggacaaggtgaagcctacaggttgaaaggtgaggagamctttggtgaagcctacgagttgaaagtgtccagacagactagaactggcaacctgcctgactgccagtcaggatgagaatacccctgtagctgagattat

SEQ ID NO: 331329 - DNA, 201 bp, Homo sapiens
cttaagagatttgttctgctgggaactcagcttggcctggaacatcgaagaaggtactcacatggctggatctcatctggggtggctgggatggctgggctttttttttttatagcatctatatcgtatcttggacttgaattaagcttgttacaaccgaagatgttttccagatgaatggctgccaggctagctctcctg

SEQ ID NO: 331330 - DNA, 201 bp, Homo sapiens
attaatagattccctcaaagtgctaccaatagccactgaaaaaacttaatgaactcgcaaagtagctcctcagtggctgaaaagcatagctgtaattcccygagtgcctaacttcttggcagccatatacacttgtggaagatggatccaaggaaaatgggtgaaggatcttttgtgtcagaagagaggaaaatatggaaa

SEQ ID NO: 331331 - DNA, 201 bp, Homo sapiens
cagttctagccaggcaggctaaggattggattaaggatccatgcccatgaaggggcagagggtagggagaactgtagccagcctcaggaaataaacaaaamgcagtcataaggattcagccaccatgcccaaagatacacatggctgttcatctcctgggttcaaggcagcaagactaagccagacttcacaagcaggtag

SEQ ID NO: 331332 - DNA, 201 bp, Homo sapiens
aacttaatgaactcgcaaagtagctcctcagtggctgaaaagcatagctgtaattccctgagtgcctaacttcttggcagccatatacacttgtggaagayggatccaaggaaaatgggtgaaggatcttttgtgtcagaagagaggaaaatatggaaatgaaagcttttggcaggtctaacttgccacattactgctcag

SEQ ID NO: 331333 - DNA, 201 bp, Homo sapiens
ttcccttcaccatgtctgagatagggtacctacagttgggctgtttgtgggatgaagaagtgcttctataacatcagcaggcgtgtgaccagtggcttgtrggagacaagcacttatgggaataaaagggaacctggcacaggccttgggcctctggcatcattagttacaggtctgccaagatgctttgggaaacatttt

SEQ ID NO: 331334 - DNA, 201 bp, Homo sapiens
ggtttgtgattaaattcaaactctgcagtgtagaagtttatatcttatccaatctggccctcactcctcttctatccatgtttccttacattctctaataygagttgaggtgcctagaaagcttaacaatattttacatgatttcaagtcctggccttccacatcatgcctgcagcggggtcctgtgtgtggcagcaccca

SEQ ID NO: 331335 - DNA, 201 bp, Homo sapiens
ttggtttctacttagctgtttctcatcatttggtgcaaatagtttccagaaatagtctagacgtcttagcccaagtagtcaggaaatggtttttaaacttyagtgtacatcctccgtcacatggagtgctaccttgatgtaaattcctgggcaccagccccagggagctggttccatgggcctagcaatctgcattgtaac

SEQ ID NO: 331336 - DNA, 201 bp, Homo sapiens
aacagaggctgccattcagaaaattctgactagatgggaaaaaattactttggattgaattagttcctattttctgaaaaccttatccatgatcacatttrctgttctgtattcatccctggagtccagagaagcaagtcctgctttggtccagtcctcccaaggtcatcctgagcctggtggtgcctgaagccacatctt

SEQ ID NO: 331337 - DNA, 201 bp, Homo sapiens
ggttgggattttctatctgaaactgagattcaaaacaagataaaggggaaaaaaatctagaattcagatgttattactaaaatttctttcacccaagtatwtaaaattattgacaaactacttttataattattagcaaaatctgtgttcttaagatgaagggcaattcagtgaattgtctgaaatcagacatagggtcct

SEQ ID NO: 331338 - DNA, 201 bp, Homo sapiens
gagcagtttatcattccagtaagttgcattcacagtaaaaagtgatctctcacagttacggcatattattcatcatgtttagtgcaataccataaaccttragtaacaccatgggacctatatgaagtgccactggtgatactgtaagtgctcccaagaagcagagaagagtcatgacattacaagaaagagttgaattgc

SEQ ID NO: 331339 - DNA, 201 bp, Homo sapiens
gttacatccatagattttccaaacactttagttccagaaatgtaggaggtactggtaacaggccagtgatataaaatccattagcaacaactatataaaakcatcttgccctagaaaaaacaatataagcatccatgtggcgagttactcaggctggcagcagggtgtctgattgctgtgccaagacttacacctgtgtgt

SEQ ID NO: 331340 - DNA, 201 bp, Homo sapiens
ataggagcccacagtcctgagagcttccttaagagtacctagaggagctcttagactcaaggagaatttatgcaatagtgcaaaagttgaagattaatatrtgcctgttaagaacaagaactatgaactgttaaccatacattaatttaattataaatatgtaccccaaaatgataaaaagatacttccttctgaagcaag

SEQ ID NO: 331341 - DNA, 201 bp, Homo sapiens
taatttaattataaatatgtaccccaaaatgataaaaagatacttccttctgaagcaagtagtacaaatattttataacaggtgtgacaacatgaatcatytctgctgaggtctggataagttttctgcctgccttgtctaagctttgctcattgtttactatgggcctaccttctcctaggctggttccttctggaattc

SEQ ID NO: 331342 - DNA, 201 bp, Homo sapiens
tatttccaactgtctgtttgtatactgctctttttttctcttacatttgctgcttccagtctgctgagcagttgatgtctcccctgtgaccaagcgatttwtcttacataaaagaggatgaggccccgacacactcctgcatggggaaaaccagcagaatgtcaggccagacctacatgacctggatttaattgctcagag

SEQ ID NO: 331343 - DNA, 201 bp, Homo sapiens
gtgcaagttgataaatactatctgactaagcttaagaagctagtacactttttaagagacatgttggttatattttaaataagtgtaacttaccaaaaatrtggtggtttttgaattatgcaaataatccaacctgcatatatttagttactataagataattactatggcaattagtgataaatgctataaagaaaaata

SEQ ID NO: 331344 - DNA, 201 bp, Homo sapiens
gtaggataggtaaggcttgagtagagggagaatggcttcttgtaaaggagatggattccagttacaacctcctgacactttttagtacactggcattttcrcgtgctgataaattcattaatttaacatccaaatgttataccagactataaaattcttcttatataaacaatcatcccattaattttagctgtggtaaaa

SEQ ID NO: 331345 - DNA, 201 bp, Homo sapiens; identical to SEQ ID NO: 69040

SEQ ID NO: 331346 - DNA, 201 bp, Homo sapiens
cagatggtaattttagtggcctcctatttttagtgacagccttctattaaataaagtaggcagttatgttagaaagatgtatgtttttccataggactcawtatggctatttatgtttttaatgctaaatatgagtcgtataaacatttctatttttcctgaatttgctgtggtgcagaatgtttccctagcctctttcta

SEQ ID NO: 331347 - DNA, 201 bp, Homo sapiens
gtttcttgttcctcttctccagagcgagctaaatcgattgaatcagtgccagacactttgttgccagccgatgaaatgaggttcacctattccttatcccvtttcaggatgagaatttatgaaattacccatgcccatttatgaaattgccactacctaagtatcccagatggtaattttagtggcctcctatttttagtg

SEQ ID NO: 331348 - DNA, 201 bp, Homo sapiens
cttcagagtgactgtcttgctccaaattcccccttttcttcttttttctcatcttaaagagcacatcaaagttttaaagatgtgtgaaaaactttgcaggrtagcccttatgtgcctggcatgacttattctttcaattcagagttattgttattgagctgaagaaaggtcaggccttgctgtgctcatttaatggacttc

SEQ ID NO: 331349 - DNA, 201 bp, Homo sapiens
accttcagagtgactgtcttgctccaaattcccccttttcttcttttttctcatcttaaagagcacatcaaagttttaaagatgtgtgaaaaactttgcarggtagcccttatgtgcctggcatgacttattctttcaattcagagttattgttattgagctgaagaaaggtcaggccttgctgtgctcatttaatggact

SEQ ID NO: 331350 - DNA, 201 bp, Homo sapiens
gtgtgcagagaatgtccatgggcagacctgatgggaggcagttggcaatagataaggaaggtgcttctggagagtgagggaggaagggaagggatggtgarccatctaccctctgctttgggctgcctgtccccattccctgtgtttctacttaatcagatttgcacacatcactcatctgctgagacttctttctctgcc

SEQ ID NO: 331351 - DNA, 201 bp, Homo sapiens
catgtttacaattatggtaaggacatatagtcattagtcatatgaagaattgctaatttgttttgggctcaaagacagttgcataagatcttacttttgayaagtaattgttattctgcttgccaacagatataggtcaccaaagtgctgcaagagaggattattttagatgtatttcgaattttaaagcacaaacatata

SEQ ID NO: 331352 - DNA, 201 bp, Homo sapiens
gcctgactgccagtcaggatgagaatacccctgtagctgagattatactttgattgtacctgcatttccagtgcctgggacttagaacttaacacattatyaataaggtcactttcaggtaggatgatcatatgtttcagtttgcccagggcagtccctgttgatgtggcatgtttattgatacccacattcactcttttt

SEQ ID NO: 331353 - DNA, 201 bp, Homo sapiens
cccagagattctggtatgttctatctttgttctcattacttgccaagaatttcttgattactgccttaatttccttgtttacccaaaagccattcaggaasagttgtttaatttctatgtaattgtatagctttgaatgattgtcttggctttgatttatatatatatatatatatattttattttattattattacactt

SEQ ID NO: 331354 - DNA, 201 bp, Homo sapiens
ggcaatgatttttatttcttagtgctacataaaatactggcacatctcacaagcactaatgtctcagatattataaaataagttatgtcagcagacataaytcttttttttttttcttttttgagatggagtctcactctgtcacccaggctggagtccagtggcacaatctcggctcactgcaacctctgcctcctgggt

SEQ ID NO: 331355 - DNA, 201 bp, Homo sapiens
ggatcacctgaggtcaggagttcaagaccagcctggccaacatgacgaaaccccgtctctactgaaaatacaaaaattagttgggcatggtggcgggtgcytgtaatcccagctacttgggaggctgaggcaggagaatcgcttgaacccaggaggcggaggttgcagtgagccaagatcatgccactgcactccagcctg

SEQ ID NO: 331356 - DNA, 201 bp, Homo sapiens
cctctggtgaccaataatatacaaagaataatttcaataatgacttcatggttattaattgttatcagtttaaatacttagcaagttgagaaaatataaasaaaataagatttcaaacaatccaatcatctatattcagcaaaacacaaaaagtttctgttagatatgacagggtctagtgtttatggaattaaagcaatg

SEQ ID NO: 331357 - DNA, 201 bp, Homo sapiens
tcccacctactcagcaccacttgacgtttggtaagctgcattctttcttttggtaattttagttacgttaagtccttcttgtttgtattgcctgcttcacyccattcttagtcctacccacctttcaaggaccaccaaaatatctctgaatcaacaacatctgaagtcagtcctgtaattgagtatttttcatttatgtct

SEQ ID NO: 331358 - DNA, 201 bp, Homo sapiens
tcatctgatcttgtctccatataaatatagagattcctagaaatattactgtgaatccatgctgtatgttttggcttcctgaaaatcaactaaggcccatmcatgctgtgcagatgttgaaagtacaattctccctgtagatagcaaagggtaagcgggtaatcacacactctttcttgtcatattttcttttagggtgag

SEQ ID NO: 331359 - DNA, 201 bp, Homo sapiens
aaattgaacctagagtagtaaacaagtgatacttctgtaaactccctaagggatgactcctcagttctgtgaaccccatcatccctcctaatctcaagtcrcttattttcttatgctttgtggagctctcctacaagcacctgaactccagcatgtcccaaatgttattcatgattttctccttaagtctgctgctcctgc

SEQ ID NO: 331360 - DNA, 201 bp, Homo sapiens
gcagaggcttggatttctgcctgccatttcctcttgccctcttcagggtctttagcacagcgcccacctctcaatggacttttattgataaggaattctaytctttcagactttcactcttcttgtgtcagaaacacctgggggcatggggcttggttcatttgaccttcatacactcacataaccacttctgttagtacc

SEQ ID NO: 331361 - DNA, 201 bp, Homo sapiens
tataggattgtttgtaacacaaatgataaatgcttattaagtggatagatattccattttccattattatgcattacatgcctgtatcaaaacatgtcacrtaccccataagtatatatacctgctatgcacctataaaaatttaaaataaaaataaaatttaaaaaaaccattgaggagaaaggatatctgcctgaacag

SEQ ID NO: 331362 - DNA, 201 bp, Homo sapiens
aaaatttaaaataaaaataaaatttaaaaaaaccattgaggagaaaggatatctgcctgaacaggtgtttaatgaagctgaaagtaccctgttctgggggraaaaaaaagtcacagtggagaattgttagtaaggaagagaagcaaacagcaggatttagggcaggaaaggataggctaactctactgttttgtgcagatg

SEQ ID NO: 331363 - DNA, 201 bp, Homo sapiens
gaagcaatgaaatatgaacactgctacaacaaacacccccacctctttcagagtttttttttttttttttttttgagacagagttttgttcttgttgcccmggctggagtgcaatggtgtggtctcagctcactgcaacctttgcctcctgggttcaagcaattcttgtgcctcagcctcccaagtagctgggtttacagg

SEQ ID NO: 331364 - DNA, 201 bp, Homo sapiens
tatggccttttccaactggcttctttcacttagcataatattttaaaggttcatccatgttgcagcatgtatcaatacttcattcctttttatgtctgaawaatattccattgtatggatatgccacagtttatccattcatcagttaaagaacatgtgagttatttctaccttttggctattatggactatgctgctatg

SEQ ID NO: 331365 - DNA, 201 bp, Homo sapiens
aataaaaccgaacagaatagactagaagagaaaatgctgttttgtatgtttgtctgtacttgtatataggtgtggtataagtttttttcaagggcacagtaaaaaaaaaaaggcttggaaaacagatttgtgatgctatactgagattatctgttcatgttactccatgaattgtaaactccttaagaaccgggaccattc

SEQ ID NO: 331366 - DNA, 201 bp, Homo sapiens
gtggtgctcaacctcacgtatttcagatctttactcaaaaatcatcttctcagcaaggctttaccctatcacctgtttaaaatcacagacacaaacacatacacacacacacacacacacacatacacacacatgcacacacagcacttgtcttctctttctggcttttctccgtagtatttatattatatatcttacatg

SEQ ID NO: 331367 - DNA, 201 bp, Homo sapiens
ttcagatgtcattagctataacaaagttcagaattaatcatgacaccatgcaaaatgggaaaaatttgcaagcaaggagagggtggagatgccagaacccrtaaatttatgccagctgagcactgtgggggcacctggcaaatggatttactattttgccaacaccagtaaagtgttacaaaattgcaaacggaattattt

SEQ ID NO: 331368 - DNA, 201 bp, Homo sapiens
gcaagtgacattattatgtgacatattatatgtctgggtcattactatgctaaaataagtagattaaaatgaaaggaatttccaaacaaatgcgggaaggmaggcattatgaagttttcagatgtcattagctataacaaagttcagaattaatcatgacaccatgcaaaatgggaaaaatttgcaagcaaggagagggtg

SEQ ID NO: 331369 - DNA, 201 bp, Homo sapiens
gtcattactatgctaaaataagtagattaaaatgaaaggaatttccaaacaaatgcgggaaggaaggcattatgaagttttcagatgtcattagctataayaaagttcagaattaatcatgacaccatgcaaaatgggaaaaatttgcaagcaaggagagggtggagatgccagaacccgtaaatttatgccagctgagca

SEQ ID NO: 331370 - DNA, 201 bp, Homo sapiens
gtaaggacagatggagaacaaggcacagggacaaaagcatgaatgaaaccaaatctgtaattaggcagtaagccagcctgtcaattagagtttttttttttgtttgtttgttttgagatggagtcttgctctgtcacccaggctggtatacagtggcacaatctcggctcactgcaacttctgcctcctgggttcaagcga

SEQ ID NO: 331371 - DNA, 201 bp, Homo sapiens; identical to SEQ ID NO: 69057

SEQ ID NO: 331372 - DNA, 201 bp, Homo sapiens
ttccgttcgtaatcttgttttgtagcagctgcattctctccactctgccactcctgtgctctgtaatttgaaaaggtgaattgttgctcctggagatttgwacctagctgccttctaggaaagtgagacaggtggtgttcccactaagggctgagctagtcatatcagtgacattcagcttccgaaggtttgagaaggaga

SEQ ID NO: 331373 - DNA, 201 bp, Homo sapiens; identical to SEQ ID NO: 69063

SEQ ID NO: 331374 - DNA, 201 bp, Homo sapiens; identical to SEQ ID NO: 69065

SEQ ID NO: 331375 - DNA, 201 bp, Homo sapiens; identical to SEQ ID NO: 69058

SEQ ID NO: 331376 - DNA, 201 bp, Homo sapiens
tcggccgactccccagacccctcgaaggtgcggggacccccagcggaagcgagagggagcgaaatcgaggaacgagtgacagccggacagtccgccgggcrgtgatccggggccgctcccgggcgcgccctcggctccaggtgagcggaggaaccgggcagaaccgagggtgggcgttacttaggaggaggaggctgggag

SEQ ID NO: 331377 - DNA, 201 bp, Homo sapiens
gagattggggcgcatccgctcactccgcttcccctcgcaggtcctacccggagccgctgccatgggagagccagccttgggcgctggggaccagccgccgygcccgcctcggagtcgcggcccgagtcccggcgccagcagccagcccgctgcgtccccttcccgggctgcagggctgcctccgccgcgccgccggcccgg

SEQ ID NO: 331378 - DNA, 201 bp, Homo sapiens
gcccgctgcccggaaactgcccagggataagtcggccgactccccagacccctcgaaggtgcggggacccccagcggaagcgagagggagcgaaatcgagsaacgagtgacagccggacagtccgccgggcggtgatccggggccgctcccgggcgcgccctcggctccaggtgagcggaggaaccgggcagaaccgaggg

SEQ ID NO: 331379 - DNA, 201 bp, Homo sapiens; identical to SEQ ID NO: 69064

SEQ ID NO: 331380 - DNA, 201 bp, Homo sapiens; identical to SEQ ID NO: 69067

SEQ ID NO: 331381 - DNA, 201 bp, Homo sapiens
cagctgagcactgtgggggcacctggcaaatggatttactattttgccaacaccagtaaagtgttacaaaattgcaaacggaattatttctatgcaaacarttgtttttaaaaagggtccctacatcgactaatgcaattcagtttttttctgggtaagcacaaagccagaaactaaatgaaaaatattagaaattatttt

SEQ ID NO: 331382 - DNA, 201 bp, Homo sapiens
ttgaaatttggtattttccagggagaaaaccgttacattttcctgtagtggttatgatgttgtgtcctgaacccatttggtactgaaacattctgcagaaygttatactatgagaagaaattgtgaagcccaaatgggaacaagagacagtgtagttgtatatgacagtaaatacagtacaagttcactatcatcatggtt

SEQ ID NO: 331383 - DNA, 201 bp, Homo sapiens
gagtaatttggatgtgggggtgggggtggagaaaggggaagtggtccagaaacaaaaagccccattgggcatgataagccgaggaggcattcttctaaagyagacttttgtgtaaaaagcaaaggttacatgtgagtattaataaagaagataataaataatattctttttaatatttgcctccattactttggattcacc

SEQ ID NO: 331384 - DNA, 201 bp, Homo sapiens; identical to SEQ ID NO: 69066

SEQ ID NO: 331385 - DNA, 201 bp, Homo sapiens
agcaaaattagaaataaactaaatgtgaactctgtgggaaataattaaatgtgatatgcacctacacgcatatacatgtatgaatgaaggaatattatatcattaaatcatatttgtacgaaataataacagaaatctcaacataatatttttgaaagagtagatggccactatacacaatgtagtttgtgtgtgtgtgca

SEQ ID NO: 331386 - DNA, 201 bp, Homo sapiens
tttgtttttatgcttgagattgattactattacttctgtaatactgttttcacagttctaaatgattcagtcctcagttacattagtaaaaggcagaggtyggatatgaaaggaaaatttataataaaagaatcagaattagttgtataaggggtaccaaaatttctaatcatcttttatctattccagttttagaatgta

SEQ ID NO: 331387 - DNA, 201 bp, Homo sapiens
ttgctcattacagcaaaattagaaataaactaaatgtgaactctgtgggaaataattaaatgtgatatgcacctacacgcatatacatgtatgaatgaaggaatattatatcattaaatcatatttgtacgaaataataacagaaatctcaacataatatttttgaaagagtagatggccactatacacaatgtagtttgt

SEQ ID NO: 331388 - DNA, 201 bp, Homo sapiens
tttgctcattacagcaaaattagaaataaactaaatgtgaactctgtgggaaataattaaatgtgatatgcacctacacgcatatacatgtatgaatgaaggaatattatatcattaaatcatatttgtacgaaataataacagaaatctcaacataatatttttgaaagagtagatggccactatacacaatgtagtttg

SEQ ID NO: 331389 - DNA, 201 bp, Homo sapiens
ctcgggatggagtaccatggctcaatcttggctcactgcaacctctgcctcctgggttctagtgattcccgtgcctcagcctcctgagtagctgggaacaygagcatgtgccaccacacctggctaatttttgtatttttagtagagatggggtctcaccatgttgggcaggctcgtcttgaactcctggcctcaaatgat

SEQ ID NO: 331390 - DNA, 201 bp, Homo sapiens
aaaatctgtggccaatcaaatgtaggagtgaagtttgatcataaggacaagtatcaagcccaatattaattaagaggttgttttttttttttgtttctttktttttggagggatgggcttaaaaccatgataatcttaaatttcacgtatgttaaaaatgtcctggtgatgtgactttggtggtaaggcatttagacaggc

SEQ ID NO: 331391 - DNA, 201 bp, Homo sapiens
gatgttttccaggttttctgaaaccttttatagtttttatttgtactatttcatcaaactttgtatttatgtgtgtgtatacttcatcatgatgtaaaatrtattatataggtcatggtccaaaaagtttgaaagccgttgcttgactttggccactaattgtttttttgttgttgttgttaatgtttagcattcagtcat

SEQ ID NO: 331392 - DNA, 201 bp, Homo sapiens
tagtagaaacaggatttctccatggtggtcaggctggtctcgaactcctgaactcaggtggtccacctgccttggcctcccaaagtgctgggattacaggygtgggccaccacacctgccaaaaccttttttaaaaagcaaactaaatatcaataatctctttaaaattgaacttttatttatttattttttaagatggag

SEQ ID NO: 331393 - DNA, 201 bp, Homo sapiens
aaaaaaaaaaaaaacaaggaagataaaaggaggccaaggtgggcccaggtgctgggattacaggcatgagctatcgcacccagctggtgtcttaaatttaraagcaactcggaaagactttttaataaagacttttaagaagaggggtttaacaagtactttgagtgaatttgttttcctccagctcgtatttcaaatttt

SEQ ID NO: 331394 - DNA, 201 bp, Homo sapiens
gtttttggccaggcgcggtggctcacatctgtaatcccagcacttttgggaggccgagtcgggtggatcacaaggtcaggagatcgagaccatcctggctmatatggtgaaaaccccgtctctactaaaaatacaaaaaaattagctgggcgtgttggcgggcacctgtggtcccagctactcgggaggctgaggcgggag

SEQ ID NO: 331395 - DNA, 201 bp, Homo sapiens
acgcgtcaccatgcccagctaatttttgtatttttcgtacagacggggtttcaccatgttggccaggatagtctcgatctcctgacctcgtgatccgcccrccttggcctccctaagtgctgggattacaggtgtgagctcccgcgcccggctcaggaagatgtttatggaagtcatagtcccccattaaagaagtatgca

SEQ ID NO: 331396 - DNA, 201 bp, Homo sapiens
ttttgtttttttttttttttgaagagtcttgctatgttgccaggctggagtgctgtggtgtgatcttggctcactgcatcctccaacaagtgattctcctscctcagcctctcaagtagctgtgattacaggcacgcgtcaccatgcccagctaatttttgtatttttcgtacagacggggtttcaccatgttggccagga

SEQ ID NO: 331397 - DNA, 201 bp, Homo sapiens
tgagagtttctaagtctttccttagttttcatggtctaaaccatcttgagaaatactggccaggtatcctgtagaatgtctttgaaatctagatttgtctytttttttttttttttgagacggcgtcttgctctgttgcccaggctggagtgcaatggcacgatctcacctcactgcaacctccgcctcctgggttcaaac

SEQ ID NO: 331398 - DNA, 201 bp, Homo sapiens
gttataataaattatgttctcctggagtgatagagatggaaacttgaaaacaagcagaaactacaaataaatttctgcctgttactgtaagaattttttttaacacatttaatcttttcttcacacatttcttactttattattgctagagctttataaaggtaggtaccatgccttcaacttcttgacttctcaaagttt

SEQ ID NO: 331399 - DNA, 201 bp, Homo sapiens
tgtatggttcgctttagttttatgaatcaaatagtttttccaaagagatatatccagtgatttttgagttaattaagtaagttttataatgcaacactgartttctatacaattaaaaacatgttttaaggtatttttatgttttttagttatcttttatttggaaacattttaatttgcatgatttgtctaaaattctca

SEQ ID NO: 331400 - DNA, 201 bp, Homo sapiens
atgagaggttttgttttgttttggtctgtataacagtctttgtttctggtatagaacttgccacaaataagttctcagtacatgtttaattgactgtaacmaagtcagttttggtttagtgttacttagtatatatatttgactgtttttttggtgggtttttttttttttgttttcactctgtcatccagactggagtac

SEQ ID NO: 331401 - DNA, 201 bp, Homo sapiens
tggagaccatatcacagaatgtctaaaagagtatacaaatcctgaacaaattaagcaatggagaaagtaagtgatacacttttcaggaagtgttaaatttrtattatataactgtcttttttttttttgttttctttcctgattctgaagtttaggtaacaagataatttttaaagaggtaacctacagatgattgtttta

SEQ ID NO: 331402 - DNA, 201 bp, Homo sapiens
tcacaatctgcattccatcctgtgatcatcatcatactggttgatttttaaaatttgcatatattaatgcttattcaatgatgcacagttctttgggtttkgacaagtgcatagaatcattttttctgtactccagtaatgtacagaacaattccttcatcttaaaaggtcccagatctactgagccagaatttccatttt

SEQ ID NO: 331403 - DNA, 201 bp, Homo sapiens
tgtgagccaccacacctggccttgtctattgttcttaggataaactagggttattggtttttagaaagaataccacaaagataaagtgtgctagtcacatmatatgggaaacatgttatcctcatgacattactggtggtgttaacctctcacttggtcaaggtagtatttgcaagtttctctactgtaaagttactgttt

SEQ ID NO: 331404 - DNA, 201 bp, Homo sapiens
ttcctttttcttttgtgaaagtttattaaacggaatagaattaagaaagaattcatttggcatttgcaggttacagttagctttctactgaaaaaaaaaawttttaactattctttctgtctggagatctctctataactattcactgaaaggaagaagaatacacaggaaaaatatgtctcttttgctatgctattgctg

SEQ ID NO: 331405 - DNA, 201 bp, Homo sapiens
gttgttaattctgctatacaggttttgtgtgcttctgaaaagtgtggttatcaagttatctagtttttacaactgccttggagtttatcaggagagagacyttcttttttgccttcattttctttcttaccgctgctatactatgctctactgtcattaacactcaattcccactcccttccccagaagcttttgtcataa

SEQ ID NO: 331406 - DNA, 201 bp, Homo sapiens
aggtaaccacactatgagtagcactaatacaaataatactcttagcatcaagaggatattgattaatattgtctgtggaactcaacacaccattttttttyatacataactagagctcagcattttatttaactatattgcaatgataattgtgttacatataggtaaggaatatagtctttattactttgaggcagtaaa

SEQ ID NO: 331407 - DNA, 201 bp, Homo sapiens
tatatttttctgccatatctaaagcgaggaggagtaataagtccaatttgatactacaggtgaaaaaaaattaaaccttgtggccgggtgcggtggcttaygcctgtaatcccagcactttgggaggccgagcaggcagatcacctgaggttgggagttcgagaccaccttgaccaacatggagaaatcctgtctctacca

SEQ ID NO: 331408 - DNA, 201 bp, Homo sapiens
tcaataaattaacctttttttgcagttttcttaatacttcttcattcactggtttatatttctattatagttttggaaatctagtcctagtattctggccrttcagagatctgcaatcctcaagaagcagcaacagcagcagcagcaacaacaacatcaagcctcatctaatagcggatcagaagaggtgcattttcatca

SEQ ID NO: 331409 - DNA, 201 bp, Homo sapiens
tttttttatttttaatgcagaaacaagaaaaaaaagtaccttatattaagacctatcattggctgacccgatcccctcaagaacagtcattgtgggctggrcacaatggctcatgcctataatcccagcacgttgggaggccaaggtgggcgcatcacaaggtcaggagattgagaccatcctggctaagacggtggtcta

SEQ ID NO: 331410 - DNA, 201 bp, Homo sapiens
tttttctaattcgaaaaaggaggggattatattagataattctgaaattctcagttttatttatgagcaatagaatttcccataagtttctatacccccartactttatttaaaagagtatatatttttgtactcatattattgaaattttgagttgaaatataatcctacaacagaattaattacatggaaggatcttgt

SEQ ID NO: 331411 - DNA, 201 bp, Homo sapiens
ctgtttggataagcaagaacatcatagagaataaaataaggaacagttatggaaagcagcattattacttgaacaagtattggtctaggagttatacaacytgagttgatgctatctctgcattaattaaaactcatatgattgcctcaactctaaggattgaactgatattgaagtttcattttaattaattacaaagtg

SEQ ID NO: 331412 - DNA, 201 bp, Homo sapiens
gatttcagatagactaagggagaatatttcttggttaataggtcttacaggaagtgaacttctgcaattgctgtgtgttttttagttttagttttataatwttttatttcaaactttctcttaaaaaaattgtaaatgatgttttcgtcaatgtatcttcttaagtgttgtcttttatcttgttgagcatcactatgtcag

SEQ ID NO: 331413 - DNA, 201 bp, Homo sapiens
ctaatttttgtatttttagtaaagatgggatttcaccatgttggccaggctggtggtcttgaactcctgaccttgtgatccacccacctcggcctcccaargtgctgggattacaggcatgagccactgcgcctggctgactttttttagttttaaataagttatcttgagtgatgatttacttcaggaatggctatatgg

SEQ ID NO: 331414 - DNA, 201 bp, Homo sapiens
ttgaacccaggaggcagacggaggttgcagtgagccggagattgcgcgattgcactccagcctgggaaacaagtgaaactccgtctcaaaaaaaaaaaaaattaaaccttgcgaaatcaaatttaaggaatcttttacaatgcatactcatcttaaataattgcaaagcatatttctttaattattcggagttgttaattc

SEQ ID NO: 331415 - DNA, 201 bp, Homo sapiens
ttgggagttcgagaccaccttgaccaacatggagaaatcctgtctctaccaaaaatacaaaatgagctgggtgtggtggcctgtaatcccagctgctcgcraggctgaggcaggagaattgcttgaacccaggaggcagacggaggttgcagtgagccggagattgcgcgattgcactccagcctgggaaacaagtgaaac

SEQ ID NO: 331416 - DNA, 201 bp, Homo sapiens
tactgagaagggaaggtgtttaaggattatataacatttaatagtggatgttaagtacacttttgtatatttgaaggaaatttacaaccttatgctttctrttttcattttgaaagataatctgagggtttttgaagtttagaattcattctcagaaaaattaaatttttggctctggcatacgtataaaaaatacatttt

SEQ ID NO: 331417 - DNA, 201 bp, Homo sapiens
agtacagttgtgtagtctcagctcactgcagcctctgcctccacctcctgggctcaaacgattctcccacctcagcatcctgaaaggcgtgcatgccaccrcactcagctaattttaaaattttttgtagagatgaggtctcaccatattgcctcagctggtcttgaactcatgggctcaagcagtcctcccaccttggcc

SEQ ID NO: 331418 - DNA, 201 bp, Homo sapiens
tcactgcaacctccacctcccaggctcaagtgtttctcctacctcagcctccggagtagctgggattacaggcgctagccaccactcccagctaatttttstattttttttgtagagatggggtttcgccacattggccaggctggtctcgaactcctggcctcaagtgatccacctgcctcgagctcccaaagtgctgag

SEQ ID NO: 331419 - DNA, 201 bp, Homo sapiens
gagtcttgctctgtcgcccaggctggagtgcagtggtgtgatcccggctcactgcaacctccacctcccaggctcaagtgtttctcctacctcagcctccrgagtagctgggattacaggcgctagccaccactcccagctaatttttgtattttttttgtagagatggggtttcgccacattggccaggctggtctcgaa

SEQ ID NO: 331420 - DNA, 201 bp, Homo sapiens
tacgatggggaaaacagttattctgtagaatttttccacaatctagattttgcatagtacttccctctaaaatagtttaacagtatcctctgtatttcctrcagattggtaggtagatgtaggtgcttgataatattcaaattaataattatgagaagagtatattttgtagtacacaatggcgattatctaattttgtta

SEQ ID NO: 331421 - DNA, 201 bp, Homo sapiens
gttaatttacaccattacacaatttaaagataaatctttaacatttatctttctgtgaccacctgagggtattatgccatttctttatctcctgtaactcmccctatatatttttaaactttaatgatctccctagttgtaatatcagaaaatcttaataacttgggaatataggagtatagggatgacaggatgactgat

SEQ ID NO: 331422 - DNA, 201 bp, Homo sapiens
aaacttgacttttttctttattgttattgttgttatttagttttcctcataggtagcagagttttcaggttttcctcttagctatccaaatactaaaaaarttctgatatacgaaccttttttcataatacaggttttaattatatttttcattcagatacacagtagatcttaaatatagaaagtttttgtttacttaaa

SEQ ID NO: 331423 - DNA, 201 bp, Homo sapiens
aagaaagtgttagaaacagtagtggagaatcaaggtaagtaagcactttgttatcaattgtttactatgaagagagttgaaaacttgacttttttctttaktgttattgttgttatttagttttcctcataggtagcagagttttcaggttttcctcttagctatccaaatactaaaaaaattctgatatacgaacctttt

SEQ ID NO: 331424 - DNA, 201 bp, Homo sapiens
cccctccgcgtctgtccccttccccctcccccgcacggactcttgcttaccccgagacgccggagccctaggactgggcggcggagatcccgggcctgggygcgggggaggccgtccacccgagtcggctccctccgccccgccaagcccgccggtaagaaagggggcggcgggcgggtcaggatgtggcggagaggacag

SEQ ID NO: 331425 - DNA, 201 bp, Homo sapiens
cgccgtggctcacgcctgtaattccagcactttggaaggcagtggcaggtggatcgctcgagctcaggagttcaacaccaacctagcaacatgacaaaacmccgcctctacaaacataaataaaaaacaaaaatcattaaccttgagtgagtcaagttcatctgcagactgaaaaaaataaagtgtaacagaattttgatt

SEQ ID NO: 331426 - DNA, 201 bp, Homo sapiens
ggtcaatggaagccccttcaagtgggctctcatgtccttttgtttttcctctgtcctttttgacatgcctctatatatatatatatatatatatatatatwtttttttttttttttcattttagcacaggaaggttgttagactcatcttgtatcttccctattgcagccttagagcctgccatttctcaaaggagctgta

SEQ ID NO: 331427 - DNA, 201 bp, Homo sapiens
aaagtttcaagcatgcattgatgagtattttagcaggaaccaatcaaaaaccactccttttaaagattgcaaagtgagtattgtctaacattttaaattaytaaaaatatatttatacattataaatatttacaagcctaaatacaagagttggatcctgatttcagatagactaagggagaatatttcttggttaatagg

SEQ ID NO: 331428 - DNA, 201 bp, Homo sapiens
atataagtacacttttactgagaagggaaggtgtttaaggattatataacatttaatagtggatgttaagtacacttttgtatatttgaaggaaatttacwaccttatgctttctattttcattttgaaagataatctgagggtttttgaagtttagaattcattctcagaaaaattaaatttttggctctggcatacgta

SEQ ID NO: 331429 - DNA, 201 bp, Homo sapiens
ccatctaactatatatttgtacccattcatcattaattttattattccagtaagacaaaatccttaaaatcttttatatttatttttaaaaaacatcggcmttgtagtatttttggtcatttggttgcactgtgctagctgaaatccttttttttttttttttttttttttttttgcctaaaatgggaaacactgggagaa

SEQ ID NO: 331430 - DNA, 201 bp, Homo sapiens
actgtaaatgcagagagatactaaaatctgtggccaatcaaatgtaggagtgaagtttgatcataaggacaagtatcaagcccaatattaattaagaggtkgttttttttttttgtttctttgtttttggagggatgggcttaaaaccatgataatcttaaatttcacgtatgttaaaaatgtcctggtgatgtgactttg

SEQ ID NO: 331431 - DNA, 201 bp, Homo sapiens
gttttataatgcaacactgagtttctatacaattaaaaacatgttttaaggtatttttatgttttttagttatcttttatttggaaacattttaatttgcrtgatttgtctaaaattctcaatttttctttattagatattacagtgacagagagaaacacagaaaactggatgatcacaggagtagagatcacaggtcaa

SEQ ID NO: 331432 - DNA, 201 bp, Homo sapiens
tataagtacctttatattaaggagatacagtaattctgatacatacctacattattatgtaaaatgtattctcttaaactgtagttcattttagtttattrtccttttaatcatccttttctcagtttctagaaattgtagaatgactgttaaaatgaacaaatattcttttttatgtaatttggaatagtaatgcattct

SEQ ID NO: 331433 - DNA, 201 bp, Homo sapiens
cctcacgtgattagaaatccaggtatgtaagccttactgattgggaaaataaattaaaaaaaattttttttaaatttttgttttaaataaaccaaatgatraaaaaggttcttaccttgtttttatttataagtacctttatattaaggagatacagtaattctgatacatacctacattattatgtaaaatgtattctct

SEQ ID NO: 331434 - DNA, 201 bp, Homo sapiens
ttatatcttaaattatttattcatcagtctcaaaaggttatttataaaacaaagtaaagctattctgggtaataggaaatggagaacagaattgcaattcraaggcagtagaatctgtttttaattcccctgacattttctgtctgggaggtaaggtcagaaattactgttttatacacacacatatgtacattcatagat

SEQ ID NO: 331435 - DNA, 201 bp, Homo sapiens
aaaacagtgatcaaaacagcaacttgaatcctcacgtgattagaaatccaggtatgtaagccttactgattgggaaaataaattaaaaaaaattttttttwaatttttgttttaaataaaccaaatgataaaaaaggttcttaccttgtttttatttataagtacctttatattaaggagatacagtaattctgatacata

SEQ ID NO: 331436 - DNA, 201 bp, Homo sapiens
ccaggtaataaggtcagtaagagtttttattgccctaaaagattagatcacagattactaagaattttttaaaaaggaaaatgaggtcaggtagtttgtartactatttgaatttttcaattttgttaataaacttaagccatgtgtaataaatcacgacagttgattttgcacattttcaaaatataccttgtttgaaaa

SEQ ID NO: 331437 - DNA, 201 bp, Homo sapiens
tagcttttttgaagtgaaaacattaaacttttcactggagctacttccccttctctatgtggtctactaatgaattaggtgaaattgtatctcttgccacytttttttcccccacatttcttttttaatcttcggactttttcatgtaactgctggaatggaaaaattcctgctgtgcacaatgcatgaatttcctctcca

SEQ ID NO: 331438 - DNA, 201 bp, Homo sapiens
atcatcgtctccttatcactggaactcctctacagaattccctcaaagagctctggtctttgctacatttcattatgccagaaaagtaagacaactttacrattttaatcatattgtgtggatattatgtttagtgggaataaacccaggtaataaggtcagtaagagtttttattgccctaaaagattagatcacagatt

SEQ ID NO: 331439 - DNA, 201 bp, Homo sapiens
agtgaaaacattaaacttttcactggagctacttccccttctctatgtggtctactaatgaattaggtgaaattgtatctcttgccacttttttttcccccacatttcttttttaatcttcggactttttcatgtaactgctggaatggaaaaattcctgctgtgcacaatgcatgaatttcctctccattaatcttaaat

SEQ ID NO: 331440 - DNA, 201 bp, Homo sapiens
ttgaagtgaaaacattaaacttttcactggagctacttccccttctctatgtggtctactaatgaattaggtgaaattgtatctcttgccacttttttttyccccacatttcttttttaatcttcggactttttcatgtaactgctggaatggaaaaattcctgctgtgcacaatgcatgaatttcctctccattaatctt

SEQ ID NO: 331441 - DNA, 201 bp, Homo sapiens
aacaagtactttgagtgaatttgttttcctccagctcgtatttcaaatttttaaattcccaatgccattaaaaaataaatatgtacacacacacacacacmtgtgtaatagtgcttcttatttatggtgaaggactagtttttttcccagttttttgcagaccaatatattttttaaaaaatacaagaagaatgaaatgtt

SEQ ID NO: 331442 - DNA, 201 bp, Homo sapiens
ggcccaggtgctgggattacaggcatgagctatcgcacccagctggtgtcttaaatttagaagcaactcggaaagactttttaataaagacttttaagaaraggggtttaacaagtactttgagtgaatttgttttcctccagctcgtatttcaaatttttaaattcccaatgccattaaaaaataaatatgtacacacac

SEQ ID NO: 331443 - DNA, 201 bp, Homo sapiens
ggtttaacaagtactttgagtgaatttgttttcctccagctcgtatttcaaatttttaaattcccaatgccattaaaaaataaatatgtacacacacacayacacatgtgtaatagtgcttcttatttatggtgaaggactagtttttttcccagttttttgcagaccaatatattttttaaaaaatacaagaagaatgaa

SEQ ID NO: 331444 - DNA, 201 bp, Homo sapiens
gtgggcccaggtgctgggattacaggcatgagctatcgcacccagctggtgtcttaaatttagaagcaactcggaaagactttttaataaagacttttaaraagaggggtttaacaagtactttgagtgaatttgttttcctccagctcgtatttcaaatttttaaattcccaatgccattaaaaaataaatatgtacaca

SEQ ID NO: 331445 - DNA, 201 bp, Homo sapiens
gaggggtttaacaagtactttgagtgaatttgttttcctccagctcgtatttcaaatttttaaattcccaatgccattaaaaaataaatatgtacacacayacacacacatgtgtaatagtgcttcttatttatggtgaaggactagtttttttcccagttttttgcagaccaatatattttttaaaaaatacaagaagaa

SEQ ID NO: 331446 - DNA, 201 bp, Homo sapiens
tatggaaagggaatatggcatgtttttgtgtactttacatttaaaatttatattttaggtaccgaagtctgtgtgtgtgtgtgtgtgtgtgtgtgtgtgcycacgtgcgcacgcacttatagttcataacagtctcaattatagaacagaattctaactgtccagtagatattatatagcactagaggcatagagcaaagg

SEQ ID NO: 331447 - DNA, 201 bp, Homo sapiens
tctatggaaagggaatatggcatgtttttgtgtactttacatttaaaatttatattttaggtaccgaagtctgtgtgtgtgtgtgtgtgtgtgtgtgtgtycgcacgtgcgcacgcacttatagttcataacagtctcaattatagaacagaattctaactgtccagtagatattatatagcactagaggcatagagcaaa

SEQ ID NO: 331448 - DNA, 201 bp, Homo sapiens
ttatatgttattaaggcattaggtgtattatttttcaaattacgaggttaaaagtcttattccatcattagctttaaaaaaatttttgatgcataatagatgtacatatttttggatgcatgtgataatttgatacaatcatataatatataaagatgcaatcagggtaactggaacatttatcaccttaaatatttatct

SEQ ID NO: 331449 - DNA, 201 bp, Homo sapiens
attatatgttattaaggcattaggtgtattatttttcaaattacgaggttaaaagtcttattccatcattagctttaaaaaaatttttgatgcataatagatgtacatatttttggatgcatgtgataatttgatacaatcatataatatataaagatgcaatcagggtaactggaacatttatcaccttaaatatttatc

SEQ ID NO: 331450 - DNA, 201 bp, Homo sapiens
cagttgagcccgggaggcggaggttgcagtgagctaagattgtgccagtgcacttcagcctgggtgacagaaggagacactgtctccaaaaaaaaaaaaarggattctaatacttgatttgtctaacttcttcatgtaactgttgtaaaggtgaaaatgtcagtaattaataaaagtgctgtgtaactgttatatttttaa

SEQ ID NO: 331451 - DNA, 201 bp, Homo sapiens
aattatatgttattaaggcattaggtgtattatttttcaaattacgaggttaaaagtcttattccatcattagctttaaaaaaatttttgatgcataatagatgtacatatttttggatgcatgtgataatttgatacaatcatataatatataaagatgcaatcagggtaactggaacatttatcaccttaaatatttat

SEQ ID NO: 331452 - DNA, 201 bp, Homo sapiens
gtttttagcatagtttattcattcttcttagataacagtgccttgaatttttatactaacaagtattttcttatatctgtaaatatcagaaatacgtatawttttagtgaatactgaagctcacatttaccaaacaattattttctcttaggtttatcaagagctataagaaatttggtggtcctctggaaaggtaaatac

SEQ ID NO: 331453 - DNA, 201 bp, Homo sapiens
ttacctggatatttttcctcatttattaaccacttacgtagctttcttaagtaaaattttaattttgcattgttggtgtaatacacatctgaattaaagcyattcagtgaatttttatcagcacttggaatgtgaggaagtgtaatataattgataattattgtggagacacttcctgtggtagcttcagaccttcttttg

SEQ ID NO: 331454 - DNA, 201 bp, Homo sapiens
ataaaaatgatattagattgttctacaatacttgataggtggactggtctgagaatttctgcagattatttagcatgttaatagtataaattacttttttrttgttctgttaactgctcttagttctgtgatgctactaattttgttgagcagtagggcaaaataaaatcattcctagaggattattagatgtcatttggt

SEQ ID NO: 331455 - DNA, 201 bp, Homo sapiens
acttttataattttaatgaatcattctgactactttgtggttgattgactgtagtgaggaaagagctatagcagggggagataagacagaatgttgagtartcctggttaagaggtgaaggtttctggaatcacaggcgtgagccacttcgcccggctgtgatagttagccttaatgggtgctttctgtataccagacctt

SEQ ID NO: 331456 - DNA, 201 bp, Homo sapiens
ttcatgaactatacctcagagttaacaaatatgatgagggaaagtttctctttacagaagtgtaatgaagaaaagatgttttgggtaactgatgaatgatrtcaccattttactgcctcttattaatggaggaagacatatcatcatcagtggctgctaaaaatgctaggtatgaagtgatggggagctttataatggatg

SEQ ID NO: 331457 - DNA, 201 bp, Homo sapiens; identical to SEQ ID NO: 69091

SEQ ID NO: 331458 - DNA, 201 bp, Homo sapiens
tattagtgatgctacattcaatcaccaggacatggtgtccggtttctccactgtgatttctaattcatctgttacagctaagaagcaatttgtgagaagayactttgagtctatgtaaattatcctactcagcaaacttcccctagatgtagtatccattgatgattttttgcccaaaccagcattttctgtgatgattgc

SEQ ID NO: 331459 - DNA, 201 bp, Homo sapiens
aatttacagttagagttgaagtgtcattcctttcctatcccgttttctttctttttcaccagaagtaaacactgtattgaatttggtgttaataacatatrtatttgattttggagtctttttgttgattggtcttgctagatgtttattagttttaaaaactgcctttctgtttaattagtaccatactgcttacgttca

SEQ ID NO: 331460 - DNA, 201 bp, Homo sapiens
ttcgtggatggcttgtaggtgattcttcagtgttgtactgaaatctttaaaggtggaaatggtgtgtcttggttcattattcttgccccaaattttttacrtaaaaaatcagatatagtgtatattctattaccttttcaatttttttcacaaaataaaaaccaagtgcaaactggttaagtattatttaaatgttatcat

SEQ ID NO: 331461 - DNA, 201 bp, Homo sapiens
gatggagacatgggggtggacaagaaacaggaaagttttggcaattaggaagattaagaaaaaatgttagatagaaaactaaatagtggtatttgtatttkatctgaaacttggacttttctttttctttttttttttttgagacagagtcttgctctgtcgcccaggctggagtgcagtggtgtgatcccggctcactgc

SEQ ID NO: 331462 - DNA, 201 bp, Homo sapiens
tcttgaactcatgggctcaagcagtcctcccaccttggcctcccaaagtgttgggattacaggtgtgagctgccacacccggcctcacattttcttattcrtagttggaatggaatggttagtaggtagaaatacctagaggaaacaaaggaaccaaactattcataaaataggagataagactcgagagtaaatcttcta

SEQ ID NO: 331463 - DNA, 201 bp, Homo sapiens
gccttgatttgataatgtttgcctcatgaaatgagttgagaagtgtttcttcctcttttattcatcttttcaaagaacctgctcctggtttcattgatttktgtgtgtgtgtgtgtttttaatttcatgagtttccacaatttattatttcttcctttctgcttttgatttaatttgctgttttctttcttttcttttctt

SEQ ID NO: 331464 - DNA, 201 bp, Homo sapiens
aaattatatgttattaaggcattaggtgtattatttttcaaattacgaggttaaaagtcttattccatcattagctttaaaaaaatttttgatgcataatagatgtacatatttttggatgcatgtgataatttgatacaatcatataatatataaagatgcaatcagggtaactggaacatttatcaccttaaatattta

SEQ ID NO: 331465 - DNA, 201 bp, Homo sapiens
gttgctaacccagccttttttttttttctttttaaatggagtctctcactgtctcccaggctggagtgcagtggcgcgatcttggctcactgtaacctccrcctcatgggttcatgtgatcctcctgcttcagcctctcgagcagctgggactacaggcgcatgccaccacacccagctaatttttttttttttttttttt

SEQ ID NO: 331466 - DNA, 201 bp, Homo sapiens
ctggtttcattgatttttgtgtgtgtgtgtgtttttaatttcatgagtttccacaatttattatttcttcctttctgcttttgatttaatttgctgttttytttcttttcttttcttttttctttggtgacagcatcttgctctattgccaaggctggagtgcagtggcacaattctggctcactgcaaccttaacctccc

SEQ ID NO: 331467 - DNA, 201 bp, Homo sapiens
tctagatccccagcttatcctcttgtcctactttctcttcttttgcaccgtgactagacagtgttgatttaatgaacccactaatgtatttcctactgatkccacaacatgccctaatatagttcaactattgttcatgctctttaaatatattggttttttaccatcctcttgttctccctactttgagctgttgacatt

SEQ ID NO: 331468 - DNA, 201 bp, Homo sapiens
ggctgaggcaggagaattgcttgaacctaggaggtgaggtggaggttgcagtgagccaagataaaaagagtgagactccgtcaaaaaaaaaaaaaaaaaawatatatatatatatatatatatatatttagtctccaatcccatctaggttgctgcaaatgccattatttcattcttctttatggctgagtagttttccac

SEQ ID NO: 331469 - DNA, 201 bp, Homo sapiens
gaggctgaggcaggagaattgcttgaacctaggaggtgaggtggaggttgcagtgagccaagataaaaagagtgagactccgtcaaaaaaaaaaaaaaaawatatatatatatatatatatatatatatttagtctccaatcccatctaggttgctgcaaatgccattatttcattcttctttatggctgagtagttttcc

SEQ ID NO: 331470 - DNA, 201 bp, Homo sapiens
attataaattgcgtggggttcattgttcgttttgaagaatattggctcaaatactctttaaaatataataagtgggataaaagcttgatataatagtgatycaggtttggtttaggaaattttgcattccatatttttaaaaagtcgggaaaaattaatatatgtgaacacatctcattgaggtaaaacttaacctcagca

SEQ ID NO: 331471 - DNA, 201 bp, Homo sapiens
ctgtaatcccagctactcgggaggctgaggcaggagaattgcttgaacctaggaggtgaggtggaggttgcagtgagccaagataaaaagagtgagactcygtcaaaaaaaaaaaaaaaaaatatatatatatatatatatatatatatttagtctccaatcccatctaggttgctgcaaatgccattatttcattcttct

SEQ ID NO: 331472 - DNA, 201 bp, Homo sapiens
gaatcaagcaaccttttttaattaatccttagtactgcttttatacaccatttctaaatgctttaactgcttgtatttgggaaccgattttgttttggcargggttgaaacgaattcttgttatctatcaactaagttttttttgccacattatttttaaggtcattaataaaagttgtacttatctaacagatgtggaaa

SEQ ID NO: 331473 - DNA, 201 bp, Homo sapiens
ctctactaaaaatacaaaaattagctgggtgtggtagtgcctgcctgtaatcccagctactcgggaggctgaggcaggagaattgcttgaacctaggaggygaggtggaggttgcagtgagccaagataaaaagagtgagactccgtcaaaaaaaaaaaaaaaaaatatatatatatatatatatatatatatttagtctc

SEQ ID NO: 331474 - DNA, 201 bp, Homo sapiens
aaatggagatctataaatgtcatacatgtatatatacacacataaacattctaatatcttgtgtgaagacttcattatcagtattttctaagaattatctstgcttttttgtaagtttgtgaagtcacctaaagattcttaacacgtgtgcatttattttagcaaaacagtgatcaaaacagcaacttgaatcctcacgtg

SEQ ID NO: 331475 - DNA, 201 bp, Homo sapiens
aaaacaaaaaacaaagagttagagaccagcctggccaacatggtgaaaccgcatctctactaaaaatacaaaaattagctgggtgtggtagtgcctgcctrtaatcccagctactcgggaggctgaggcaggagaattgcttgaacctaggaggtgaggtggaggttgcagtgagccaagataaaaagagtgagactccgt

SEQ ID NO: 331476 - DNA, 201 bp, Homo sapiens
aggaaaattaatatccttaagagtttgttccatagagggctgtgtatgtgtatatgtgtttgtgcctggagggaaggagttccatgaaaaaaactaaataytttccaccagactaacttaatttgcctttttttaaattcttctagaaacctgtggatttttgtatctaagtttactgaatttgatgcaagaaaattacat

SEQ ID NO: 331477 - DNA, 201 bp, Homo sapiens
aattagctgggcgtagtggcgggcgcctgtagtcccagctactcgggaggctgaagcaggagaatggtgtgaacccgggaggcggagcttgcagtgaaccragatcgcgccactgcactccagcctgggtgacagagcgagactccgtctcaaaaaaaaaaaaacaaaaaacaaagagttagagaccagcctggccaacat

SEQ ID NO: 331478 - DNA, 201 bp, Homo sapiens
agtattgtagaaaatgtgaacagatatttactattccattttacagaagaaaaaaatggattcagatgaaaagcattttagggctgggactggagaatgasaaaggaaacacctaggacctgaactgtttaaaagaggcactaattcttaggtttgtgtaagtgctgacgcttgcctcagctctggtgctttgttcaagat

SEQ ID NO: 331479 - DNA, 201 bp, Homo sapiens
cctcagcctcacaagtagctgggattacaggcgcgtgccactgtgcccagctagtttttgtagttttagtagagatggggcttcaccatgttggctaggcyggtcttgaactcctgacctcaggtgatccacctgcctcagcctcccaaagtgctaggattacaggcatgaagccaccgcgcccagccaagaattttactc

SEQ ID NO: 331480 - DNA, 201 bp, Homo sapiens
tggagtgcagtggcgaatctcagctcgctgcatcctccgcctcctgggctcaagctatccttccacctcagtctctttggtagctgggactacaggcccaygctaccaggcctggctaattcttgtattttttgtagagatggggtttcaccatgtcagccaggctggtgttgaactcctgacctcaaggaatctgcctgc

SEQ ID NO: 331481 - DNA, 201 bp, Homo sapiens
aaaataaaaataaaaagtaaaaaaaataaactgggcatagtggcactcggttgtagtcccagttacttgggaggctgagttgagtggatcacttagctcargagtttgaggctgcggtgagccatgatcatgtcactagactctagcccaggcaatagagtgagactctgtctcaaaaaaaaaaaaagggaaagaaaaaac

SEQ ID NO: 331482 - DNA, 201 bp, Homo sapiens
ttctcattttaaagtgtaaagaaagaatgaggcctgttaaagcagctttgaaacaacttgataggcctgagaaaggcctttcagaaagagaacaactagarcatactagacaatgtttaataaaaattggagaccatatcacagaatgtctaaaagagtatacaaatcctgaacaaattaagcaatggagaaagtaagtga

SEQ ID NO: 331483 - DNA, 201 bp, Homo sapiens
gggcacagtagctcacccctgtaatcccagcactttgggaggccaatgcaggagaatcgcttcagaccaggagtttgagaccaccctgggaaacagtgagwctgctgtctgtacaaaaaaaaataaaaataaaaagtaaaaaaaataaactgggcatagtggcactcggttgtagtcccagttacttgggaggctgagttg

SEQ ID NO: 331484 - DNA, 201 bp, Homo sapiens
acttactcaaagactgattttaaatgataacagaaaggcttgctctcctgaagaaaatctaaaggggaaagaaccctgatgtataagatttgtgaagtgaratttaattgcttattttgctatcaaacagtgttataatattatactcatgtaaatatcattgaaggaggtagaccttgttgaatttaggtttttaataca

SEQ ID NO: 331485 - DNA, 201 bp, Homo sapiens
aacgtagaagagtaccattagttgaggtttttgaaaacacctttattgatacgtaattcccatatcatacagtttactcatttaaagtatacaattcagtrgtttttactatgttcacagatgtgtataattgttcgacaggtggttttagaacattttcatcagaaagaacctgtagcctttagctattcctcttgtcct

SEQ ID NO: 331486 - DNA, 201 bp, Homo sapiens
ggaggtatatgtgcaggtttgttacatgggtaatattgcatccaggtagtgagcatggtacgcagtgggtagttttcaacccatgttcccctccttccccmctctagtagtcgacagtgttgttacatgtttatgtccatgtgtgctcagtgtttaacttgcacttgtaagtgagaacatgcggtgtttggttttctgttt

SEQ ID NO: 331487 - DNA, 201 bp, Homo sapiens
tcatggatgttgaacttaaactcttcaaggtactttttggcaactaaggtaataagatactgccataaatttctggaaaaattcttagaatttttacctcyagagaaattaataataaattttttctggataaggaaaaatattctttattcttgattacctcttagggcattgagcattgtccatgggtttcgttttgct

SEQ ID NO: 331488 - DNA, 201 bp, Homo sapiens
caagtgtttttgttgttttgagatggggtttcactctgtctcccaggctggagtgcagtggtatgatcttggctcactgcaactgggaccacaggagcacsccaccactcctggctaattttttatattttttagtggagacagggttttactgtgttgccaggctggtcttgaactgagctcaagtgatctgcctccctt

SEQ ID NO: 331489 - DNA, 201 bp, Homo sapiens
tttatttagaggctgacggtattagtagattgatccatcttatgtaattggtaaaacacttagagaaatacttttcgtgaatttgcatctgcaagattatwatcacttgttcatatgtaatgaagttcaaggttttccagtaatctcttaataatataaataaggaatacttattgttaaataacataagtaatagcatca

SEQ ID NO: 331490 - DNA, 201 bp, Homo sapiens
attaaaggatttagtgatgcagaaattaggcggtaaggtgttataagacaatcgcttcaacttggttttagtagagtgtgaaactaaaatgtaaaaacgcygtaattttcaaaaattgtgatgaagttttagaagaggcaaatctgttatttgagtaggaattgggtggttctgcttttgggtatttgttataactgaaca

SEQ ID NO: 331491 - DNA, 201 bp, Homo sapiens
tgaactcctgggctcaagttatcttcctgccttggcctcccagtcatgctgggattacaggcatgagctgctgcactcagccacatttttcttttatgatktaaattactttattgatcaatgtttcttcacagttctgatctcctcaggaaaaatgcctagaggttatgttgctgcgtcagtagaataacttttggaggc

SEQ ID NO: 331492 - DNA, 201 bp, Homo sapiens
accattccccgaagggtagagctttttgttttttcttttcttgcaaccgtattagatcttattctgttccctcagttgagcagatgagaaaggtctggcarggcttccttcctgtttccacaaaggtgactgctcactttctccaaggctgtaccatggaggaaagttttctccagtcttccttctcatgagcacctggtg

SEQ ID NO: 331493 - DNA, 201 bp, Homo sapiens
gtccctgccctgctaccattccccgaagggtagagctttttgttttttcttttcttgcaaccgtattagatcttattctgttccctcagttgagcagatgrgaaaggtctggcaaggcttccttcctgtttccacaaaggtgactgctcactttctccaaggctgtaccatggaggaaagttttctccagtcttccttctc

SEQ ID NO: 331494 - DNA, 201 bp, Homo sapiens
gtgtccggtttctccactgtgatttctaattcatctgttacagctaagaagcaatttgtgagaagacactttgagtctatgtaaattatcctactcagcaracttcccctagatgtagtatccattgatgattttttgcccaaaccagcattttctgtgatgattgcataattatggttttctaagactaatacccttacc

SEQ ID NO: 331495 - DNA, 201 bp, Homo sapiens
tgagccaaaaaacaaagtcaaaagcagaaaacctcaaaataggtatggtctcagtttggtgctgaaaattgattgtggaaagtatttgttctttttgtatrtagtttctcaaatcttgtttttttttctctttgcactttcctagatctaagtcaaaaaatggaaagaagattcttggacaaaaaaagagacagattgatt

SEQ ID NO: 331496 - DNA, 201 bp, Homo sapiens
aaagtttctctttacagaagtgtaatgaagaaaagatgttttgggtaactgatgaatgatgtcaccattttactgcctcttattaatggaggaagacataycatcatcagtggctgctaaaaatgctaggtatgaagtgatggggagctttataatggatggataaggctggcagtacctgaatccacagatttatactaa

SEQ ID NO: 331497 - DNA, 201 bp, Homo sapiens
ttatagtatttatgcttttatagtaagtagaagaaacaaattagaagacatctttgtattttagtgttcattacaataatttctttgagaacctctgtcarcactatgaacacatcagttgtagaatggctgttatttgaaggggtcaaataattaaaaggaaaaggcagatttatagtatatatttcacaggcttatgca

SEQ ID NO: 331498 - DNA, 201 bp, Homo sapiens
ctggcccaaaacggtcatctccttttacttttcttacagcattagtgattaagtctttagccagatacctttacatttattatttgtagttaataaaagtrgtatattctatataatacctatcaattttatttaacttcataaaaacatatacacatgatgtaaaaaggtttctttgtatatttgaatatttccttgcat

SEQ ID NO: 331499 - DNA, 201 bp, Homo sapiens
tgcctcagcctcacaagtagctgggattacaggcgcgtgccactgtgcccagctagtttttgtagttttagtagagatggggcttcaccatgttggctagrctggtcttgaactcctgacctcaggtgatccacctgcctcagcctcccaaagtgctaggattacaggcatgaagccaccgcgcccagccaagaattttac

SEQ ID NO: 331500 - DNA, 201 bp, Homo sapiens
gaagaagaagaaagacaaaaggaacttgaagaaatttatatgctcccaagaatgagaaattgtgcaaaacaggtgattttgcaattttaaagatatttctrtaaagtaagagtattcaacctgggctgattttgtttgtttctacgaggtatcagtccatagttttcttttcttgtaatggccttgatttgataatgtttg

SEQ ID NO: 331501 - DNA, 201 bp, Homo sapiens; identical to SEQ ID NO: 69093

SEQ ID NO: 331502 - DNA, 201 bp, Homo sapiens
aagctagatgaagggaactcagtatttttgcaacctttctgttaagtcaatttatttcaaaatgaaaaaatatctttaagtcatgggacaagtagttcatrctttaaaaatggagatctataaatgtcatacatgtatatatacacacataaacattctaatatcttgtgtgaagacttcattatcagtattttctaagaa

SEQ ID NO: 331503 - DNA, 201 bp, Homo sapiens
taaaagctactttgcttagcctgagtaccttcttaataaccacctgaccacatttcttttttctttttttttttttttgtgacagaatctcgttctgttgyccaggctggagtgcagtggcacggtctcagctcactgcaagctccgcctcccaggttcacgccattctcctgcctcagcctcccgagtagctgggactac

SEQ ID NO: 331504 - DNA, 201 bp, Homo sapiens
attttatttttttgaaatagggtctcacttttgcctaggctgcagtgccagtggcatgatcacagctcattacagtctcctgggttcaaacagtcctcccmccttgacctcctgagtagctgggactacaggtgtgcgccaccatgcttggctaattttttttttttttttttggtatagaatcaggatctcactgttgcc

SEQ ID NO: 331505 - DNA, 201 bp, Homo sapiens
agtttttaaaaaaccatttattgtttggttatttaaataatatttacaggagtagagggctgggcacagtgggtcgcccctgtaatcccagtactttgggkggccgaggccgatggatcaggagttctagacctgaggtcaggagttctagaccagcctggccaacgtggcaaaaccccatctctactaaaaatagaaaag

SEQ ID NO: 331506 - DNA, 201 bp, Homo sapiens
acaggcatgagctgctgcactcagccacatttttcttttatgatgtaaattactttattgatcaatgtttcttcacagttctgatctcctcaggaaaaatkcctagaggttatgttgctgcgtcagtagaataacttttggaggcttttgatataatgtctgattaccttttaaatcaaaatatccaccagaggtatatat

SEQ ID NO: 331507 - DNA, 201 bp, Homo sapiens
aaataattaaatgtgatatgcacctacacgcatatacatgtatgaatgaaggaatattatatcattaaatcatatttgtacgaaataataacagaaatctcaacataatatttttgaaagagtagatggccactatacacaatgtagtttgtgtgtgtgtgcaagcatgcatacatgtatgtttgcacaaaaacattcagg

SEQ ID NO: 331508 - DNA, 201 bp, Homo sapiens
acattcttccagtcactgggagtattggagacattcaaagctgctgcagctcctatcttccattttatttatttgagccatattttttatctctggacttwtatttttatctcctgcaggttcacaggctggaatttcttctctctttttcaagggtaaccgtttttgtttttgttttttgtttttgtttttgttttttac

SEQ ID NO: 331509 - DNA, 201 bp, Homo sapiens
gaaataattaaatgtgatatgcacctacacgcatatacatgtatgaatgaaggaatattatatcattaaatcatatttgtacgaaataataacagaaatctcaacataatatttttgaaagagtagatggccactatacacaatgtagtttgtgtgtgtgtgcaagcatgcatacatgtatgtttgcacaaaaacattcag

SEQ ID NO: 331510 - DNA, 201 bp, Homo sapiens
cctactgattccacaacatgccctaatatagttcaactattgttcatgctctttaaatatattggttttttaccatcctcttgttctccctactttgagckgttgacattcttccagtcactgggagtattggagacattcaaagctgctgcagctcctatcttccattttatttatttgagccatattttttatctctgg

SEQ ID NO: 331511 - DNA, 201 bp, Homo sapiens
actctgtgggaaataattaaatgtgatatgcacctacacgcatatacatgtatgaatgaaggaatattatatcattaaatcatatttgtacgaaataataacagaaatctcaacataatatttttgaaagagtagatggccactatacacaatgtagtttgtgtgtgtgtgcaagcatgcatacatgtatgtttgcacaaa

SEQ ID NO: 331512 - DNA, 201 bp, Homo sapiens
aactctgtgggaaataattaaatgtgatatgcacctacacgcatatacatgtatgaatgaaggaatattatatcattaaatcatatttgtacgaaataataacagaaatctcaacataatatttttgaaagagtagatggccactatacacaatgtagtttgtgtgtgtgtgcaagcatgcatacatgtatgtttgcacaa

SEQ ID NO: 331513 - DNA, 201 bp, Homo sapiens
taagagtgagactaaaaagtccaattgcagagcaaaaccaggaagaaataataatgttagagaaaaaagggctgagtgatacgagaccgataatgtagttkggctttaactaggactaggaaatgtttccttacaagccacaactgaaggaaacacttatagtctgatatatagatgtgtcatgtttatatatagttacaa

SEQ ID NO: 331514 - DNA, 201 bp, Homo sapiens
gaactctgtgggaaataattaaatgtgatatgcacctacacgcatatacatgtatgaatgaaggaatattatatcattaaatcatatttgtacgaaataataacagaaatctcaacataatatttttgaaagagtagatggccactatacacaatgtagtttgtgtgtgtgtgcaagcatgcatacatgtatgtttgcaca

SEQ ID NO: 331515 - DNA, 201 bp, Homo sapiens
tgaactctgtgggaaataattaaatgtgatatgcacctacacgcatatacatgtatgaatgaaggaatattatatcattaaatcatatttgtacgaaataataacagaaatctcaacataatatttttgaaagagtagatggccactatacacaatgtagtttgtgtgtgtgtgcaagcatgcatacatgtatgtttgcac

SEQ ID NO: 331516 - DNA, 201 bp, Homo sapiens
attcttggtgcaagtaagtatattttgaatcatctatttaatttgacagagtaagaatttaccaatacaggattcagaaaagatttccatttacataaagrataagactctttggcagtttatatgctagtctttgtatttcctagtttgtataaacaatacttactacatactaggaagaaaatccagtggagttggagt

SEQ ID NO: 331517 - DNA, 201 bp, Homo sapiens
gcgtaaaagggagataagcctgggcatggtggctcacacctgtaaacccagcactttggaaggccgaggcagtggatcacctgaggttaggagtttgagaycaacctggccaacatggtgacactctactaagaaaaaaaacaaaaattaactgggtgtgttggcgagcacctgtaatctcagctactcgggaggctgagg

SEQ ID NO: 331518 - DNA, 201 bp, Homo sapiens
tttgaacaatttaacgtaggttttgcttgtgaaatacatgagactcatattttggcaggaagttaattttctctatacatttttgtttaaaaaagaaggcraaatatttcactgttcatttttgtagagtagtagaaaacagtattgactgaatcctcaggtacattttgagtaatggaatctctgagcttgatgattaga

SEQ ID NO: 331519 - DNA, 201 bp, Homo sapiens
gatggggattttttatgtcacccaggctggtctcgaactccttggcgtaaaagggagataagcctgggcatggtggctcacacctgtaaacccagcacttwggaaggccgaggcagtggatcacctgaggttaggagtttgagaccaacctggccaacatggtgacactctactaagaaaaaaaacaaaaattaactgggt

SEQ ID NO: 331520 - DNA, 201 bp, Homo sapiens
tttacattttaggagactaaattgcatatcagcccttattagtctcaataactgagttcttcagaagcatgtttgggtatgcagtagaggagaatagtagrtctgaacactctttaatgctttaccttcagagtaacattacagagtagctttgattgtttccccaaataaaattggggaaaaaaacaaattaaaatagat

SEQ ID NO: 331521 - DNA, 201 bp, Homo sapiens
aaaaaatgtagaaagtaaaaacaatcagcatatttacattttaggagactaaattgcatatcagcccttattagtctcaataactgagttcttcagaagcrtgtttgggtatgcagtagaggagaatagtaggtctgaacactctttaatgctttaccttcagagtaacattacagagtagctttgattgtttccccaaat

SEQ ID NO: 331522 - DNA, 201 bp, Homo sapiens
acaattggtgcaaaagatacagagcaatgaagcagaagcatagctgaaataggatatagtgtatttgtaagaattcaatgtgtgcctttcatttgaacttmttatgatagcaaaatattaacatccattatttttctctacatgttgattggaatgaaatagacttaatagactaaaaataataatacaggtaaggtactc

SEQ ID NO: 331523 - DNA, 201 bp, Homo sapiens
aaaacttgtctatacttcgtggtagtatacagtgttactcagagtaccagtctgtgatgagataagatgcttgagggccagaatataaatcgacacacagmttccttcatagagaaaaatgttgctaccggccccccgctcaaatctgagctaaaacaatgtgcctagtgacatcgttgacgtatattctgactcagcctc

SEQ ID NO: 331524 - DNA, 201 bp, Homo sapiens
ggtaccatgccttcaacttcttgacttctcaaagtttctaacccaggattttgtacttagtagattttgcatattgtcttagaagaagattacaatcttaytgcttatgttttagccataaaaatctataaaatatgtcataaatctatcaagtatgtaataatctatcacgtataaataaattatcaactatggcagttg

SEQ ID NO: 331525 - DNA, 201 bp, Homo sapiens
ccttggggataattatataatcaactgtttagtccagactatttctgctctatcttggactaaaaattagaaatggaaaaaaggatagtttatgaaatgtyaattgcttttttatgtgtgtgtatacacgttaggaaatatgagaatttgctatttcagatttattgctacagatccacaaagaacttattaataagtgat

SEQ ID NO: 331526 - DNA, 201 bp, Homo sapiens
tattgtggataattatagaataatgctgtgggatctcaggtggatctctgtctttttattttttctaattcgaaaaaggaggggattatattagataattytgaaattctcagttttatttatgagcaatagaatttcccataagtttctatacccccaatactttatttaaaagagtatatatttttgtactcatattat

SEQ ID NO: 331527 - DNA, 201 bp, Homo sapiens
ataaacaaatgaccttggggataattatataatcaactgtttagtccagactatttctgctctatcttggactaaaaattagaaatggaaaaaaggatagkttatgaaatgttaattgcttttttatgtgtgtgtatacacgttaggaaatatgagaatttgctatttcagatttattgctacagatccacaaagaactta

SEQ ID NO: 331528 - DNA, 201 bp, Homo sapiens
aattcttgctctggaaaaagagaattactgtgttgtcttagagtaatacctccatctggtggcattttagaaaattacagaagaggacaggaaacttgtaytttcttgtatatctgtaaactgtattacctgtggtttctcataaagccaaatgaaattacatcaaaagcggagtcaaccatatgtaccagaaatttaatg

SEQ ID NO: 331529 - DNA, 201 bp, Homo sapiens
gtgcttaacaaagcagtggaactacctggttttcagagttgtacaaatgagaagatgttttccaggttttctgaaaccttttatagtttttatttgtactrtttcatcaaactttgtatttatgtgtgtgtatacttcatcatgatgtaaaatgtattatataggtcatggtccaaaaagtttgaaagccgttgcttgact

SEQ ID NO: 331530 - DNA, 201 bp, Homo sapiens
tccccagtctcctttcatctgtgagagtttctaagtctttccttagttttcatggtctaaaccatcttgagaaatactggccaggtatcctgtagaatgtytttgaaatctagatttgtctttttttttttttttttgagacggcgtcttgctctgttgcccaggctggagtgcaatggcacgatctcacctcactgcaac

SEQ ID NO: 331531 - DNA, 201 bp, Homo sapiens
taggtaagtttcgtttctccggaagcagtaacaatggcaactgatgattgttgagctcttgctgtgccttaacctagcatgatgcacatagggcattgtgyattacttgaattgtcacagttcatcctcacaaaacttctgtgatgtatacattgttatgattcccactttccagatggggaaacaagatttatagccatt

SEQ ID NO: 331532 - DNA, 201 bp, Homo sapiens
attgtgtcttgagcaggactagcaagaggctaggtaagtttcgtttctccggaagcagtaacaatggcaactgatgattgttgagctcttgctgtgccttracctagcatgatgcacatagggcattgtgcattacttgaattgtcacagttcatcctcacaaaacttctgtgatgtatacattgttatgattcccacttt

SEQ ID NO: 331533 - DNA, 201 bp, Homo sapiens
ctgttatttgagtaggaattgggtggttctgcttttgggtatttgttataactgaacaaaacaagtttggtgtctaatctttgcatgttatttatttatcrctaaactgcttagactacacaattttttttattaatttgactcaatagtgatcctttcgaataataaaagtagttttgatgcatttgatttttaaaaatt

SEQ ID NO: 331534 - DNA, 201 bp, Homo sapiens
cttttctgtatgtagtcataatgtgtgggcaaacattaatgtgatgttaccccttttactctgcttaagtagctgcttgtttaagatcttgatgactgatkggttatatatggtgcagttttgtgttttaaaatgagtattactttatgatgaatggagaaaatgtttaacctttttttaaaatgggaaatatttaaaact

SEQ ID NO: 331535 - DNA, 201 bp, Homo sapiens
acacaaagttttatgtaactgaagttaagctttttaaagataatgctggaagatttcaaagcatcaatttgcagctgtgtggatttgtggtggtatttgcragcaaatttttcaaatcctggtagacttttttttagtgtgtgtgtggtttgtttttttttaattgagatggagtctcactgttgcccaggctggagtgca

SEQ ID NO: 331536 - DNA, 201 bp, Homo sapiens
tttacagaattggtatataatcttccatttgctctataatgaattaaactcattattattgaatatataaatgaattgtttgtctaccacattgtcctggyttttatgtgtttcctgccatttatgtgaacaagaatatatagagcatgcagtagagtgatattcagatcttgaaatagagtgaaacttaatcttaaatgg

SEQ ID NO: 331537 - DNA, 201 bp, Homo sapiens
tcttgacttctcaaagtttctaacccaggattttgtacttagtagattttgcatattgtcttagaagaagattacaatcttattgcttatgttttagccayaaaaatctataaaatatgtcataaatctatcaagtatgtaataatctatcacgtataaataaattatcaactatggcagttgttactatagattaaatca

SEQ ID NO: 331538 - DNA, 201 bp, Homo sapiens
attctatcactggagaaagttttagacagtgctgagccagacatttgttgaaatattactgtggcccttttttattttcagattggagttttaattatctktgaaggagttaagagttcttgcttgggtcaagtgtttgcaaagaagattctttaaattctgtagctctcaaattttgagttatctgcacattagtttaca

SEQ ID NO: 331539 - DNA, 201 bp, Homo sapiens
taggagactaaattgcatatcagcccttattagtctcaataactgagttcttcagaagcatgtttgggtatgcagtagaggagaatagtaggtctgaacastctttaatgctttaccttcagagtaacattacagagtagctttgattgtttccccaaataaaattggggaaaaaaacaaattaaaatagatgaggatatt

SEQ ID NO: 331540 - DNA, 201 bp, Homo sapiens
gaaattgtatattaaacttgaaaagacactttaatttgaattactattttatcttttaaatgtggtatttctccttaatttaccctaagaaaacactatarttttatcacagtacctattaatggtggtttttctttcgtgaattgaggaaaagaattcaatgggtttatttatttatttatttattccgtgggtgtatta

SEQ ID NO: 331541 - DNA, 201 bp, Homo sapiens
atcctgtttgtaatcccagcactttgagaggctgaggaaggaggatcacttgaactcaaaagttggagaccagtttaggcagcatagtgagactttgtctstaatttataaaaaataaaatttaaaaaaaatttgaggattgagatgcttcatgtaaagggcttaaaatattttctgagataatgagcactgaatatttgc

SEQ ID NO: 331542 - DNA, 201 bp, Homo sapiens
gtgaactctgtgggaaataattaaatgtgatatgcacctacacgcatatacatgtatgaatgaaggaatattatatcattaaatcatatttgtacgaaataataacagaaatctcaacataatatttttgaaagagtagatggccactatacacaatgtagtttgtgtgtgtgtgcaagcatgcatacatgtatgtttgca

SEQ ID NO: 331543 - DNA, 201 bp, Homo sapiens
aaatgtgaactctgtgggaaataattaaatgtgatatgcacctacacgcatatacatgtatgaatgaaggaatattatatcattaaatcatatttgtacgaaataataacagaaatctcaacataatatttttgaaagagtagatggccactatacacaatgtagtttgtgtgtgtgtgcaagcatgcatacatgtatgtt

SEQ ID NO: 331544 - DNA, 201 bp, Homo sapiens
taaatgtgaactctgtgggaaataattaaatgtgatatgcacctacacgcatatacatgtatgaatgaaggaatattatatcattaaatcatatttgtacgaaataataacagaaatctcaacataatatttttgaaagagtagatggccactatacacaatgtagtttgtgtgtgtgtgcaagcatgcatacatgtatgt

SEQ ID NO: 331545 - DNA, 201 bp, Homo sapiens
ctaaatgtgaactctgtgggaaataattaaatgtgatatgcacctacacgcatatacatgtatgaatgaaggaatattatatcattaaatcatatttgtacgaaataataacagaaatctcaacataatatttttgaaagagtagatggccactatacacaatgtagtttgtgtgtgtgtgcaagcatgcatacatgtatg

SEQ ID NO: 331546 - DNA, 201 bp, Homo sapiens
ataggaaggtaaacattgcatgtatcattattagggggattctgggctctttcagaatccacatacatgcaatctgtagtcatatgaagaaaaattagtckttgttaaaatttggttagtaatacattggccatacttgcactttccaggatgagatcagttctgtgaaacatccaaataaaaaaattaaaacagaaagag

SEQ ID NO: 331547 - DNA, 201 bp, Homo sapiens
aactaaatgtgaactctgtgggaaataattaaatgtgatatgcacctacacgcatatacatgtatgaatgaaggaatattatatcattaaatcatatttgtacgaaataataacagaaatctcaacataatatttttgaaagagtagatggccactatacacaatgtagtttgtgtgtgtgtgcaagcatgcatacatgta

SEQ ID NO: 331548 - DNA, 201 bp, Homo sapiens
aatatggcatgtttttgtgtactttacatttaaaatttatattttaggtaccgaagtctgtgtgtgtgtgtgtgtgtgtgtgtgtgtgcgcacgtgcgcaygcacttatagttcataacagtctcaattatagaacagaattctaactgtccagtagatattatatagcactagaggcatagagcaaaggtccttcctttt

SEQ ID NO: 331549 - DNA, 201 bp, Homo sapiens
taaactaaatgtgaactctgtgggaaataattaaatgtgatatgcacctacacgcatatacatgtatgaatgaaggaatattatatcattaaatcatatttgtacgaaataataacagaaatctcaacataatatttttgaaagagtagatggccactatacacaatgtagtttgtgtgtgtgtgcaagcatgcatacatg

SEQ ID NO: 331550 - DNA, 201 bp, Homo sapiens
aaaatttgtttctacttctctctgatcctttttttaaaggaataataatggctagtatttattatttacattaatattatatttgactcattaagttatawcacctttattgagtttctgatgttggtacagcttattaccaatagactaaggatcaggtaggaatatgtgttctagcccttggatttaatgtttatgaag

SEQ ID NO: 331551 - DNA, 201 bp, Homo sapiens
ataaactaaatgtgaactctgtgggaaataattaaatgtgatatgcacctacacgcatatacatgtatgaatgaaggaatattatatcattaaatcatatttgtacgaaataataacagaaatctcaacataatatttttgaaagagtagatggccactatacacaatgtagtttgtgtgtgtgtgcaagcatgcatacat

SEQ ID NO: 331552 - DNA, 201 bp, Homo sapiens
gtgcggagtactttttgagaagtcaagccttacatagcctacatgactgttttacttggagtcattagaatgcttaagggacagcgtcataggttgccaascttactgaaaaagaaggaaaaagacaccaaaaaggaggtgattggaaacttagagcaactgttagaagtttacctgtgaccataatgtcaataactacct

SEQ ID NO: 331553 - DNA, 201 bp, Homo sapiens
aataaactaaatgtgaactctgtgggaaataattaaatgtgatatgcacctacacgcatatacatgtatgaatgaaggaatattatatcattaaatcatatttgtacgaaataataacagaaatctcaacataatatttttgaaagagtagatggccactatacacaatgtagtttgtgtgtgtgtgcaagcatgcataca

SEQ ID NO: 331554 - DNA, 201 bp, Homo sapiens
atctcagcatacatgttaaaactgatgaatcatagctttcagaagtaggattctgttttttttttctagttttagagagggatagagaaaactcgtttagygtgcggagtactttttgagaagtcaagccttacatagcctacatgactgttttacttggagtcattagaatgcttaagggacagcgtcataggttgccaa

SEQ ID NO: 331555 - DNA, 201 bp, Homo sapiens
aaataaactaaatgtgaactctgtgggaaataattaaatgtgatatgcacctacacgcatatacatgtatgaatgaaggaatattatatcattaaatcatatttgtacgaaataataacagaaatctcaacataatatttttgaaagagtagatggccactatacacaatgtagtttgtgtgtgtgtgcaagcatgcatac

SEQ ID NO: 331556 - DNA, 201 bp, Homo sapiens
taaattatctcagcatacatgttaaaactgatgaatcatagctttcagaagtaggattctgttttttttttctagttttagagagggatagagaaaactcrtttagcgtgcggagtactttttgagaagtcaagccttacatagcctacatgactgttttacttggagtcattagaatgcttaagggacagcgtcataggt

SEQ ID NO: 331557 - DNA, 201 bp, Homo sapiens
gaaataaactaaatgtgaactctgtgggaaataattaaatgtgatatgcacctacacgcatatacatgtatgaatgaaggaatattatatcattaaatcatatttgtacgaaataataacagaaatctcaacataatatttttgaaagagtagatggccactatacacaatgtagtttgtgtgtgtgtgcaagcatgcata

SEQ ID NO: 331558 - DNA, 201 bp, Homo sapiens
atagaatttcccataagtttctatacccccaatactttatttaaaagagtatatatttttgtactcatattattgaaattttgagttgaaatataatcctrcaacagaattaattacatggaaggatcttgtgcttttgttttcagctactggtgctactacaaccatctatgcagttgaagcagatggtgacccaaatgc

SEQ ID NO: 331559 - DNA, 201 bp, Homo sapiens
gggaataaacccaggtaataaggtcagtaagagtttttattgccctaaaagattagatcacagattactaagaattttttaaaaaggaaaatgaggtcagktagtttgtaatactatttgaatttttcaattttgttaataaacttaagccatgtgtaataaatcacgacagttgattttgcacattttcaaaatatacct

SEQ ID NO: 331560 - DNA, 201 bp, Homo sapiens
agaatggaagctgaacttctgaccatagcttgttctgtagctccgaagttggatccaagtaaataaagcaacataaaatcaaaattagtaagaaagcagtstctatttaaaaaagcagatggtcctaactgtgccaaattggtggtcacacagagataaattattttacctgactttatagcagttatttgactgtagaag

SEQ ID NO: 331561 - DNA, 201 bp, Homo sapiens
caggagaattgcttgaacctaggaggtgaggtggaggttgcagtgagccaagataaaaagagtgagactccgtcaaaaaaaaaaaaaaaaaatatatatawatatatatatatatatatttagtctccaatcccatctaggttgctgcaaatgccattatttcattcttctttatggctgagtagttttccactgtgtatg

SEQ ID NO: 331562 - DNA, 201 bp, Homo sapiens
ttttgatgataaagacttcatctcatctcagtctgtccccagtgcctaacacatgatagttctcaataaagtttattgagtaaatgaaatattttgcttayctattatgttaagggaaaaataaagttgtatgtcaggaaaaaaaatcttttaatatccttgctaaaatttctcgcaaggtatgcaagtaaaatatggcct

SEQ ID NO: 331563 - DNA, 201 bp, Homo sapiens
aagtgattccaggaaaagaccctattcttcttttagtaatggtaaagaccatcgtgattgggatcactacaagcaagacagcaggtaaacttggcagtcamtttagaaattttgcttatgcatgtttttctccttatcatgatgttcctgtatttgacctgtcagccaattcaatcttcatgcagtcaaaacaaatcttgt

SEQ ID NO: 331564 - DNA, 201 bp, Homo sapiens
tgtctcgaggttaaatagttcttttgatgataaagacttcatctcatctcagtctgtccccagtgcctaacacatgatagttctcaataaagtttattgartaaatgaaatattttgcttacctattatgttaagggaaaaataaagttgtatgtcaggaaaaaaaatcttttaatatccttgctaaaatttctcgcaagg

SEQ ID NO: 331565 - DNA, 201 bp, Homo sapiens
caagacagcaggtaaacttggcagtcactttagaaattttgcttatgcatgtttttctccttatcatgatgttcctgtatttgacctgtcagccaattcartcttcatgcagtcaaaacaaatcttgtgaaataaaggtgttgtatataattaagaaaaatgtatatattttaagaactgaatttctctataaaatggatt

SEQ ID NO: 331566 - DNA, 201 bp, Homo sapiens
ttgtcagaaggacttaagagctaataaagggtttcctgttggaaaaagatgggagagtttggaaatcaacaaggatgctgacagtagattaaaatttatamaataagttcaaatccatgagttcataatgggacttaaaaaattattggtctactttgaaggatgctggcgatttaactcattttgaaaactggtaaataa

SEQ ID NO: 331567 - DNA, 201 bp, Homo sapiens
agacaattaagatgcagtcatataaatgatgtgtaaaataaaaagcagctaattatctaaaatagccatgtgaaattagatgctattttaggggttttgtrtggttcgctttagttttatgaatcaaatagtttttccaaagagatatatccagtgatttttgagttaattaagtaagttttataatgcaacactgagttt

SEQ ID NO: 331568 - DNA, 201 bp, Homo sapiens
ttacacagccttctctgagcttgaatgtatttgtattatgaaaataaaaggattaaataagaacctaatatctggcacatagcaccaactaataacatctyttcctttttttattaaataattaaataattagttctatgtggcagaaacctgaggctcatctaaccagtgtacagatataaatacaactagaaggagaag

SEQ ID NO: 331569 - DNA, 201 bp, Homo sapiens
aacattaaggaattttttaaaaaaaaaactactactctcatcgtaagaaatgagtggcttttttctgaacttcctttcagttctccatatatattcgtaayttgtacacttgttattacagtgttggcatttgtttacacagccttctctgagcttgaatgtatttgtattatgaaaataaaaggattaaataagaaccta

SEQ ID NO: 331570 - DNA, 201 bp, Homo sapiens
ctagaggacaaacaaaatagatactgggtggatagggaggggcacattttctgccacaaacattaaggaattttttaaaaaaaaaactactactctcatcrtaagaaatgagtggcttttttctgaacttcctttcagttctccatatatattcgtaatttgtacacttgttattacagtgttggcatttgtttacacagc

SEQ ID NO: 331571 - DNA, 201 bp, Homo sapiens
ttgtatctcattggccagaacctactcacatgactacactgagctgtagaagatgctgagaaaggtaatctttagctgggtgggcatgtgtcaacctaaaytggggggatggttgttttactagaggacaaacaaaatagatactgggtggatagggaggggcacattttctgccacaaacattaaggaattttttaaaaa

SEQ ID NO: 331572 - DNA, 201 bp, Homo sapiens
tttgaagtgaaaacattaaacttttcactggagctacttccccttctctatgtggtctactaatgaattaggtgaaattgtatctcttgccactttttttycccccacatttcttttttaatcttcggactttttcatgtaactgctggaatggaaaaattcctgctgtgcacaatgcatgaatttcctctccattaatct

SEQ ID NO: 331573 - DNA, 201 bp, Homo sapiens
ctaaaataaaggtcctgacttaatgatcttcaagacctagttagggagagatatatgtataaaaataattgtaatactgtgaaggaattattagtaacatsagcaaagtattgtgggaacatgagctagggcaatgatctgtgcctggggaaaccagggaatggctacctaaaggacatagttttgaatagtcttattttt

SEQ ID NO: 331574 - DNA, 201 bp, Homo sapiens
tataaggggtaccaaaatttctaatcatcttttatctattccagttttagaatgtattttatagtgaaggattaacccattgtccaccctagcatctggtrcatactacattgtttatttcacattttttaaccaaatgactcacaataaaggcagttttttcttaggtgcagtacacacccataggtatatgcagacaga

SEQ ID NO: 331575 - DNA, 201 bp, Homo sapiens
caggtctcatacctggaggccttcagtaaggtatgtctgggtggttttgtacaggcaagtgggagctgagcctgaccaggaggctgtatgtgggcttgcgstcatgccctgatcagcagcgcctgcaaggaggttcttttcttcccagttctgtgcccattgcacagctgcaacctctcatcaccccaaaccaggtgaaga

SEQ ID NO: 331576 - DNA, 201 bp, Homo sapiens
gatcacttgagccagggaggcggaggctgcagtgagccaagatcatgccactgcactccagcttgggtgacagagtgaaaccctgtccttaaaaaaaaaaatgtgaaggattcctgcacttgtgaaacttatatcctaactggggagatagttgttaaaaagagtaagtaaaagatgtattattgcatttggtggtgattg

SEQ ID NO: 331577 - DNA, 201 bp, Homo sapiens
cgcatggcctgttctgctcatttaagtcactgcctacttgtgacagtacaggcaaacctttgctttattgcccttttgcagatgctgtattttttttttttaccagttgaaggtttgtggcaaccctgcactgagcaagtctactgacgccatttgtgtaacagcatatactcacttcatgccacattttggtaattctca

SEQ ID NO: 331578 - DNA, 201 bp, Homo sapiens
ctgcaacctccctctgccgggctaaggaaactcttctgcctcagcctcccgagtagctgggtttacaggcatgtgccaccatgcccggctaatttttgtawttttttttagtagagacggggtttcaccatgttggccaggctggtcttgaactcctgacctcaggtaatccgcccccctcggcctcccaaagtgctggat

SEQ ID NO: 331579 - DNA, 201 bp, Homo sapiens
ttaacaaccttagaaggagaaagaaaccaatttatattcagttatctgaagttgataaaaccaaggaagagcttagagagcatattaaaaatcttcagacrgaacaagcatctttgcagtcggaaaacacacattttgaaagtgagaatcagaaacttcaacagaaagttaatgactgagttatatcaagaaaatgaaatg

SEQ ID NO: 331580 - DNA, 201 bp, Homo sapiens
gaggatggcttgagcccaggagtttgaggctacagtgagttgtgatcccaccactgcacttcagcctgagtgataaagcaagatcctgtctcaaaaaaaaagaaaagaaaagaaagcagaataagggaataagatagggattgacatgggtggagaggaagatgctgttttaagtaggtggtcagggaatgatttctcttg

SEQ ID NO: 331581 - DNA, 201 bp, Homo sapiens
ccacaagcattgcttatgtttattctctggtcatcctggtggttgctgtggctgagaaggcggagaggagccctgtgacattcttcgacacgccccccatkctctttgtgttcattgccctgggccggtggctggaacacttggcaaaggtaacagcagcttcaggttcagaaaagagctgctccttcagtaaacaaatct

SEQ ID NO: 331582 - DNA, 201 bp, Homo sapiens
ggttcctcttccgcttggaccctggggagtgcagcagctgcgtcaggaagtgagggcgcccttgctctgtacctggagccatacctggatcaagtttgggytctgccagttgccagctctggccttagggtgaatcttaagctctcagggtctctaaggcgccatctgtaaaacagagtcagtaacacttcccagatagga

SEQ ID NO: 331583 - DNA, 201 bp, Homo sapiens
gatcacctctggttgagaaccactgagatatatcaattggactgaaaattgaaaatgcattgagcatatcatttggcaattattattgattaattcccatygtgccctttattatcactcagctgctaggagaggaagcagcaggggctattatcactgcccttctaggtgcagaggcaggtgtgagacacacagtcctat

SEQ ID NO: 331584 - DNA, 201 bp, Homo sapiens
gtctcaaaaaaaaaaaaaaaaaaaaaaaggtaaaacaaaggtcttttcgtgctgatttggagagattcccaggatacattattaagtgaaaaaaaaaaaaatgactacaaatgtagggcgtcttcttcttcttcttcttcttgttcttcttcttcctcctcctcctcctcctcttcctcttcttcctcttcttcctcttct

SEQ ID NO: 331585 - DNA, 201 bp, Homo sapiens
cccaggaggtggaggttgtggtgagccgaggacatgccactgcactctagcctgggtaacagaacaagactccgtctcaaaaaaaaaaaaaaaaaaaaaaaggtaaaacaaaggtcttttcgtgctgatttggagagattcccaggatacattattaagtgaaaaaaaaaaaaatgactacaaatgtagggcgtcttcttc

SEQ ID NO: 331586 - DNA, 201 bp, Homo sapiens
acccaggaggtggaggttgtggtgagccgaggacatgccactgcactctagcctgggtaacagaacaagactccgtctcaaaaaaaaaaaaaaaaaaaaaaaggtaaaacaaaggtcttttcgtgctgatttggagagattcccaggatacattattaagtgaaaaaaaaaaaaatgactacaaatgtagggcgtcttctt

SEQ ID NO: 331587 - DNA, 201 bp, Homo sapiens
ttattaaagattaaaaataaaaacttattttttataaatccagcatagaccaaaatcagccaatcaaatagtttaattagaaagagattatttgaattgcwggggttttttttttttgctctaaaaaattatgacagtgttttagtaggtaaatttcctaatgtgtatacaattgagttagacaatttttatttgcataca

SEQ ID NO: 331588 - DNA, 201 bp, Homo sapiens
tcttccccaggtgtcttcatgcccatcggcattgtgctgcagccctggatgggctcagcggccatggcagcctcctctgtgtctgtggtgctctcatcccygcagctcaagtggtgagtcccctcaggtggagcatctgtgggaggctcccaggaggccttgtcattctgcatgcttagcacagtggaacttgcctctcat

SEQ ID NO: 331589 - DNA, 201 bp, Homo sapiens
aacccaggaggtggaggttgtggtgagccgaggacatgccactgcactctagcctgggtaacagaacaagactccgtctcaaaaaaaaaaaaaaaaaaaaaaaggtaaaacaaaggtcttttcgtgctgatttggagagattcccaggatacattattaagtgaaaaaaaaaaaaatgactacaaatgtagggcgtcttct

SEQ ID NO: 331590 - DNA, 201 bp, Homo sapiens
ccaggtgtcttcatgcccatcggcattgtgctgcagccctggatgggctcagcggccatggcagcctcctctgtgtctgtggtgctctcatccctgcagcycaagtggtgagtcccctcaggtggagcatctgtgggaggctcccaggaggccttgtcattctgcatgcttagcacagtggaacttgcctctcatttccca

SEQ ID NO: 331591 - DNA, 201 bp, Homo sapiens
gaacccaggaggtggaggttgtggtgagccgaggacatgccactgcactctagcctgggtaacagaacaagactccgtctcaaaaaaaaaaaaaaaaaaaaaaaggtaaaacaaaggtcttttcgtgctgatttggagagattcccaggatacattattaagtgaaaaaaaaaaaaatgactacaaatgtagggcgtcttc

SEQ ID NO: 331592 - DNA, 201 bp, Homo sapiens; identical to SEQ ID NO: 69106

SEQ ID NO: 331593 - DNA, 201 bp, Homo sapiens
cctggtgtttggcatccctgtcatggccttaatgatctatatgctgatacccagcaacgagccccaccagtccatggtcctggaccacaacatcattccargactgtccattctaaatctcatcttctttatcttgtgtacctttgtccaggtatatatgagaaagtgggcagacctctcccttccatgctgtgtgtggcc

SEQ ID NO: 331594 - DNA, 201 bp, Homo sapiens
atgtgagtgataagtggcgtttgttgcagggaggagcaagtccccatggagctggtgcagcggggcgatatcgtcaaggtggtccctgggggaaagtttcyagtggatgggaaagtcctggaaggcaataccatggctgatgagtccctcatcacaggtgagatggcttgtttcatgttccctcaggaggatatcatagca

SEQ ID NO: 331595 - DNA, 201 bp, Homo sapiens
gtttgctttccagacgtccatcacggtgctgtgcattgcctgcccctgctccctggggctggccacgcccacggctgtcatggtgggcaccggggtggccrcgcagaacggcatcctcatcaagggaggcaagcccctggagatggcgcacaaggtcagcctgtagcacggctttccccatcctgagagatgaaagtagta

SEQ ID NO: 331596 - DNA, 201 bp, Homo sapiens
tagttcacagtgaaattggaccatttagaaataaccacagcctcttttgaatagatgcagtcccccagaccttctctgtgctgattggaaaccgtgagtgkctgaggcgcaacggtttaaccatttctagcgatgtcagtgacgctatgacagaccacgagatgaaaggacagacagccatcctggtggctattgacggta

SEQ ID NO: 331597 - DNA, 201 bp, Homo sapiens
acctacatctgtgcaggaagtggctccccacactgggaggctccctgcaaaccatgccccggacatcttggcaaagtccccacaatcaaccagagcagtgkcaccgcagaagtgcttcttacagatcaaaggcatgacctgtgcatcctgtgtgtctaacatagaaaggaatctgcagaaagaagctggtaagagatgaac

SEQ ID NO: 331598 - DNA, 201 bp, Homo sapiens
gctggctggttcgctccaggtgtgctctgtgggatgatcgcaatcgcagacgctgtcaagcaggaggctgccctggctgtgcacacgctgcagagcatggktgtggacgtggttctgatcacgggggacaaccggaagacagccagagctattgccacccaggtacagccctttaatgttgcaaactgtgtaaagctcata

SEQ ID NO: 331599 - DNA, 201 bp, Homo sapiens
gtgtcgctcattgaactctcctccctacttgctggcagccttcactgtccttgtctttcagctcctcggtgggtggtacttctacgttcaggcctacaaayctctgagacacaggtcagccaacatggacgtgctcatcgtcctggccacaagcattgcttatgtttattctctggtcatcctggtggttgctgtggctga

SEQ ID NO: 331600 - DNA, 201 bp, Homo sapiens
catggtcttggtgttttattttcataggcacccattcagcagctggctgaccggtttagtggatattttgtcccatttatcatcatcatgtcaactttgaygttggtggtatggattgtaatcggttttatcgattttggtgttgttcagagatactttcctgtaagttgaatgccttgggctatatggtggttgtgtttt

SEQ ID NO: 331601 - DNA, 201 bp, Homo sapiens
cacccctcttggcttacagtttcctcttcctctctttccaccttcccaggaacttggaacagagaccttgggatactgcacggacttccaggcagtgccargctgtggaattgggtgcaaagtcagcaacgtggaaggcatcctggcccacagtgagcgccctttgagtgcaccggccagtcacctgaatgaggctggcag

SEQ ID NO: 331602 - DNA, 201 bp, Homo sapiens
accatggggcataatcttagtcaagcacccaaagtaatgatttcaggcaacagatactgaaacaccaaagtgataaggtggcaggtatttcagttagctaytgctgcataatgaaagaccccaaagcttagcgacttaaaacaatgatttgttattccttatcattctgtcagctgggagtttcttctgctggcctcacct

SEQ ID NO: 331603 - DNA, 201 bp, Homo sapiens
agctgactccgcagtggtccgctccggttgcctggcgcagatttgagttccgaacagaaggctgtgtattctctgccgcttattgtggcctcgacaggccrtggttactttggccactgccagagcagccttggcactatggaggagcctagggctacccctcagctgtacttggggctggtcctgcagttgctacccagg

SEQ ID NO: 331604 - DNA, 201 bp, Homo sapiens
gaaggaaaggtttcaagtacccagtctcaatacctggaaagtgatcgtgcactgatagaaatgtgaaattgagctggagttgatttagatgggttggggamgtattcttacatgaaactttgggatcctcagtgattcacagttcataaagtgtttgctatttcgggtaagccttataatagcctctggaggaaatagcaa

SEQ ID NO: 331605 - DNA, 201 bp, Homo sapiens
cttcagtcattctttactcctttcttcccttcattcccacacctaatgggtgctcaaggcgctgctggagcctcacaattgctctccaggctgagttatgmaacagccacttcgctggtctcttcactccgagagccaccccctttagtcctcattttctccaaaggttcagctttgattattatttgatgatattattga

SEQ ID NO: 331606 - DNA, 201 bp, Homo sapiens
agaagattataaaggaaatcatcttggcagacaaaaataagagtccccctccagggaagacagattttcttactgtgtatgataataaagataattttggycaggcacagtggctcatgcctgtaatcccagcactttggaagtctgaggcaggcaggtcacttgagcccaggagttcaagatcagcctgggcaacataat

SEQ ID NO: 331607 - DNA, 201 bp, Homo sapiens
ttcgggaaattagttaccaccacctcccccaacacacatcctacctgtttatgcaacagaagtgctgatggcaacaccaggttggcaagagaggaagtatyatgctcagggtttcccagaaaaagggatgtttcctggctgcactgtaaatctgcaggtcaaggtctaggccaaccttggcctaatgatggcctccttgat

SEQ ID NO: 331608 - DNA, 201 bp, Homo sapiens
tcgcacaaggtggccaaggtccaggagctccagaataaagggaagaaagtcgccatggtgggggatggggtcaatgactccccggccttggcccaggcagrcatgggtgtggccattggcaccggcacggatgtggccatcgaggcagccgacgtcgtccttatcagagtgagcgtggctgcagccaggctgtgggtgctg

SEQ ID NO: 331609 - DNA, 201 bp, Homo sapiens
actatggtgtaaaagttgggcaggtttacctgcagtcctttcagcctttcaaaagatttgggtttctgaaacttggggctcctctgctgtgatgaacccartgtgtgctctgtattcacctgggccactctgcatcaccctgtggtgccagagaacaaagggaaccaacctgaacatgaagtttatgctgcttgctgtgct

SEQ ID NO: 331610 - DNA, 201 bp, Homo sapiens
cctctttgactgaggcttgggcttcttcctctgaccatccctttgctggggacacttgtgctttctctttactccaagtcttgggtgctggcagcgtttcyaggtgcgatccgtctggcacactgtagtttccttgctgctgctgctgcttagtctccatgggctttcttctctcctttttccttgtggatggtccttggg

SEQ ID NO: 331611 - DNA, 201 bp, Homo sapiens
gttgcttgatgcagtgttctctctctctatgtctgaattaggttgagtctttacctatgttgttcaaatcttctatatccttatagatttttctggctgcytgttctgtcagttactgagagagatgtacttgcagatctatttcttccagttaggtcagtttttgttttatatactttgaggctatattattagatacat

SEQ ID NO: 331612 - DNA, 201 bp, Homo sapiens
ctgagcctgaccaggaggctgtatgtgggcttgcggtcatgccctgatcagcagcgcctgcaaggaggttcttttcttcccagttctgtgcccattgcacrgctgcaacctctcatcaccccaaaccaggtgaagaaataacccctgggccaagtcagagtctggttgaccctccagtgggtctggagaggggtaggtggg

SEQ ID NO: 331613 - DNA, 201 bp, Homo sapiens
cacctgccacattctgttgaaattaagtcttatcctcccactgtattttaaagtctttgaggacgatgcccatttgcaagtcaccgttgtatgcttggtgyctggcacaaaacaggtgatctgaaatttctggtggaagtggaagggtcatgtgtatgttgggcgggtgtgtgtgagaaggtaaaggacacgtttttcatt

SEQ ID NO: 331614 - DNA, 201 bp, Homo sapiens
gtatcagagatatagtggtcagatgaacgtggtaacaaagcgcttgagttaaactgtgagcaaagcacaagattgcggtgtaggctctgttggggcacagyggaagctgtgcttccaaatgctgaaggagccgagttctgccgcagtggcaagaagcctgggctggaagctggaggctggagctctgagtccagctcttct

SEQ ID NO: 331615 - DNA, 201 bp, Homo sapiens; identical to SEQ ID NO: 69135

SEQ ID NO: 331616 - DNA, 201 bp, Homo sapiens
tactcagaagagtgaattgtctgtttgcttcatatttgcctaatacatatcccaggaatagcacgtcacacttaagacttccctttcccatgtcaggatayacaacatggtacggcacaagcggtgtaggctttaaaaaccgggtttgagttttggccctgtcgctgcagggatacttctgaacctggtctgagaagactc

SEQ ID NO: 331617 - DNA, 201 bp, Homo sapiens
ctgacattttatcctagaaagctgttctactaaccctcttggaaaccacagtgctgggaattccatggtgcaaactacagatggtacacctacatctgtgyaggaagtggctccccacactgggaggctccctgcaaaccatgccccggacatcttggcaaagtccccacaatcaaccagagcagtggcaccgcagaagtg

SEQ ID NO: 331618 - DNA, 201 bp, Homo sapiens
tgcttaagaccatcagtttccgaaacagccaagtaaaaagggctcccgggagaacctccgacctgccaccgggtggatggggcgggacctcgggaagttckcactgtttgcaggggggaaggagcttggcctctcatgtttctgggtggcaacctaggattcagtctgtgagatgggggcctgttaacaggaacccctttc

SEQ ID NO: 331619 - DNA, 201 bp, Homo sapiens
ttaatatgtgtgcttaagaccatcagtttccgaaacagccaagtaaaaagggctcccgggagaacctccgacctgccaccgggtggatggggcgggacctygggaagttcgcactgtttgcaggggggaaggagcttggcctctcatgtttctgggtggcaacctaggattcagtctgtgagatgggggcctgttaacagg

SEQ ID NO: 331620 - DNA, 201 bp, Homo sapiens
cctgatggttccaggtgttctctccgtgttggttgccttgatggcaggaaaggcagagatcaagtatgacccagaggtcatccagcccctcgagatagctyagttcatccaggacctgggttttgaggcagcagtcatggaggactacgcaggctccgatggcaacattgagctgacagtaagtactgtgggtgcgttacg

SEQ ID NO: 331621 - DNA, 201 bp, Homo sapiens
ctgcaactttgtaccctttgatttccctcttcccgtccactccccacacgtagcagctgccattttattctttgtctgtgtatttgacttttttcttactkcttctttttaatttttttaatattctacatataagtgaagttgtgcagcatttttctttctgtgtctggcttatttcacttagcataatattctccagtt

SEQ ID NO: 331622 - DNA, 201 bp, Homo sapiens
cacctgcatgctggctacgccctgcctcgggagaaggccagcaagcgctgccctctgttggcgttgtggggcccatcttcgagcatctgctctccggcaaygtggccattgttctccatccagaaggccctctcttcctcccagagggcattctcttcctcccagagggacgttttatcttcccacagggctttctccccc

SEQ ID NO: 331623 - DNA, 201 bp, Homo sapiens
tttacaagttcatggatttttttcttctgtcagttcaaatatgctgttgaatccctctttaatttttcattttcaactccaagatttttgtcatgtagtamaatttttaaatagtcaagtaaattaacatatccatcatctcatatagttacccttttttgtgcactgtagcaagagcacccacaatctactctcttagca

SEQ ID NO: 331624 - DNA, 201 bp, Homo sapiens
aattgatcaggagtaggttgttcctcctcttctttacccagccccaagccctgagggtgcctgatgcttattattaactcgagataattcatagagccccsaaaggggcttcgtctgaggggtgccaaaaggcaggtacccacctggggaaaataggaccaaactgctgcctgtgggtgagattttctcttgaggttcacc

SEQ ID NO: 331625 - DNA, 201 bp, Homo sapiens
ccgtgagacctattggggaaattttcagggctttctctgtatttttccatttctggtttaggaacagggagtggaggaggagaaaagacacatagctggtgtgtgtgtgtgtgtgtgtgtgtgtgtgtgtgtgtgtgtctgtgtgcgcgtgcatatgaagacacagtggctaggctgtggacagctggtggcatcaccatc

SEQ ID NO: 331626 - DNA, 201 bp, Homo sapiens
gagcccccaaaggggcttcgtctgaggggtgccaaaaggcaggtacccacctggggaaaataggaccaaactgctgcctgtgggtgagattttctcttgakgttcacctgcaatgaaaccagagtgcctcctagctttggaggacagctgctcatctctgcaggggtggctgagggctaattgggcttgggggattgtccc

SEQ ID NO: 331627 - DNA, 201 bp, Homo sapiens
tagacatccatacatcctcctcaaggtcatgccatttttaacacccttcattgtccccaacactgaaatgtatcttacaagagaatggaactcaggccctraaagaaattagattgaacctaaaagaaaatggtcagtgggaagactgatgtttgtttccagtctgaaatgtaattcccggactttagtggcacaggcact

SEQ ID NO: 331628 - DNA, 201 bp, Homo sapiens
cggtttagtggatattttgtcccatttatcatcatcatgtcaactttgacgttggtggtatggattgtaatcggttttatcgattttggtgttgttcagaratactttcctgtaagttgaatgccttgggctatatggtggttgtgttttaaataatctactgacattgatcctgttctttcatatcttagattcactggg

SEQ ID NO: 331629 - DNA, 201 bp, Homo sapiens
ttaaaatcagtgcctcatgagtgacacaaatttaacttaatcttttcaatgctattattttaaaaatagtttaccattcttgccaattttcaaggtaatgmatgttcattgtaaaaagaaagcagaaaatagagcaaagatgaagaagaaaatgaaaatcaaccatatcccaatactcaaaggtaaccagtatgaacattt

SEQ ID NO: 331630 - DNA, 201 bp, Homo sapiens
tccgtgagacctattggggaaattttcagggctttctctgtatttttccatttctggtttaggaacagggagtggaggaggagaaaagacacatagctggtgtgtgtgtgtgtgtgtgtgtgtgtgtgtgtgtgtgtgtctgtgtgcgcgtgcatatgaagacacagtggctaggctgtggacagctggtggcatcaccat

SEQ ID NO: 331631 - DNA, 201 bp, Homo sapiens
ccacgaagcccagctaacttttgtattttttagtagagatggggtttcactatatgttagccaggctggtctcaaactcctgacctcaggtgatctgcctrcctcagtctcccaaagtgctgggattacaggtatgagccaccacgcctggcctgggattttcttaacattttcttttctccagcttactttatcgtaaca

SEQ ID NO: 331632 - DNA, 201 bp, Homo sapiens
tgcctcagtctcccaaagtgctgggattacaggtatgagccaccacgcctggcctgggattttcttaacattttcttttctccagcttactttatcgtaasaacacagtatatataatacatataacatacaaaacatatgctaattgactatgctattgtttctggtcaacattaggctattagtagctaagtttttggg

SEQ ID NO: 331633 - DNA, 201 bp, Homo sapiens
atttcgagtctggaactcagctaaatgagcaggactctgaaacaccataaatgacatttctccctgccaggagctcaaagcagggagactgagccactccrtagatatttgcctgtgctttgtcttacgaaagacccaggaactctctcaggagttcagccttgctgtcacaggtgctggctaagggaagccagctttggc

SEQ ID NO: 331634 - DNA, 201 bp, Homo sapiens
gctattcccactcctagctccttcatgtattcatcaaagcctttgctgtccagcaggcgccatcttccttccagctgctgaactgtggccatggtgggtgygggcgggctggcgtgcagagcagggtctacgtcggcatggcagcatgctgtgtctgtagtgttctttttttaaaaaaaccatgctgtatcaatagttgca

SEQ ID NO: 331635 - DNA, 201 bp, Homo sapiens
tattgaaagaagagaactgtttctagccacaccagccataaaggaatcatgccctggaagcaggctttgtgaaagaggagactttgtcatgttcactgctrtatccacagtgcccgttttataaagagcttctgaaattgagcagacaaagaccaccaacccaatagataaatggccaaaggatatgaacaaattggttgc

SEQ ID NO: 331636 - DNA, 201 bp, Homo sapiens
ttctgttgaaattaagtcttatcctcccactgtattttaaagtctttgaggacgatgcccatttgcaagtcaccgttgtatgcttggtgcctggcacaaarcaggtgatctgaaatttctggtggaagtggaagggtcatgtgtatgttgggcgggtgtgtgtgagaaggtaaaggacacgtttttcatttgcctttatat

SEQ ID NO: 331637 - DNA, 201 bp, Homo sapiens
acagggtttcatcatgttttccaggctggtctagaactcctgacgtcaggtgatccacctgcctcagcctcccaaagtggtgggattacaggcatgagccwccgtgcctagccccgggaaagctttttgacatggaaatgatcatgctgctgatggtccagggccccacccttggaggcagacagcatagcttttttatca

SEQ ID NO: 331638 - DNA, 201 bp, Homo sapiens
actaagaaaattacacgtgaatttgccttttcacccagcaattccatgtctagaaatttatccagcaggtacatgtacacaattacagaaagatacttgtrtaggttattcatcggagtattgtttgtaattccaaaagattggaagtaactcaattttgtagcaatagggaaccacttacataaactggcacatccacag

SEQ ID NO: 331639 - DNA, 201 bp, Homo sapiens
ccggttccacagggcccttagaatgttaggccttgactcccccagcttctcagatccaggagtttgtttgcttattaaactgtgctaaaatacacataacwtaaaactcaacatcttaaccactgaaaaatgtacagctcagtagtgttaagaatattcacattgttgtgcaaccaatctttttcatcttgcaaaactgaa

SEQ ID NO: 331640 - DNA, 201 bp, Homo sapiens
gccatcccctgcgttgtgctccagctgccctgcaccactggcaggtcccaggaagggactgcctctctctgcagacctctgcacacatccttccttccctytgaactcccttcttccttaacctttgcctggctccttgccttcagggctcagcatggaagttgcatcctccagaagcctttcctgattccccaggcctgg

SEQ ID NO: 331641 - DNA, 201 bp, Homo sapiens
gtggctccccacactgggaggctccctgcaaaccatgccccggacatcttggcaaagtccccacaatcaaccagagcagtggcaccgcagaagtgcttctyacagatcaaaggcatgacctgtgcatcctgtgtgtctaacatagaaaggaatctgcagaaagaagctggtaagagatgaacgcccatgttgaacttagga

SEQ ID NO: 331642 - DNA, 201 bp, Homo sapiens
tagccaggcgtggtggcaggtgcctgtaatcccaactacttgggaggctgaggcaggagaatcgcttgaacctggaaggcagaggttgcagtgagctgagrtcgagccactgcactccagtctgggcgacagtgtgagactccatctcaaaaaaaaaaaaaaaaaaaaaagaaaaagaaaaaagaaaaaggattaattaaa

SEQ ID NO: 331643 - DNA, 201 bp, Homo sapiens; identical to SEQ ID NO: 69156

SEQ ID NO: 331644 - DNA, 201 bp, Homo sapiens
gagagggtcaaagctagacctcttgaataggatcagtcatggaagaactatcctgcttctccgtcccctctacttctacctcggaaggatccgaacctacrtgagcacaaccaggagagaaaaaggagaagtattcatccctcttcgactgcaggatttctgattcctgcagagcgtacttgagggtccagagctttatta

SEQ ID NO: 331645 - DNA, 201 bp, Homo sapiens
acatgagtgctggatggggctgagcaagtgacagttgtctctttcctacgtctaggagaagccatgccagtcactaagaaacccggaagcactgtaattgyggggtctataaatgcacatggctctgtgctcattaaagctacccacgtgggcaatgacaccactttggctcagattgtgaaactggtggaagaggctcag

SEQ ID NO: 331646 - DNA, 201 bp, Homo sapiens
gttcgctccaggtgtgctctgtgggatgatcgcaatcgcagacgctgtcaagcaggaggctgccctggctgtgcacacgctgcagagcatgggtgtggacrtggttctgatcacgggggacaaccggaagacagccagagctattgccacccaggtacagccctttaatgttgcaaactgtgtaaagctcataaaagcagt

SEQ ID NO: 331647 - DNA, 201 bp, Homo sapiens
tggctcctctccccagacctaggtgtgagtgcgagttctttcttccccaggtgtcttcatgcccatcggcattgtgctgcagccctggatgggctcagcgkccatggcagcctcctctgtgtctgtggtgctctcatccctgcagctcaagtggtgagtcccctcaggtggagcatctgtgggaggctcccaggaggcctt

SEQ ID NO: 331648 - DNA, 201 bp, Homo sapiens
ggcgtgcgccaccagacctagctaattttttgtgtttttttagagataaggtttctccatgttgcccaggctggcctcaaacttctaggctcaagtgatcyacccattcggcttcccaaactgttgggattataggtgtgagccatcacacctggccttgttttcctttaattcttttggaatggtttcttttagttcttt

SEQ ID NO: 331649 - DNA, 201 bp, Homo sapiens
atatatatgtatgcacacatacttttctgtctctttttggtaaggcatagtttttaattctttcctttaatgcttttttttttttttttttgagacatgtytctgtcactcaggctggagtgcaatggcatggtatgatcttggctaactgcagcctcaatttcctggactcaagtgatcatcccacctcagcctctcaag

SEQ ID NO: 331650 - DNA, 201 bp, Homo sapiens
cccacattcaaaaatgtggccccaatggaaaaaaatagtcttgaagaatttcaacttctagatttttccttttagtcattagcatatgtttattttgtcawtttttaaattttattttaccagagtgtaatttctacgggtgggaaggtagtgtggggaccgactgactttttcctttgtattgttctgtcatttaacttt

SEQ ID NO: 331651 - DNA, 201 bp, Homo sapiens
acgagggcttctgtgaggcactggcttggcttcatgtctttttagggggcagaggaggataggattttaacagtagggggaatgagggtgggcagagcccycttgatctgccatccccagcactggtgtgagtccctttctctaatgcaggcctgcctcagcggcgtgtggggagaacgctgaaaggcagctcctgtcaaa

SEQ ID NO: 331652 - DNA, 201 bp, Homo sapiens
actacttgaaaaatttagccttgttcaaaaagagtatgaaggctatgaagtagagtcatctttagaggatgccagctttgagaaggaggcaacagaagcasaaagtctggaggcaaactgtgaaaagctgaacaggtccaattctgaactggagcatgaaatactctgtctagaaaaggggataaaagaagagaaatctaa

SEQ ID NO: 331653 - DNA, 201 bp, Homo sapiens
gtgcttacttagataatcctccaaaaggagctttgaagaaactgattcatgctgctaagttaaatgcttctttaacaaccttagaaggagaaagaaaccartttatattcagttatctgaagttgataaaaccaaggaagagcttagagagcatattaaaaatcttcagacggaacaagcatctttgcagtcggaaaacac

SEQ ID NO: 331654 - DNA, 201 bp, Homo sapiens
aaagtcaacaatctagaaacttcaaaattactgcagccacctactactttccaaaaataagcacccatcaaaactagactctatcatttgttacccatgcrtgttctattactaatgttctcaaatcaaatttgagcttaaaaacagaaaatctacagtttcgttgacgacccctcccacccccaactattccacccttca

SEQ ID NO: 331655 - DNA, 201 bp, Homo sapiens
ttcaaaaatgtggccccaatggaaaaaaatagtcttgaagaatttcaacttctagatttttccttttagtcattagcatatgtttattttgtcattttttwaattttattttaccagagtgtaatttctacgggtgggaaggtagtgtggggaccgactgactttttcctttgtattgttctgtcatttaactttgtacaa

SEQ ID NO: 331656 - DNA, 201 bp, Homo sapiens
ctggcttatttcttagcataatggcctcaagtttgcagcatgggtcaggggtgcctgtcatttaactcttcttcttcctgactgtgaactagttgtgggascatgcattctgtttctctttttcttaaattgtcctcaggaaaattaaaatgctgggaaaagtcaaaaggaaaatgaaaacttatattgaaatgctttttg

SEQ ID NO: 331657 - DNA, 201 bp, Homo sapiens
tcagaccacagcagctgttttttagagctttgtgttcactaacacccctccccacttctgtccagcccttgaagcttttactcctcctacttcctctttctattttccatcagataggttgatttcaaattcttccattcctcctgccgcctttctagtccttccttcatttctcattatctgattttttttaaaagagtt

SEQ ID NO: 331658 - DNA, 201 bp, Homo sapiens
ttcagaccacagcagctgttttttagagctttgtgttcactaacacccctccccacttctgtccagcccttgaagcttttactcctcctacttcctctttctattttccatcagataggttgatttcaaattcttccattcctcctgccgcctttctagtccttccttcatttctcattatctgattttttttaaaagagt

SEQ ID NO: 331659 - DNA, 201 bp, Homo sapiens
attcagaccacagcagctgttttttagagctttgtgttcactaacacccctccccacttctgtccagcccttgaagcttttactcctcctacttcctctttctattttccatcagataggttgatttcaaattcttccattcctcctgccgcctttctagtccttccttcatttctcattatctgattttttttaaaagag

SEQ ID NO: 331660 - DNA, 201 bp, Homo sapiens
ctcagatcatcaggcattagattctcataaggagtgtgcaacctagatttctggcatgcacagttcacgaaggatttgtgcccctgtgagaatcaaatgcygttgctgatctgacaggaagtggagctcaggtggtaatgatcgctcacctgccactcatctcctgctgtggggcccggttcctaaaaggctagggaccag

SEQ ID NO: 331661 - DNA, 201 bp, Homo sapiens
cattcagaccacagcagctgttttttagagctttgtgttcactaacacccctccccacttctgtccagcccttgaagcttttactcctcctacttcctctttctattttccatcagataggttgatttcaaattcttccattcctcctgccgcctttctagtccttccttcatttctcattatctgattttttttaaaaga

SEQ ID NO: 331662 - DNA, 201 bp, Homo sapiens
tcctccccttgctcctctgcttcaccctgtcctgtggtgtgaagtggtcaccttggattcaggactgggagagtggcagggccagccctagagtgagcccsgagaggtgccctcctcccaggggtgtgcaatgcaggggtagcttcagagggagcagctccttgcattttacataataggctcttctcttgcctcacacca

SEQ ID NO: 331663 - DNA, 201 bp, Homo sapiens
acctggaaggcagaggttgcagtgagctgagatcgagccactgcactccagtctgggcgacagtgtgagactccatctcaaaaaaaaaaaaaaaaaaaaaagaaaaagaaaaaagaaaaaggattaattaaaactgtaccaatttacttggagtgattcctataaaatgctgtcatgtgagaaaagcaagatgcatgaagt

SEQ ID NO: 331664 - DNA, 201 bp, Homo sapiens
tttagcatcaagggtggtgtgattccatgggtgatgaatgtctctgaggacccagtttctttttacctcttctcttgcctctcagggcgttgttctcattygcaggctggcttcccctcatgatggcaagaaggctgccagccacccccagagtaattcaattcctcaccagtggccagggagggagaaaccttgtttctg

SEQ ID NO: 331665 - DNA, 201 bp, Homo sapiens
ctcctcccaggggtgtgcaatgcaggggtagcttcagagggagcagctccttgcattttacataataggctcttctcttgcctcacaccagtccctccccmagtccctccccagtagactggccttttccaccgaaatgacaacaaaaaacctggaatgtcagggttggagaatgcctttaagtcatgtgacgccagtttc

SEQ ID NO: 331666 - DNA, 201 bp, Homo sapiens
tgaacccaggaggcggaggttaaggtgagccgggatcgcaccattgcactttagcctgggcaacaagagcaaaactccatctcaaaaaaacaaacaaaacycccccacacacacacaaaaaaacaaatcggattgggtggttcaaacaacaggaagttattttctcacagttctagaagctgaaagtccaagatcaaggtg

SEQ ID NO: 331667 - DNA, 201 bp, Homo sapiens
ttcaattcctcaccagtggccagggagggagaaaccttgtttctggaagttctgtcagcagagcgagaaagctttttcctgactctcagtaaatctcccartataagtcatgagcccatccactaataacgtatctggtaagtggggctctgctggttaattgagggtgaaacttcatgcccttttctatggccagggtgg

SEQ ID NO: 331668 - DNA, 201 bp, Homo sapiens
gagacttagcagagtctaaactgcagattcctgggcccaggcccagacctacagattgagaatctttgggaggtggtacaggaatctgcatttcaataaakaatctctggcacttcttataaatcagcagctgagaacttctactgctaggtgcttgcttacaatacagacacacaacagcctcacaaagcagcctgcttc

SEQ ID NO: 331669 - DNA, 201 bp, Homo sapiens
cttgaacccaggaggcggaggttaaggtgagccgggatcgcaccattgcactttagcctgggcaacaagagcaaaactccatctcaaaaaaacaaacaaamcccccccacacacacacaaaaaaacaaatcggattgggtggttcaaacaacaggaagttattttctcacagttctagaagctgaaagtccaagatcaagg

SEQ ID NO: 331670 - DNA, 201 bp, Homo sapiens
acctggtcctggcactgatttataacctggttgggatacccattgcagcaggtaggcagctcttacccactgtgctccagctgcgcccagaaaggcttctstctcccaggttcctgctggggttagtgagtggctcactcactggctggctagaggcgttttagaaaggctgtttttttttttttttcatgtcccctgctt

SEQ ID NO: 331671 - DNA, 201 bp, Homo sapiens
gtgataaagtgagttgtcagtgaattttatccagggaagagaagaaccatctgccctgagtacaggcacccaggaagcacagggtgaatcctgcctggctyagtggatgccggcagcttctggcatcctggcacgggcacagtggcagtttataaactccttttccataagctgtcagacttggagaggtcctgcaggata

SEQ ID NO: 331672 - DNA, 201 bp, Homo sapiens
tgactctgagacacagtaggtatgcgataacctccactgaattcatgcattcgggcatggttaggagagaaaacagcacaggttacacagagagctacagrtaagaaaggactgtgtcctgagcacccgaaatgtttgttgaaaatattcaacaatactagttaacatctgctttgaaggaacaggtatggggatggttaa

SEQ ID NO: 331673 - DNA, 201 bp, Homo sapiens
catgcctgtaatcccagcactttggaagtctgaggcaggcaggtcacttgagcccaggagttcaagatcagcctgggcaacataatgagactccatctctmcaaaaaaaaaaaaaaaattagccagacatggtggcatgcatgtgtggtcccagctactttggaggctgagataggatggttgcttgagcctaggtcaggg

SEQ ID NO: 331674 - DNA, 201 bp, Homo sapiens
ctgcaccttcccaggacagagcaggcagcaggagcatttcccaggggcacagagtagcacggcggtttggagatgccgcggggagctgaatggtatggtcragtgtggcaccagctgccagaccctgggaccctgggactctgggaccctcggaagcagacccaagagttgagctgccctcctctgggagatgcatggggt

SEQ ID NO: 331675 - DNA, 201 bp, Homo sapiens
ctacttcaaaaacatttcatgcaatattagaataaagttcctgtcattcctctaaaaatctgcctgtgagtgagatgcgtggtcagaggccagtgccgtcytgtcttcacgagggcttctgtgaggcactggcttggcttcatgtctttttagggggcagaggaggataggattttaacagtagggggaatgagggtgggc

SEQ ID NO: 331676 - DNA, 201 bp, Homo sapiens
tggctggaagatgtgaagtacacactctccctgttatgtgaagtgcaccctctgttttccctaagaagggtgaggaaaggaaccgaccttccgggcctttrggagccgtgatgggccatggcccctttagataactgggcttatcactggatccaggagggttgtttttccaggcagggttttaagtggcttagcttctgt

SEQ ID NO: 331677 - DNA, 201 bp, Homo sapiens
aggctgttctcaaacacatctcaatcaggagggatatgttttgggttccttggccttgagggagtgagtcaggaggaggagcagaaaaatcttgactagtrggctctgctgggaaagctctgtgggcatcttggggtggccggggggtgtaagtgagccacacctgaagggagttgacagtgtaatcttcacccacaccag

SEQ ID NO: 331678 - DNA, 201 bp, Homo sapiens
cctaagaagggtgaggaaaggaaccgaccttccgggcctttaggagccgtgatgggccatggcccctttagataactgggcttatcactggatccaggagrgttgtttttccaggcagggttttaagtggcttagcttctgtgacacccgtgtggcaatcaacctcatgaagtgtggacatcaacaataaatctgtaattc

SEQ ID NO: 331679 - DNA, 201 bp, Homo sapiens
taggtacatgtgcagagcatgcaggtttgttacgtaggtacacatgtgccattgtggtttgctgcacccgtcaacctatcatctacattaggtatttctcstaatgctttccctcccctaatcccccacccctcagcaggccccagtgtgtgatgttcccctccctgcgtccatgtgttctcattgttcatctcccactta

SEQ ID NO: 331680 - DNA, 201 bp, Homo sapiens
tcctctttctattttccatcagataggttgatttcaaattcttccattcctcctgccgcctttctagtccttccttcatttctcattatctgattttttttaaaagagttattataatataataaactttcaaggcacaccatccatgtcatctgtaacctttcaggctgttaatattagaactatccctggtgaatgaca

SEQ ID NO: 331681 - DNA, 201 bp, Homo sapiens
cattttttttcaaaaatgacatctggaaattgacatgttagaaaatagattctcaaattattctgctagattaccaaggaatcaagattaataaataaaamcttttttattaaagattaaaaataaaaacttattttttataaatccagcatagaccaaaatcagccaatcaaatagtttaattagaaagagattatttga

SEQ ID NO: 331682 - DNA, 201 bp, Homo sapiens
acccaagtcaacattgccacaaccaattttcactttctaggctccccatctgtggaaaatgtaagatcaaccccgaatcctgcatgttgtcaaatacaggtatgggtcatttccttatttactgtggaaatgttagggatgtgggaggatagccttttctagaagcaaaccttaactattatagaattctggcctgagggt

SEQ ID NO: 331683 - DNA, 201 bp, Homo sapiens
ttcctcccacagggccttgtcctcctgaagaaggttccggtctctttcccataaggcattgtcctctttccagaaggccttatcctccttccagaaagtgyggtactttttccagaaagttttctcttcctccctgaaagacttttccatttcccagaaggatttttcctctttccagaaggttttctcctcttcccagaa

SEQ ID NO: 331684 - DNA, 201 bp, Homo sapiens
tcctcccacagggccttgtcctcctgaagaaggttccggtctctttcccataaggcattgtcctctttccagaaggccttatcctccttccagaaagtgcrgtactttttccagaaagttttctcttcctccctgaaagacttttccatttcccagaaggatttttcctctttccagaaggttttctcctcttcccagaaa

SEQ ID NO: 331685 - DNA, 201 bp, Homo sapiens
tttatttattttattttatattttttatttgttatttatttttattatatttattttttattttttaatgaaaagtttgtaatatttacacttttacagastagatagaaccatcacttaggtttcaccatttctgaagccactttaatatattcttggcaggtttttcatggttctgatggcaattgtcctcacccccca

SEQ ID NO: 331686 - DNA, 201 bp, Homo sapiens; identical to SEQ ID NO: 69190

SEQ ID NO: 331687 - DNA, 201 bp, Homo sapiens; identical to SEQ ID NO: 69194

SEQ ID NO: 331688 - DNA, 201 bp, Homo sapiens
ccccctccagggaagacagattttcttactgtgtatgataataaagataattttggccaggcacagtggctcatgcctgtaatcccagcactttggaagtytgaggcaggcaggtcacttgagcccaggagttcaagatcagcctgggcaacataatgagactccatctctacaaaaaaaaaaaaaaaattagccagacat

SEQ ID NO: 331689 - DNA, 201 bp, Homo sapiens; identical to SEQ ID NO: 69195

SEQ ID NO: 331690 - DNA, 201 bp, Homo sapiens
tatttttttcaagaagattataaaggaaatcatcttggcagacaaaaataagagtccccctccagggaagacagattttcttactgtgtatgataataaarataattttggccaggcacagtggctcatgcctgtaatcccagcactttggaagtctgaggcaggcaggtcacttgagcccaggagttcaagatcagcctg

SEQ ID NO: 331691 - DNA, 201 bp, Homo sapiens
tgatgagtccctcatcacaggtgagatggcttgtttcatgttccctcaggaggatatcatagcagctgtcaggtcacatgagtgctggatggggctgagcragtgacagttgtctctttcctacgtctaggagaagccatgccagtcactaagaaacccggaagcactgtaattgcggggtctataaatgcacatggctct

SEQ ID NO: 331692 - DNA, 201 bp, Homo sapiens
tggtctcaatctcttgaccttgtgatccacccacctcagcctcccaaagtgctggaattacaggcgtgagccaccgcgcccagccctttttttttttttttttttgagatggagtctcaccctgtcacccaggctgtagtgcaatggcatgatcttggctcactgcaacctccgcctcctgggttcaagtgattttcttgc

SEQ ID NO: 331693 - DNA, 201 bp, Homo sapiens
gctcatcgtcctggccacaagcattgcttatgtttattctctggtcatcctggtggttgctgtggctgagaaggcggagaggagccctgtgacattcttcracacgccccccatgctctttgtgttcattgccctgggccggtggctggaacacttggcaaaggtaacagcagcttcaggttcagaaaagagctgctcctt

SEQ ID NO: 331694 - DNA, 201 bp, Homo sapiens
cgaccttccgggcctttaggagccgtgatgggccatggcccctttagataactgggcttatcactggatccaggagggttgtttttccaggcagggttttmagtggcttagcttctgtgacacccgtgtggcaatcaacctcatgaagtgtggacatcaacaataaatctgtaattcatacagtagccatttgtccatggc

SEQ ID NO: 331695 - DNA, 201 bp, Homo sapiens
gtgccaaatgttgctgattagaagtacactggaaaaacctttcagtcgctatacccttttctggcttttattactgtttttaattgacacataataactgtatatatttatgggatacagtgtgattatgaagccttgcacctatgttgtttatctcaagtattttttcttctagatgctattgtaaattgtttccttgat

SEQ ID NO: 331696 - DNA, 201 bp, Homo sapiens
ggccacaagcattgcttatgtttattctctggtcatcctggtggttgctgtggctgagaaggcggagaggagccctgtgacattcttcgacacgccccccrtgctctttgtgttcattgccctgggccggtggctggaacacttggcaaaggtaacagcagcttcaggttcagaaaagagctgctccttcagtaaacaaat

SEQ ID NO: 331697 - DNA, 201 bp, Homo sapiens
aggggctgacagatgggtgcctgggcacctttccttacctgtacttaccatgtcctagcacacactgtccacctcccacttctcctcccatgacgtttccygcactgctgcatgccagcacctccagcagtgcctgacacacagtaggagctcaataaataggcactggctgactaagcaggtaaatgagtgaagagccac

SEQ ID NO: 331698 - DNA, 201 bp, Homo sapiens
agtgccaaatgttgctgattagaagtacactggaaaaacctttcagtcgctatacccttttctggcttttattactgtttttaattgacacataataactgtatatatttatgggatacagtgtgattatgaagccttgcacctatgttgtttatctcaagtattttttcttctagatgctattgtaaattgtttccttga

SEQ ID NO: 331699 - DNA, 201 bp, Homo sapiens
actggctgactaagcaggtaaatgagtgaagagccacctcccagatacaactgaccttctccattcgctgatgggcccagtgcccatctcattctcctaaygcacagccctgacattttactcccagggacagctctaagggccaccctcctttcatccctggagcacacctactgctgtgagggccagagtgggacagtg

SEQ ID NO: 331700 - DNA, 201 bp, Homo sapiens
cagtgtgaatgtatttttgttaagagttattggcctttgagtttctggtgaccagatgcttctttctaaacacacacacacacacacacacacacacacacacacacacacacacacgtggaagactgttggagaaacccaaatggtgtcataggaggcaggtgtgagaagacactttggttgcacaaccaggtatgattc

SEQ ID NO: 331701 - DNA, 201 bp, Homo sapiens
gccacaagcattgcttatgtttattctctggtcatcctggtggttgctgtggctgagaaggcggagaggagccctgtgacattcttcgacacgccccccakgctctttgtgttcattgccctgggccggtggctggaacacttggcaaaggtaacagcagcttcaggttcagaaaagagctgctccttcagtaaacaaatc

SEQ ID NO: 331702 - DNA, 201 bp, Homo sapiens
ccagtgtgaatgtatttttgttaagagttattggcctttgagtttctggtgaccagatgcttctttctaaacacacacacacacacacacacacacacacacacacacacacacacacgtggaagactgttggagaaacccaaatggtgtcataggaggcaggtgtgagaagacactttggttgcacaaccaggtatgatt

SEQ ID NO: 331703 - DNA, 201 bp, Homo sapiens
tcctagtctgcagctggagccaatttaatcattttttatgcatctagaaatgcaagtatcagaaggaaaacatgggagaaggggaagagcatgaggctggrggttagccctgccactggatacctccatgctacaatatatgcaacacctgtactagcagcccagggttttagagcctcagatatgcatttagtgcagagt

SEQ ID NO: 331704 - DNA, 201 bp, Homo sapiens
tttatgttttaagaacaatcttcagatatcccccttagattggttggtgctgtccctatccacatgtggagctgctaagtggtggcggcctcagaggagtrgcttgtttatctgggcgttcatccagggagtagggtggtctccgtgctctcagatcccagcaagccacttgggggagctttctggagctctcctgggcca

SEQ ID NO: 331705 - DNA, 201 bp, Homo sapiens
tccagtgtgaatgtatttttgttaagagttattggcctttgagtttctggtgaccagatgcttctttctaaacacacacacacacacacacacacacacamacacacacacacacacacgtggaagactgttggagaaacccaaatggtgtcataggaggcaggtgtgagaagacactttggttgcacaaccaggtatgat

SEQ ID NO: 331706 - DNA, 201 bp, Homo sapiens
ctaagagttccatagttttaactcttgcatgtaagactatgacccatattgagttaatttttgtatgtggtttgtaataggagtccaacttcattcttttrtaggtgaatatccagttgtcccagcaccacttattgaaaagactgttcatctcccatatgattgcctaggcttgtctaaatcaattgtccataaaagtaa

SEQ ID NO: 331707 - DNA, 201 bp, Homo sapiens
cgaggggttttcctccttaccttcccccaagacctggattttgcccccacccccacccccacattctgaagatagagtgagttccctttagggttgagtctgccttcaaatgagcctgctgctgaagatccagaaccacagcaagaaacctgataatatttttgctgtcttcaaaagtcattttgactattctcattttca

SEQ ID NO: 331708 - DNA, 201 bp, Homo sapiens
gcccagagcttcccctgtggcctgggtgagcaaaggacaggtgttgcctggatgtgtgcttaggtgggctactgacagcaagagctccgaggaagagggtrcctggtgtgccttagagaggcacagcccccaggggtgccccacctcggtagattcccttgcctggaggtagacttgcaggaactgctctgagcttagaca

SEQ ID NO: 331709 - DNA, 201 bp, Homo sapiens
ccgaggggttttcctccttaccttcccccaagacctggattttgcccccacccccacccccacattctgaagatagagtgagttccctttagggttgagtctgccttcaaatgagcctgctgctgaagatccagaaccacagcaagaaacctgataatatttttgctgtcttcaaaagtcattttgactattctcattttc

SEQ ID NO: 331710 - DNA, 201 bp, Homo sapiens
tgagctaggcatgatgcattaatagcatagagatgaaagtactcactttctttgcttgcatttgagtgggggagtcagaaaagcaaacaagcacaagaaartgtcacagggacggtggcaggtgaggagagcgacatgctcacgcaggtgcgcagcaggagacctgcaaaggcaggtcaccatggcaccgtttgctcggga

SEQ ID NO: 331711 - DNA, 201 bp, Homo sapiens
ttgcttcttctattcctccttttctttctttttctcttttttatttgctgaagtaatttaaagtaaatcccggatgccatgtctttccaccccttcatackgccttgtgcaattctaaaatatccagacactgagaaagatttttaaagcgggaagtgtcagtcacattaaatgttacagatgacttgagatgaggaccag

SEQ ID NO: 331712 - DNA, 201 bp, Homo sapiens
ccccagggaaccaggccctacctgggatgcaaacctaggaaagagggctgggtcagtccatgctcggatggctggaagggccaaatccaagccagcacctrgctccatgtggctcctttctctaaactaaaatgcagactaaaataagacgttttcaataagggaagaatgcgttgatgatagctaccacttgttgaacct

SEQ ID NO: 331713 - DNA, 201 bp, Homo sapiens
atgtcccttccagcccctgtcccctgtccctgaattggcctgagatgctgcagtcagtctcaagacctgcaaggtgagcaggagaacactggcgtttccaktgcgacagacatacctggctgacctctacttgcctggctttctccaccttggtgacagtgctgctcagccctgctaagcgtcaatttccctatgtattaa

SEQ ID NO: 331714 - DNA, 201 bp, Homo sapiens
aagatatgtgcatgcgcgggaggtgatggctcattgcagggcagggcatcatctgtgttgaaggattgccagtgtttcagaaatggacacagagcaggtaygtttgatggacagttaagaggaacactctctatgtgacagcactgttttaagtgccctggatcttctggggatgagactagtgtttttcagtcgtgcatg

SEQ ID NO: 331715 - DNA, 201 bp, Homo sapiens
actagtgtttttcagtcgtgcatgggacagttgaggatcatgctaggcagaggtgagccctttcctggaaggagttaacctaaaaagcataatctgcctcrtctgggaggagcttaataaatctctcttcaatgacgtaatggtcaatcagaaaatttatattttagctgtaaaattacttatcacaatttaccatggggc

SEQ ID NO: 331716 - DNA, 201 bp, Homo sapiens
tgtataaatacagaaagcccaactcaagctggctaaagtaataaaggggatttattggctcctataaatggcaagtccagaagtagtttagcatcaagggyggtgtgattccatgggtgatgaatgtctctgaggacccagtttctttttacctcttctcttgcctctcagggcgttgttctcattcgcaggctggcttcc

SEQ ID NO: 331717 - DNA, 201 bp, Homo sapiens
actcttctacccagaaatttattgctaagaaattatctcacagctagaaaaccaccagtaataacgaaaatgtgttcaagggtgtttatcacagggttgtyattgtggcaaacagttacacctggacacaatgtagatacccatcagtgggaaagtggttaaaaaaatcatgatgaaatacacatcaccagagaggctctg

SEQ ID NO: 331718 - DNA, 201 bp, Homo sapiens
taacaagctccaaggtcaaaaatgcagaataggattcatcgaccccttgaatttctatcctttgccagcaagaaatttcttccttgaccgccactctaagytgagaattaaaacaaatgtggctagattaactgaaattctctctaattcaccacacctgccagcagcactgtgtcactcatgaccagcagggccccggag

SEQ ID NO: 331719 - DNA, 201 bp, Homo sapiens
ggatttttcctctttccagaaggttttctcctcttcccagaaaggtctctcctcttcccaaaaacccaggatctggccccggaaagcatggatcttgcctyggaaagtccacatctcttccctgaagtcctctattttttcacgaaaaattttcatctcttcgcgaaaagccttttcctcctgcagcttgtgcattagttt

SEQ ID NO: 331720 - DNA, 201 bp, Homo sapiens
ccttcgcacaaggtggccaaggtccaggagctccagaataaagggaagaaagtcgccatggtgggggatggggtcaatgactccccggccttggcccaggyagacatgggtgtggccattggcaccggcacggatgtggccatcgaggcagccgacgtcgtccttatcagagtgagcgtggctgcagccaggctgtgggtg

SEQ ID NO: 331721 - DNA, 201 bp, Homo sapiens
ggagggcaatgggcagaccccttcctcactgtgtgctcctctccatcagaatgatttgctggatgtggtggctagcattcacctttccaagaggactgtcygaaggatacgcatcaacctggtcctggcactgatttataacctggttgggatacccattgcagcaggtaggcagctcttacccactgtgctccagctgcg

SEQ ID NO: 331722 - DNA, 201 bp, Homo sapiens
gggcagaccccttcctcactgtgtgctcctctccatcagaatgatttgctggatgtggtggctagcattcacctttccaagaggactgtccgaaggatacscatcaacctggtcctggcactgatttataacctggttgggatacccattgcagcaggtaggcagctcttacccactgtgctccagctgcgcccagaaagg

SEQ ID NO: 331723 - DNA, 201 bp, Homo sapiens
ctcactgtgtgctcctctccatcagaatgatttgctggatgtggtggctagcattcacctttccaagaggactgtccgaaggatacgcatcaacctggtcstggcactgatttataacctggttgggatacccattgcagcaggtaggcagctcttacccactgtgctccagctgcgcccagaaaggcttctgtctcccag

SEQ ID NO: 331724 - DNA, 201 bp, Homo sapiens
gtcccaggtccaccacgtgctccatttgcaatgagaaatgtctgtccaccgaggggttttcctccttaccttcccccaagacctggattttgcccccacccccacccccacattctgaagatagagtgagttccctttagggttgagtctgccttcaaatgagcctgctgctgaagatccagaaccacagcaagaaacctg

SEQ ID NO: 331725 - DNA, 201 bp, Homo sapiens
tgtcccaggtccaccacgtgctccatttgcaatgagaaatgtctgtccaccgaggggttttcctccttaccttcccccaagacctggattttgcccccacccccacccccacattctgaagatagagtgagttccctttagggttgagtctgccttcaaatgagcctgctgctgaagatccagaaccacagcaagaaacct

SEQ ID NO: 331726 - DNA, 201 bp, Homo sapiens
gccctctcctggctcctctccccagacctaggtgtgagtgcgagttctttcttccccaggtgtcttcatgcccatcggcattgtgctgcagccctggatgrgctcagcggccatggcagcctcctctgtgtctgtggtgctctcatccctgcagctcaagtggtgagtcccctcaggtggagcatctgtgggaggctccca

SEQ ID NO: 331727 - DNA, 201 bp, Homo sapiens
atgtcccaggtccaccacgtgctccatttgcaatgagaaatgtctgtccaccgaggggttttcctccttaccttcccccaagacctggattttgcccccacccccacccccacattctgaagatagagtgagttccctttagggttgagtctgccttcaaatgagcctgctgctgaagatccagaaccacagcaagaaacc

SEQ ID NO: 331728 - DNA, 201 bp, Homo sapiens
gatgtcccaggtccaccacgtgctccatttgcaatgagaaatgtctgtccaccgaggggttttcctccttaccttcccccaagacctggattttgcccccacccccacccccacattctgaagatagagtgagttccctttagggttgagtctgccttcaaatgagcctgctgctgaagatccagaaccacagcaagaaac

SEQ ID NO: 331729 - DNA, 201 bp, Homo sapiens
ccaagggatgtcccaggtccaccacgtgctccatttgcaatgagaaatgtctgtccaccgaggggttttcctccttaccttcccccaagacctggattttgcccccacccccacccccacattctgaagatagagtgagttccctttagggttgagtctgccttcaaatgagcctgctgctgaagatccagaaccacagca

SEQ ID NO: 331730 - DNA, 201 bp, Homo sapiens
aaacttgcttctgtacaaatagtaaagccagcccagagcctggcttctttacaagtctttttgttctacagagattttattctactgtaatgtattggcarctgcaaattttatacatgcccatttatttgctgttatgctgtgatatggttaaattcaaatctcatcttgaattataatcctgataatccccacatgttg

SEQ ID NO: 331731 - DNA, 201 bp, Homo sapiens
tgagtggccctggctttgttcctccacctcttgctccaatcagaggtccgttgtttccagtggatacgaggggcccgttcatgagaagaggacctcctttycctccacctcctccaggaaccatgtttggagcttctccagattattttccaccaagggatgtcccaggtccaccacgtgctccatttgcaatgagaaatg

SEQ ID NO: 331732 - DNA, 201 bp, Homo sapiens
ctaggagaagccatgccagtcactaagaaacccggaagcactgtaattgcggggtctataaatgcacatggctctgtgctcattaaagctacccacgtggkcaatgacaccactttggctcagattgtgaaactggtggaagaggctcagatgtcaaaggtaatgaagaaatttttaaaactaacttcatctttctcgttt

SEQ ID NO: 331733 - DNA, 201 bp, Homo sapiens
actggctcccagagcccgagccccaagtcaccactgggtacagtgcacgttcctctgctgtgcagtggtggagcttcatcctggtgagtcatttgttctgygtctaggtgtctcagtgagactcctacctgtctgcttcagagccacaggtgaagccttcattctcaatccgattgaagaagagaaggcggcatcacagct

SEQ ID NO: 331734 - DNA, 201 bp, Homo sapiens
atataccttctttggataaaatggatgggtcaatgccttcagaaatggaatccagtggaaatgataccaaagataatcttggtaatttaaatgtggctgaytcatctctccctgctggaaatgaagtgagtggccctggctttgttcctccacctcttgctccaatcagaggtccgttgtttccagtggatacgaggggcc

SEQ ID NO: 331735 - DNA, 201 bp, Homo sapiens
cttatcctcccactgtattttaaagtctttgaggacgatgcccatttgcaagtcaccgttgtatgcttggtgcctggcacaaaacaggtgatctgaaattyctggtggaagtggaagggtcatgtgtatgttgggcgggtgtgtgtgagaaggtaaaggacacgtttttcatttgcctttatatagcgaccactcatctta

SEQ ID NO: 331736 - DNA, 201 bp, Homo sapiens
agcttcatcctggtgagtcatttgttctgcgtctaggtgtctcagtgagactcctacctgtctgcttcagagccacaggtgaagccttcattctcaatccrattgaagaagagaaggcggcatcacagctgagttgctctccatcatagaaccatggggcattgtcctcagacacacgctgacattaaccgaggctaatga

SEQ ID NO: 331737 - DNA, 201 bp, Homo sapiens
ggtcggccttcatctgaaacgagagcttttctctatcttccgactttgttggagggtccactgagactctcacctttgcttccagggggaggaggaagagrcccaagaggcccagggaatcctctggaccaccagattaccaaggaaagaggagaatcaagctgtgataggtttactgatcctcacaaggctccttctgac

SEQ ID NO: 331738 - DNA, 201 bp, Homo sapiens
ggacctgtggcaggcagaggggctctgggcagcttccctgcaggattccacttcctgcttgggtcgaccgcgccgctgcgagggagggcttgccccttgcytccctgctctctgggtgtttcctttgtgaagggagggacctggcatgctagaaagcatctcaaagccctgctgaagaggaactccggcttcccttgggtt

SEQ ID NO: 331739 - DNA, 201 bp, Homo sapiens
gaggccaaggtgagtggatcacttgaactcaagagttcgagaccagcctgggcaacatggcaaaaccctgtctctacaaaaaaaaaaaaaaaaaaaaaaaagaatttcaaaaattagccaggcatggtgacgtgtccctgtggtcccagctacttgggaggctgaggtgggaggatacttgagctggggaggttcaggctt

SEQ ID NO: 331740 - DNA, 201 bp, Homo sapiens
gaagaaggtgctctccaaatgagagggcctcaggaagacagtggcatctccctgactgggtgagtcaggtgcagctctagccgaggtgagtgggacctgcygtgtccgaggtggtgacagcaggcactgagactgctctggaatcatggctctctgaggttgttgctctgaagtcctgcctctgggccctcgtccagtgtc

SEQ ID NO: 331741 - DNA, 201 bp, Homo sapiens
tacttgacagcctgagaaatgtgtagccgcttctccattctcagatcaatgtctgcgtattgaccagggtcagcactcaatggctgcctcctgatacagcragctctctgcctagctcctctcccaccaggcgtcgcagagctgtgaattgcagttatcacaagcaaaatgaaatgagtttgagcctaaggggaatccata

SEQ ID NO: 331742 - DNA, 201 bp, Homo sapiens
aattatctattccaaaatgtcagtactaatgaggttaagaaacactactaatgatgatgttcccctacctggtaaataaaattcaaggttttcagcctccrcatcagtacagaatgaatgtttcttaattgaaatgcttggagccagaagtgttttagatttaggattttggaatatttgcattatatttgctggttgagc

SEQ ID NO: 331743 - DNA, 201 bp, Homo sapiens
agaggtaattgcagaaaaggaaccaaactgtgtggggaggctaagggaagataagagtgattttgacaagatctgtttgtacagaattctcttggtctcartgtcccatccttgatgataagaatggtgctttcctttggtatagggaggacatcctctatgtggggcttttgtttcccacttttaagaaggaaaagggga

SEQ ID NO: 331744 - DNA, 201 bp, Homo sapiens
gatcatcaattatcattatcatcatcatcaacaacaattaccttagggtcatcataagaattgcatataagctagccaccaagcagtcatcagtcatctgyctttagcccagtgctacctgaattcagtttctgtcatcatgtatttcttaatttcaaaataggcagcagcactaaatctggtccatgggctcattaacat

SEQ ID NO: 331745 - DNA, 201 bp, Homo sapiens
ttgagtttccaacacatgaactttgggggacacattcaaaccatagcaggcagaggagacatgacaacaaatgcaatacttcagcctagactggacccaarggctttattaggtcatcaacattggaatatggatggcagattaaaatattgtatcaatgtaaatttaagaagctgcgactgtactaaggtactatattaa

SEQ ID NO: 331746 - DNA, 201 bp, Homo sapiens
gcttctgacctcacccctgaaatggcttctccagaggtctgcagtaacccccctgataccacatcccaagtgattcttttcagtttttttattacatgacytttccatggagcttgaccccagtggataacttcccaagctcctcctccttgaaactctcctctcttggattttgagcttggatgacagagtgagaaaggc

SEQ ID NO: 331747 - DNA, 201 bp, Homo sapiens
caagagccctgaaacctcttgttctgaaaaacatattatttgctcttctaatttgaatattttctgacattttatcctagaaagctgttctactaaccctsttggaaaccacagtgctgggaattccatggtgcaaactacagatggtacacctacatctgtgcaggaagtggctccccacactgggaggctccctgcaaa

SEQ ID NO: 331748 - DNA, 201 bp, Homo sapiens
ggggaggcagtgagccttaggagagcaggtagattctagatacttaggagagccactgtcacagagctttgtaaagggacttgggatggagtgggcactgrgggagggcagaaaggaaaatagagacactgaagatgtgtccaggcttctccgggggtagttagtaatgccattgacccaagtcaactgatgtatttctgt

SEQ ID NO: 331749 - DNA, 201 bp, Homo sapiens
gagtccaaactcacgaggacaaatggcatcacttatgcctccgttgcccttgccaccagcaaagcccttgttaagtttgacccggaaattatcggtccacrggatattatcaaaattattgaggtaagtaattcattaaaaaattgtagtcacctttttaaaaacagtaatatataatcagtgaagaaaaatgagaaaata

SEQ ID NO: 331750 - DNA, 201 bp, Homo sapiens
tgttgtttatctcaagtattttttcttctagatgctattgtaaattgtttccttgatttcatcttcagattattcatcgctagtatatagaaatacaatcrattttttatatattgacctcatatcctgcaactttactgtacttgttcattggttctgaaagcgtgttttgtggattttccagataagagatcatatcat

SEQ ID NO: 331751 - DNA, 201 bp, Homo sapiens
taatttccaaagctgaaaagtgctttctgccaatgcatattttaaccaagtaccttcctcctttttccccacccctctctttttaatgacaaggaaattgsctttcatgcttccctggcccagagaaaccccaacgctcatcacttggaccacaagatggaaataaagcagtaggtagaacacaaaagataaactccagct

SEQ ID NO: 331752 - DNA, 201 bp, Homo sapiens
ctcctttttccccacccctctctttttaatgacaaggaaattggctttcatgcttccctggcccagagaaaccccaacgctcatcacttggaccacaagakggaaataaagcagtaggtagaacacaaaagataaactccagctctcatctaagtcccttcctctacctgggcccaactctgccagctggtcttgtcttcc

SEQ ID NO: 331753 - DNA, 201 bp, Homo sapiens; identical to SEQ ID NO: 69131

SEQ ID NO: 331754 - DNA, 201 bp, Homo sapiens
cacccctctctttttaatgacaaggaaattggctttcatgcttccctggcccagagaaaccccaacgctcatcacttggaccacaagatggaaataaagcrgtaggtagaacacaaaagataaactccagctctcatctaagtcccttcctctacctgggcccaactctgccagctggtcttgtcttcccatggtgccttc

SEQ ID NO: 331755 - DNA, 201 bp, Homo sapiens
aagctagaggctttgccatccccagggcccttggccctgtgtcgctcattgaactctcctccctacttgctggcagccttcactgtccttgtctttcagcycctcggtgggtggtacttctacgttcaggcctacaaatctctgagacacaggtcagccaacatggacgtgctcatcgtcctggccacaagcattgcttat

SEQ ID NO: 331756 - DNA, 201 bp, Homo sapiens
gaggctttgccatccccagggcccttggccctgtgtcgctcattgaactctcctccctacttgctggcagccttcactgtccttgtctttcagctcctcgstgggtggtacttctacgttcaggcctacaaatctctgagacacaggtcagccaacatggacgtgctcatcgtcctggccacaagcattgcttatgtttat

SEQ ID NO: 331757 - DNA, 201 bp, Homo sapiens
ggaaaagctcctgagtgacctgccattgttttctcccttcctgaactcccaggaagactgcctcatcacctgaaattttgtttgttttgatgtcagggctmaaatgtgctcaaaaaagactgctgcccctttttggccacgtccaggccaggcttatggtcaccgtgtgctcccagacccccaccactttggcagggaagc

SEQ ID NO: 331758 - DNA, 201 bp, Homo sapiens
agaggctttgccatccccagggcccttggccctgtgtcgctcattgaactctcctccctacttgctggcagccttcactgtccttgtctttcagctcctcvgtgggtggtacttctacgttcaggcctacaaatctctgagacacaggtcagccaacatggacgtgctcatcgtcctggccacaagcattgcttatgttta

SEQ ID NO: 331759 - DNA, 201 bp, Homo sapiens; identical to SEQ ID NO: 69288

SEQ ID NO: 331760 - DNA, 201 bp, Homo sapiens
taaccaccctgtgcaaacctctctttgagcacctgccacattctgttgaaattaagtcttatcctcccactgtattttaaagtctttgaggacgatgcccrtttgcaagtcaccgttgtatgcttggtgcctggcacaaaacaggtgatctgaaatttctggtggaagtggaagggtcatgtgtatgttgggcgggtgtgt

SEQ ID NO: 331761 - DNA, 201 bp, Homo sapiens
ccagcctggtccaccatttgctaggagaagatttcagtccctccagaacacacagcctgtaaggagccacactggctcccagagcccgagccccaagtcaycactgggtacagtgcacgttcctctgctgtgcagtggtggagcttcatcctggtgagtcatttgttctgcgtctaggtgtctcagtgagactcctacctg

SEQ ID NO: 331762 - DNA, 201 bp, Homo sapiens
tattccattaagctacatgtctagccttttctagtgccatgcggtcttaattactatagctttgcattaagatctgaaatagagaaacttgagtcccccarttttgttgtaagattgtttcggctattctggatcccttgcatttttatattaactttagggtcagtttgtcaatttctacatagaagccagatgacattt

SEQ ID NO: 331763 - DNA, 201 bp, Homo sapiens
atgaggttttgatgaataaatgagtggctaatttatgcaatcccaacaagatcatagacatacgtggttcagtcctaaaacaatgtcacattcaaagaaayacaatttcgtaaatgaaattgttttaaataaatttttctttatcgttgtctttaaattctttagtctcacaccatagaaaatagattaaatgctaatcca

SEQ ID NO: 331764 - DNA, 201 bp, Homo sapiens
ggatcccttgcatttttatattaactttagggtcagtttgtcaatttctacatagaagccagatgacatttttgagaggatagtgttgaatctgttcatcratttgggaaatattgccgtcttaatcttagtcttctgattcatgaacatggcatgtctttccacttatttaggccttctttaatttctttcatgatatct

SEQ ID NO: 331765 - DNA, 201 bp, Homo sapiens
ggtcttggtgttttattttcataggcacccattcagcagctggctgaccggtttagtggatattttgtcccatttatcatcatcatgtcaactttgacgtwggtggtatggattgtaatcggttttatcgattttggtgttgttcagagatactttcctgtaagttgaatgccttgggctatatggtggttgtgttttaaa

SEQ ID NO: 331766 - DNA, 201 bp, Homo sapiens
tgtaggagattttaggccttctctttgctcccagtattctgaaattccatagtgatgtgtcctggttggatctgttttcatccactcttctgggcactcaygagccctttccatctgcaaacttgtgttctgggacatagtcttggatgatttttttgagcatgtcttcccctatgttcttttccttttctttcttttttg

SEQ ID NO: 331767 - DNA, 201 bp, Homo sapiens
agcccttgaagcttttactcctcctacttcctctttctattttccatcagataggttgatttcaaattcttccattcctcctgccgcctttctagtccttycttcatttctcattatctgattttttttaaaagagttattataatataataaactttcaaggcacaccatccatgtcatctgtaacctttcaggctgtta

SEQ ID NO: 331768 - DNA, 201 bp, Homo sapiens
gagggaaggagaaagatcttcaaacattgccatatatctgaggaatcagatagcagaattatccatagcaatccctgtaactacaaacatgaatcaagggmtgagaaaaagtgctggacataggaaggtggttagagtgcagtaaagagctcagtgttgtcagataaggagtgcaggcacatgctgacagcattgttttcc

SEQ ID NO: 331769 - DNA, 201 bp, Homo sapiens
tcagggaaggcacagagcctgcctcaaggaaccagtgcagggaagacaagacacacacacatacaccacacacaccacataccatgcacacatagacacayacaccacacacacacaccacacacaccacataccacacactcatagacacacaccacacatatatgtcacactgcacacaccacataccacatgcacctc

SEQ ID NO: 331770 - DNA, 201 bp, Homo sapiens
aggggcacatccttgacctttccctctccctcaccagacttctctcctcaaccatcaagccctcctagccgagatccagatccttaacatttcctgaaacyatgcccctgttccatctcccccatgacagccaggtcaggccaggatgcctgtaacagtctcgctgctctctgtattgatcttaccctctcatctgcccct

SEQ ID NO: 331771 - DNA, 201 bp, Homo sapiens
ttggttttctgttcttgtgttagtttgctgagaatgatggtttctagcttcatccatgtccctgcaaaggacatcaactcatcctttttttttttttttttgagacgaactcatccttttttatggctacatagcattccatggtgtacatgtgccacattttcttcagtctatcattgatgggcatttgcgttggttcca

SEQ ID NO: 331772 - DNA, 201 bp, Homo sapiens
tgcactgtagccctacaggtgttttctagaacactctctcgtcctatcacatcagttcacacaccttcaaagaccctgtagcccaaagatcaaagctgaamgccctaggaaggccttgtgcagcccaactccagcttgcttctccctctccttcctacccagcctgcacccaactccaaatctaaggcccagtattaacgg

SEQ ID NO: 331773 - DNA, 201 bp, Homo sapiens
tacattaggtatttctcgtaatgctttccctcccctaatcccccacccctcagcaggccccagtgtgtgatgttcccctccctgcgtccatgtgttctcaytgttcatctcccacttacgagtgagaatatgtggtgtttggttttctgttcttgtgttagtttgctgagaatgatggtttctagcttcatccatgtccct

SEQ ID NO: 331774 - DNA, 201 bp, Homo sapiens
aacaaagtctttgcagaggtgctgccttcgcacaaggtggccaaggtccaggagctccagaataaagggaagaaagtcgccatggtgggggatggggtcavtgactccccggccttggcccaggcagacatgggtgtggccattggcaccggcacggatgtggccatcgaggcagccgacgtcgtccttatcagagtgagc

SEQ ID NO: 331775 - DNA, 201 bp, Homo sapiens
caaagaccctgtagcccaaagatcaaagctgaacgccctaggaaggccttgtgcagcccaactccagcttgcttctccctctccttcctacccagcctgcrcccaactccaaatctaaggcccagtattaacgggctctattcagctcttggcactctgcctgcagtttcctgcctgtgtggtgaagcacatgtcgcatcc

SEQ ID NO: 331776 - DNA, 201 bp, Homo sapiens
ggaaacagactccggagatccttgagaacagaccaaaagctacccacttttcctaccaagattacccatttaaaaatgcattgaattctcccagctacctrttttgactgataaccggatggcagcgtatctttaacacctgctaccatgctgctccctctgacaatcacgggcagcagcaatcagcagtcgtgagagcag

SEQ ID NO: 331777 - DNA, 201 bp, Homo sapiens
ctgtgtccattccattgaaggcatgatctcccaactggaaggggtgcagcaaatatcggtgtctttggccgaagggactgcaacagttctttataatccckctgtaattagcccagaagaactcagagctgctatagaagacatgggatttgaggcttcagtcgtttctggtacgtagtgtgtttgaggcatgtcctgagc

SEQ ID NO: 331778 - DNA, 201 bp, Homo sapiens
actctcaacctgcctctgactctgtcctgttttcagaaccccaacaagcacatctcccagacagaggtgatcatccggtttgctttccagacgtccatcayggtgctgtgcattgcctgcccctgctccctggggctggccacgcccacggctgtcatggtgggcaccggggtggccgcgcagaacggcatcctcatcaag

SEQ ID NO: 331779 - DNA, 201 bp, Homo sapiens
ctgataccttttgccaacactaggcattgccttccttttgtcttaggttggcatcaacaaagtctttgcagaggtgctgccttcgcacaaggtggccaagrtccaggagctccagaataaagggaagaaagtcgccatggtgggggatggggtcaatgactccccggccttggcccaggcagacatgggtgtggccattgg

SEQ ID NO: 331780 - DNA, 201 bp, Homo sapiens
tgctgctgctcacatagttccttcacttaaaaccaagtctctgaaatgataagaaaacttcaataattattctaaaaacatacatttgtgttacacacacktgtttctctgtttctctcatacacacacacacccctctagagctatatggcttgttataggctttgaaaatcttttatattcaccaagctgtccccgatg

SEQ ID NO: 331781 - DNA, 201 bp, Homo sapiens
ctagatttctggcatgcacagttcacgaaggatttgtgcccctgtgagaatcaaatgccgttgctgatctgacaggaagtggagctcaggtggtaatgatygctcacctgccactcatctcctgctgtggggcccggttcctaaaaggctagggaccagtactgttcccaaaaggccagagaccatggcatgttactgtat

SEQ ID NO: 331782 - DNA, 201 bp, Homo sapiens
tttctgacattttatcctagaaagctgttctactaaccctcttggaaaccacagtgctgggaattccatggtgcaaactacagatggtacacctacatctstgcaggaagtggctccccacactgggaggctccctgcaaaccatgccccggacatcttggcaaagtccccacaatcaaccagagcagtggcaccgcagaa

SEQ ID NO: 331783 - DNA, 201 bp, Homo sapiens
ttgaatagatgcagtcccccagaccttctctgtgctgattggaaaccgtgagtggctgaggcgcaacggtttaaccatttctagcgatgtcagtgacgctrtgacagaccacgagatgaaaggacagacagccatcctggtggctattgacggtatcttctgcttctgccttccttccgctctctcagaaatacagttttc

SEQ ID NO: 331784 - DNA, 201 bp, Homo sapiens
atatttaagagaggagcgataaaacagttattagaagctctgtgtgcatgggcgagtccccagaattagcacttctaggcctattctcctgagctggtcarattccctggggaagatgcttccattctcctgttagaagggacaagtttggctgccagcattctgggagctgagtgaggaaggaaggctggaaagcctctg

SEQ ID NO: 331785 - DNA, 201 bp, Homo sapiens
catagttccttcacttaaaaccaagtctctgaaatgataagaaaacttcaataattattctaaaaacatacatttgtgttacacacacttgtttctctgtytctctcatacacacacacacccctctagagctatatggcttgttataggctttgaaaatcttttatattcaccaagctgtccccgatggcacagctagaa

SEQ ID NO: 331786 - DNA, 201 bp, Homo sapiens
cctttgaaatggagacggctattaactgttctcaatttaaacataataactgcttatagcaaaaaattaagcatatagaaatatagaaagtggggggggggaaggcaaatactccctccccagccccaaaaggaaagccagtgaacatgacttcatggagggatgtcctttgtggatgaaccacatcgggacatggaggga

SEQ ID NO: 331787 - DNA, 201 bp, Homo sapiens
aagggttgaggcgggaaacctgacagcggcgtgtccgcgcatcctcccacagggcctctgcgaccgctgaaattggggctgaagagaccccgggattttcyggagcatgttggacaactgcccggttccacagggcccttagaatgttaggccttgactcccccagcttctcagatccaggagtttgtttgcttattaaac

SEQ ID NO: 331788 - DNA, 201 bp, Homo sapiens
aagcacatctcccagacagaggtgatcatccggtttgctttccagacgtccatcacggtgctgtgcattgcctgcccctgctccctggggctggccacgcycacggctgtcatggtgggcaccggggtggccgcgcagaacggcatcctcatcaagggaggcaagcccctggagatggcgcacaaggtcagcctgtagcac

SEQ ID NO: 331789 - DNA, 201 bp, Homo sapiens
cattacccatggcgtccccagggtcatgcgggtgctcctgctgggggatgtggccacactgcccctcaggaaggttctggctgtggtggggactgcggagsccagcagtgaacaccccttgggcgtggcagtcaccaaatactgtaaagaggtacgtggacttgggcgtggccctgccctccccgccaatgctcttttatt

SEQ ID NO: 331790 - DNA, 201 bp, Homo sapiens
ggaggtgcatgagaaagtgcttgtctagtagtaggggacccactacggtgaggtaagttgatgtgttaatgacagtgaaggccaggcctaaggaaaggggragcaggacacatttgtcgtggcgtttcttactcccttactccctcactccggtcatttgtgtagcattccctataaaggccatctaatctccccaccccc

SEQ ID NO: 331791 - DNA, 201 bp, Homo sapiens
gtgcacactaaatgtaatgcacttgaatcatcctgaaaccattccccagcctggtccatggaaaaattgtcttccacgaaactggtccctggtgccaaaarcgttggggaccactgctttaagcgactgcaggctccatttgcacatttgggtttgcccttttgcaaacttctcagtcctttcgcgcctttcctttgaaca

SEQ ID NO: 331792 - DNA, 201 bp, Homo sapiens
tacttactactaattcactctcaaactctcctccagcaatgttcattctccttttaacaccttcagttactttaggagttccattaatttcgtcttgtctyttttaatgacttccgactgctccattctggactggggttctgcctgggcctgggccacagctgtcccctgggatctcccctcccctgaccactgtattgg

SEQ ID NO: 331793 - DNA, 201 bp, Homo sapiens
atcgtcctggccacaagcattgcttatgtttattctctggtcatcctggtggttgctgtggctgagaaggcggagaggagccctgtgacattcttcgacaygccccccatgctctttgtgttcattgccctgggccggtggctggaacacttggcaaaggtaacagcagcttcaggttcagaaaagagctgctccttcagt

SEQ ID NO: 331794 - DNA, 201 bp, Homo sapiens
gaaacttgctggcctgtctcaggccttccaggctccgtcctgtgtgatgacttcttccttctttgctctgcatacagcactactgtcttcatcatttattmctattgtgatcttcgttattatttaaatcatacaaagttctgcattgaggatttcatgtattatatttgttttctccacaacaagatgacaagcttttgg

SEQ ID NO: 331795 - DNA, 201 bp, Homo sapiens
gagtattccctgcatagtctctgctctcttcaccttacagtctgctagaagatgggtgaccagtgctgggccaggggaagtacaggtagaagagggacccyagaaggatcgcgaggtcaggaaaggctcttcagagtcagccatatctaggctgatacttgaaggatgaatgtgagctcatcctggtgaaggctgagggaa

SEQ ID NO: 331796 - DNA, 201 bp, Homo sapiens
gggggccgaggtgggcggatcacctgaggtcagaagttcaagatgagcccgaccaacatggagaaaccttgtctctactaaaaatacaaaattagtcgggygtggtggcgcatgcctgtaatctcagctactcgggtggctgaggcgggagaatcacttgaacccaggaggcggaggttaaggtgagccgggatcgcacca

SEQ ID NO: 331797 - DNA, 201 bp, Homo sapiens
tctctccttttattctctagaaagcccttcctggaccctcttgttggactaaatgacctttctccacattcctaaccaccctgtgcaaacctctctttgarcacctgccacattctgttgaaattaagtcttatcctcccactgtattttaaagtctttgaggacgatgcccatttgcaagtcaccgttgtatgcttggtg

SEQ ID NO: 331798 - DNA, 201 bp, Homo sapiens
gcaggtgtatagaaagatggtcttcattttcgaaatgaaaaattgtgttaatatcatctccttttatttttaacaaatcctaaaagaaacaaaatagagayggcttgaatcactgtttcccttggttctcctttgccatcttggggccccattcttcagaatcctgcagcttaaggatgtctaagaatggaagcagtgctc

SEQ ID NO: 331799 - DNA, 201 bp, Homo sapiens
atattgcttccagacttttgtgtacatccgtaaatgcatgtactttttaaaaagcaaaaaaaccacattgtgttatataatttgatgttttgttttttgcrcataatattatatgatgagaacattgcaagtgtggtatcttggtgcggggtgccccaacttgtgtagctgctgatgctggctggttcgctccaggtgtgc

SEQ ID NO: 331800 - DNA, 201 bp, Homo sapiens
ctgcattaatcttagtctcttctctcttgagatctctacaccaccttcccaaaccattaccttgagggtaaaattcgtacacaaataaaggagaatgatgkgtgtgatggaaggtctaggtaccaggcggggaagctgaacatggaagaaagccttctgaagattacaagcttcttcctttatggagttttgagtgatcca

SEQ ID NO: 331801 - DNA, 201 bp, Homo sapiens
ttcctgaggcctccccagccatgcggaactgtgagtcaattaaacctcttttatttataaattgcccagtctcaggtattctttcatagcattgtgagaayggattaatacatgctatatatgaaaattgagtgaaaaggaataagtgtcacatccagacacaaatgagtgttttcctgttggtctctttcaagagagaca

SEQ ID NO: 331802 - DNA, 201 bp, Homo sapiens
gaaagtgagaatcagaaacttcaacagaaagttaatgactgagttatatcaagaaaatgaaatgaaactctacaggaaattaatagtagaggaaaataacyggttagagaaagagaaactttctaaagtagacgaaatgatcagccatgccactgaagagctggagacctgcagaaagcgagccaaagatcttgaagaaga

SEQ ID NO: 331803 - DNA, 201 bp, Homo sapiens
cactctttgccagttgccttctgggtatttgatagctcagtggagccccgaaggatggtgttgcagagaaaaactgctgggtcccagtctcagtttctgcrctaaactaagcaaaagatctggggatatattaatacttgctattcataggaaacagactccggagatccttgagaacagaccaaaagctacccacttttc

SEQ ID NO: 331804 - DNA, 201 bp, Homo sapiens
atcctctactgagagccccttttgttcctgtggtgggcttgaattcctgtacatcctttcccctctgaaagctactcggaccctccagacaaagttcctcrccacctctgcgatactgtctgtctgttactccactattacttgtcacacttgattgaaattaggtgtggacatgtcttcctgacatctctgtaacccagc

SEQ ID NO: 331805 - DNA, 201 bp, Homo sapiens
gtgtataaacttaatgcaatctcaaacaaaattacagaagggtttttctttccccaggggaacatttcaagtagctgggactacaggcacacacccctacrcccagctaattttttattttgttttttagtctcaatacattgcctgagctggtctcgaactcctggtgtcaagcaatcctcctgtcttggccttctaaag

SEQ ID NO: 331806 - DNA, 201 bp, Homo sapiens
acactggagagaaggcactgcccggcctgttaccccaatctcttcctgtttcagatttctaacaaataagaaaactttctatcaaataagaaaaaatgtaygttttcttagtagaagatatagaaggtatagaaattgactaaaatctgtgtcattacagattttagtcaatcatttaatggattgcattgacatgaatcc

SEQ ID NO: 331807 - DNA, 201 bp, Homo sapiens
tttgctttccagacgtccatcacggtgctgtgcattgcctgcccctgctccctggggctggccacgcccacggctgtcatggtgggcaccggggtggccgygcagaacggcatcctcatcaagggaggcaagcccctggagatggcgcacaaggtcagcctgtagcacggctttccccatcctgagagatgaaagtagtat

SEQ ID NO: 331808 - DNA, 201 bp, Homo sapiens
aggtaagttgatgtgttaatgacagtgaaggccaggcctaaggaaaggggaagcaggacacatttgtcgtggcgtttcttactcccttactccctcactcyggtcatttgtgtagcattccctataaaggccatctaatctccccacccccagaagaaaagttgggcacataagttgcttgaccacattcatgtacattca

SEQ ID NO: 331809 - DNA, 201 bp, Homo sapiens
acccttcagccccatggcatgttaaagggaagaacaatgaattctggttgttacaagagaatatttggagcatctgactctttttgctgtcaaccagggtrtcaacttgaggcatccataatgactcgactccctgtttgattccttctctccttttattctctagaaagcccttcctggaccctcttgttggactaaatg

SEQ ID NO: 331810 - DNA, 201 bp, Homo sapiens
aactaagcaaaagatctggggatatattaatacttgctattcataggaaacagactccggagatccttgagaacagaccaaaagctacccacttttcctaycaagattacccatttaaaaatgcattgaattctcccagctacctattttgactgataaccggatggcagcgtatctttaacacctgctaccatgctgctc

SEQ ID NO: 331811 - DNA, 201 bp, Homo sapiens
actttcctgctaaaagccttacatccaaaacccatgctctgctccaggagactcggcatgatctggactctgcctgcttctctgacctcaacttgcacgtyacttacttcctgccagccttgcttgctttcttgctgtttctcagacgcacccttcctgcctgccttaaacctttgtgtcagttgttttctctccgtgaac

SEQ ID NO: 331812 - DNA, 201 bp, Homo sapiens
tttggtgtctctgattcttatcctccgatgtcatgcagactctaaccactcccattttcagaggcgttgtgccttgcccctcccttgtgtgcccttgtccrtgtatcacactgttgatggagccagcctgccctagctgtgtcctggaggcctgggcgtgaaggctgagacagaccccttgcttccccatggggtctgcag

SEQ ID NO: 331813 - DNA, 201 bp, Homo sapiens
actatggaagcccctccatctgtattgtggtcagtgagttgtggttgtttttggcagataaagactgtgatgtttgacaagactggcaccattacccatgkcgtccccagggtcatgcgggtgctcctgctgggggatgtggccacactgcccctcaggaaggttctggctgtggtggggactgcggaggccagcagtgaa

SEQ ID NO: 331814 - DNA, 201 bp, Homo sapiens
agcgtgctcactcccaccaggaggattttcctccccgcgttcggcgcttactcgcccccagggggtgcgcagggaaggccgagccagaccccagctccagsgatgtcttggcgtgggagaaaaggaccctttagaaaaagtgtgccgtcaactgatgtttgggagcaatggaaaaccccgcacctcaaaattcatctttat

SEQ ID NO: 331815 - DNA, 201 bp, Homo sapiens
tgacttgtgtcttgtgtgccttctcctgtaagtgtggttgccttgattagggatattgaggaaagtggagcgagtgtggatattttgctgtagttttcctsaggtgacagatactagtgggtgaagccagggctcaggcagctcagctctcttgtgtgttagcctggcttgctgcttgcaggtatggctgtttattttcat

SEQ ID NO: 331816 - DNA, 201 bp, Homo sapiens; identical to SEQ ID NO: 69178

SEQ ID NO: 331817 - DNA, 201 bp, Homo sapiens
gcccctccatctgtattgtggtcagtgagttgtggttgtttttggcagataaagactgtgatgtttgacaagactggcaccattacccatggcgtccccarggtcatgcgggtgctcctgctgggggatgtggccacactgcccctcaggaaggttctggctgtggtggggactgcggaggccagcagtgaacaccccttg

SEQ ID NO: 331818 - DNA, 201 bp, Homo sapiens
tgttaatgacagtgaaggccaggcctaaggaaaggggaagcaggacacatttgtcgtggcgtttcttactcccttactccctcactccggtcatttgtgtrgcattccctataaaggccatctaatctccccacccccagaagaaaagttgggcacataagttgcttgaccacattcatgtacattcattcaatgtactac

SEQ ID NO: 331819 - DNA, 201 bp, Homo sapiens
tcacttagaattttaaagagtgacagagcgtttaatcttttaatcagccttttcatatgttgccggtttatacaatatacggtgaacatttatacttttarccatgtgtttaaaatagtgaaatactaaatatgttggggtgaaaatgcttgaggcatttttaaaaaatgtccaaactgttactttacaatttccagccta

SEQ ID NO: 331820 - DNA, 201 bp, Homo sapiens
aaattgagtgaaaaggaataagtgtcacatccagacacaaatgagtgttttcctgttggtctctttcaagagagacaaaagtgttcatggatacccctagyagactgaacttcacatcttattggacagaaatgggtcaggtgctcacttctaagcttagtggccagacgatagaattaccatgactgactttgactggca

SEQ ID NO: 331821 - DNA, 201 bp, Homo sapiens
ctccctgcaaaccatgccccggacatcttggcaaagtccccacaatcaaccagagcagtggcaccgcagaagtgcttcttacagatcaaaggcatgacctstgcatcctgtgtgtctaacatagaaaggaatctgcagaaagaagctggtaagagatgaacgcccatgttgaacttaggaatgctgcgtatagacctcgta

SEQ ID NO: 331822 - DNA, 201 bp, Homo sapiens
tctgtattgtggtcagtgagttgtggttgtttttggcagataaagactgtgatgtttgacaagactggcaccattacccatggcgtccccagggtcatgcsggtgctcctgctgggggatgtggccacactgcccctcaggaaggttctggctgtggtggggactgcggaggccagcagtgaacaccccttgggcgtggca

SEQ ID NO: 331823 - DNA, 201 bp, Homo sapiens
ttgtggtcagtgagttgtggttgtttttggcagataaagactgtgatgtttgacaagactggcaccattacccatggcgtccccagggtcatgcgggtgcycctgctgggggatgtggccacactgcccctcaggaaggttctggctgtggtggggactgcggaggccagcagtgaacaccccttgggcgtggcagtcacc

SEQ ID NO: 331824 - DNA, 201 bp, Homo sapiens
ctgtgcatcctgtgtgtctaacatagaaaggaatctgcagaaagaagctggtaagagatgaacgcccatgttgaacttaggaatgctgcgtatagacctcrtattctcccttcagaatacccagcaactgtgtttatcagtagccctgataaccaggtagcaagttcattatatagcataaatgtttgtctaatgtccttg

SEQ ID NO: 331825 - DNA, 201 bp, Homo sapiens
tcagagggagcagctccttgcattttacataataggctcttctcttgcctcacaccagtccctcccccagtccctccccagtagactggccttttccaccraaatgacaacaaaaaacctggaatgtcagggttggagaatgcctttaagtcatgtgacgccagtttctctaagtgtggtccatggagcacctacaggaga

SEQ ID NO: 331826 - DNA, 201 bp, Homo sapiens
actgtttctagccacaccagccataaaggaatcatgccctggaagcaggctttgtgaaagaggagactttgtcatgttcactgctatatccacagtgcccrttttataaagagcttctgaaattgagcagacaaagaccaccaacccaatagataaatggccaaaggatatgaacaaattggttgcagacaaatgcaaatg

SEQ ID NO: 331827 - DNA, 201 bp, Homo sapiens
gtgttattcagttgttcggccacacccagaatacttggtgattgttactggcttatccttcagcctctttttactctggctatgcaatggcagttcacctracttttcagtgtaggccatgatcacttcagtcacctcttcccaacattctccaggaccttggctggaatttatttattacactttttatttccataggtt

SEQ ID NO: 331828 - DNA, 201 bp, Homo sapiens
attaataaattaggtattaataccatttccatttcacatatgaagaaggaagtgcatagagaatttcagaaacttgcctaaagctacacagaagtagagcytagatttgaaccaaggcagttttgctcagagaccatacctctctaaagtagaaggttactataataacataggcatcaaatagcctgggtcacaatgagc

SEQ ID NO: 331829 - DNA, 201 bp, Homo sapiens
actctggctatgcaatggcagttcacctaacttttcagtgtaggccatgatcacttcagtcacctcttcccaacattctccaggaccttggctggaatttrtttattacactttttatttccataggtttttgggggaacaggtgatatttggttacatgtgtaagttctgtagtggggatttgtgagattttggtgcact

SEQ ID NO: 331830 - DNA, 201 bp, Homo sapiens
atgtgagggactgatagagtttgcccttgtgttgtggtaagggggacaaaaagtaccatgaaattctaggtagaaagcacattctgagcagtatataattsaactcatttatttaaatatggttaaatatacttattcaaatgtaaatatgtaaatatttaactgcttaaatatacttatttaatgtctgatattgttcat

SEQ ID NO: 331831 - DNA, 201 bp, Homo sapiens
tatccatcttgatttttaattccatttattaattgtagttattttaaagtctgtgtcttattattattcaagatccagttcatctgtggatatgtttctcwtgtctttttttccctcttggttttctgtcaaaacttattttcttatacggcttgttattttgatagagtgctaatattctgaggctcttcagcatgttaa

SEQ ID NO: 331832 - DNA, 201 bp, Homo sapiens
atacctaattacaaatttacacaccaaaaattgattttccagaccctctattacctgcttgctcaccacccattgctcccaaaaacatcatctcccttcartgattccattttagaatcatgaggatataagacaacataataataaaatcagagtgtacaaatttaacaaaagtgaataatatcctaaatgcaaatgatg

SEQ ID NO: 331833 - DNA, 201 bp, Homo sapiens
tcagtctttaattttatttattaaattttattccaatctaggatattcatttggttctcagtttttctggtaccaaatttatccatcttgatttttaattscatttattaattgtagttattttaaagtctgtgtcttattattattcaagatccagttcatctgtggatatgtttctcttgtctttttttccctcttggt

SEQ ID NO: 331834 - DNA, 201 bp, Homo sapiens
ccttgaactctggaagcagaggttgcagtgagccgagatcgtgccactgcactccagcctgggcgacagggcgagactccatctcaaaaaaaaaaaaaaaattactgaattgggactgggttttttaacttaaagtgactggaagaatccatggtgtctactcgagttttaatttagggacaagggtggagctagccccat

SEQ ID NO: 331835 - DNA, 201 bp, Homo sapiens
tcctgttttcagaaccccaacaagcacatctcccagacagaggtgatcatccggtttgctttccagacgtccatcacggtgctgtgcattgcctgcccctrctccctggggctggccacgcccacggctgtcatggtgggcaccggggtggccgcgcagaacggcatcctcatcaagggaggcaagcccctggagatggcg

SEQ ID NO: 331836 - DNA, 201 bp, Homo sapiens
tttgggaggctgaggtgggcggatcacgaggtcaggagttggagaccagcctggacaacatggcgaaaccccgtctctactaaaaatacaaaaattagcckggcatggcggcaggtgcctgtaatcccagctactcaggaggctgaggcaggagaatcccttgaactctggaagcagaggttgcagtgagccgagatcgtg

SEQ ID NO: 331837 - DNA, 201 bp, Homo sapiens
tgcctctacccgggaacctttctctgttggttttctcagtggtttttggtgtctctgattcttatcctccgatgtcatgcagactctaaccactcccattktcagaggcgttgtgccttgcccctcccttgtgtgcccttgtccatgtatcacactgttgatggagccagcctgccctagctgtgtcctggaggcctgggc

SEQ ID NO: 331838 - DNA, 201 bp, Homo sapiens
acaagcacatctcccagacagaggtgatcatccggtttgctttccagacgtccatcacggtgctgtgcattgcctgcccctgctccctggggctggccacrcccacggctgtcatggtgggcaccggggtggccgcgcagaacggcatcctcatcaagggaggcaagcccctggagatggcgcacaaggtcagcctgtagc

SEQ ID NO: 331839 - DNA, 201 bp, Homo sapiens
tgagaagtcagcatcaatctaattgttgctttttgaaggaagtatgctttttaaaattctacccgatgttaatttaagactttgcctttggtctttggcarctttattttgatgtgaccagatgtgctttactttgtattttcatgcttgggatttgaagtatttcttgtatgattgaaattacctttgcaaaatgatgac

SEQ ID NO: 331840 - DNA, 201 bp, Homo sapiens
tggcagataaagactgtgatgtttgacaagactggcaccattacccatggcgtccccagggtcatgcgggtgctcctgctgggggatgtggccacactgcycctcaggaaggttctggctgtggtggggactgcggaggccagcagtgaacaccccttgggcgtggcagtcaccaaatactgtaaagaggtacgtggactt

SEQ ID NO: 331841 - DNA, 201 bp, Homo sapiens
tagtccatccagaatttctccagaaattttcactgtgtctccagaatttgtttggttatatatagaaaaggatatatgtgcttttctatatacatatatayacacacacacacacacacacacacacacttctatatatatattttttctatatatctatataaaagtatatgtatacaaagtgtgtgtgtgtgtatatat

SEQ ID NO: 331842 - DNA, 201 bp, Homo sapiens
aagactggcaccattacccatggcgtccccagggtcatgcgggtgctcctgctgggggatgtggccacactgcccctcaggaaggttctggctgtggtggrgactgcggaggccagcagtgaacaccccttgggcgtggcagtcaccaaatactgtaaagaggtacgtggacttgggcgtggccctgccctccccgccaat

SEQ ID NO: 331843 - DNA, 201 bp, Homo sapiens
ggcaccattacccatggcgtccccagggtcatgcgggtgctcctgctgggggatgtggccacactgcccctcaggaaggttctggctgtggtggggactgyggaggccagcagtgaacaccccttgggcgtggcagtcaccaaatactgtaaagaggtacgtggacttgggcgtggccctgccctccccgccaatgctctt

SEQ ID NO: 331844 - DNA, 201 bp, Homo sapiens
caccattacccatggcgtccccagggtcatgcgggtgctcctgctgggggatgtggccacactgcccctcaggaaggttctggctgtggtggggactgcgraggccagcagtgaacaccccttgggcgtggcagtcaccaaatactgtaaagaggtacgtggacttgggcgtggccctgccctccccgccaatgctctttt

SEQ ID NO: 331845 - DNA, 201 bp, Homo sapiens
accattacccatggcgtccccagggtcatgcgggtgctcctgctgggggatgtggccacactgcccctcaggaaggttctggctgtggtggggactgcggmggccagcagtgaacaccccttgggcgtggcagtcaccaaatactgtaaagaggtacgtggacttgggcgtggccctgccctccccgccaatgctctttta

SEQ ID NO: 331846 - DNA, 201 bp, Homo sapiens
ggcgtccccagggtcatgcgggtgctcctgctgggggatgtggccacactgcccctcaggaaggttctggctgtggtggggactgcggaggccagcagtgracaccccttgggcgtggcagtcaccaaatactgtaaagaggtacgtggacttgggcgtggccctgccctccccgccaatgctcttttattcctcaccatg

SEQ ID NO: 331847 - DNA, 201 bp, Homo sapiens
tcaaaaatgtggccccaatggaaaaaaatagtcttgaagaatttcaacttctagatttttccttttagtcattagcatatgtttattttgtcattttttawattttattttaccagagtgtaatttctacgggtgggaaggtagtgtggggaccgactgactttttcctttgtattgttctgtcatttaactttgtacaac

SEQ ID NO: 331848 - DNA, 201 bp, Homo sapiens
ccctcgagatagctcagttcatccaggacctgggttttgaggcagcagtcatggaggactacgcaggctccgatggcaacattgagctgacagtaagtacygtgggtgcgttacggggttacaggcttctgacagtttgcattttggacacatccatctttgtgattagtaaatttccccatcttggacgtgtctggtttg

SEQ ID NO: 331849 - DNA, 201 bp, Homo sapiens
tgcatattttaaccaagtaccttcctcctttttccccacccctctctttttaatgacaaggaaattggctttcatgcttccctggcccagagaaaccccarcgctcatcacttggaccacaagatggaaataaagcagtaggtagaacacaaaagataaactccagctctcatctaagtcccttcctctacctgggcccaa

SEQ ID NO: 331850 - DNA, 201 bp, Homo sapiens
gctgcatttgctttccaggtggaagaagtctttcctgtgcagcctggtgtttggcatccctgtcatggccttaatgatctatatgctgatacccagcaacragccccaccagtccatggtcctggaccacaacatcattccaggactgtccattctaaatctcatcttctttatcttgtgtacctttgtccaggtatatat

SEQ ID NO: 331851 - DNA, 201 bp, Homo sapiens
ttttccagaccctctattacctgcttgctcaccacccattgctcccaaaaacatcatctcccttcaatgattccattttagaatcatgaggatataagacmacataataataaaatcagagtgtacaaatttaacaaaagtgaataatatcctaaatgcaaatgatgtgaagttaactgagtattaaccaaggcacagaac

SEQ ID NO: 331852 - DNA, 201 bp, Homo sapiens
actctcctccctacttgctggcagccttcactgtccttgtctttcagctcctcggtgggtggtacttctacgttcaggcctacaaatctctgagacacagrtcagccaacatggacgtgctcatcgtcctggccacaagcattgcttatgtttattctctggtcatcctggtggttgctgtggctgagaaggcggagagga

SEQ ID NO: 331853 - DNA, 201 bp, Homo sapiens
gcttgctcaccacccattgctcccaaaaacatcatctcccttcaatgattccattttagaatcatgaggatataagacaacataataataaaatcagagtstacaaatttaacaaaagtgaataatatcctaaatgcaaatgatgtgaagttaactgagtattaaccaaggcacagaacaatctttgtagatgtgtgaatc

SEQ ID NO: 331854 - DNA, 201 bp, Homo sapiens; identical to SEQ ID NO: 69218

SEQ ID NO: 331855 - DNA, 201 bp, Homo sapiens
ccctttcacttcacccctcttggcttacagtttcctcttcctctctttccaccttcccaggaacttggaacagagaccttgggatactgcacggacttccmggcagtgccaggctgtggaattgggtgcaaagtcagcaacgtggaaggcatcctggcccacagtgagcgccctttgagtgcaccggccagtcacctgaat

SEQ ID NO: 331856 - DNA, 201 bp, Homo sapiens
ataataaaatcagagtgtacaaatttaacaaaagtgaataatatcctaaatgcaaatgatgtgaagttaactgagtattaaccaaggcacagaacaatctytgtagatgtgtgaatctgtgcataggtaatgattattaagaacctaacaggatttctgtacccacagttaaggttcttttcaaactggtgaaatatgtgc

SEQ ID NO: 331857 - DNA, 201 bp, Homo sapiens; identical to SEQ ID NO: 69220

SEQ ID NO: 331858 - DNA, 201 bp, Homo sapiens
agtattaaccaaggcacagaacaatctttgtagatgtgtgaatctgtgcataggtaatgattattaagaacctaacaggatttctgtacccacagttaagsttcttttcaaactggtgaaatatgtgctaatgaaatgatttcatgacaccctgaattccctgcctgaagatcttttaatagacagaccaccaggggccat

SEQ ID NO: 331859 - DNA, 201 bp, Homo sapiens
caatccaaccccagtcaggctgtcacgaagcattgttttatattacttaagagctcatttcaaattgtggaggaggagggaggcaggcacagacagcgcarccataaaacacgagcaaaaccagcgcttctggctggaggagttcgcagtgggcataaaaataggaaaacaagtgttgaagtgtgctcctacccacctgca

SEQ ID NO: 331860 - DNA, 201 bp, Homo sapiens
agatgtgtggttcctcattgggaaggggcaggatgagaagcgcctactgtggcctcacactccttccctcagggaagtcagaggtcatcaaatattctttmcttcattcatctgtatcattaaacatgtactgagtatctattgcatgcccaagatttgctaggcactgaggataaaactcaaagcaagacagttactctc

SEQ ID NO: 331861 - DNA, 201 bp, Homo sapiens
acagccagagagtgagggtaagtgactacacagccaagaacattatgcagaaaatagttctggaatgctccaaaagagcccttattgcccctgcagcaggrtgtgggctctggctcacactactgtcccaggcagggacccctctgccagggcctctgttcctgctcttctaaaagcttgatttcctgccctcacacaatg

SEQ ID NO: 331862 - DNA, 201 bp, Homo sapiens
gctgtaagggaggctgggaaataaatttctgactttcacagatgagacggaaaattccccaaacacaagaagggtgttccaaaggtgctgggcagccacaragcctttgagtattccctgcatagtctctgctctcttcaccttacagtctgctagaagatgggtgaccagtgctgggccaggggaagtacaggtagaaga

SEQ ID NO: 331863 - DNA, 201 bp, Homo sapiens
gtgtgaactcaggaggtggagcttgcagtgagccgagattgcgccactgcactccagcctgggcaacagagcgagactccatctcaaaaaaaaaaaaaaaagtcatactctgcatttttcttattattccattggtcacacagatcagccctactcagtgtgggtggggatggtccaagggtatgcataccagagggggag

SEQ ID NO: 331864 - DNA, 201 bp, Homo sapiens
ctttgggaggctgaggtgggcggatcacgaggtcaggagttggagaccagcctggacaacatggcgaaaccccgtctctactaaaaatacaaaaattagcsgggcatggcggcaggtgcctgtaatcccagctactcaggaggctgaggcaggagaatcccttgaactctggaagcagaggttgcagtgagccgagatcgt

SEQ ID NO: 331865 - DNA, 201 bp, Homo sapiens
atgactccccggccttggcccaggcagacatgggtgtggccattggcaccggcacggatgtggccatcgaggcagccgacgtcgtccttatcagagtgagygtggctgcagccaggctgtgggtgctgggagggcaatgggcagaccccttcctcactgtgtgctcctctccatcagaatgatttgctggatgtggtggct

SEQ ID NO: 331866 - DNA, 201 bp, Homo sapiens
ttgctttccagacgtccatcacggtgctgtgcattgcctgcccctgctccctggggctggccacgcccacggctgtcatggtgggcaccggggtggccgcrcagaacggcatcctcatcaagggaggcaagcccctggagatggcgcacaaggtcagcctgtagcacggctttccccatcctgagagatgaaagtagtatc

SEQ ID NO: 331867 - DNA, 201 bp, Homo sapiens
ctcaggactagaagctaggggttcgaatcaaaaatgaataagacacagtcctgcctctttttccttccatttccctagaacagtagttgtccctctcctgyaacccacccctgcggaatccttcgtgcagatgtcatgtcactgaggaaaataatgcacaaagcagggaaagtgaaggtgctgtgcttcagttgggcatag

SEQ ID NO: 331868 - DNA, 201 bp, Homo sapiens
cgccatggtgggggatggggtcaatgactccccggccttggcccaggcagacatgggtgtggccattggcaccggcacggatgtggccatcgaggcagccracgtcgtccttatcagagtgagcgtggctgcagccaggctgtgggtgctgggagggcaatgggcagaccccttcctcactgtgtgctcctctccatcaga

SEQ ID NO: 331869 - DNA, 201 bp, Homo sapiens
tcttggcttacagtttcctcttcctctctttccaccttcccaggaacttggaacagagaccttgggatactgcacggacttccaggcagtgccaggctgtrgaattgggtgcaaagtcagcaacgtggaaggcatcctggcccacagtgagcgccctttgagtgcaccggccagtcacctgaatgaggctggcagccttcc

SEQ ID NO: 331870 - DNA, 201 bp, Homo sapiens
gccaacatggacgtgctcatcgtcctggccacaagcattgcttatgtttattctctggtcatcctggtggttgctgtggctgagaaggcggagaggagccytgtgacattcttcgacacgccccccatgctctttgtgttcattgccctgggccggtggctggaacacttggcaaaggtaacagcagcttcaggttcagaa

SEQ ID NO: 331871 - DNA, 201 bp, Homo sapiens
ggcttacagtttcctcttcctctctttccaccttcccaggaacttggaacagagaccttgggatactgcacggacttccaggcagtgccaggctgtggaaytgggtgcaaagtcagcaacgtggaaggcatcctggcccacagtgagcgccctttgagtgcaccggccagtcacctgaatgaggctggcagccttcccgca

SEQ ID NO: 331872 - DNA, 201 bp, Homo sapiens
tgacatgaatccatcattagtatgtatttgctctattgggcatctcttgctgttgagggaccctcttttggaagagctgccgcttcaaagggctccaaggracgtgcagttttttgtgagttgttcaagtccccaccataatagtgaataggtcttttgtagtgtatttgaatctgcaaattcacacagtgaattctgtga

SEQ ID NO: 331873 - DNA, 201 bp, Homo sapiens
ctcaccgcagccacctgcttcctgaagaattgcccttgcagagcagaagccaccatgctaggaagttatccactccctcggcatcacatagccaataaccrattgctgtcagggctgtgttagttatctgtttctcaaaataaattactccaaaacttagtgccttaaacggacaatgaatatttgttatttcacagtctg

SEQ ID NO: 331874 - DNA, 201 bp, Homo sapiens
gggactgactatctctggtcacactgcttcctgccataaaggtcctgttgacataaagccaagttttgagcatgacatgtcctagaaggacagtgatgggraataagaaccccgagtctcagcccaaccaccgtgcttgtgtgctagcagtggatcagctgcagagagaagctgcgggctgcatggctcctgcctgcaggc

SEQ ID NO: 331875 - DNA, 201 bp, Homo sapiens
cagtttcctcttcctctctttccaccttcccaggaacttggaacagagaccttgggatactgcacggacttccaggcagtgccaggctgtggaattgggtkcaaagtcagcaacgtggaaggcatcctggcccacagtgagcgccctttgagtgcaccggccagtcacctgaatgaggctggcagccttcccgcagaaaaa

SEQ ID NO: 331876 - DNA, 201 bp, Homo sapiens
cctcttcctctctttccaccttcccaggaacttggaacagagaccttgggatactgcacggacttccaggcagtgccaggctgtggaattgggtgcaaagwcagcaacgtggaaggcatcctggcccacagtgagcgccctttgagtgcaccggccagtcacctgaatgaggctggcagccttcccgcagaaaaaggtatt

SEQ ID NO: 331877 - DNA, 201 bp, Homo sapiens
ggcgtggcagtcaccaaatactgtaaagaggtacgtggacttgggcgtggccctgccctccccgccaatgctcttttattcctcaccatgtccttctctcmtagctgccctcgaggagccttctctgtgtggtctggaaaaccacttagagggcccttctgcagcaggcggagatatagggctcacagtcagcccttgcca

SEQ ID NO: 331878 - DNA, 201 bp, Homo sapiens
caggtatggagagatgaacagatcaagtgtcgattaccactgaaaagatggtttgttactcacagatcccaacagaagggaaagtactatgccatgcagcwccgaatagggaggcagtatggtcagcgagaagataggagtgatggaaaaacatgggcaagagcctttacggtggtttccatgggaaggaatgagtgaggc

SEQ ID NO: 331879 - DNA, 201 bp, Homo sapiens
gacatctccattgacacagactacgtactttagaaccttgcctgatcataggttccagagacatgctggtggcatagtccgttatcatatttcaaggttcycccccatatccacgtcttggtacctacacatctctgtagaatcattgaggtgattatctcatggctcattgtgactgcatagctagatggccagccccgc

SEQ ID NO: 331880 - DNA, 201 bp, Homo sapiens
tgtttgtgagggacaagctttggtagaaaaacatgtggggtggtcatggctttgagctggagaggcagtcagtacattcaagctcaaggctgctaaaaacrtagacactcagccaagaaggacagtggctgtcaactagggtatcagaacacataggtgtgacatgatgaggccaagaagaatttacgtttgttaaatcaa

SEQ ID NO: 331881 - DNA, 201 bp, Homo sapiens
ggagaggagccctgtgacattcttcgacacgccccccatgctctttgtgttcattgccctgggccggtggctggaacacttggcaaaggtaacagcagctkcaggttcagaaaagagctgctccttcagtaaacaaatctcacttcctctgaacaccatgtttagaattactaattatacacagcatagagacagacttaa

SEQ ID NO: 331882 - DNA, 201 bp, Homo sapiens
acccctgttttccatggtcctccttgctaattatggacctgtttagcgtccttccccccttttctggctagcacttgttcatctattcagcaggcacttaygaagcaccacgaatgtgacaggcaggtgtggggccaggctctgtgaggagtgaaggggggtctgcccttgacgggctcatggtcttgcaggaaggtggac

SEQ ID NO: 331883 - DNA, 201 bp, Homo sapiens
cacttggcaaaggtaacagcagcttcaggttcagaaaagagctgctccttcagtaaacaaatctcacttcctctgaacaccatgtttagaattactaattrtacacagcatagagacagacttaaagaaataggaaacctccatataattaaggtgctctagtcactaatctccaaattggtcactacttctgaaatccca

SEQ ID NO: 331884 - DNA, 201 bp, Homo sapiens
tttagttcacagtgaaattggaccatttagaaataaccacagcctcttttgaatagatgcagtcccccagaccttctctgtgctgattggaaaccgtgagyggctgaggcgcaacggtttaaccatttctagcgatgtcagtgacgctatgacagaccacgagatgaaaggacagacagccatcctggtggctattgacgg

SEQ ID NO: 331885 - DNA, 201 bp, Homo sapiens
tgcttgaacctgggaggcggagtttgcagtgagctgagattacgccactgcactccagcctgggcaacaaagagcgaaactccgtctcaaaaaaaaaaaaagattgtgtcaagtgaaattacaatatgtataatgcaatcacactttaccatttatatgaagttatataggtgtgtatatgtttaaagatgttaatgaaat

SEQ ID NO: 331886 - DNA, 201 bp, Homo sapiens; identical to SEQ ID NO: 69137

SEQ ID NO: 331887 - DNA, 201 bp, Homo sapiens; identical to SEQ ID NO: 69139

SEQ ID NO: 331888 - DNA, 201 bp, Homo sapiens
aggaagtggctccccacactgggaggctccctgcaaaccatgccccggacatcttggcaaagtccccacaatcaaccagagcagtggcaccgcagaagtgmttcttacagatcaaaggcatgacctgtgcatcctgtgtgtctaacatagaaaggaatctgcagaaagaagctggtaagagatgaacgcccatgttgaact

SEQ ID NO: 331889 - DNA, 201 bp, Homo sapiens
atctgtattgtggtcagtgagttgtggttgtttttggcagataaagactgtgatgtttgacaagactggcaccattacccatggcgtccccagggtcatgygggtgctcctgctgggggatgtggccacactgcccctcaggaaggttctggctgtggtggggactgcggaggccagcagtgaacaccccttgggcgtggc

SEQ ID NO: 331890 - DNA, 201 bp, Homo sapiens
tgaatagatgcagtcccccagaccttctctgtgctgattggaaaccgtgagtggctgaggcgcaacggtttaaccatttctagcgatgtcagtgacgctaygacagaccacgagatgaaaggacagacagccatcctggtggctattgacggtatcttctgcttctgccttccttccgctctctcagaaatacagttttct

SEQ ID NO: 331891 - DNA, 201 bp, Homo sapiens
ttctgggctcaagagatccacctgcttcagccttccaaaatgccggaaatacaggtgtgagcaaccatgccagggtggaagttgcttttaaatgcagattyccaggcgccatttgtactgatcctggtttgtgagatctagagcggccattgagaccctgagagtcatggctctgaggtgcagcgagcaagagtgagcctc

SEQ ID NO: 331892 - DNA, 201 bp, Homo sapiens
gcctcatgtgcagcctcattttcaaacagtgtttgaaaactgctgttctagaggattctgggaagatgtgtttctttgttcggttatattgactgtgtcamcctagaggccctgcccacccagagtgttacagccatgacctgatggttccaggtgttctctccgtgttggttgccttgatggcaggaaaggcagagatca

SEQ ID NO: 331893 - DNA, 201 bp, Homo sapiens
caggaggcggaggttaaggtgagccgggatcgcaccattgcactttagcctgggcaacaagagcaaaactccatctcaaaaaaacaaacaaaacccccccmcacacacacaaaaaaacaaatcggattgggtggttcaaacaacaggaagttattttctcacagttctagaagctgaaagtccaagatcaaggtgccggca

SEQ ID NO: 331894 - DNA, 201 bp, Homo sapiens; identical to SEQ ID NO: 69161

SEQ ID NO: 331895 - DNA, 201 bp, Homo sapiens
ccaaattcgaatccttatggttttccatgggaattggtgatatgtgcagctgtccttggatttgttgctgttcccttttttttgtggagaagttttagatyggttaggagtcggctttatgtgggaagagagaaagagcttgctatagcgctttctggactaattgaagaaaaatgtagactacttgaaaaatttagcctt

SEQ ID NO: 331896 - DNA, 201 bp, Homo sapiens
gcttcagccacctttccaggcgagtgaacggttctgtcttgctggcattccaggcaccactggggtatgaaaaaaaaactcctgcagctagcttggtgtcygcccaaacggctgtccagttttgtgcttgaaacccagggccctggtggtgtaggcacccgagggaatctcctggtctgtgggttgtgaagaccgtgggaa

SEQ ID NO: 331897 - DNA, 201 bp, Homo sapiens
gaaacccagggccctggtggtgtaggcacccgagggaatctcctggtctgtgggttgtgaagaccgtgggaaaagtgtagtgcctggaccagagtgcaccrttcctcatggcacagtccctcgcggcttcccttggctagtggaggaggttcactaaccacttgtgcttcctgcatgaggcaacaccccaccctgctttgg

SEQ ID NO: 331898 - DNA, 201 bp, Homo sapiens
gtgctctgtgggatgatcgcaatcgcagacgctgtcaagcaggaggctgccctggctgtgcacacgctgcagagcatgggtgtggacgtggttctgatcaygggggacaaccggaagacagccagagctattgccacccaggtacagccctttaatgttgcaaactgtgtaaagctcataaaagcagttagagacaaaagt

SEQ ID NO: 331899 - DNA, 201 bp, Homo sapiens
cttccttttgtcttaggttggcatcaacaaagtctttgcagaggtgctgccttcgcacaaggtggccaaggtccaggagctccagaataaagggaagaaaktcgccatggtgggggatggggtcaatgactccccggccttggcccaggcagacatgggtgtggccattggcaccggcacggatgtggccatcgaggcagc

SEQ ID NO: 331900 - DNA, 201 bp, Homo sapiens
ttaggttggcatcaacaaagtctttgcagaggtgctgccttcgcacaaggtggccaaggtccaggagctccagaataaagggaagaaagtcgccatggtgrgggatggggtcaatgactccccggccttggcccaggcagacatgggtgtggccattggcaccggcacggatgtggccatcgaggcagccgacgtcgtcct

SEQ ID NO: 331901 - DNA, 201 bp, Homo sapiens
taggttggcatcaacaaagtctttgcagaggtgctgccttcgcacaaggtggccaaggtccaggagctccagaataaagggaagaaagtcgccatggtggkggatggggtcaatgactccccggccttggcccaggcagacatgggtgtggccattggcaccggcacggatgtggccatcgaggcagccgacgtcgtcctt

SEQ ID NO: 331902 - DNA, 201 bp, Homo sapiens
tttgcagaggtgctgccttcgcacaaggtggccaaggtccaggagctccagaataaagggaagaaagtcgccatggtgggggatggggtcaatgactcccyggccttggcccaggcagacatgggtgtggccattggcaccggcacggatgtggccatcgaggcagccgacgtcgtccttatcagagtgagcgtggctgca

SEQ ID NO: 331903 - DNA, 201 bp, Homo sapiens
accacatcccaagtgattcttttcagtttttttattacatgacttttccatggagcttgaccccagtggataacttcccaagctcctcctccttgaaactstcctctcttggattttgagcttggatgacagagtgagaaaggcctggcgtttttgctctggactgggtaacccaatgaagctatgtggattttctgcaca

SEQ ID NO: 331904 - DNA, 201 bp, Homo sapiens
ggtatgattctgccagagcagaagaccctatatggttctcttttctgccccagcactgcctcattatggctatgataggtttattgaagctaaagtttggrcattctggggcagcctttgccccacacccacacgagtctttttcatttttcggttgccactgaagtctggaaatagcactctgccttttcctctggcccc

SEQ ID NO: 331905 - DNA, 201 bp, Homo sapiens
tgatgctgatggtgaatgagaagcagcactgcagaaaaccacctcatgcctagcatcccagggccacaggtgctgtgtgttagattgagtgttcacttgtycagtgtgaatgtatttttgttaagagttattggcctttgagtttctggtgaccagatgcttctttctaaacacacacacacacacacacacacacacaca

SEQ ID NO: 331906 - DNA, 201 bp, Homo sapiens
tgtcaaaggtaatgaagaaatttttaaaactaacttcatctttctcgttttagaaattatgtgaagagttctgggaaatcagacagttttattgagtagarattgattagtaaatgtggttaaatgaaggagattatcccaatctttatccatgcttgtggtgttttatttcttcataggttgtaatttcccatggtcttg

SEQ ID NO: 331907 - DNA, 201 bp, Homo sapiens
ttactcacagatcccaacagaagggaaagtactatgccatgcagcaccgaatagggaggcagtatggtcagcgagaagataggagtgatggaaaaacatgrgcaagagcctttacggtggtttccatgggaaggaatgagtgaggcaaggtgagcagggttaaggttagctattatagtttgagtagtttcagcaggctct

SEQ ID NO: 331908 - DNA, 201 bp, Homo sapiens
tccatttgcaatgagaaatgtctgtccaccgaggggttttcctccttaccttcccccaagacctggattttgcccccacccccacccccacattctgaagrtagagtgagttccctttagggttgagtctgccttcaaatgagcctgctgctgaagatccagaaccacagcaagaaacctgataatatttttgctgtcttc

SEQ ID NO: 331909 - DNA, 201 bp, Homo sapiens
tggaatttttattctactttttcatagatccgagtacaggtgacattgttcatgacacactccaccactaatttcccatctttcaattttcttgttattgkgctttccttcccatcccactcctgatgctgaaccaatgcaccatctgtaaagttgcagacagtctgtgtttttctgccatcagctgtggtttcttcaaac

SEQ ID NO: 331910 - DNA, 201 bp, Homo sapiens
taggcacccgagggaatctcctggtctgtgggttgtgaagaccgtgggaaaagtgtagtgcctggaccagagtgcaccattcctcatggcacagtccctcrcggcttcccttggctagtggaggaggttcactaaccacttgtgcttcctgcatgaggcaacaccccaccctgctttggcttgccctccatgggctgtacc

SEQ ID NO: 331911 - DNA, 201 bp, Homo sapiens
ccaagttcgtcacgttgtgtccagtgcccccctgaaatgtccttatgtgattagagttctgggagcttccttattgaactctcaacctgcctctgactctstcctgttttcagaaccccaacaagcacatctcccagacagaggtgatcatccggtttgctttccagacgtccatcacggtgctgtgcattgcctgcccct

SEQ ID NO: 331912 - DNA, 201 bp, Homo sapiens
attttagatattccctaagaaacatcaatattgtcaagataccctgtacatagggttaaagtgcctaattgtaatttttaagtgtgatctttgcccaaacsaagtatctgtagagcaaaggaacgttggccttggaaaaaatgatccacattttgccactatgccaggccactcttgttgtggagagcttggccgcttctg

SEQ ID NO: 331913 - DNA, 201 bp, Homo sapiens
atgaagaaaaactggagataggaatacaagatgcttcgagtgaaaattgtcaacttcaggaaagccagaaacagcttttgcaagaagctgaagtatggaargaacaagtgagtgaacttaataaacagaaaataacatttgaagactccaaagtacacgcagaacaagttctaaatgataaagaaaatcacatcgagactc

SEQ ID NO: 331914 - DNA, 201 bp, Homo sapiens
tgccacctgtgggtggttctgggaacatcagggcgagtggaagagagccaggcccactcaacagcatcccacacccagctttctaggaagcctcactttgsggggggcctgtgggcaagatccattggcaggggcttctgagcacgccaggtggagacctcactgggggccgctgagggtggggcagcccggtgcctgaag

SEQ ID NO: 331915 - DNA, 201 bp, Homo sapiens
atccatttgtatgatattctcttgtttcacacaggtagtcctagcaccatgacagaattgtagccctctcagtgaactacacacccttgtattcaagctcmgtgtaattcctgcccatattgactgtgcttggccgtgtgactggttttggccaatgggtgttagcaagtgtgatgcaagcagaggtttgataagagcttg

SEQ ID NO: 331916 - DNA, 201 bp, Homo sapiens
cctgcccctgctccctggggctggccacgcccacggctgtcatggtgggcaccggggtggccgcgcagaacggcatcctcatcaagggaggcaagcccctrgagatggcgcacaaggtcagcctgtagcacggctttccccatcctgagagatgaaagtagtatctgtttactatttcacattgagagaaaagcctgagag

SEQ ID NO: 331917 - DNA, 201 bp, Homo sapiens
gagcaaatgaggaactggaagaaaatcattgagagagaggaaccagagatgaggccgttgagggaggggccagaatccaaaggctgaagatttagtaaagkgttctgaacgttagcctagaagccacgtaggggatggcatacccacgtgatgtgactggatcgtgtgttgggaagatcattccggctgcagtgttaaggt

SEQ ID NO: 331918 - DNA, 201 bp, Homo sapiens
gatactgcacggacttccaggcagtgccaggctgtggaattgggtgcaaagtcagcaacgtggaaggcatcctggcccacagtgagcgccctttgagtgcrccggccagtcacctgaatgaggctggcagccttcccgcagaaaaaggtattgctggcttttgtctctgcagctggttaaaagtagaggtgggtcaaacca

SEQ ID NO: 331919 - DNA, 201 bp, Homo sapiens
atgttgtgtctttgttctcattggcttcaaagaacttatttctgccttaatttcattatttacccagtagtcattcaggagcaggttgttcagtttccatrtagttttacagttttgagtgagtttcttaatcctgagttctaatttgattgcactgtgatctgagagactgtttgttattatttctgttcttttgcattt

SEQ ID NO: 331920 - DNA, 201 bp, Homo sapiens
actgcacggacttccaggcagtgccaggctgtggaattgggtgcaaagtcagcaacgtggaaggcatcctggcccacagtgagcgccctttgagtgcaccrgccagtcacctgaatgaggctggcagccttcccgcagaaaaaggtattgctggcttttgtctctgcagctggttaaaagtagaggtgggtcaaaccacag

SEQ ID NO: 331921 - DNA, 201 bp, Homo sapiens
cagaatgaaccaacaggatctgtgtgtatcaatatggggaaaacacagtgttgagtgaaaaaaattacagatacttaaagagtcatgaagattaaaaaaaataattttatgtattgttctagacaccagtctctgtggtcaaagtacaaacatggtctggggctatataccaagttcagatcggtggtttcctatggggag

SEQ ID NO: 331922 - DNA, 201 bp, Homo sapiens
tggctctcaagtccacagcgccagccccaaagcatctgagtggctgccggcactttccactgtgagatgtgctgcctgagggtctggtgcttggctgtgggctttcaaccgatctcagtgtgggtgtggcacaactgacactgttgcttttcctggccttaacaagccacccattccatcgcctccccaggtggctgtggt

SEQ ID NO: 331923 - DNA, 201 bp, Homo sapiens
ataattgaacacagtaatgaaaaaaaaaagaaagaaacagtatggagatttgctcattgaactgagcttggtcattctcttagttaactcctgtccaaagkgatgatggaatttttattctactttttcatagatccgagtacaggtgacattgttcatgacacactccaccactaatttcccatctttcaattttcttgt

SEQ ID NO: 331924 - DNA, 201 bp, Homo sapiens
ggcagggatgacagtgttaatgggggaggaagcgtcactgtgggcaacctatgaggaggcagccttcagtgaccttgggcatgtgttctgagtgccctcaytgggtgcacaccttagtgaccccctgctggtacattctgctgtgaagaataacacggagagacagagtgatcattttaccctgaattcaattccacactc

SEQ ID NO: 331925 - DNA, 201 bp, Homo sapiens; identical to SEQ ID NO: 69499

SEQ ID NO: 331926 - DNA, 201 bp, Homo sapiens
ggcgagatcatctgctagagaaggactgtggccctcagccgtgtttgtcctctgtgggactgtggctacaggatgggcaactggctccctcagctcctgcygcttttctcctcccgctcctcccactccttgtggtttgtcgctgccctggagctcgccctgaaatgggatgccacctgtgggtggttctgggaacatcag

SEQ ID NO: 331927 - DNA, 201 bp, Homo sapiens
ttaaaaaatgtccaaactgttactttacaatttccagcctatatctgaagttttgagatatgacgtgtgctggtgatttttaaggccagcaccaatctgtkactagtggggcgacctgaagctgactaggggagcctcttcagaaaggagggctggggaagaggccttggtggaggggatctgagtgcagacccaacacaa

SEQ ID NO: 331928 - DNA, 201 bp, Homo sapiens
tgagtcagtttcaacagtgaaatggtgataatatctccttctagaattgccctaagcatgagggatataaaatgccatcctcataaaataacactcagaawcattaattatttgttattattggatctgcgtgcatatgaaagaatccggacttttttgtattttgaatcccatgaaagttcagatgtgttaagttgtatg

SEQ ID NO: 331929 - DNA, 201 bp, Homo sapiens
gttattattggatctgcgtgcatatgaaagaatccggacttttttgtattttgaatcccatgaaagttcagatgtgttaagttgtatggggggaggtgatrtattggaaaagttgccttcatgtataacatgtttgcctcataagttgttatgggtgttatacatccttcaaagtgaaagaattcttgaggataggcagca

SEQ ID NO: 331930 - DNA, 201 bp, Homo sapiens
cccagaagcccccagctgtgaggtccccacctagtcataaagagaagccacatggaagagaaccgggtccctgccaacagcctcatctgagcccctagccrgcagcaagcatccacttggcagccatgtgatgaatgaactatcttcttggaagtggaactgccagccccattcaggccacccccagtggtgctatgtgga

SEQ ID NO: 331931 - DNA, 201 bp, Homo sapiens
tcatttgaataattttttgtccttattgtgtttagttatgtcaaatcttttatagcttttggattttcttggttttgttctggtttgttggtcatatttargcttttctcactttaagattattgtagatattctcctgtgttttcttctagtgtttttgttatttcttttttacatgttaatctttgatctgcctgaaat

SEQ ID NO: 331932 - DNA, 201 bp, Homo sapiens
cccacagtgagcgccctttgagtgcaccggccagtcacctgaatgaggctggcagccttcccgcagaaaaaggtattgctggcttttgtctctgcagctgkttaaaagtagaggtgggtcaaaccacagagagcaccacgcccagcagtgattgcctctgctgtgcggcagacggttcatggctaaggcacccaagcctgc

SEQ ID NO: 331933 - DNA, 201 bp, Homo sapiens
gttcccccgcgtccgcgcagcgtgctcactcccaccaggaggattttcctccccgcgttcggcgcttactcgcccccagggggtgcgcagggaaggccgarccagaccccagctccagggatgtcttggcgtgggagaaaaggaccctttagaaaaagtgtgccgtcaactgatgtttgggagcaatggaaaaccccgcac

SEQ ID NO: 331934 - DNA, 201 bp, Homo sapiens
cccagctccagggatgtcttggcgtgggagaaaaggaccctttagaaaaagtgtgccgtcaactgatgtttgggagcaatggaaaaccccgcacctcaaarttcatctttatgcttttaaggggtctgatgctggagagataaagtgagcgtcgagttgctgtgctagagccctaatggctcaaaacgatgaagttagtta

SEQ ID NO: 331935 - DNA, 201 bp, Homo sapiens
catacacacatatatatacatatatatatgtttactgttgattcatgacacaactcagaggttaacaaaagtagaattttacaaatttgaactctaaaacygggaatgttagacagacatagaaagtttctcagacctagtcctattgacattttggagcagataagtgttgttggggactgccctgctccttggaggatg

SEQ ID NO: 331936 - DNA, 201 bp, Homo sapiens
tctctgtctgctttatttatttattattactttctttttcttttttagactgagtttccctcttgtcacccaggctgtagtgcagtggagtggtgtgactygtctcactacaagctccaccttccgggttcaagcaattctcctgcctcagactcctgagtagctgggattacaggcccccgccaccacgcccagctacat

SEQ ID NO: 331937 - DNA, 201 bp, Homo sapiens; identical to SEQ ID NO: 69144

SEQ ID NO: 331938 - DNA, 201 bp, Homo sapiens
gtaggtggtttgtagggtatgatgactatgcatttgataggagtatgaagaaatgttgggaggggtggcttgtacagaggagatttcaacttcctacagtrtccccacctagagaaagaaatcattatccttccaaatcaagctcaagacctgccacctccttgaaacgttctgtaactgctcctgcccatgttgacctgt

SEQ ID NO: 331939 - DNA, 201 bp, Homo sapiens
gtagcctaggttgagaaaccataaagtgtgagagtcctacggcagtcatgtgataagaagaaatatatacttggtcttgtcccaagttcctgacatagagyttcttaaaccgttgtaatttcctgagagatggtgataagagcatcttttgttattcataacaagtctctttcacccctacctgagtttctgttaatgaga

SEQ ID NO: 331940 - DNA, 201 bp, Homo sapiens
gggagggatggagatggcccagtaacatgaacactgctcactgatgccatagcatagatatcgaggaagtatccgtgttcagtgctgagagccccgaacaragatttacccacgaatttattaacagcaagccagtcattagcattgtttctatagatattcattaactaaaagtatcccttatgggaaaggaagggatgg

SEQ ID NO: 331941 - DNA, 201 bp, Homo sapiens; identical to SEQ ID NO: 69517

SEQ ID NO: 331942 - DNA, 201 bp, Homo sapiens
caggccttttgacaacagttggctggagctgaggaacagctgcctgctccaggtggggcatgagctcctcctgtggccgcaagccccgcatggcctgttcygctcatttaagtcactgcctacttgtgacagtacaggcaaacctttgctttattgcccttttgcagatgctgtattttttttttttaccagttgaaggtt

SEQ ID NO: 331943 - DNA, 201 bp, Homo sapiens
ttttagcgcagagcccttctacacagccctgaggaacactgtccttaaaccacaggactcgctggtagcacctgtcctcagtagcgtgtgggtttccctakcatctcccagaaaacagctcactggattggctcaggtgtgtaagggtacctggatatgtgagcagggcaggggtggcagaagatggaagattcaggaacc

SEQ ID NO: 331944 - DNA, 201 bp, Homo sapiens
tgatgtttgcaggtgcagtgtgggactaggaggtgggtgggctggcacccataagtcatattcatggtctttagtgaatgtccgcctggtcagcagatggrcagctagggcttaagcccacaggttagcgttaacggggccttacttgtcctcctccgcataagggaatggagaaaacactggtgagcgagacagacctga

SEQ ID NO: 331945 - DNA, 201 bp, Homo sapiens
cactgagcaagtctactgacgccatttgtgtaacagcatatactcacttcatgccacattttggtaattctcacaatatttcagatttttcattattattrtatctgttacggtgatctgtgatcagtgctctttgatgctactgttataatcatcttggggcccgtgtaagatggcaaagttaatctataaatgtgtaca

SEQ ID NO: 331946 - DNA, 201 bp, Homo sapiens
gaaagtcctgctgagctagttgtttcagtcttggagatcagcagcgatatggggaggagaagccaagcctctgttaaagcccaccagtccttccctccccygctcccagcacctagtgtttgaggaattcagactttgaatactgctctttgctactgttcttctctcctaacttgccagtaaacttccaagggcagtatg

SEQ ID NO: 331947 - DNA, 201 bp, Homo sapiens
agggctattgggtaaagaagttgtaagcagaaaacccacaaagtctactgaggcacttttagattcactttctaatttccaaagctgaaaagtgctttctrccaatgcatattttaaccaagtaccttcctcctttttccccacccctctctttttaatgacaaggaaattggctttcatgcttccctggcccagagaaac

SEQ ID NO: 331948 - DNA, 201 bp, Homo sapiens
ggtgtgtggcctaggagcaacaggctacaccatacagctcaggtgtttggtaggctacatcagctaggtgtgtgtaagtgactctatgatggtcacacaaygatgaagtcacaatgatgactcatttctcagaatgtatcaccatccttaacatcattaaacattcatgtatttactggattcagcaatatcttttgaact

SEQ ID NO: 331949 - DNA, 201 bp, Homo sapiens
agattttgcttttcatgtagttgggattttgtattagtctgttttgtgttgcttataacagaatggctgaatttgggtaatttataaagatatggaatttrtttcttatagttactgagaagtctaaggttgagggccacatctggtgagagccttctgccagtggggactccggtgccacagggcatcacatggcagggg

SEQ ID NO: 331950 - DNA, 201 bp, Homo sapiens
tccatggaggcaatgagaccacgtaggaggccgggtgagaaagaggtgggtttgaaagacattcaggagggcagctccaccaagcttggggtcaccaagargggtgtgtgatggggagggccatggaggaaaggggtaactgggatgagcctttagctgagatgctggaggacagtgggatagaagggccttgaattttga

SEQ ID NO: 331951 - DNA, 201 bp, Homo sapiens
aaaagaatagtgatttttttaattgggcaggattatgagaattttatttagccgaagaggtatttagggtatcagacttagcaaataaaaatataggacakctacttaaattttaatttttcataaacaatgaatggttttttagtataaacatgtccagctcaatattcatgacatatgtatagtaaaaattatttgttg

SEQ ID NO: 331952 - DNA, 201 bp, Homo sapiens
ttctccttggactcaatagcaccccgcatgcagtaagtattcctgaaggaaatgaaagataaggtgaagttacggggtagctcagtggaaggatttaatayagagaactatttacaaaggtattagagagctggaaatccaaataggcaatgggaagaaccccagagattaacaacagcagggagctctgtcctccaggat

SEQ ID NO: 331953 - DNA, 201 bp, Homo sapiens
agagattaacaacagcagggagctctgtcctccaggatggctgagggacaaggtagttactggagcccaggggctgaggctgctcggtgggagccgggacmatgaaccctcaccaagagccctgaaacctcttgttctgaaaaacatattatttgctcttctaatttgaatattttctgacattttatcctagaaagctgt

SEQ ID NO: 331954 - DNA, 201 bp, Homo sapiens
gcttggttcagtaggcatgcctggggcacaggaggagcttacgggagaggcatctgaacagccagttgggggtctggttcttgggtagcagtccaacagcytaagacttcagcctcaaaggccagtggttttcatgtcatgttttaggtgcatttgaggttccacaaccactcggttggaatttcatggatgctgcagcta

SEQ ID NO: 331955 - DNA, 201 bp, Homo sapiens
agagaatggaactcaggccctaaaagaaattagattgaacctaaaagaaaatggtcagtgggaagactgatgtttgtttccagtctgaaatgtaattcccrgactttagtggcacaggcactgtgcatcactgtggaagtgacatgtggccatgtgtggtggatagcaagtaacgcccacctgcagagccttttatcgtgc

SEQ ID NO: 331956 - DNA, 201 bp, Homo sapiens
tggtgtgtgtgtgcgaaatggcacatgggaggtgtagatgattagtattccaggaattaagaagaggaaggccagtgttggtcaagggaaacttcacagakaacatagagtatgaattaggccttcctagtaagatacacattcagacaggcagagagataaggacttcaacttgctaaagaataaaaattgaaggagaaa

SEQ ID NO: 331957 - DNA, 201 bp, Homo sapiens
ccaggtgacaagcagcatctgatatatctgtgttgctgcatttgctttccaggtggaagaagtctttcctgtgcagcctggtgtttggcatccctgtcatrgccttaatgatctatatgctgatacccagcaacgagccccaccagtccatggtcctggaccacaacatcattccaggactgtccattctaaatctcatct

SEQ ID NO: 331958 - DNA, 201 bp, Homo sapiens
aatttcccatggtcttggtgttttattttcataggcacccattcagcagctggctgaccggtttagtggatattttgtcccatttatcatcatcatgtcamctttgacgttggtggtatggattgtaatcggttttatcgattttggtgttgttcagagatactttcctgtaagttgaatgccttgggctatatggtggtt

SEQ ID NO: 331959 - DNA, 201 bp, Homo sapiens; identical to SEQ ID NO: 69163

SEQ ID NO: 331960 - DNA, 201 bp, Homo sapiens
ggctttgccatccccagggcccttggccctgtgtcgctcattgaactctcctccctacttgctggcagccttcactgtccttgtctttcagctcctcggtdggtggtacttctacgttcaggcctacaaatctctgagacacaggtcagccaacatggacgtgctcatcgtcctggccacaagcattgcttatgtttattc

SEQ ID NO: 331961 - DNA, 201 bp, Homo sapiens
gctttgccatccccagggcccttggccctgtgtcgctcattgaactctcctccctacttgctggcagccttcactgtccttgtctttcagctcctcggtgrgtggtacttctacgttcaggcctacaaatctctgagacacaggtcagccaacatggacgtgctcatcgtcctggccacaagcattgcttatgtttattct

SEQ ID NO: 331962 - DNA, 201 bp, Homo sapiens
ccatccccagggcccttggccctgtgtcgctcattgaactctcctccctacttgctggcagccttcactgtccttgtctttcagctcctcggtgggtggtrcttctacgttcaggcctacaaatctctgagacacaggtcagccaacatggacgtgctcatcgtcctggccacaagcattgcttatgtttattctctggtc

SEQ ID NO: 331963 - DNA, 201 bp, Homo sapiens
tttggcatccctgtcatggccttaatgatctatatgctgatacccagcaacgagccccaccagtccatggtcctggaccacaacatcattccaggactgtscattctaaatctcatcttctttatcttgtgtacctttgtccaggtatatatgagaaagtgggcagacctctcccttccatgctgtgtgtggccctcagat

SEQ ID NO: 331964 - DNA, 201 bp, Homo sapiens
ctggtcatcctggtggttgctgtggctgagaaggcggagaggagccctgtgacattcttcgacacgccccccatgctctttgtgttcattgccctgggccdgtggctggaacacttggcaaaggtaacagcagcttcaggttcagaaaagagctgctccttcagtaaacaaatctcacttcctctgaacaccatgtttaga

SEQ ID NO: 331965 - DNA, 201 bp, Homo sapiens
gtcatcctggtggttgctgtggctgagaaggcggagaggagccctgtgacattcttcgacacgccccccatgctctttgtgttcattgccctgggccggtrgctggaacacttggcaaaggtaacagcagcttcaggttcagaaaagagctgctccttcagtaaacaaatctcacttcctctgaacaccatgtttagaatt

SEQ ID NO: 331966 - DNA, 201 bp, Homo sapiens
ctggtggttgctgtggctgagaaggcggagaggagccctgtgacattcttcgacacgccccccatgctctttgtgttcattgccctgggccggtggctggracacttggcaaaggtaacagcagcttcaggttcagaaaagagctgctccttcagtaaacaaatctcacttcctctgaacaccatgtttagaattactaat

SEQ ID NO: 331967 - DNA, 201 bp, Homo sapiens
ctggtgcagcggggcgatatcgtcaaggtggtccctgggggaaagtttccagtggatgggaaagtcctggaaggcaataccatggctgatgagtccctcaycacaggtgagatggcttgtttcatgttccctcaggaggatatcatagcagctgtcaggtcacatgagtgctggatggggctgagcaagtgacagttgtct

SEQ ID NO: 331968 - DNA, 201 bp, Homo sapiens
gattatcccaatctttatccatgcttgtggtgttttatttcttcataggttgtaatttcccatggtcttggtgttttattttcataggcacccattcagcrgctggctgaccggtttagtggatattttgtcccatttatcatcatcatgtcaactttgacgttggtggtatggattgtaatcggttttatcgattttggt

SEQ ID NO: 331969 - DNA, 201 bp, Homo sapiens
caatctttatccatgcttgtggtgttttatttcttcataggttgtaatttcccatggtcttggtgttttattttcataggcacccattcagcagctggctraccggtttagtggatattttgtcccatttatcatcatcatgtcaactttgacgttggtggtatggattgtaatcggttttatcgattttggtgttgttca

SEQ ID NO: 331970 - DNA, 201 bp, Homo sapiens
tgctccctggggctggccacgcccacggctgtcatggtgggcaccggggtggccgcgcagaacggcatcctcatcaagggaggcaagcccctggagatggygcacaaggtcagcctgtagcacggctttccccatcctgagagatgaaagtagtatctgtttactatttcacattgagagaaaagcctgagagccactcaa

SEQ ID NO: 331971 - DNA, 201 bp, Homo sapiens
gagctagttgtttcagtcttggagatcagcagcgatatggggaggagaagccaagcctctgttaaagcccaccagtccttccctcccccgctcccagcacmtagtgtttgaggaattcagactttgaatactgctctttgctactgttcttctctcctaacttgccagtaaacttccaagggcagtatgtgtcttgtgctc

SEQ ID NO: 331972 - DNA, 201 bp, Homo sapiens
aggaagctgaggttcagagaggctaagcaactggcccaaggtcacacaggtattcagtaatggaattgggatgtaacccaggctggtggatccagagtctrttttcttaacctttacacacactgactcttaatgcatatttaataatatggaaatttttctaattaaggcttctgtatttccttggggttagcttctttt

SEQ ID NO: 331973 - DNA, 201 bp, Homo sapiens
agtgattacatgttgtgctcatggacaccttggccgggtgtccagtgtgcactgggtgagggtgtgcatgggctgtgtgcaaagatctgcagtgctgcacrcagtgtgttgagtgagagggtgccaagtgctgggacggttgtagataaacaaaagcaaataggtgcagtactgtgcagcctgcccaagttcccaaagctt

SEQ ID NO: 331974 - DNA, 201 bp, Homo sapiens
tggtactgcctctgtctttgtgtgttacacaccgtcactgggacgtctcactctcccacgtctttggttaacagccgtgagaagctcattctcaaacctaygtctagatcccagagactacctgctggttggagtgtttttcttggttgactggtaaaggctcagactcggcctgtctgtattcttcttcaccttccccca

SEQ ID NO: 331975 - DNA, 201 bp, Homo sapiens
gagtgtgaatgtagcacctggcaggagtcaagctgattaattacaccatggcttggaagtttgggttttgttgctttttattttcagaatattttgtaagmctctatgaagcaaaagttttccacaatgcaagtcaaacaaaaatgaatccttccttctttttactaatatgttttatagtgtataccttattttgttaat

SEQ ID NO: 331976 - DNA, 201 bp, Homo sapiens
gcccttggttctgtactactgaatttgagaaaatgtaatcactgctctttgtccacatggtggtgtttgtgagggacaagctttggtagaaaaacatgtgrggtggtcatggctttgagctggagaggcagtcagtacattcaagctcaaggctgctaaaaacgtagacactcagccaagaaggacagtggctgtcaacta

SEQ ID NO: 331977 - DNA, 201 bp, Homo sapiens
aaaggctcagactcggcctgtctgtattcttcttcaccttcccccactttttccccaaaaatattccccttccttggtgcctgtctgtctcaggcaaaggyaccctcatgccagctcccagtgtgtcctctacaatgcctgtctgccctcattcacacatctgcagtccatcctcatggttctagcacctctgtctctagg

SEQ ID NO: 331978 - DNA, 201 bp, Homo sapiens
aatgaaatcatgactttggaaaacctgtttctttgattcttctatgtttcagacaggcagagaggggaaaaagatctgttttaaaaggcataactggtaamagctcagagtctggagggcacatttccgcccgctcctctcccacattagaaagtttctgtttgctgatgtgagcagggctaagcctggtgaggttcctag

SEQ ID NO: 331979 - DNA, 201 bp, Homo sapiens
gctgaaatgggggtaataagactcaccttgtatgtgtctgggaagattcagtgaggtaaaacatgtaaaaatctagcacagttcctagcactcagtaaatrtctatttctccttctcaagtaagtaagatggcttttgtgcctgtgatagtttaaatgtagtctttgtagaatgaaagcaaggtgtaaaataacctcagag

SEQ ID NO: 331980 - DNA, 201 bp, Homo sapiens
tcctaggaattaattatgaaaagggggaaatagggaggagggccttccccgcaaatcccctccataagagcacgctaaccagagtagaagtcaggggctcygtgctttggcccaggtgttcctatcaaaggttccacagacaacctttcaggcccagaatggtgagctggagaggaatgggtgcctgccactgaggctctc

SEQ ID NO: 331981 - DNA, 201 bp, Homo sapiens
  misc_feature (1)...(201): n = A,T,C or G
gacccggtgaccgaatgagtggccatgtgagtgataagtggcgtttgttgcagggaggagcaagtccccatggagctggtgcagcggggcgatatcgtcanggtggtccctgggggaaagtttccagtggatgggaaagtcctggaaggcaataccatggctgatgagtccctcatcacaggtgagatggcttgtttcatg

SEQ ID NO: 331982 - DNA, 201 bp, Homo sapiens
aagaggactgtcttaatacagttctgcaacttttttttctttttaacatcatggaagtctttccacgtcaatacatgtaaattcacctatttttaaaaaaycatgacatagatttctgttcgatggactatattttatgtagacagttctctatagaagaatattgagatggtttccagtttttcactatttgaatgtagc

SEQ ID NO: 331983 - DNA, 201 bp, Homo sapiens
ccagagtaggataaacagtcactctccttctgcaggtttctattaaagatctcctttacattctacttagataattttcacagacaccaattggtgctcarttgtaatgcttgaagcatttacaatatgtattattggtcctttttgaggttatgaggcatacatcatagaaaatagttcactttaaatctcaatggcatg

SEQ ID NO: 331984 - DNA, 201 bp, Homo sapiens
tccagtttttcactatttgaatgtagcaatgaacattaatatgtaattgtatatctatatggtaaaattcccagaagtggaatttctaggacaaaagcagyaatactttttgaagagcaattaggcaaaatttagctttctacaaacagtggttaagaactgtttttccttatactcttgtttactgtatcatcagacttt

SEQ ID NO: 331985 - DNA, 201 bp, Homo sapiens
gaactcctgacctcaggtgatctgcctgtctcggcctcctaaagtgctgggatttcaggtgtgagccactgcacccaggcgtgaatagctttttataatarttaaatatttactaaacattgtatgtgaggcaatggaatatacatttttgagtttaaaaaagtggttgaagaacactatcttaggaaatatggttttatt

SEQ ID NO: 331986 - DNA, 201 bp, Homo sapiens
ttaatatgtaattgtatatctatatggtaaaattcccagaagtggaatttctaggacaaaagcagtaatactttttgaagagcaattaggcaaaatttagytttctacaaacagtggttaagaactgtttttccttatactcttgtttactgtatcatcagactttttaaattaataaaataacatttattttattaatgt

SEQ ID NO: 331987 - DNA, 201 bp, Homo sapiens
attaaacctcagaaaaagaaaggaaaatacaggccacccctcaaaaaaacatatctgcttgaggaataaaagctatattacatctgtgattctcagttggsagctgtgacattttcggtgtttgtgactggggggatgctgctaaacatcctgcaaggcacatcacaggccctacaacaaagagttatctggccccaaatg

SEQ ID NO: 331988 - DNA, 201 bp, Homo sapiens
ttttccttatactcttgtttactgtatcatcagactttttaaattaataaaataacatttattttattaatgttataataaatgttattttaattttaaaraagatttattagatacttaatatttctttttctaaggattattttaagtagcatttcccatcatgcatttatagagtagtgctaatttataaacattagg

SEQ ID NO: 331989 - DNA, 201 bp, Homo sapiens
gtgctgctggtacctttccatatcagtatgttccatcatcattccaatagttgcctcgtatcccattatatacatcacacctacagtttaattaaccaatyccgtattggttgtttccattttttatcattacaaaaacaaaacaaaacactgtggtaaatatccttgcatcttttcttatttatatgattatcaccttag

SEQ ID NO: 331990 - DNA, 201 bp, Homo sapiens
ctgaaacggttgattataaagctgtgtagcacgagattgtgaatgggttttctaagataatattgtgaagtgctccttggagacgataccctgtcttatastttgtgaatttctaaatttcattttgttgtatattgaaaataacatatttgtatgtacatatgtggtgaggtttgttaattttgtttttaattttactca

SEQ ID NO: 331991 - DNA, 201 bp, Homo sapiens
gatagctgggatgtggagagcagtaacgtgttctctatgatggcagagcagtgtggaataccatctgtttccggaacccaagttcgtcacgttgtgtccaktgcccccctgaaatgtccttatgtgattagagttctgggagcttccttattgaactctcaacctgcctctgactctgtcctgttttcagaaccccaacaa

SEQ ID NO: 331992 - DNA, 201 bp, Homo sapiens
tagaggccctgcccacccagagtgttacagccatgacctgatggttccaggtgttctctccgtgttggttgccttgatggcaggaaaggcagagatcaagyatgacccagaggtcatccagcccctcgagatagctcagttcatccaggacctgggttttgaggcagcagtcatggaggactacgcaggctccgatggcaa

SEQ ID NO: 331993 - DNA, 201 bp, Homo sapiens
cacttgaaccctggaggcagaggttgcagtgagccgagatcatgctactgtacccagcctgggcaacagagtgagattccatctcaaaaaaaaaaaaaaaagaaaaaagaaaaaaagatgcctgccacctaccctgggatactctgatttggttggtctgggtaagagaccagacatcgtgattgtcgaaggctttccaag

SEQ ID NO: 331994 - DNA, 201 bp, Homo sapiens
ggaaaggggtaactgggatgagcctttagctgagatgctggaggacagtgggatagaagggccttgaattttgagggagagtgtggggccggaaatgcagdgtgtgggaagatgacagagacctagaaagagtgattgtgagatgggaaagaattagagggaggaggaggggtctcctagtcaccctggacataatgcgag

SEQ ID NO: 331995 - DNA, 201 bp, Homo sapiens
aaagaagttcatctatattcaaaggggattaagtgctaataaaaataccccctcatgcaaattgctattggctgtgacctctggggattagtgggtggctrtggcaatgcagggtgcttgtgcagggctggagaagaggggtgggtggaaacgaggcagaggcagaatgactgaacataccaggagagggcagaagtggtt

SEQ ID NO: 331996 - DNA, 201 bp, Homo sapiens
aaaggatttataaatgatttttttctccctgtttgatgaatataagagaagaggtaaaggtgagggagccaccaggcttttatattttttaattaaaaaawtttttaatttttttagggacacggtcttgccctgttgtccaagatggaggatagtgacatgatcataggtcactgcatccttgaacctttgggctcaggt

SEQ ID NO: 331997 - DNA, 201 bp, Homo sapiens
tgactttcctgggccacattagaagaagaatgtgtcttcggccacacataaaatacgctaacactaataatagatgatgagctaaaaaaaaaaaaaaaaaattcacacccaaaaaaatctcattatgttttaagaaagtttacaaatttgtgttgggccgtattcaaagccatcctgggctgcatgtggcttgcaggccat

SEQ ID NO: 331998 - DNA, 201 bp, Homo sapiens
tgctggcagtgagaatttcaaaccagtggatcttaacttgctgggctctgtaggggtgggatccgctgagctagaccacttggctccctggcttcagccayctttccaggcgagtgaacggttctgtcttgctggcattccaggcaccactggggtatgaaaaaaaaactcctgcagctagcttggtgtctgcccaaacgg

SEQ ID NO: 331999 - DNA, 201 bp, Homo sapiens
gttggcctgtcttgctaggttggggaagttctcctggataatatcctgaagagtgttttccaacttggttccattctccccgtcattttcaggtacaccartcaaacttatgtttggtcttttcacatagtcttatatttcttggaggctttgtttgttccttttcattcttttttctctatcttgtcttcacgctttatt

SEQ ID NO: 332000 - DNA, 201 bp, Homo sapiens
ctagccagttttcccaagaccatttattaaatagggaatcctttccccattgcttttgtcaggtttgtcaaagatcggatggttgtagatgtgtggtgttrtttctgaggcccatgttctgttccattggtctatatctctgttttggtaccagtaccatgctgttttggttactatagccttgtagtatagtttgaagtt

SEQ ID NO: 332001 - DNA, 201 bp, Homo sapiens
gccaccttcaccctgtgtccctgtcctgcctgcccctccctttcacttcacccctcttggcttacagtttcctcttcctctctttccaccttcccaggaayttggaacagagaccttgggatactgcacggacttccaggcagtgccaggctgtggaattgggtgcaaagtcagcaacgtggaaggcatcctggcccacag

SEQ ID NO: 332002 - DNA, 201 bp, Homo sapiens
gatattttgctgttaaaaggattgcatggtttttagttcacagtgaaattggaccatttagaaataaccacagcctcttttgaatagatgcagtcccccasaccttctctgtgctgattggaaaccgtgagtggctgaggcgcaacggtttaaccatttctagcgatgtcagtgacgctatgacagaccacgagatgaaag

SEQ ID NO: 332003 - DNA, 201 bp, Homo sapiens
aggatattttgctgttaaaaggattgcatggtttttagttcacagtgaaattggaccatttagaaataaccacagcctcttttgaatagatgcagtccccyagaccttctctgtgctgattggaaaccgtgagtggctgaggcgcaacggtttaaccatttctagcgatgtcagtgacgctatgacagaccacgagatgaa

SEQ ID NO: 332004 - DNA, 201 bp, Homo sapiens
ttgagttttcttgtcaccaaagcagtaaggaagaggtgatgatctctttgtataggtcatacatcttccctggtttgaggttacagtgagctatgattgcrccactgcactctactctgggtgacagaatgagaccccatctctaaaaaacaaaattacccccttctggggaaacaggttagatcctaaagaaaatgttca

SEQ ID NO: 332005 - DNA, 201 bp, Homo sapiens
aaccgtgagtggctgaggcgcaacggtttaaccatttctagcgatgtcagtgacgctatgacagaccacgagatgaaaggacagacagccatcctggtggstattgacggtatcttctgcttctgccttccttccgctctctcagaaatacagttttctgcagatatcaggcaaaagagtcctcctttataaaagaaaaga

SEQ ID NO: 332006 - DNA, 201 bp, Homo sapiens
aaaccgtgagtggctgaggcgcaacggtttaaccatttctagcgatgtcagtgacgctatgacagaccacgagatgaaaggacagacagccatcctggtgrctattgacggtatcttctgcttctgccttccttccgctctctcagaaatacagttttctgcagatatcaggcaaaagagtcctcctttataaaagaaaag

SEQ ID NO: 332007 - DNA, 201 bp, Homo sapiens
gtggctgaggcgcaacggtttaaccatttctagcgatgtcagtgacgctatgacagaccacgagatgaaaggacagacagccatcctggtggctattgacdgtatcttctgcttctgccttccttccgctctctcagaaatacagttttctgcagatatcaggcaaaagagtcctcctttataaaagaaaagaagacaaac

SEQ ID NO: 332008 - DNA, 201 bp, Homo sapiens
cagagggggcaagggtaacttgaggtttctgctgctatctgataccttttgccaacactaggcattgccttccttttgtcttaggttggcatcaacaaagkctttgcagaggtgctgccttcgcacaaggtggccaaggtccaggagctccagaataaagggaagaaagtcgccatggtgggggatggggtcaatgactcc

SEQ ID NO: 332009 - DNA, 201 bp, Homo sapiens
ttatcagagtgagcgtggctgcagccaggctgtgggtgctgggagggcaatgggcagaccccttcctcactgtgtgctcctctccatcagaatgatttgcyggatgtggtggctagcattcacctttccaagaggactgtccgaaggatacgcatcaacctggtcctggcactgatttataacctggttgggatacccatt

SEQ ID NO: 332010 - DNA, 201 bp, Homo sapiens
gatttgctggatgtggtggctagcattcacctttccaagaggactgtccgaaggatacgcatcaacctggtcctggcactgatttataacctggttgggayacccattgcagcaggtaggcagctcttacccactgtgctccagctgcgcccagaaaggcttctgtctcccaggttcctgctggggttagtgagtggctca

SEQ ID NO: 332011 - DNA, 201 bp, Homo sapiens
tcactgggggccgctgagggtggggcagcccggtgcctgaagccctctcctggctcctctccccagacctaggtgtgagtgcgagttctttcttccccagrtgtcttcatgcccatcggcattgtgctgcagccctggatgggctcagcggccatggcagcctcctctgtgtctgtggtgctctcatccctgcagctcaag

SEQ ID NO: 332012 - DNA, 201 bp, Homo sapiens
cgccaaggagcccaccagggggaaagacagacagtgaaaaagtaaatagcaaagctgactgagtattacgagatactgagtattgactggtggtgcttgaygtcctggggacacttgaacaggggccaatcctagacttggggtgctcgactcagggacaagggtgctgcaggtggtcagggaagcgaatacgaacgttca

SEQ ID NO: 332013 - DNA, 201 bp, Homo sapiens
aagggagttcagtgtcacaggcatttgctgaacatcaccaggcgccaggctcaggagaacaacaggagtgggatatgaactctaccctttgggagctcacrgtcttggggagtacgggcagtctggaaactcagtgctttgacagtgcttagtgcaaggggacacaaacatgaaatgggagtactggggtggaagggagaa

SEQ ID NO: 332014 - DNA, 201 bp, Homo sapiens
ataggggcagcagaacgcgtcacacagaatattgccctgacaacttttaaacagcctgagcaatactgttagcagtaaatgtagaaaggtgacatcattgmcttgaaaaacaattgacaactcttcctgatcaggggctcttccagaaacctcatttctagttttgtccttcatgtagggtcagacagcccactctttctc

SEQ ID NO: 332015 - DNA, 201 bp, Homo sapiens
agcagtaaatgtagaaaggtgacatcattgccttgaaaaacaattgacaactcttcctgatcaggggctcttccagaaacctcatttctagttttgtcctycatgtagggtcagacagcccactctttctcacctcacccttctgacatttcagggagaatcttgctcaccctcagtcatcctttatttgttgtgtggtct

SEQ ID NO: 332016 - DNA, 201 bp, Homo sapiens
gctgccttaaattcatagagcattgtttagctgacccatgattttgattctcctctttcttatcccatatcggtcttgcttctcataagctacagagtagrcagacgggaattccactttcgttcttcctgtttccattctgtatggtagaattctggtatttacaaagcaggcagaaaaagtcagggaaagcagagggaa

SEQ ID NO: 332017 - DNA, 201 bp, Homo sapiens
gtttagttggtggttcctgattgatgaagtctctagttagagatagttaatggattgtgattggttaagctaagctttgttttactgtttatattgagttkggtttggtttgcttacataggaacctgaaatgttggagtcatctcagcctaattgcttcctgattaatgatttgttaacacaagttaggatgcaactcca

SEQ ID NO: 332018 - DNA, 201 bp, Homo sapiens
  misc_feature (1)...(201): n = A,T,C or G
ttaaaaggatattttgctgttaaaaggattgcatggtttttagttcacagtgaaattggaccatttagaaataaccacagcctcttttgaatagatgcagncccccagaccttctctgtgctgattggaaaccgtgagtggctgaggcgcaacggtttaaccatttctagcgatgtcagtgacgctatgacagaccacgag

SEQ ID NO: 332019 - DNA, 201 bp, Homo sapiens
aggattgattttctagtttggacatttatcactttaagtgatatctgttatgtctcttgaattttagtagctaatgtgtattgaattcttattacaagccrggcacttcgcaaagtgtcatacgtgctccttgcagaaagtttggaaaattcagctataaaggagaaaatgaaatcactcgtaatcctattccttggggag

SEQ ID NO: 332020 - DNA, 201 bp, Homo sapiens
gcaagtgtggtatcttggtgcggggtgccccaacttgtgtagctgctgatgctggctggttcgctccaggtgtgctctgtgggatgatcgcaatcgcagaygctgtcaagcaggaggctgccctggctgtgcacacgctgcagagcatgggtgtggacgtggttctgatcacgggggacaaccggaagacagccagagcta

SEQ ID NO: 332021 - DNA, 201 bp, Homo sapiens
tctcctgcctctagactgggtttctaggagtgcacatggccaaaaggaaactgctgcactctggcaagtgattacatgttgtgctcatggacaccttggcygggtgtccagtgtgcactgggtgagggtgtgcatgggctgtgtgcaaagatctgcagtgctgcacgcagtgtgttgagtgagagggtgccaagtgctggg

SEQ ID NO: 332022 - DNA, 201 bp, Homo sapiens
acttgtgtagctgctgatgctggctggttcgctccaggtgtgctctgtgggatgatcgcaatcgcagacgctgtcaagcaggaggctgccctggctgtgcrcacgctgcagagcatgggtgtggacgtggttctgatcacgggggacaaccggaagacagccagagctattgccacccaggtacagccctttaatgttgca

SEQ ID NO: 332023 - DNA, 201 bp, Homo sapiens
ggagcttgggcgcatgcatcctggaaaaaaaggagttccagggttctctaaccgtttcccagtctttgcaatggaaaaaaaagtatgtgacctaagggctragatagacattttctaacctttatgttaagggaagattttgccagctcagctcttctcactggggtgctcagataagtgactcctgggcagttctccagc

SEQ ID NO: 332024 - DNA, 201 bp, Homo sapiens
cttctcttgcatcctggttattatgacgttctttgagctgggccgatagatccagctgaagagttctacatacattagtcttcaaggttcttctctgggcrtttcccatgcagctctctggtagctggggaatgatttgtgagtgcttcctctgctccacagcctcagaggctccagcacaggcttccctcgcgtgctgga

SEQ ID NO: 332025 - DNA, 201 bp, Homo sapiens
aatcagtgttgaaaccaagatgtggtcttccatatcttattctgtttagaaggttagaaacagatgcagaaatgctatgaagtgattatcttaatggcaawtgtaagaatccttcttgtaaccccatatcatatcgtgtatgactcatagagcctgcctgtgataacaggtgatgatccacatcccacctctattccccaa

SEQ ID NO: 332026 - DNA, 201 bp, Homo sapiens
gcgctccagcatgacagtgtgcacaagtgatgctgaaacacacactgggatttggaaaacctcttagacaaggtgcatgcaacagcagaaacaagaatagscaaggatctgctctggtctctggaaaatgtggggacttctggaagctgggaatttatttcctgcacggcatggcctcttttgttcatggatggaaagagg

SEQ ID NO: 332027 - DNA, 201 bp, Homo sapiens; identical to SEQ ID NO: 69706

SEQ ID NO: 332028 - DNA, 201 bp, Homo sapiens
aaaaaagtgtagtgacatgtttagtgcatgaaggaatccctctgaatacctatttttttttccctgacaggtagaaacaataggagatgcttatatggtgrtaggaggtgtaccagtgcctattggaaaccatgctcaaagagtggctaattttgccttggggatgagaatttctgcaaaggaagtgacgaatcctgttac

SEQ ID NO: 332029 - DNA, 201 bp, Homo sapiens
aatggttgtcaactacacacacattaaattctctaagaatttaaggatatgtcctgagactggcctcattactcagtgacaatgagtagggttcttaactwtaactagaaataatacactcgcacactagttaaatcatagggttcctctgaggaccattctgggacagtatactatttatggaggcagggatgctgtgtt

SEQ ID NO: 332030 - DNA, 201 bp, Homo sapiens
gcttctaaggaaggctgggtccctgttctcagctccgagccctttctgcagcctctctcagtccttcctaagtgtggctgtcaaactttgctgacctttcycccttggggctaatgagtgtcacagctatttttaaccttgggttttctagaagttgagccgttaacctagctcctacagaaggaggatcctgggaggtat

SEQ ID NO: 332031 - DNA, 201 bp, Homo sapiens
tgggggcaacaaatcaaccacaggaaaggcttcctaccaggaatgaggcagctgcgttcccagaaatgcacaaacaaaccaccaaaaaccagatcagggtyctatcttcctctcagacactcttaccttgcattctccctctagtttctttccttaaatgatagaggtttactccagcgacctcccaatggtatcccgccc

SEQ ID NO: 332032 - DNA, 201 bp, Homo sapiens
actgcttttacaataacataacaaacatatctatttttaaagaaatacacatattgagttcaggaagcaaggtttctctggaaattcagatgcagtcagcrtggtgtaggatgcagttgtgtgatgctaaatgagaataccaagacaaaaccctcaggaacactaacatttaaggaatgagattaaaataatgtaagtaaa

SEQ ID NO: 332033 - DNA, 201 bp, Homo sapiens
aacaagttaagccaggcacaacagagaacagactgtattcacgtgaagttcaagagcaagcaaaactagtctgtggcgataatatgatagtaatcggaatrggggcagctgggggtggtaggactgattgagaaggggtaccggggaaatttccatgaccacagagatgttctatatctttattagggtgtgagctacaca

SEQ ID NO: 332034 - DNA, 201 bp, Homo sapiens
gaacccaagaggtggaggttgcagtgagccgagatcatgccactgcactctagcctgggtgacagagtgagactctatctcaaaaaaaaaaaaaaaaaaawatatatatatatatatgtatatacatataatgtcaaatgtatggagtgggtggaaggcaatcaagctaaaaggatagccagtctaggggctattttatac

SEQ ID NO: 332035 - DNA, 201 bp, Homo sapiens
ccaggcacaacagagaacagactgtattcacgtgaagttcaagagcaagcaaaactagtctgtggcgataatatgatagtaatcggaatgggggcagctgrgggtggtaggactgattgagaaggggtaccggggaaatttccatgaccacagagatgttctatatctttattagggtgtgagctacacaatagtgtacat

SEQ ID NO: 332036 - DNA, 201 bp, Homo sapiens
acaagtggttcaggtttaatgagcagccaacttttcctgcttaggaaattgtgtctccaacatgccatctgacaggttcagaactcaggctgaggtgtgargctgcctgcagtcagcaggccaggcaccgtgatgccgtaagatattcagaatggctttccttccaccaagtggccactagcgagacatctgctcgccttt

SEQ ID NO: 332037 - DNA, 201 bp, Homo sapiens
ggcacagggcagttcaaagaactcatatagccacaaggcagtggtctgtccgggctgtttggccttggctgtgaagaattcttcctgtccaggatcacacygagtagaaaaggaggcccgtagtgtccacacgtgttccccagggtctggcccagacagacagtctgaggctcgatcacttgctcacccctctgtgttctt

SEQ ID NO: 332038 - DNA, 201 bp, Homo sapiens
gtggcgataatatgatagtaatcggaatgggggcagctgggggtggtaggactgattgagaaggggtaccggggaaatttccatgaccacagagatgttcyatatctttattagggtgtgagctacacaatagtgtacatttgtcaaagatcatgaaactgcgcacttaatatagaaaaaggtaacagcgaaaaatatccc

SEQ ID NO: 332039 - DNA, 201 bp, Homo sapiens
aagtggccactagcgagacatctgctcgcctttctcacagaaaagtacgcttccaagtctggaagtttgttcacactctaaaagttgaacagttttggagrtgaaaaatgaatgtcctcctccgctggctcagcagatcctaatgctcctgggatggctgagagtggcgtctctctgcctttgatttctaggtccttcctc

SEQ ID NO: 332040 - DNA, 201 bp, Homo sapiens
caaaacaacagtcacagtatcggcagggaggtccattatgtcatggaggagagaaggggaatttccatatagtgaaatttcctccctggctgtctatgcarttgaaaaacatataaaacgtcagccaattttccagacagtttcaaaatctagggactttttttttttttttggtacaagcactgtctatgtcttttcaaa

SEQ ID NO: 332041 - DNA, 201 bp, Homo sapiens
ccagggtgggactgaagagcaaagagacttctgaaaatctcactgttgggctgtaatgcaggaggagatctcctacaactccaaaagctgtggattggctrtacagcattcaaggtcctcagagtcttgctggtgctcagattctaagctctgctgtactgaaagttctgattcagccttcataatatttgaaaccagtgg

SEQ ID NO: 332042 - DNA, 201 bp, Homo sapiens
gcacctcatccactgctatctcccactccctcccacccaccatcatgccagccccacagtacagagggtttctagagagaaggcaaacaaacatcccccccttttctcttcttcgttgtcaagaaatgaacaaagtaaagtggggagggggcatcatatcacgtgatcattggagaggggaaggcagggctggaggctttg

SEQ ID NO: 332043 - DNA, 201 bp, Homo sapiens
aaatacgtacatactgtctatatttacatctatatctatatctaacagaaaactatgatatcagaaatcagaaataaagaattaattttatgggctcaacraagactagacacaatagagaaaaaaatcagggaatttgaagacagagaaatagaaatcacccaaactgaaatgcaaagaagaaaacagggttaaaaaggg

SEQ ID NO: 332044 - DNA, 201 bp, Homo sapiens
agtcaccaatttaacgcaaattaaaaccacagtgagatatcatttcacacccacgagaagaccaaatgatggtgaaaatgggaacaactgaaagtgtcacrtcgctgatagaaatgtaaaacagtaaaacaactttggagaattgctgggtagttttttggcttgttttgttaaaaaataaaattaaatctgtatctacct

SEQ ID NO: 332045 - DNA, 201 bp, Homo sapiens
caaggtaatggaactagtttacattttattttgggtggtggttacagggatataagcacttgtcaaaactcatggagccaaacactttaatatctttttttattttatgtaaattatatctcaacttacaaataaaatcaagagtattagatggtctcttttcagtgatgctgtctctgtacagctcagagtggggatcca

SEQ ID NO: 332046 - DNA, 201 bp, Homo sapiens
gctgaggcaggagaatcgcttgaacccaggaggcggaggttgcagtgagctgagatcacactgcactccagcctgggcaacaagagtgaaactccatctcmaaaaaaaaaaaaaaaaaaaaaagaagaaatgagaatgtagttatctctgctgaagaagatggggagagagcttaactagaaggggcacaagataattttg

SEQ ID NO: 332047 - DNA, 201 bp, Homo sapiens
tgggatatcactgcttttaggccctcttagtggacagtgctggaaaatacatgtcatatacacacacacacacacacacacacacacacatacacacacayacatccatctttctctctctatatatatatctatatatataatatatatctatatataatatatagatataatataatatatatagatataatctatatc

SEQ ID NO: 332048 - DNA, 201 bp, Homo sapiens
gtagtgatgaatgttaagaaaaaaataaaactcagtagagggccagtgaagtcttctgagagggagcagcatttcagctgagacttggatgaaggaagaamccccatgtggctacctgggtaggggcttccaggcagcgctgtgcccaaggcagaaacagccttggcaagttcacaggagacaagaagaccagtgtgcctg

SEQ ID NO: 332049 - DNA, 201 bp, Homo sapiens
accccagttgatcacaagggtaagcaaaaaagagaagctttgtcattagtgttgagtagtttttccactaaccacttcagatatgtttattatttgcaggktcaacacagaaagcatccttgcccaccaccaagctccagggctcagttcaaccatcttgccctgaacactcttctcttgcatcctggttattatgacgtt

SEQ ID NO: 332050 - DNA, 201 bp, Homo sapiens
ggaccgtgggcactcagaggagactcgagaggcaccccatttatttgcccaaggctgtggaaggggccttcaacacctggaaatttaagcccaaagcctgyaaaaaagagtaagtgcttgggctaaatagcatgaccaagatgttctcgtggcctccagacgcttggggtgatccttaaggtgcctccagccccatcttac

SEQ ID NO: 332051 - DNA, 201 bp, Homo sapiens
agtgtggctgtcaaactttgctgacctttcccccttggggctaatgagtgtcacagctatttttaaccttgggttttctagaagttgagccgttaacctakctcctacagaaggaggatcctgggaggtataaatgaactcttcacacacaaggaggtgactaatggaggaacataggattttcagtgtcagggctagcct

SEQ ID NO: 332052 - DNA, 201 bp, Homo sapiens
agagtgtcaggtgtgcggactgctgagtcacttgggcattcattcgcttaacaaatatatgggtcttaacacaaaactgtaagaggtactgcagaggtttktttttttttttttaaatatgatctgttgtgtgcgaagagcttcagacaaatgggacagaggaatccacatgggaagtcaggctcccagccttgtgcaggg

SEQ ID NO: 332053 - DNA, 201 bp, Homo sapiens
tgctcatttttgtaaataaagttttattggaacacagccatgcactttcatttacatatagtctatggctgatgtcatgctacaaaggcagagttgaatcwctgcaacaaagaccatatgatacacaaagtctaaaatatttactatctggtctttatttatataaaaagcgtgctgacctttggtctagcagaagaaaaa

SEQ ID NO: 332054 - DNA, 201 bp, Homo sapiens
caatctgagggtctccatgagaatggtggtcattgagcatcccttccctctgtgtggccggccaagccgaacttaaacctcctgcctcattccttccttcwagcctggggagctccagacagatccttttcaacttctcaggagaagatatggagtgggatgcagagctctttgcgttggagccccagttgtctcctgggg

SEQ ID NO: 332055 - DNA, 201 bp, Homo sapiens
acattctcaaaagtggttgtagtagaatggtgggatagacgttgggctgaagaataaaaagaggagaaagtttgcatgagattaaagcaggtgagaggctrttttgtttgcttctgtttaggatggaagagacataagcacactgaaaagcagaaggagaaaggcaaatggaatgggagatgaagataagcgtggggtggc

SEQ ID NO: 332056 - DNA, 201 bp, Homo sapiens
aagtggttgtagtagaatggtgggatagacgttgggctgaagaataaaaagaggagaaagtttgcatgagattaaagcaggtgagaggctgttttgtttgyttctgtttaggatggaagagacataagcacactgaaaagcagaaggagaaaggcaaatggaatgggagatgaagataagcgtggggtggccaatggagca

SEQ ID NO: 332057 - DNA, 201 bp, Homo sapiens
atcctcggagattgggggacaggatggtgtggtcatggggtgagaagtcacaggctctcacctgtaatcaatgtaattttgtagatgaatcagggcataargtaggaggcacagccaccagcgtatgagtgaggggagcagatgccaaatggaggcccatgaggactgtggtgaaggtctgaactctctaccaacctggcc

SEQ ID NO: 332058 - DNA, 201 bp, Homo sapiens
caaggggaatctcaaagtccagaggttccttatttacacagctattacacgcagtatgtctctttgggacatgtggattatgatgactatttttaaaagtrgggctatcccaaagaaaagatggattatttgaagaatttttaaaattgttgtcataatgctttcattctaatatcagctcactgtagtatccctgtgagc

SEQ ID NO: 332059 - DNA, 201 bp, Homo sapiens
ccactgctactgggatatcactgcttttaggccctcttagtggacagtgctggaaaatacatgtcatatacacacacacacacacacacacacacacacayacacacacatacatccatctttctctctctatatatatatctatatatataatatatatctatatataatatatagatataatataatatatatagatat

SEQ ID NO: 332060 - DNA, 201 bp, Homo sapiens
ccctgtgagctatagttggtttaggccacattttactgttgtagacactgagatacaaatatctaaataaaaaacaagaaataactttggtaataaggacsaggagcagtcctcattagaggttttagccccagaatttccaggctctgggcacctcatccactgctatctcccactccctcccacccaccatcatgccag

SEQ ID NO: 332061 - DNA, 201 bp, Homo sapiens
cccactgctactgggatatcactgcttttaggccctcttagtggacagtgctggaaaatacatgtcatatacacacacacacacacacacacacacacacmtacacacacatacatccatctttctctctctatatatatatctatatatataatatatatctatatataatatatagatataatataatatatatagata

SEQ ID NO: 332062 - DNA, 201 bp, Homo sapiens
tctatagaccttattgagagttttccagttgacccagtgatgtcctttagaacaaaagaaaatcctgaatcatgtcacttatcgtgtctcttcagtattcyttggcttggaacagtttctgagtctctttatgttttataaaattggtatttttggaaagttctggtcagacattttgcaaaatgtccctcaattgaggat

SEQ ID NO: 332063 - DNA, 201 bp, Homo sapiens
ggagaggggaaggcagggctggaggctttggcacaggacagggcagatgggtctcagctgtgcctggctgtaaccccacactgctctctcccactcgttcrctgagggttcccacacttcttagagaaacagtattccggagcaaggtctgagtcagtagaatcaaacccactttcagttctgagctagggaaaagcaacc

SEQ ID NO: 332064 - DNA, 201 bp, Homo sapiens
ctcacggttttttgcagaagcaagtgctcagggaaatgaagacaggagaactgctgccgtcatgagctatgccgacagtcagcagctgatccccgacagaracgcagcagatgcagacggtgagtgcagcaggcctggtctaaaatacttccagccttgcattgctcataaagacaatcggacacttcagaggtcacttca

SEQ ID NO: 332065 - DNA, 201 bp, Homo sapiens
atacaaaaattaaccaggcgtgatggcacacacctgtagtcccagctacttaggaggctgaggcaggaggatcacctgagcctggggaggttgaagctgcrtgagccgtgatagcaccactgcactccagcctgggcaacagagtgagaccctgtctcaaaaaaccgaacaaacaaacaaaaaaacaaacgaaaaaaaccc

SEQ ID NO: 332066 - DNA, 201 bp, Homo sapiens
tcacaaaggaataatgaagaaccagggatgggtggacaacatgaacccctgtagcagcagctcccccatctttttctagaaccctcatgctaggtgatccrtgtggagttaaaagcggcacggccacagtatagaggggatcacatctcatgcattttctaaaaaccatctctggtcactgagacaatttcttaagacaaa

SEQ ID NO: 332067 - DNA, 201 bp, Homo sapiens
aaaaaatacaatactgcaataaactccataattcaaaatgaaagagagtattgggaataataaaattagtagagaatcagcaaaaagcaaaaacaaaacaycctgtatctgaataagtaacagtttccaaagagcataaaatactgctgaatataattcagtcgtgtgtgtgtgcgtgtgtgtgtgtgtgtgtatgtgtgt

SEQ ID NO: 332068 - DNA, 201 bp, Homo sapiens
tcattgagaggggtgaaattgaagtgaaaggtaaagggagaatgaccacatactttttgatccagaacttgaatgccacagaggatgagatcatggggagrtctaaaaccccagttgatcacaagggtaagcaaaaaagagaagctttgtcattagtgttgagtagtttttccactaaccacttcagatatgtttattatt

SEQ ID NO: 332069 - DNA, 201 bp, Homo sapiens
atccttgcccaccaccaagctccagggctcagttcaaccatcttgccctgaacactcttctcttgcatcctggttattatgacgttctttgagctgggccratagatccagctgaagagttctacatacattagtcttcaaggttcttctctgggcgtttcccatgcagctctctggtagctggggaatgatttgtgagtg

SEQ ID NO: 332070 - DNA, 201 bp, Homo sapiens
taccaggtatggaaatggcttagctggccgcagagctatggggcttctgaagtgaggaaggtttccccatagattctccaggatggctaataactggctaygggtaagaagttaaaactcttagaatgtgtgacttcatatcatcttgaccactgctcccaatgtccttgagcttttaaaataagtttccaaaattccaca

SEQ ID NO: 332071 - DNA, 201 bp, Homo sapiens
aatttttctaatctttccaccccattccctaccaatgtcctgtaggtaaccaatctcaatagatccaggtttatccttctggtgtttaattttgcacaagyaggcagatagatgattatttccttgttttcccttctttcttacattaaagaatactaagcatagtataaagtctcccctgcactatcagaaaaacatttt

SEQ ID NO: 332072 - DNA, 201 bp, Homo sapiens
agtgtgggagatgattggttgtccagcgagctcgtctcagtccctactggtgacatactctactgttgcatttctctccatgatggcaaggccagatgatytggatggagtccatgtggtgcatggtgtacctgtgctctccgaagctccgcagcctgcaagagctggaagaactcaatatgcatctttctgacatcgccc

SEQ ID NO: 332073 - DNA, 201 bp, Homo sapiens
cttaataatccatataaaaagtctagctctcgttatctttattagacaatatctctaaagttgagtgttgcttgagcccttggcattggcactgccctgaygcccaaaggcttccctctagcttgatcctagaacctgaggttgagggaatgaatagcagcctcctgttcatttcaggtgagaggagacagagcaaaactt

SEQ ID NO: 332074 - DNA, 201 bp, Homo sapiens
aatagttgtccaacgtattacaggatagaattataacactcataggtccatttgatagtgttccttggaaaactgttgctgctgcaggaatggacaaagcrtctagtcactgtcctgggatctgcaatgctcactgaactaaacacatgagattcctgcctttgggcagcttgtggtttagtagagggaaacagacaatta

SEQ ID NO: 332075 - DNA, 201 bp, Homo sapiens
tccatttgatagtgttccttggaaaactgttgctgctgcaggaatggacaaagcatctagtcactgtcctgggatctgcaatgctcactgaactaaacacwtgagattcctgcctttgggcagcttgtggtttagtagagggaaacagacaattaacatgtaactaaacaaataagatcattggggtagtgatgaatgtta

SEQ ID NO: 332076 - DNA, 201 bp, Homo sapiens
atttcacagcacctcttctaactgtggctttcctggacaaaaagcaacactgaactagagaaggaaaaattgaggccacctcagttttggggggaaactckagcggtgaactggcatttttttggcaactactttgtgccaggcattttacccacattatcttatttacacaacagttatataaggtcccacaactagtaa

SEQ ID NO: 332077 - DNA, 201 bp, Homo sapiens
ggaagtgtctgcatcagtagccatgacctgtcaggactcctcagagaccaacctgcttctcaggctccaggcagctgggtggacgttcaagacttgcttcrttcatcatctctgccaccaatctcaccaggtggtcacctggctgccaaacatgatggctcttcagtggcacaccattccatctgacttggccctcttggg

SEQ ID NO: 332078 - DNA, 201 bp, Homo sapiens
gtgcagtaagaaattggacatttagaaaattggacatgtagaaaattccatacttctcgcagtgtcaagattctatggtgtgctctggataagcttgaatrctctgacccctctctgttcttcaaacatgttctctgctgcctagaagcctgttctctctgtccagaaggctcttctttgcctttccatccttcagtctca

SEQ ID NO: 332079 - DNA, 201 bp, Homo sapiens
ctctttgcgttggagccccagttgtctcctggggaggactattatgagacagagaaccccaaaggacagtggctgcttcgagaaagactttgggagcggayggtgccctgactccatctggattccttgacgtgtctcagactgggtccctgagaagctgtccgctttcagcgcagcatgaggtatttggtagagttgaaa

SEQ ID NO: 332080 - DNA, 201 bp, Homo sapiens
aggaatgagcttgttgtcactggaagcattcaagaagaaactggaaaaccagcagtcagaaatagcgtgcagtaagaaattggacatttagaaaattggayatgtagaaaattccatacttctcgcagtgtcaagattctatggtgtgctctggataagcttgaatgctctgacccctctctgttcttcaaacatgttctc

SEQ ID NO: 332081 - DNA, 201 bp, Homo sapiens
cagatgtttctcctcctttgcttgcagtattttcctctcttatagtctagatttgtagatttctaattataaatcactcttttttttttttttttttttttaagagacagggtctcactctgtcactcaggctggagtacagtggtacgatcatagctcactgcagtctcaaacccttgagcttaagtgatccttccacct

SEQ ID NO: 332082 - DNA, 201 bp, Homo sapiens
acagatgtttctcctcctttgcttgcagtattttcctctcttatagtctagatttgtagatttctaattataaatcactcttttttttttttttttttttttaagagacagggtctcactctgtcactcaggctggagtacagtggtacgatcatagctcactgcagtctcaaacccttgagcttaagtgatccttccacc

SEQ ID NO: 332083 - DNA, 201 bp, Homo sapiens
aacagatgtttctcctcctttgcttgcagtattttcctctcttatagtctagatttgtagatttctaattataaatcactcttttttttttttttttttttttaagagacagggtctcactctgtcactcaggctggagtacagtggtacgatcatagctcactgcagtctcaaacccttgagcttaagtgatccttccac

SEQ ID NO: 332084 - DNA, 201 bp, Homo sapiens
aggagatgaatgcaccatcgtttcgtgtggagagaggagcagatgggaaaatgtttctccattgctactcggatagaagtggtctgtgccacattgtaccrggtatggaaatggcttagctggccgcagagctatggggcttctgaagtgaggaaggtttccccatagattctccaggatggctaataactggctacgggt

SEQ ID NO: 332085 - DNA, 201 bp, Homo sapiens
ctgatgtctgatttgaagcagggcctgggcttggtgaacttcagaatattcatcagaagttttgccatttgattattttatgatttttgctgataaagttsccttcggccatccctcgacaataggtgtccttctgctgcaggtatcattgaggctgtggccaaagacttctttgatattgatgtaatcatggacattctt

SEQ ID NO: 332086 - DNA, 201 bp, Homo sapiens
aaacagatgtttctcctcctttgcttgcagtattttcctctcttatagtctagatttgtagatttctaattataaatcactcttttttttttttttttttttttaagagacagggtctcactctgtcactcaggctggagtacagtggtacgatcatagctcactgcagtctcaaacccttgagcttaagtgatccttcca

SEQ ID NO: 332087 - DNA, 201 bp, Homo sapiens
tatacacaaagactgcctcaagcttattcatcacaatgttgtttatacaatgataagctagataaaatataatcaatactagcttattatttaataaaagwatgagcaaggtaaccagcaaaaattaagatgaatatctatatttaatactatgaaagaatatgttatatattttaagtgaaaaattcagattatgaaaag

SEQ ID NO: 332088 - DNA, 201 bp, Homo sapiens
gaaacagatgtttctcctcctttgcttgcagtattttcctctcttatagtctagatttgtagatttctaattataaatcactcttttttttttttttttttttttaagagacagggtctcactctgtcactcaggctggagtacagtggtacgatcatagctcactgcagtctcaaacccttgagcttaagtgatccttcc

SEQ ID NO: 332089 - DNA, 201 bp, Homo sapiens
tgtataacttcagtctctgcatatttttatttaattggctgtcactgatgtctgatttgaagcagggcctgggcttggtgaacttcagaatattcatcagragttttgccatttgattattttatgatttttgctgataaagttgccttcggccatccctcgacaataggtgtccttctgctgcaggtatcattgaggctg

SEQ ID NO: 332090 - DNA, 201 bp, Homo sapiens
atatatgtcaactgaattgattaggaactcatttaaaggacacctattttacttcttccttctgtgtgttcactggagatagcagtgaaaggtattccccyacccccttgatggatttcttcacccaggcctgggtgatagatccaatgctatagaatttgctagtttcttcattagtaaatgatagagagagtgagagag

SEQ ID NO: 332091 - DNA, 201 bp, Homo sapiens
ttaatgggggtggaaatgaccaaaggaaaagaaactaatttgcattaaggagcaattattgtgccaggatccatgttagacattttacatgtgcagtttcrttaaattttctcaacatttctatgaaggaggtgttgtccataccatattgctgagcaaattgacattcagcgcagctgataaatgaaagaggtggaaact

SEQ ID NO: 332092 - DNA, 201 bp, Homo sapiens
acgcagcagatgcagacggtgagtgcagcaggcctggtctaaaatacttccagccttgcattgctcataaagacaatcggacacttcagaggtcacttcayaggcagtgagaaagagccgggaagggatagcacaggtggagtttggtgtcccggggcaggacgctactgacttgcttgctgtattttgaataaactgttg

SEQ ID NO: 332093 - DNA, 201 bp, Homo sapiens
gtgtaagtcactggtgaaaaataaaaataaaaatggaaagcatagtgtgcgtgtgtgtgtgtgtgcgtgtgtgtgtgtgtgcatgtgtgtatgaaaggggyatagcgccagagatgaaaataatgctacaccaataagaatgaaattagacaatgaattgttggaaactctcaaggtggatttaccaagaaaaaaatagga

SEQ ID NO: 332094 - DNA, 201 bp, Homo sapiens
atttgtgtccactgggaaaaatgtgtgtcttttaattaggagatgaatgcaccatcgtttcgtgtggagagaggagcagatgggaaaatgtttctccattrctactcggatagaagtggtctgtgccacattgtaccaggtatggaaatggcttagctggccgcagagctatggggcttctgaagtgaggaaggtttcccc

SEQ ID NO: 332095 - DNA, 201 bp, Homo sapiens
aggggctacgttgagaacacgttttcttttttctgacgtttccacttgacttgatctgtaaagaatatattttatttcctcaaccatctctggcttagacrtaaactatgtatgtaatatagttacatacataattatacaagtatatacattatgtaattataaaattctgatatgttaccaaaattttcagaatgcatg

SEQ ID NO: 332096 - DNA, 201 bp, Homo sapiens
aagaatgcaagggaaccagagaaatatgtctgggaatagagaacccagcagggtacatcctgcgcttgtgtcattaggttttatctctttcatcttgaagyttcaattatctgcttaactgggtctcaggatgtttgtatacagagcactagacatctatacgattgcattggaaatgcatctttaagccaaaaataaagc

SEQ ID NO: 332097 - DNA, 201 bp, Homo sapiens
caaggaacttgtgttggcatcggtagcatggaggccattgatagatgggagccacttcaatgtaggcaatggacacagctgctagggacagaggggagatragtaaggtctcacagaccttgggtaaaagagaaagagcgtgactgtgcagtaactagaagcacacagtgtgggagatgattggttgtccagcgagctcgt

SEQ ID NO: 332098 - DNA, 201 bp, Homo sapiens
tcagtgatacctgcaaacctcacccctatcctgtccagcctgtcttggggggactcccaggcccttttgtctctccagcagctaacaccaggggaggtttstgtggggctgggttatcaaaaagcacacagcatcgagctttctgcgctcgagtctgagagcgggatgtgtcctctttacagcactgtgctgctcccaggg

SEQ ID NO: 332099 - DNA, 201 bp, Homo sapiens
cctgtctcctgtgtcaatgatgccaacgcataagcagcgcttcccttggggagactccttgcttctctcattgctgcttcagaggctgggggatgtggtayaaaaagtgctaaacttagagttggagcctcttcaacaaatctggcctctgcaactctatgtgactgcagtcaattcacaaagatgactcagccccaacag

SEQ ID NO: 332100 - DNA, 201 bp, Homo sapiens
gcttgtgttaggagccccgagttgcggaaggcaggtggcctgcctggggcacactatccctcactaagcagaagtgttcatgggtcctccttttttttttytctgatggaggaagaagaaagagcacagattaatgagcaaacccagaagacagttctttctgttaacctggtgctgtctttcttattggagtttcctcct

SEQ ID NO: 332101 - DNA, 201 bp, Homo sapiens
acttgctgggggttcaaagataaaaacaggtcacaatgctcatcctcaaggagaccagctagtgggtaagaccaacaatctttatataagttgaggaaatrcatagcctatcctgggtacttgagaaggggtctccgggctcaaactgaggtccagggaaggcttcttggaggagttgacacccaaacactccagtgtctc

SEQ ID NO: 332102 - DNA, 201 bp, Homo sapiens
agtatatacaaatacatgcacacccatacatacatgcctgtgtgtatatatatatgtgtgtgttgacagatacaaaacccgagcgtgtgcatgtgatagttaacacaccatctctgtggtgttgaggacacagaggcatccagcagtgagcctgacagggaatgatggctgggtctggcagagggagaggaaatggttctg

SEQ ID NO: 332103 - DNA, 201 bp, Homo sapiens
ttatcttatttacacaacagttatataaggtcccacaactagtaagtggaagaaatagcatttgatcttcatttcagacttgtttgtctagggcagatcaygtccgtgtgagttcattttgagcatcagaccaagacaattccatagtttccctaagtggtggccactgcacttgaactgcttgggttgacaatggcccag

SEQ ID NO: 332104 - DNA, 201 bp, Homo sapiens
gtgccaggcagcaggtcccacttgctcaccagagggggcggccttatgctttaccccgcaggtgactgaggacccaacagtgtgctccttgcttggaggcyagtgatgagctcctaatttcactgtggactgcccagatttctacaagacaggcttctggagacgctgtggattctctcctgagtgactaggggctggcag

SEQ ID NO: 332105 - DNA, 201 bp, Homo sapiens
aggcagctgggtggacgttcaagacttgcttcgttcatcatctctgccaccaatctcaccaggtggtcacctggctgccaaacatgatggctcttcagtgscacaccattccatctgacttggccctcttgggtgggaaacgggcactcctggccccctctccccggagaggaccgtggatcctgacaaagtatctcagag

SEQ ID NO: 332106 - DNA, 201 bp, Homo sapiens
tcaatagacagcctcatctacaaggcagtcttcctacaggagcttaggggtgtatgcttttctgtgcttgcagaaaggcgttctgtgccgttggcacctcrgggagaagcttcaggtttcaggctgaactcctgagagcttagcatctggggtgtgcacgacttggggtgccaggcagcaggtcccacttgctcaccagag

SEQ ID NO: 332107 - DNA, 201 bp, Homo sapiens
cagctcccagcgtgagcgacgcagaagacgggtgatttctgcatttccatctgaggtaccgggttcatctcactagggagtgccagacagtgggcgcaggwcagtgggtgtgtgcaccgtgcgcgagccgaagcagggcgaggcattgcctcactcgggaagcacaaggggtcagggagttccctttccgagtcaaagaaa

SEQ ID NO: 332108 - DNA, 201 bp, Homo sapiens
cagaagacgggtgatttctgcatttccatctgaggtaccgggttcatctcactagggagtgccagacagtgggcgcaggacagtgggtgtgtgcaccgtgygcgagccgaagcagggcgaggcattgcctcactcgggaagcacaaggggtcagggagttccctttccgagtcaaagaaaggggtgacggacggcacctgg

SEQ ID NO: 332109 - DNA, 201 bp, Homo sapiens
attcttgacatgaatgaagaagtggagaggacagggaagaaggagcatgttgtgtttctgattgtacagaaggctcacaggaagatgagaaagacaaagcyaaaaaggttacaagacagtcagggcatggagagagaccaagaggtactgggtttgctgtgcctttagaaagaacagttgcacttaagtagagctacgagt

SEQ ID NO: 332110 - DNA, 201 bp, Homo sapiens
agatcacctggtttatttgcaacttttcctttatcaaatggaagtatagattaggttagatttgaagattgttgactttggtcttgaggagcccttacctsgagtgccagtgttgcgagacctcacctccattcttgcctgggttctgtacataatgtacaaagtcagatgtatattctctttgcagttctgggaccactg

SEQ ID NO: 332111 - DNA, 201 bp, Homo sapiens
gagaagacattctgcaacgcttttcctttccacattgtattcgatgaatcagtaagagactcttccctctgtagcttagaattggggctaagccagggaartgagcatgatttacagtccttcatgaacagtggagattttcaagtccctgagaaattcccagggcttgggagactaggctttatcctggcaggaccattg

SEQ ID NO: 332112 - DNA, 201 bp, Homo sapiens
ggttcctccacccaccggctggatggccttgaatgtgctactcgcctgctcccagccccagcttcctaactgtaaaatgaacaaagctcgagtgcctacttcatgggaccctcatgagcacctgatagcataatgcacataaagcccttggcctggtgtctggcagagtaagcacaataaatattcagttcatattattat

SEQ ID NO: 332113 - DNA, 201 bp, Homo sapiens
agtccctactggtgacatactctactgttgcatttctctccatgatggcaaggccagatgatctggatggagtccatgtggtgcatggtgtacctgtgctytccgaagctccgcagcctgcaagagctggaagaactcaatatgcatctttctgacatcgccccccacgacaccaccagggatctcatcctcctgaaccag

SEQ ID NO: 332114 - DNA, 201 bp, Homo sapiens
aatgtttcaattggaggaagtacagtctcctgagaaagctgttttgaagaagacagcactgcaccgacttgtggttaagattgggctctgtaggcaggaggtctggcttgaatcttggttcctccacccaccggctggatggccttgaatgtgctactcgcctgctcccagccccagcttcctaactgtaaaatgaacaaa

SEQ ID NO: 332115 - DNA, 201 bp, Homo sapiens
gaggagactcgagaggcaccccatttatttgcccaaggctgtggaaggggccttcaacacctggaaatttaagcccaaagcctgcaaaaaagagtaagtgyttgggctaaatagcatgaccaagatgttctcgtggcctccagacgcttggggtgatccttaaggtgcctccagccccatcttacatgccaaatattattc

SEQ ID NO: 332116 - DNA, 201 bp, Homo sapiens
ggcagatagatgattatttccttgttttcccttctttcttacattaaagaatactaagcatagtataaagtctcccctgcactatcagaaaaacattttarggcacctaagttagtttagttctttcttgcagtttctaaccatttcctgtatatcttggatcccctatgacttagcgggttcttggaatcttaaatacac

SEQ ID NO: 332117 - DNA, 201 bp, Homo sapiens
ttttgcacaagtaggcagatagatgattatttccttgttttcccttctttcttacattaaagaatactaagcatagtataaagtctcccctgcactatcaraaaaacattttaaggcacctaagttagtttagttctttcttgcagtttctaaccatttcctgtatatcttggatcccctatgacttagcgggttcttgga

SEQ ID NO: 332118 - DNA, 201 bp, Homo sapiens
aaaatattcacaagctgattttaaaatttatatggaaatgtaaagaatctagactaacccgaacactcttagaaaataacaaaattggaggatgtacacarctaattttaagacttattctaaagcaacagtaaaaaaaaaacagagtgagattgggagaagaatagacaaagagaccactggagcagcacagagtgtcca

SEQ ID NO: 332119 - DNA, 201 bp, Homo sapiens
ggagctccagacagatccttttcaacttctcaggagaagatatggagtgggatgcagagctctttgcgttggagccccagttgtctcctggggaggactaytatgagacagagaaccccaaaggacagtggctgcttcgagaaagactttgggagcggatggtgccctgactccatctggattccttgacgtgtctcagac

SEQ ID NO: 332120 - DNA, 201 bp, Homo sapiens
gggcaaacattgagtaacagaacagtaattaatgtgtgttgtcagaactataaaacattcttttaaaatgtttgctgtctttcccataaagtggacacttkcttactgtctattccaacagtgtagactggggagcggggaggtgggcagcagctccaactaatgccgcaaatctacctccaggtgttcatcaggcaccta

SEQ ID NO: 332121 - DNA, 201 bp, Homo sapiens
ctgcaggctgcatggaggacctcatttgcacttcaataacatgcttttctttcacttaactatatatcttggtgttagatttgtcagtggagagactcccyagtgcaattaaacgggagtattgagccggagagaaatcagtgtgtgttgactcagatatttaagcaaccacctttcagtattgactcagaaattggcctt

SEQ ID NO: 332122 - DNA, 201 bp, Homo sapiens
ttgacacccttgatagcatcgaccagatgtcaaatcagagctggtcagcacaggcggcatgggtgggagggcagccagaccatctgtggaacaacctgttsatagtatagacggctgagcctcacctgagagggatttggcaagtctgcagtagggctgtgactggttcgttaaccaactttataggggattctgatgagc

SEQ ID NO: 332123 - DNA, 201 bp, Homo sapiens
gttacttcgggcaagtcctcttcaagacatttttctcatcctgaaggcaggggtaatggcgggccttcttcacagggttgctttgagaaatagatgagatrgtatgtagcacctgaaaacagcagagtgtcaggtgtgcggactgctgagtcacttgggcattcattcgcttaacaaatatatgggtcttaacacaaaact

SEQ ID NO: 332124 - DNA, 201 bp, Homo sapiens
aaatgtttcaattggaggaagtacagtctcctgagaaagctgttttgaagaagacagcactgcaccgacttgtggttaagattgggctctgtaggcaggaggtctggcttgaatcttggttcctccacccaccggctggatggccttgaatgtgctactcgcctgctcccagccccagcttcctaactgtaaaatgaacaa

SEQ ID NO: 332125 - DNA, 201 bp, Homo sapiens
cccaaggtaatttatagattcaatgctatccccgtcaagctaccactgactttcttcacataattggaagaaactacattaaatttcatatggaaccaaaraagagcccgcatagccaagacaatcctaagcaaaaagaacaaagctggaggcatcacgctacctgacttcaaactatactacaagtctacagtaaccaaa

SEQ ID NO: 332126 - DNA, 201 bp, Homo sapiens
caataaaatactggcaaactgaatccagcagcacatcaaaaagcttatccaccacgatcaagttggcttcatccctgggacgcaaggctggttcaacataygcaaatcaataaacgtaatccagcatataaacagaaccaacgacaaaaaccacataattatctcaatagatgcagaaaaggccttgaacaaaagtcaaca

SEQ ID NO: 332127 - DNA, 201 bp, Homo sapiens
gacatctgcagaactctccaccccaaatcaacagaatagacattcttctcagcaccacattgcacttattctaaaattcaccacataattggaagtaaaarctcctcagcaaatgtaaaagaatagaaatcacaacaaactgtctctcagaccatagtgcaatcaaattagaactcaggattaagaaactcactcaaaact

SEQ ID NO: 332128 - DNA, 201 bp, Homo sapiens
ctgatggagctgaaaaccaaggctcgagaactatgtgaagaatgcagaagcctcaggagccgatgcgatcaactggaagaaagggtatcagcgatggaagrtgaagtgaatgaaatgaagtgagaagagaagtttagagaaaaaagaataaaaagaaatgagcaaagcctccaagaaatatgggactatgtgaaaagacca

SEQ ID NO: 332129 - DNA, 201 bp, Homo sapiens
tctcagtccctactggtgacatactctactgttgcatttctctccatgatggcaaggccagatgatctggatggagtccatgtggtgcatggtgtacctgygctctccgaagctccgcagcctgcaagagctggaagaactcaatatgcatctttctgacatcgccccccacgacaccaccagggatctcatcctcctgaa

SEQ ID NO: 332130 - DNA, 201 bp, Homo sapiens
cattgaaaagaagaaaacagagaccttactttatgccatgctgcccaaacacgtggccaaccagctgagggagggcaaaaaggtggctgcaggtaaggcamcctctcctccacagcgtcctctgagcagagcgtggtatgtcttagtggtcagggccacaggctttgaagccagacagaagtggttttgaattctggctct

SEQ ID NO: 332131 - DNA, 201 bp, Homo sapiens
aaaccacaaagatggggaaaaaacagaacagaaaaactggaaactctaaaaagcagagcgcctctcctcctccaaaggaacgcagttcctcaccagcaacrgaacaaagctggatggagaacgactttgacgagctgagagaagaaggcttcagacgatcaaattactctgagctacaggaggacattcaaaccaaaggca

SEQ ID NO: 332132 - DNA, 201 bp, Homo sapiens
gggcagactgcctcctcgagtgggtccctgacccctgacccccgagcagcctaactgggaggcacccccccagcaggggcacactgacacctcacacggcwgggtactccaacagacctgcagctgagggtcctgtctgttaaaggaaaactaacaaacagaaaggacatccacaccaaaaaaccatctgtatatcaccat

SEQ ID NO: 332133 - DNA, 201 bp, Homo sapiens
gaacgggcagactgcctcctcgagtgggtccctgacccctgacccccgagcagcctaactgggaggcacccccccagcaggggcacactgacacctcacasggctgggtactccaacagacctgcagctgagggtcctgtctgttaaaggaaaactaacaaacagaaaggacatccacaccaaaaaaccatctgtatatca

SEQ ID NO: 332134 - DNA, 201 bp, Homo sapiens
tgcacgattcttttcagcgatgtagtgacatttactaacatctgtactgcctgtgaacctatacaaatagtgaacgtgctgaattccatgtactccaagtktgacagattaaccagtgtgcacgcagtctataaagtaagtgtctgtgcagtgtggggtgtttcacggtgtgctcacgcagggcgagtgcttgattctaag

SEQ ID NO: 332135 - DNA, 201 bp, Homo sapiens
gatgtggaaattgatcctctcagtccctctgaagcacacacatcaaagttgaactgttctatgtccttttccttcttaggtgaatactagctaatctgttyagccaaaggaatatatttttattctgtcagaagtttcccaagttgtagctaaaaggaatgagaatttcagagacctggcaggcctgggggggtggggggt

SEQ ID NO: 332136 - DNA, 201 bp, Homo sapiens
acttggggtgccaggcagcaggtcccacttgctcaccagagggggcggccttatgctttaccccgcaggtgactgaggacccaacagtgtgctccttgctyggaggctagtgatgagctcctaatttcactgtggactgcccagatttctacaagacaggcttctggagacgctgtggattctctcctgagtgactagggg

SEQ ID NO: 332137 - DNA, 201 bp, Homo sapiens
gcggactgagcccagagggcgagaggggaagcggcatgggagaccggcagggttggtggagcaggcttcacagccaggtgagaaaaacagtctcaattttkattcaaaatcggactgtccacagctgaaagctcactaacctgtctcatgagacccagctctgcactccttctgactgtttctaaaactcaagccctgctg

SEQ ID NO: 332138 - DNA, 201 bp, Homo sapiens
acaccaaagacaaatgctggaccacatgactcaatggccctaaattcatcaaacagaggcacactatcggggtggtcatgacctagaagtaggtgatgtgkttatcaactagcagcagacttcaaattccccactgcctcagtttcccttgttacacactagaagtttgtctctagtgctcgggcagtgggcatgatgttt

SEQ ID NO: 332139 - DNA, 201 bp, Homo sapiens
atgtctcttcacctcaatgctcccatcagtcaagggtgtttatgataataggacctacactataggattgtggtaaggctgaattaatattaagtagaacsaaatgcaagtggttcagttcgttcaattctaaagtctttgacctgtaaaaaatggcaatttcatgtggctcattctaaaacatggaaagtgctttgtgcc

SEQ ID NO: 332140 - DNA, 201 bp, Homo sapiens
cacactatccctcactaagcagaagtgttcatgggtcctccttttttttttctctgatggaggaagaagaaagagcacagattaatgagcaaacccagaasacagttctttctgttaacctggtgctgtctttcttattggagtttcctcctctgttttcctgcactcgttatattctccacacacacacccaggtataga

SEQ ID NO: 332141 - DNA, 201 bp, Homo sapiens
aaatggttctgcagaccaggcagtatcccagtagcctcagagcctggccttgccctgggctgactgggtgagaaaggaggaaactctatccattgaagaartgacatctctgtttggggaagggcggtaggcattttggatgagcctaaggcagcaggagtaggtgataaaatgaaacaaattaagacagttctagagagt

SEQ ID NO: 332142 - DNA, 201 bp, Homo sapiens
acttacttgctgtttgacttgggcaaatgtatttattcaacaagtatttagcttctagaatgtgctgaacaaagtttcaggcactgggaatagaggcaaarggaataggcaagtgctgtgttccctgggaatgtattccaatggggaggacagtaaacaggcaaataaacaaataaatctcaggttgtgcaaagagctaaa

SEQ ID NO: 332143 - DNA, 201 bp, Homo sapiens
taaggagtaaggatgacattggtggtggggaactggaaatatagcccagtaggacaaatatttccatttctggaaaataactaccagagtttagacactcrccttcctgttggcactgggctctttcactttaagaaattcctatatatatgaaaatccaaacttataaaataaatctggagcctgatatttgtgtgacaa

SEQ ID NO: 332144 - DNA, 201 bp, Homo sapiens
gtattggcttattttcaagatgctcgtcctcacgtgggttgggggagaggtggggggcagtggcgtgcgtcccactggactggatttgcatctgggctctrctgctcagagctgtgtgatcttgagcgggttgcttcacctctctgaagctctgtttcctcattgataaagggggaataatgtacctatcttctagggtta

SEQ ID NO: 332145 - DNA, 201 bp, Homo sapiens
tcctcattgataaagggggaataatgtacctatcttctagggttaaggagagaattgagtggtgcaatctacacagaagtgcctagtagaaactcagtaarcatccttcctcctctctgagatataggtgctacattaagattacattatacttgacattattagaaccactttgctgctggtcagataatgatgctttcc

SEQ ID NO: 332146 - DNA, 201 bp, Homo sapiens
gccaccacgtgggaattcattttcaggggctctgggtgaaataagagaggtgtgtctttaaacatgtgtttactgagctcccatagtaggcctggtactaygaaaaacactggaggattgaagaagcaaataagccttttggcctggatggctttagaatctgtggaaacattacaggtatgcctggaacacaggaactag

SEQ ID NO: 332147 - DNA, 201 bp, Homo sapiens
tacaagttggaagaaaatacatgcaatgatacctaacagctatatagtgctttattctgggcaaagtattatagattgtctctttaggcaaaaataacaamgtaagataatgttcactttttttgtgtctatctagtaatttggcagtgcctttaaggtatacatttctggttataactgagcctttaatcttgttatgct

SEQ ID NO: 332148 - DNA, 201 bp, Homo sapiens
tggttataactgagcctttaatcttgttatgctttggccaaacttcattgagtgctaattatgaggcaggtgttgggctaagtaatgtgtcaacattgacktaccttcttgatgccataagagtaggcagtcttatttttcctgttatacggatgagaaaactgaggtccggaaagttcaagtaactgtccccaaatcacc

SEQ ID NO: 332149 - DNA, 201 bp, Homo sapiens
tgttgggctaagtaatgtgtcaacattgacttaccttcttgatgccataagagtaggcagtcttatttttcctgttatacggatgagaaaactgaggtccrgaaagttcaagtaactgtccccaaatcacccaggcatggtggctgagctggacccaaacccacacctgtctccaaagatcctgccctgtgctgttctcat

SEQ ID NO: 332150 - DNA, 201 bp, Homo sapiens
aactgtccccaaatcacccaggcatggtggctgagctggacccaaacccacacctgtctccaaagatcctgccctgtgctgttctcattattctttggaayaataagaactttgtcaaagatcacgtggctttaggtgtacagccttatttctgggctttctattctgttctgtaatgatacctaacggctatatagtgct

SEQ ID NO: 332151 - DNA, 201 bp, Homo sapiens
agtgaaggagtgcctactgagaagggaagaatctttcagcaaacttcggatgccaagggaaagatgctgaagtcttccaggagggcgtgcgatgcctggaygttcgtttcagtggacggccccagtctgtggcgttgtggtcctcgacagactgtcttaaccatgagtcacatccctctagtgccccacacctccacactg

SEQ ID NO: 332152 - DNA, 201 bp, Homo sapiens
aagtaatcatgttatcaccttgatctcagacttccgacctccagaactctgagaaaataaatatctgttgtttaagccaccccatctatggcattttgtcrtggtggccctagtggactaatataagaacttgaatcagcttgtatatctccagaaagaaatactctgtatatatcatatcaccccagtccatttttgtgg

SEQ ID NO: 332153 - DNA, 201 bp, Homo sapiens
cacacaaaagtagaattctgcttatgtgcttaggtgattactgggtaagttgctgtcattaaaatgggtaatgtatcctagcccttttcttctcttgcatrtgtccctaatagagatattcctaaggctcctatagtctcaacttttctcaaatttcagaggaggctgcggtgctcaaggttttcctacgattgactgcaa

SEQ ID NO: 332154 - DNA, 201 bp, Homo sapiens
tataaagaggatagaatgaatattctagcatggctggctgaaaattgtatttattgtattttgttttcattgttagcttagacaaatttctttatgcacakccataactttctcagcagtttcttgctgaagtgtgcttctttcatgttggcaagtcctgggaaaactccagcgtttgatctccctcgacctgttccaccc

SEQ ID NO: 332155 - DNA, 201 bp, Homo sapiens
tgcctccgaagatgcttagaaagcactgtataggcatgggccaaaacaggaactcttacaggtgaaggagaattcaagcagcttctagtcctagaagctasagtcctagatcctcaactgcgtgcacaagcgtttctggggctgtctgagaatccccagtggatgtgtgtgtagcagagaggttaaaaaagatggagaaac

SEQ ID NO: 332156 - DNA, 201 bp, Homo sapiens
tcctagatcctcaactgcgtgcacaagcgtttctggggctgtctgagaatccccagtggatgtgtgtgtagcagagaggttaaaaaagatggagaaacacraatcttgcccagtacctcctctattttacggataaagaaatcaaggcccagagggggaaagtggttttccctcagagcttatttgtgtaaggtataagct

SEQ ID NO: 332157 - DNA, 201 bp, Homo sapiens
ggctgaggaagctggatgtgtgtggtgctcagagtcctctctggtaacaggtggtcacctgcttcccctgcccactctgggccacctgcttcccctgtccwctctgggccacctgctgtctcatctcatcatgttgctctcttggagccacagagacaagcaggggccagagttgccaacgaggcctggcaggtgatggtg

SEQ ID NO: 332158 - DNA, 201 bp, Homo sapiens
cacctgcatcttttgatagaaccaaggttgtgtctgaggctggaaataaggcacaaggagtgaaacagtcatttgctccttcagctcctggaactcaggcrccaagagcagcaacacctcccggatgcttcctaaagccagttcccagcctgccaccacggcagcacttagagggaggacgcaggcagctggcagacaggg

SEQ ID NO: 332159 - DNA, 201 bp, Homo sapiens
taattctttggtgttgatggggtgtctttcacgtcatagtgtgcttagcagcagccctggtcttttcctactagtagaacctcatcccctcatttgtggcmaaacaaaaaagaaagaaaaagaaatgtctcctggcattgccaagtgtctgcgtagtgggggtaatggataaaatcattcccagttgagaattgctgggtt

SEQ ID NO: 332160 - DNA, 201 bp, Homo sapiens
tgccaaagagattacctgttttgttttcttaagcatcactttaattttttttaaaagtatgcgattacgatgttaaatatgcttttgcaaaccagacagamagatcccctcttgatcctaatatgtccaccccacataggcaaagcctaggtgctgcccttgtggctgacaattctgcacatctgtgatcctagtgagggc

SEQ ID NO: 332161 - DNA, 201 bp, Homo sapiens
agtctacagaccaatgtgtgggctggcccacatcacctttccaccgaaagccaacgtacatcactgtggtttctctctgcctagctttgaatgtcaggaaycttttcttcttgtagtttatttccataacatctattggcctatatctatctgaaagagtaaatgagtatggtgaatgcatttttcaaacaagaagttggg

SEQ ID NO: 332162 - DNA, 201 bp, Homo sapiens
acatctattggcctatatctatctgaaagagtaaatgagtatggtgaatgcatttttcaaacaagaagttgggatgcaaaatcgagtgaacacatgtatgrgatgtggaatcaggacagccccaggaagcccgtcgtgattctgtatgtctccaactcccatgagtctgagagagcaagacccatccaaaggaaaggctac

SEQ ID NO: 332163 - DNA, 201 bp, Homo sapiens
ttattctttggaacaataagaactttgtcaaagatcacgtggctttaggtgtacagccttatttctgggctttctattctgttctgtaatgatacctaacrgctatatagtgctttattctgggcaaagtattatagattgtctctttaggcaaaagcattttttttattctgttattctttgccctaattctccactttt

SEQ ID NO: 332164 - DNA, 201 bp, Homo sapiens
ggacagggaagaaggagcatgttgtgtttctgattgtacagaaggctcacaggaagatgagaaagacaaagccaaaaaggttacaagacagtcagggcatsgagagagaccaagaggtactgggtttgctgtgcctttagaaagaacagttgcacttaagtagagctacgagtcttggaaaaatctatgcaaacaacagaa

SEQ ID NO: 332165 - DNA, 201 bp, Homo sapiens
tgaaaaaaagacataatgtaatgtccttgaggcagggatttttgccagtttgagtcactgctgtatcctcaatgcttaaaacagtgtgcctagctcatcgyagggactaactacatatgtaatgaaagaactaatagaaagagaagatttgtggaggggatcgaagttgagttcagtgcagatatccatgaacagatacct

SEQ ID NO: 332166 - DNA, 201 bp, Homo sapiens
gatagatgattatttccttgttttcccttctttcttacattaaagaatactaagcatagtataaagtctcccctgcactatcagaaaaacattttaaggcrcctaagttagtttagttctttcttgcagtttctaaccatttcctgtatatcttggatcccctatgacttagcgggttcttggaatcttaaatacactgat

SEQ ID NO: 332167 - DNA, 201 bp, Homo sapiens
tactaaaaatacaaaaaattagccgggcgtggtggcacatgcctgtaatcccagctacccgggagtctgaggcaggagaatcgcttgaaccctggaggtgsaggttgcggtgagccgagatcgcatcattgcactccagcctgggtgacgagcaaaacttcgtcacacacacacacacaaaaaatctcaagaacaaaaatc

SEQ ID NO: 332168 - DNA, 201 bp, Homo sapiens
tggccaaggcctggagtctcactcttcctctgggctacgaggacctgcttgttctttacaatcacccgttctcccccgccctttctttttcaccctttctytcttttccaactccccttcagctcgagttgtgtgtgagagaaagaaggcggctcacgtgcccggctgaggaatgagatcatttctctccccgtgtagcgg

SEQ ID NO: 332169 - DNA, 201 bp, Homo sapiens
aaatcattaggtggaaattctgtaatgagagatgactacttttgagctgaaaatctggagttttgacagagcttaggaaataaaacggcaaaaaagcttasaatgggtagtgaaattaagcccacctttagtcttttcttgattttattccaagggatcccagcagcagaaggacgtagtggctgtatcgtgtagtcttga

SEQ ID NO: 332170 - DNA, 201 bp, Homo sapiens
ttagaaatactaattggcatctttgagtttgtgctctatggggcattgcgtgactcacttggtataaatcatctagtttaatgatcataacaaccctggarggcaggtgttatttctccatttttcatatgaggaaaactgaggcccagagagcttcagtaactcatccagggttacaggtcaagtagtggcaatgctggc

SEQ ID NO: 332171 - DNA, 201 bp, Homo sapiens
cagaatcttttttactttgacataatttcaaacttgcaaaaggcttacaagaatagtacaaagaattcccatgtagtatttatccatattccccaaatgtygacattttaccatatagtgtctatccttctctttatatctagatttatactttttttcttgaaattgttagtatattgcaaatgtgatgccttcttgtcc

SEQ ID NO: 332172 - DNA, 201 bp, Homo sapiens
ggaactgaattggagtagaatgtcaaacatatatgtgtgaaaattccaagacagccttgcagttctgcgctgaccaagtcttgtttgaattgtcagaggcrtcaacccaaattgatggagtcaggtttggcttgtccaactttcactgtgctgtttcagttcattttctcagcacagtcctagctgattgtcctttctgtc

SEQ ID NO: 332173 - DNA, 201 bp, Homo sapiens
ttaaataactacagtacaacaatcaaactcaggaaatgaacatagatatagtgctattatctaatctatagaccttattgagagttttccagttgacccartgatgtcctttagaacaaaagaaaatcctgaatcatgtcacttatcgtgtctcttcagtattctttggcttggaacagtttctgagtctctttatgtttt

SEQ ID NO: 332174 - DNA, 201 bp, Homo sapiens
caggtgatgatccacatcccacctctattccccaaggcaacagcatttcctcacattccatgctgctatcgctgcagccactaccacccccaactccccarcctccaagtttgtgtttgacaatctcacatgataggtgttttccaaatgggaagatttcttctgcaaccattcttttcatttaatctgttcttgatctac

SEQ ID NO: 332175 - DNA, 201 bp, Homo sapiens
tcttttcttgattttattccaagggatcccagcagcagaaggacgtagtggctgtatcgtgtagtcttgatttggtctgagccctctgcgaaagaacatckcgttgttattccagaatgagaatggagggtggattcttttccgtcacaccagctgtgtgaccttgggctagaatttcactgagagttgatctcctgcaaa

SEQ ID NO: 332176 - DNA, 201 bp, Homo sapiens
aggccggccaggatgcacccacaagcaaagaagccaacggaggcaattaacacaggccattaccactggcttctctaccatcccaagcttcgtctagattsagatccgactaatcaatttttggaaaatatgtataactcatcttggaaaatatgtacaactcatctctgacaaaactagaccaattcagtggggactcta

SEQ ID NO: 332177 - DNA, 201 bp, Homo sapiens
ctgtaaaaaggacatgataataaggttagctaccttataagagctgggcaaacattgagtaacagaacagtaattaatgtgtgttgtcagaactataaaayattcttttaaaatgtttgctgtctttcccataaagtggacacttgcttactgtctattccaacagtgtagactggggagcggggaggtgggcagcagctc

SEQ ID NO: 332178 - DNA, 201 bp, Homo sapiens
aagaaatgtctcctggcattgccaagtgtctgcgtagtgggggtaatggataaaatcattcccagttgagaattgctgggttaaggttaagtggatatatrctgggaagcattctgggatgcacctgagcctggacaatttttcacctataacaataaccatatgaaggatttgaaatttgaatttgatggcttttttttt

SEQ ID NO: 332179 - DNA, 201 bp, Homo sapiens
gaattgctgggttaaggttaagtggatatatactgggaagcattctgggatgcacctgagcctggacaatttttcacctataacaataaccatatgaaggrtttgaaatttgaatttgatggcttttttttttcaatcctcctcaaataaattgatctttccagtcttcagtgcccacttctgcagctggaaccagtcata

SEQ ID NO: 332180 - DNA, 201 bp, Homo sapiens
cctcttgaacatggggaaggggtcatgccaactcaagccactgctctgtaagagttgtgagcataactatttaagtttgattgttaatccatttctatggwtaaaatatatgtcaactgaattgattaggaactcatttaaaggacacctattttacttcttccttctgtgtgttcactggagatagcagtgaaaggtatt

SEQ ID NO: 332181 - DNA, 201 bp, Homo sapiens
actgaaaaaaagacataatgtaatgtccttgaggcagggatttttgccagtttgagtcactgctgtatcctcaatgcttaaaacagtgtgcctagctcatygcagggactaactacatatgtaatgaaagaactaatagaaagagaagatttgtggaggggatcgaagttgagttcagtgcagatatccatgaacagatac

SEQ ID NO: 332182 - DNA, 201 bp, Homo sapiens
acaaaacaccctgtatctgaataagtaacagtttccaaagagcataaaatactgctgaatataattcagtcgtgtgtgtgtgcgtgtgtgtgtgtgtgtgkatgtgtgtgtcagagagagagaatatgtaatagcaatcaaatgaacatatagctaatgatatctgtacttagctaactctggttgcgccataccctataa

SEQ ID NO: 332183 - DNA, 201 bp, Homo sapiens
acagagctgggcatccacaaacaaaataaccagagcctggaacaaacagcttcatggattttttaagtttaaagatttgaaagtcaaacaggcagtctttyacccaaagctgccactcttacttgaatataactttgcttggcttacacgcagcccagtcctcctggcagaggttcttgggagaaggggggccgctgggac

SEQ ID NO: 332184 - DNA, 201 bp, Homo sapiens
gtccttcctaagtgtggctgtcaaactttgctgacctttcccccttggggctaatgagtgtcacagctatttttaaccttgggttttctagaagttgagcygttaacctagctcctacagaaggaggatcctgggaggtataaatgaactcttcacacacaaggaggtgactaatggaggaacataggattttcagtgtca

SEQ ID NO: 332185 - DNA, 201 bp, Homo sapiens
caccaaaagcaatggcaatgaaagccaaaattgacaaatgggatctaattaaactaaagagcttctgcacagcaaaagaaactatcatcagagtgaacagrcaacctacagattgggagaaaatttttgcaatctatccatctgacaactggctaatatccagaatctacaaagaacttaaatttacaagaaaaaacaacc

SEQ ID NO: 332186 - DNA, 201 bp, Homo sapiens
gaatggacaaagcatctagtcactgtcctgggatctgcaatgctcactgaactaaacacatgagattcctgcctttgggcagcttgtggtttagtagagggaaacagacaattaacatgtaactaaacaaataagatcattggggtagtgatgaatgttaagaaaaaaataaaactcagtagagggccagtgaagtcttct

SEQ ID NO: 332187 - DNA, 201 bp, Homo sapiens
gttattggcattttaccgaggaggcaagtgacggcttagagagtagctcgatagtgtcacacagccaggatgtgaaccctttggaaataaatgaagaccayacaaaggacaacacacacctccaggagattttatttagggggtatgctttggtttctacaggtgtctccatggaagccatcctgaaactctttggagaat

SEQ ID NO: 332188 - DNA, 201 bp, Homo sapiens
tgtgattgtgttggcactagtttctgcaaagcttggatttggtgaccatggtttttaactttaaaatgtcaggctctaattgtccttccattgcctctcawtatttgtgccgggtgacatggagacatcatctcccctgtcctaagaaaaagtttttggagacacaattggaatcactcccaacaggtgatgggtggagag

SEQ ID NO: 332189 - DNA, 201 bp, Homo sapiens
gagtgctccagccggaccctatctccggcatcccttccctttcttttttttttttttgagacagagtctcactcttgtcacccaggctggagtgcagtggygcaatctcggctcactgcaacctctgcctcccaggttcaagcgatactcctgcctcagcctcccaagtagctgggattacaggtgcccaccaccatgccc

SEQ ID NO: 332190 - DNA, 201 bp, Homo sapiens
aggctggtctcgaactcctgacctcaagtgttctgctcacagcctcccaaagtgctgggattacagatgtgagccatcgcaccaggcctacaataaaattwaaaaaaaaaaatagtcgggtgtgatggtacatgcctgtagttctagccacttgggaggctgagaatggaggatggcttgagcccaggaggttaaagctgc

SEQ ID NO: 332191 - DNA, 201 bp, Homo sapiens
ctgcggctccgatcccggggccccgccacggtggaggatctggtgagtgctccagccggaccctatctccggcatcccttccctttcttttttttttttttgagacagagtctcactcttgtcacccaggctggagtgcagtggtgcaatctcggctcactgcaacctctgcctcccaggttcaagcgatactcctgcctc

SEQ ID NO: 332192 - DNA, 201 bp, Homo sapiens
gcactccagcctgggtgacagagcaagaccctgtctcaaaaagagaaaggaaaactaaatcctagtcctagcagagctgacacgctaatgtgggccctgcygtggccctggctcaggctcagtgggtgatgagttactgggatggaatccccctagtcctctcccagctctctcccttcgccctccagtggtgattagaaa

SEQ ID NO: 332193 - DNA, 201 bp, Homo sapiens
gcaatggcacggtctcagctcactgcaacctccgcctcccaggtttcaggcaattctcctgcctcagcctcctgagtagctaagactacaggcacatgccmccacacccggctaatttttgtgtttttttgttagagacagggtttcactatgttggccaggctggtcttgaattcctgacctcgtgatccacccgcctca

SEQ ID NO: 332194 - DNA, 201 bp, Homo sapiens
gcaggggtctccctaagtgggatgagtttctgtgtcctccacaagcatttcctgagcactcactgtgtgccaggctccgttccctgaaagcagcaatgaattttttttttttttttttgagatggagtcttgctctgtcaccaggctggagtgcagtggcacgatcttggctcactgcaacctccacctcctgggttcaaa

SEQ ID NO: 332195 - DNA, 201 bp, Homo sapiens
agttcctgtcaggcattgggaggccagtgccccatgagatggtggaggctagaggccagatacgagatgcacttctccgtgatgccttggagaaactcaaygctgtgggaggcaggcttgcctggtgccaagcactgtggggatagatgggagggggtcaaggagggcaatagtgggtttgagcaagaagtagacgcaggg

SEQ ID NO: 332196 - DNA, 201 bp, Homo sapiens
catgccaccacacccggctaatttttgtgtttttttgttagagacagggtttcactatgttggccaggctggtcttgaattcctgacctcgtgatccaccygcctcagcctcccaaagtgctgggattacaggcatgagccaccgcacccggcctgcaaaaagttttaaaacgtcagctgagcattaggcacagtggttca

SEQ ID NO: 332197 - DNA, 201 bp, Homo sapiens
ccccctctctcctaaaaatatgaaaattagctgggtgtggtggcgcacgcctgtaagcccagctactcaggaggctgaggcaggagaatcgcttgaacccrggaggcggaggttgcagtgagctgagatcgtgccactgcactccagcctgggctacagagcgagactccatctcaaaaaaaaataaaaataggccaggcg

SEQ ID NO: 332198 - DNA, 201 bp, Homo sapiens
ctgctctgccccacatccatgccaggcctgagtcaggattcctgccctcctgggatcaccccggccccagcccccagaaacttgcagaagcctggagaagyttggggtggtggtgaaagccaggaaggacaagttcctgcccagaacgtgctaaaaccaagcttcccccacactcactcctctcctgcctcccacagacat

SEQ ID NO: 332199 - DNA, 201 bp, Homo sapiens
ccgcctcccaggtttcaggcaattctcctgcctcagcctcctgagtagctaagactacaggcacatgccaccacacccggctaatttttgtgtttttttgktagagacagggtttcactatgttggccaggctggtcttgaattcctgacctcgtgatccacccgcctcagcctcccaaagtgctgggattacaggcatga

SEQ ID NO: 332200 - DNA, 201 bp, Homo sapiens
gagcggccggtgatggggaccccacatcccaggcagtgccgggtaagcgggttgcacatgagggtccctgattggggaggaggagggcatgaaggggtggrgccatggccacctgctgtccgtcctgtgtccccgggctcttctccctgatctgtgcgtccctgtcttaccgtctgtccatcctcccttcccatctggcct

SEQ ID NO: 332201 - DNA, 201 bp, Homo sapiens; identical to SEQ ID NO: 69737

SEQ ID NO: 332202 - DNA, 201 bp, Homo sapiens
gaactcctgacctcaagtgttctgctcacagcctcccaaagtgctgggattacagatgtgagccatcgcaccaggcctacaataaaattaaaaaaaaaaaatagtcgggtgtgatggtacatgcctgtagttctagccacttgggaggctgagaatggaggatggcttgagcccaggaggttaaagctgcagtgagccatt

SEQ ID NO: 332203 - DNA, 201 bp, Homo sapiens; identical to SEQ ID NO: 69740

SEQ ID NO: 332204 - DNA, 201 bp, Homo sapiens
ccatccttcctcctagcccccctctcctcttcctttttggggtctttgtagcgcaccccgacccacacaagcctcctctcctgccccaccgttataagtcsccgcgcttcattccctagtcctttcacccaacccccttgcttttcctctttccgggacacctgagactcctctacggccggacccccacccactgaaggt

SEQ ID NO: 332205 - DNA, 201 bp, Homo sapiens
tgcgcccgcgcctgctctatagctcacaccggcttcccccgcaggtgttggtggcgctggccgtcggcggctggagctctacctccctgcagcggccactrttcctggccgtgcgccttgcctcctggaaccagatcctggacccttgggtgtacatcctactgcgccaggccgtgctgcgccaactgcttcgcctcttgc

SEQ ID NO: 332206 - DNA, 201 bp, Homo sapiens
gatggtgggccagcttgtcggtatcatggtggtgtcgtgcatctgctggagcccaatgctggtgaggggcgcaccggcccctcgagccacgctccttcccsctccctctcggcaccctcccgccctttgtcgtcccaggacacctggggcctccatcctggactcaaccaaggccccggcccctagaggccccacctgccc

SEQ ID NO: 332207 - DNA, 201 bp, Homo sapiens
ttcggcatccactggggccgcgcggggggctgcagggacgccgcgtgcgcctccagggtggatgcagttccggggcctaccagaagagggcgcggagacamgggggcgcggttctaggaggtttgagggtgccgggcccgtgggcgccagagccgcaggagcaagcgcaccgtgcgggcggcgggggctggggctccgctg

SEQ ID NO: 332208 - DNA, 201 bp, Homo sapiens
catcctgttcatgagctggggctcagatgctgaagctgcagatgctgagcctgggccccactcagtggtgggggccaatggcctgggctggatgctgagtycccatgaggcactgggaggcttgtgcccctgtgaattgtggggaactggaggccagggctggatgctgagttcccatcaggcactgggagacctgtgccc

SEQ ID NO: 332209 - DNA, 201 bp, Homo sapiens
acctgtgccccagtggattgtgggagctgatggccagggctgcatgctgacatcccatcaggcattaggaggggtgtacccccagtagattgtgcaagacyaggggtggatgctgagttcccaacaggcactgagagacctgagctccaatggactgtgggaggccagggctggatggattgattggatggatggattgag

SEQ ID NO: 332210 - DNA, 201 bp, Homo sapiens
aggtagggctggtctgtggcccagcagccatacccccttggccaagaggagacggactcaggcagctggagactcaggctggggtacacctgcttcctgtyccccagcccctgggagcagaagtggcccctccagtctcccctccagcatttcctattcctggcccccagctgttccccctgctctgccccacatccatgc

SEQ ID NO: 332211 - DNA, 201 bp, Homo sapiens
ctcacacctagcttccaggggccattagcccagccaagcgccctcagccctggccagccccctatccccaacaggccaggcttgactgctcagtgccagcycccccacttttccatctggcttcactaactctcaggaatgggccccaggcccctgaggtgggggtgggggactaaatcacttccctgggcaggtagggct

SEQ ID NO: 332212 - DNA, 201 bp, Homo sapiens
ccccgcaatattccttggacatgtctgccaccatttaatttcaatgaaaacttcttgtccgtaaattttttcaactcaggagggtgagctttgctcatggkgtatactccatgggctcacagatgccttggaacagaacgcacggcttccctcacgctaccgcggtaggcccagcatcttgtgcctggcgtcatcgacctc

SEQ ID NO: 332213 - DNA, 201 bp, Homo sapiens
ggaggccaggaagtgccatccacctgtttggtccaaagggggagagtcagaaattttttgcacacagtgttagtgactgtggctgagaggaaaatagaagygtagtcgctttcagcctccattttctcatctgttcaatgggcataattgtagcataacgtgatccctgtgttacagtgtggtgtgagggttaaggaaggt

SEQ ID NO: 332214 - DNA, 201 bp, Homo sapiens
gagggagggggaagaggtttcagcgtctcccacccctgcaggtgatgttctgcaccctgaacacccacaaagtggacatggacaagctcctggggggccaratcgggctggaggacttcatcttcgcccacgtgaaggggcagcgcaaggaggtggaggtgttcaagtcggaggatgcactcgggctcaccatcacggaca

SEQ ID NO: 332215 - DNA, 201 bp, Homo sapiens
tcagggatgtggcggcagcaacctggctgtgctgagatggggacaggatgaaactgagtggtaagtgacaggattgtatgtcttagggtgtgaggctgtgmcagtgtgaccctacttctcagggcaggaggcgagtctttgtgtcttaggacgtgtgtcacaggtgtcactcagcccatcttaaaggagccagtcactggg

SEQ ID NO: 332216 - DNA, 201 bp, Homo sapiens
acatgatcagccagcgttcagcgggtggccgccctggctctggcccacaactgggcactggccgagggaccctgcggctccgatcccggggccccgccacrgtggaggatctggtgagtgctccagccggaccctatctccggcatcccttccctttcttttttttttttttgagacagagtctcactcttgtcacccagg

SEQ ID NO: 332217 - DNA, 201 bp, Homo sapiens
ttgtaaaaaaggtgaggcagcctacccagagaggtggagtgacttgcccaaggtcacacagctagtaactggcacatctgggactggaactcatgccccarggtccagaactggagtcacacccactagactggataccaataactccacggctcagttgttgctgagtagctccggccccctacccctcccaccccctac

SEQ ID NO: 332218 - DNA, 201 bp, Homo sapiens
agaccccatatctccacaaaaaatacaaaaattagccaggcatggtggcgagcacctgtagttccagctacttgggaggctgaggtgggaggattgccggwatctgggaggttgtggctgcagtgactatgatggcaccactgcactccagcctgggtgacagagcaagaccctgtctcaaaaagagaaaggaaaactaaa

SEQ ID NO: 332219 - DNA, 201 bp, Homo sapiens
gtgctggaacggggagcctgggcgtggtttcccccttcccctagcttctgtgtgctcccaggaacccccttcccctcctcctgctggccacactgcttctktgtggccgtggggttgctaagtttcaggcccttcccaggatgagggggtgaggatgctgaaattccagcccaaacactcaatatccgggctgaagtggct

SEQ ID NO: 332220 - DNA, 201 bp, Homo sapiens
tgctgggattacaggcatgagccaccgcgcctggctagggcttttctttgtttttttgagatggagtctcggtttgtcacccaggctggagtgcagtggtrtgatctcggctcactgcaacctccgcctcctgcattcaagtgattctcccacctcagcttcccgagtagctgggatcacaggtgtgcaccaccacgccca

SEQ ID NO: 332221 - DNA, 201 bp, Homo sapiens
atttcctcgtatttccaccattccaatatttttctgttgtccactagtcgccatctccacacattcatctatcacaaggttcataaagggatcaaatcccygcaatattccttggacatgtctgccaccatttaatttcaatgaaaacttcttgtccgtaaattttttcaactcaggagggtgagctttgctcatggtgta

SEQ ID NO: 332222 - DNA, 201 bp, Homo sapiens
ccaggatgagggggtgaggatgctgaaattccagcccaaacactcaatatccgggctgaagtggctcttcatctctgtgttcaggtgtgaggggagccagsgaaagtggggagcctaggacagttggcaaccgcacagcaggcatgtttagggggctgtttcaaggatggggagcacagagagcaatcagaacgaggacct

SEQ ID NO: 332223 - DNA, 201 bp, Homo sapiens
agacccgtctctacaaaaaataaaaattagctgggcatggctgtgaacacctgtagtctcagctattcaggaggttgagacaggaggattgcttgagcccrggaatttgaggctgtagtgagctgtgatcacatcactccactgcagcctggacgacagagtgagaccccattaaaaaaaaaaaatcaggaaaacatagca

SEQ ID NO: 332224 - DNA, 201 bp, Homo sapiens
aggagttcaggaccaatctgggcaacgtagtgagacccgtctctacaaaaaataaaaattagctgggcatggctgtgaacacctgtagtctcagctattcrggaggttgagacaggaggattgcttgagcccaggaatttgaggctgtagtgagctgtgatcacatcactccactgcagcctggacgacagagtgagaccc

SEQ ID NO: 332225 - DNA, 201 bp, Homo sapiens
gttggacctgtgtggcttcggggtgggagagggggaagattggggctgagaaagaattcagcagctgaaatccatcttccgcaggctccaaattgaattasgagctggcaccaagccacctgccccctcccactgttccttctggctgcaggccaccaggcttccaggcagggccagagcttcctggactactgagggttc

SEQ ID NO: 332226 - DNA, 201 bp, Homo sapiens
tgccgaaagggaaggggttgcagaaagggaaggggttgcagctcctcccgaccccagacggggtgctggcccttggcccagcctgggagaagggcgggggygaggaggaagttgccctcacacctagcttccaggggccattagcccagccaagcgccctcagccctggccagccccctatccccaacaggccaggcttga

SEQ ID NO: 332227 - DNA, 201 bp, Homo sapiens
ggaaggccaaggcgggaggattgcttgagcccaggagttcaggaccaatctgggcaacgtagtgagacccgtctctacaaaaaataaaaattagctgggcrtggctgtgaacacctgtagtctcagctattcaggaggttgagacaggaggattgcttgagcccaggaatttgaggctgtagtgagctgtgatcacatcac

SEQ ID NO: 332228 - DNA, 201 bp, Homo sapiens
caaggtctttaggctggaccaagtttggaatcacatggttggagcagaagatgaacccagagcagcgattctgcaggggtttgtgggtcacagtaaggagwttgcagtttttcttccagaaggtgggaaactgttgtaaagtttcaggcagggcagtgatgccatctggtttacgttttaaaatagagacatgaagttaaa

SEQ ID NO: 332229 - DNA, 201 bp, Homo sapiens
gggagcctcactcctcgtggagggagccgctggggcccagagtggcccccgcccattgccaggagcagagaggggggtctctgccactccaggcccccagygggcgtgcgcggggtggagcggcccctggaggccagcaagggcggcgggaggagctgaggagccgccccaggaagagggagggaggaagcggcttgccgg

SEQ ID NO: 332230 - DNA, 201 bp, Homo sapiens
tcatcttcgaggattgagggtgatcagggaaaggcggggtgggaccctggccagacctggagggaagggaagggattgaagcaaggggcgctgggccagarggccccacaggaatgcttgggggtgagccgagaggctgtggggaagtccgaggccagcttgcaatcctcgttccaaaaggcgggcgggcactgggccacc

SEQ ID NO: 332231 - DNA, 201 bp, Homo sapiens
agcactttggaaggccaaggcgggaggattgcttgagcccaggagttcaggaccaatctgggcaacgtagtgagacccgtctctacaaaaaataaaaattrgctgggcatggctgtgaacacctgtagtctcagctattcaggaggttgagacaggaggattgcttgagcccaggaatttgaggctgtagtgagctgtgat

SEQ ID NO: 332232 - DNA, 201 bp, Homo sapiens
agcaggctgggtgtggtagctcatgcctataatcccagcactttggaaggccaaggcgggaggattgcttgagcccaggagttcaggaccaatctgggcarcgtagtgagacccgtctctacaaaaaataaaaattagctgggcatggctgtgaacacctgtagtctcagctattcaggaggttgagacaggaggattgct

SEQ ID NO: 332233 - DNA, 201 bp, Homo sapiens
ctaggtctaggggtgtctaggggtgcaggtgtgtgtgtctcagggcgttgctgtttctgggtgagggtgggggtggccagctaggtctctggtgtccagcrgcggggggtgtcacttcttgtgccttgggtgtacggagtttgctggtggggcctgtctgggattgttggggggtcattgaaagtcaaacagagtgtggtc

SEQ ID NO: 332234 - DNA, 201 bp, Homo sapiens
ccaaaccatagcaggctgggtgtggtagctcatgcctataatcccagcactttggaaggccaaggcgggaggattgcttgagcccaggagttcaggaccartctgggcaacgtagtgagacccgtctctacaaaaaataaaaattagctgggcatggctgtgaacacctgtagtctcagctattcaggaggttgagacagg

SEQ ID NO: 332235 - DNA, 201 bp, Homo sapiens
ggtatcagggacacggagctgggtgagtgagggctgcctgggggagggggcatctaggtctgctgggggccgaatccaccctgagccccttggtccctggwgtcatttgtgcctccgttctgacccctcccccaatagcggccaccatggtggagctgggaaaggacaaaaggaacccggatgagctggccgaggccctgg

SEQ ID NO: 332236 - DNA, 201 bp, Homo sapiens
accttatccaaaccatagcaggctgggtgtggtagctcatgcctataatcccagcactttggaaggccaaggcgggaggattgcttgagcccaggagttcrggaccaatctgggcaacgtagtgagacccgtctctacaaaaaataaaaattagctgggcatggctgtgaacacctgtagtctcagctattcaggaggttg

SEQ ID NO: 332237 - DNA, 201 bp, Homo sapiens
gcccccaaatgggcttgcccccccctcccccagccctgcggccccgcctcgtgttccacacccagctggcccatggcagtcccactggccgcatcgagggsttcaccaacgtcaaggagctgtatggcaagatcgccgaggccttccgcctgccaactgccgaggtatccactggggagccgggcaccagggtccctgatg

SEQ ID NO: 332238 - DNA, 201 bp, Homo sapiens
caagagttctgccagggcagcatgcaattaagttcatgggcctgagccatctgtaccacaggggcagttccagcatgctggggcaagcctgggaggcttcrtggaggagtgggcctggagtaggtattggcaggcagagagggttgggatattcctgggcagggcagggcagaggaggagacacccatagtaatgacaaca

SEQ ID NO: 332239 - DNA, 201 bp, Homo sapiens
taatacataaaaccctttgaaatcaatgtcaaccaggaaaattcatgttagaaaaaattggaatgagagctaatattgtatattcagaacatctgaaaaarcatttttgactattacaaaagtttatttaacaaaaagtctaatatgaaaatgtacatgacctaatttttacatcatagtaaaacaggccctatggagaga

SEQ ID NO: 332240 - DNA, 201 bp, Homo sapiens
ccctgcggccccgcctcgtgttccacacccagctggcccatggcagtcccactggccgcatcgagggcttcaccaacgtcaaggagctgtatggcaagatygccgaggccttccgcctgccaactgccgaggtatccactggggagccgggcaccagggtccctgatggtggaccagaggtctgggcctgcatcctgttca

SEQ ID NO: 332241 - DNA, 201 bp, Homo sapiens
atgatgatactatttcctcgtatttccaccattccaatatttttctgttgtccactagtcgccatctccacacattcatctatcacaaggttcataaaggratcaaatccccgcaatattccttggacatgtctgccaccatttaatttcaatgaaaacttcttgtccgtaaattttttcaactcaggagggtgagctttg

SEQ ID NO: 332242 - DNA, 201 bp, Homo sapiens; identical to SEQ ID NO: 69736

SEQ ID NO: 332243 - DNA, 201 bp, Homo sapiens
aaccaagcttcccccacactcactcctctcctgcctcccacagacatgatcagccagcgttcagcgggtggccgccctggctctggcccacaactgggcastggccgagggaccctgcggctccgatcccggggccccgccacggtggaggatctggtgagtgctccagccggaccctatctccggcatcccttccctttc

SEQ ID NO: 332244 - DNA, 201 bp, Homo sapiens
tgcaccctgaacacccacaaagtggacatggacaagctcctggggggccagatcgggctggaggacttcatcttcgcccacgtgaaggggcagcgcaaggmggtggaggtgttcaagtcggaggatgcactcgggctcaccatcacggacaacggggctggctacgccttcatcaaggtgcctggggagacggggcacccc

SEQ ID NO: 332245 - DNA, 201 bp, Homo sapiens
gggggagggggcatctaggtctgctgggggccgaatccaccctgagccccttggtccctggtgtcatttgtgcctccgttctgacccctcccccaatagcrgccaccatggtggagctgggaaaggacaaaaggaacccggatgagctggccgaggccctggacgaacggctgggtgactttgccttccctgacgagttcg

SEQ ID NO: 332246 - DNA, 201 bp, Homo sapiens
agctgagatggcgccactgcactccaacctgggtgacagagcaagactccatctcgaaaaaaaaaaaagagagagagatgggcaaggccaaggtctttagkctggaccaagtttggaatcacatggttggagcagaagatgaacccagagcagcgattctgcaggggtttgtgggtcacagtaaggagtttgcagtttttc

SEQ ID NO: 332247 - DNA, 201 bp, Homo sapiens
gctgcccatcttctccatgacgctgggcgccgtgtccaacctgctggcgctggcgctgctggcgcaggccgcgggccgcctgcgacgccgccgctcggccrccaccttcctgctgttcgtggccagcctgctggccaccgacctggcgggccacgtgatcccgggcgcgctggtgctgcgtctgtacactgcggggcgcgc

SEQ ID NO: 332248 - DNA, 201 bp, Homo sapiens
aaaaattagccgggcatggtggcgtgcacctgtagtcccagctacctgggaggctgaggcaggagaattgctggaacctgggaggcggagcttgcagtgarccaagattgcaccactgcactccagcctgggcaacacagaacagactctgtctcaaaaaaaaaaaaagaaagaaagaaaaaaaagaaaaaaagaaaggca

SEQ ID NO: 332249 - DNA, 201 bp, Homo sapiens
aaaaaaattgtttgaagggaggggagaatggagaaagagagaaataaagaagcgggccgggcgcggtggctcatgcctgtaatcccagcacttcaagaggytgaggcgggtggatcacttgaggtcaggagtcttctgtagtcacagctacttgggaggttgaggcaggtgaatcgcttgaacccaggaggcggaggttgc

SEQ ID NO: 332250 - DNA, 201 bp, Homo sapiens
ggaagagaggaagggttagtgggagaggcagggttggctgaggtcactcaccgtgggaggagacggaggtgagggtggagtagtccctcggcagtgtggtygagtgtgagtgttctgagcgggtcagtgagttgtagtcccgtgtgagggtggaggatgtgcttagcacgcggtggggcacgtgtgggctcaggtgggtgc

SEQ ID NO: 332251 - DNA, 201 bp, Homo sapiens
aggcggctgctgactcctctttcctccccagctgccagggacctggtgagcaaagagggcttccggcgggcccggcacgtggtgggggagattcggcgcayggcccaggcagcggccgccctgagacgtggcgactacagagcctttggccgcctcatggtggagagccaccgctcactcaggtgaggccctctgggcgcc

SEQ ID NO: 332252 - DNA, 201 bp, Homo sapiens
gcccgcgcccaggtgtgtcagcaggccgagcacagcttcgcagggatgccctgtggcatcatggaccagttcatctcacttatgggacagaaaggccacgygctgctcattgactgcaggttgggctcgctcccctcgtcccctcccgccctgcactcagcagctcctgggtggagtgtgcccactgcctggcgcagcaag

SEQ ID NO: 332253 - DNA, 201 bp, Homo sapiens
gctccaggagctggaagagaggaagggttagtgggagaggcagggttggctgaggtcactcaccgtgggaggagacggaggtgagggtggagtagtccctsggcagtgtggtcgagtgtgagtgttctgagcgggtcagtgagttgtagtcccgtgtgagggtggaggatgtgcttagcacgcggtggggcacgtgtgggc

SEQ ID NO: 332254 - DNA, 201 bp, Homo sapiens
tatcctctctgcagagacgactatgaggtgagctgcccagagctggaccagctggtggaggctgcgcttgctgtgcctggggtttatggcagccgcatgaygggcggtggcttcggtggctgcacggtgacactgctggaggcctccgctgctccccacgccatgcggcacatccaggtgggcgggcaccagggcctgggc

SEQ ID NO: 332255 - DNA, 201 bp, Homo sapiens
gctaagggttccgctggtggtcagtgtccggctcacaaactcctgggtcacatgccgggtgagggagccgcctgcctccaggtgctgggcccccagggtcrgcccatctgtggaggaggaggcattagatgacctggcttggggtctgcccttctccctctgctagctccctgtcccaggagagccgggatcccctagccc

SEQ ID NO: 332256 - DNA, 201 bp, Homo sapiens
cccaagacccccactgtcctcttgtgggtcccaggtctccactcaccagtgtcatcggagacgctgggcctctggctgcccgatggagagcgtagaacgtmatcgctgtacataaggaagctgtcgtagtcctccccgctctgggcgtccacgatagggatgtcagggatgatggggactgcagggcaggggagtgagcca

SEQ ID NO: 332257 - DNA, 201 bp, Homo sapiens
tctctgcagagacgactatgaggtgagctgcccagagctggaccagctggtggaggctgcgcttgctgtgcctggggtttatggcagccgcatgacgggcrgtggcttcggtggctgcacggtgacactgctggaggcctccgctgctccccacgccatgcggcacatccaggtgggcgggcaccagggcctgggcgggca

SEQ ID NO: 332258 - DNA, 201 bp, Homo sapiens
cttgtagggcacgttctcgctgaggcccggcacggtcagccggctctcggggctgtctccatccacccggaatgcggtggctggccctgagcagggaagaygccttcagcctctgcggccccctctttacccctcccctggccactcctgcccccggggtgggcagcacctcctccttgggccatctcacaggtcaccagg

SEQ ID NO: 332259 - DNA, 201 bp, Homo sapiens
gggcaggagcggcagcttcccggggccctgccactcacccccagcccgcctcttacaggagcactacggcgggactgccaccttctacctctctcaagcasccgatggagccaaggtgctgtgcttgtgaggcacccccaggacagcacacggtgagggtgcggggcctgcaggccagtcccacggctctgtgcccggtgc

SEQ ID NO: 332260 - DNA, 201 bp, Homo sapiens
ccctgctctgtgcatgcgggtgggctgggcccccaggggtgcaaggatggagtagctgaggaggctccgggagaggagtcgggaggacgcctagtgggacrtggcgggggtggggcagggtgcggtcaagtttggaagaactgttggtccatgtgggtgctaagggttccgctggtggtcagtgtccggctcacaaactcc

SEQ ID NO: 332261 - DNA, 201 bp, Homo sapiens
tgggcctccgtggccgctcccagctcagctgcagcgagtctgggctcagggcagtgaacaccagcgggcctggggcactgggagtgctcaaagtgaaggcsgagcctgggggcagtagaggaagagcatcagcctgtgggtgggtggtgggcatgatgggggcagctctggggctgggggaggcaactcacctggcagggg

SEQ ID NO: 332262 - DNA, 201 bp, Homo sapiens
gcgcgtcatggctgctttgagacagccccaggtcgcggagctgctggccgaggcccggcgagccttccgggaggagttcggggccgagcccgagctggccrtgtcagcgccgggccgcgtcaacctcatcggggaacacacggactacaaccagggcctggtgctgcctatggtgaggggctgcacggggagcccctagcc

SEQ ID NO: 332263 - DNA, 201 bp, Homo sapiens
ctcacgtactgcttgtctctcctgccaggctctggagctcatgacggtgctggtgggcagcccccgcaaggatgggctggtgtctctcctcaccacctctkagggtgccgatgagccccagcggctgcagtttccactgcccacagcccagcgctcgctggagcctgggactcctcggtgggccaactatgtcaagggagt

SEQ ID NO: 332264 - DNA, 201 bp, Homo sapiens
agggtggagtagtccctcggcagtgtggtcgagtgtgagtgttctgagcgggtcagtgagttgtagtcccgtgtgagggtggaggatgtgcttagcacgcrgtggggcacgtgtgggctcaggtgggtgccataggcagcagcactggtcgtggtcatcctgtgcagggagttggtgctgcccgggaaggcaaagtccatc

SEQ ID NO: 332265 - DNA, 201 bp, Homo sapiens
ggatgggggctttagcgctcaagggacttgggtgggttcctgacacagctgaggtaccctatgtgtctcactggggccaggccttgcagggctgcaccccrcagcctggcagccaccatgcctcaccgccgttcagcagctggtactccacactgtagccctgcagcggccgctcgcaccgcggctcctgccagctcactc

SEQ ID NO: 332266 - DNA, 201 bp, Homo sapiens
tcggctggaggcagtgtcattggagaggcttactccagctggcggaagcctcacgtactgcttgtctctcctgccaggctctggagctcatgacggtgctrgtgggcagcccccgcaaggatgggctggtgtctctcctcaccacctctgagggtgccgatgagccccagcggctgcagtttccactgcccacagcccagc

SEQ ID NO: 332267 - DNA, 201 bp, Homo sapiens
gtggcatcatggaccagttcatctcacttatgggacagaaaggccacgcgctgctcattgactgcaggttgggctcgctcccctcgtcccctcccgccctrcactcagcagctcctgggtggagtgtgcccactgcctggcgcagcaagcacacgcttggcctcgtcatctcccccattgtaactccaccccaggtccttg

SEQ ID NO: 332268 - DNA, 201 bp, Homo sapiens
ttctgacaattgagacacacaccctagaaacagctgctaggccgttgctgcccttcccgccaggacacctgcccttcctgtgccatcctcccaggcagccyctcttaccatcacctgttctttcccctgcagctgcccccctccctggcttcagtgcagtggtggtcagctcagtgcccctggggggtggcctgtccagct

SEQ ID NO: 332269 - DNA, 201 bp, Homo sapiens
atgatggcctcccgctcaggcccccagccggccccgttgcgcgccttcaccgtgtagcggtagggctgggactcccgaaggttctcaataagcagcatccrgttcttagggttgtcaaccagcactttcttcatgggcccaataggtcctggggcagagagagtgcttcagagggtcacccaggtcccagcctggtcccaa

SEQ ID NO: 332270 - DNA, 201 bp, Homo sapiens
ccaaggcagacggatcacctgaggtcaggagtgtgagaccagcctggccaacacggtgaaaccctgtccctactaaaaattcaaaaaattagctgggcatrgtggcacgtgcctgtaatcccagctacttgggaggctgaagcaggagaattgcttgaacctggtaggcagaggttgcagtgagctgagattgtgccacta

SEQ ID NO: 332271 - DNA, 201 bp, Homo sapiens
ctgcacggtgacactgctggaggcctccgctgctccccacgccatgcggcacatccaggtgggcgggcaccagggcctgggcgggcaggagcggcagcttyccggggccctgccactcacccccagcccgcctcttacaggagcactacggcgggactgccaccttctacctctctcaagcagccgatggagccaaggtgc

SEQ ID NO: 332272 - DNA, 201 bp, Homo sapiens
ccaggtaccagctaggccccagccctgacccagccctccttccctgaggtctccaggtggtcccagcttctactatgccttatggagggggtggcagggamtctccctggagtgtcattgaagccactgctgcttccaccagccctagcctccccacctcaccctgtactgcagactcgggcacaatagctgcccgcgccc

SEQ ID NO: 332273 - DNA, 201 bp, Homo sapiens
ctgatacacctcacactgtgattaactttttttatttatcttttttattatttatttatttatttatttgagacagagtcttgctctgtcacccaggctgsagtgcagtggcacgatctcggctcactgcaacctctgcctcccaggttcaagtgattctcctgcctcagcctcctgagtagctaggattagaggcatgtg

SEQ ID NO: 332274 - DNA, 201 bp, Homo sapiens
ctcagtgctcacccactaggaagggctcggtggcgctggtgtgggtggtggtgatgctgctgtactcgctttgcagcgggtgctggaagagcccggcacgrctgcccagctgcgggaagggtcctggggtgggcagataggccagtcagagggtggtgccagaaggaggcacggcccgaggaggggtgggggtgaaggaaa

SEQ ID NO: 332275 - DNA, 201 bp, Homo sapiens
tgctccctgaaggaccaaggtgtcccattttacagtcgggggaggaggcactgtgataaaggggctcttcagacccacgtctgagagagccaggctgcccygcccccgcggccttccacccttcaccgtccagccagggccactgccatcaccgcctgctggtcctcacaggcgtcggggccccaggcagtgagaaggcgg

SEQ ID NO: 332276 - DNA, 201 bp, Homo sapiens
tcccaggagagccgggatcccctagccctcagtgctcacccactaggaagggctcggtggcgctggtgtgggtggtggtgatgctgctgtactcgctttgyagcgggtgctggaagagcccggcacggctgcccagctgcgggaagggtcctggggtgggcagataggccagtcagagggtggtgccagaaggaggcacgg

SEQ ID NO: 332277 - DNA, 201 bp, Homo sapiens; identical to SEQ ID NO: 69781

SEQ ID NO: 332278 - DNA, 201 bp, Homo sapiens
gtgtcattggagaggcttactccagctggcggaagcctcacgtactgcttgtctctcctgccaggctctggagctcatgacggtgctggtgggcagccccygcaaggatgggctggtgtctctcctcaccacctctgagggtgccgatgagccccagcggctgcagtttccactgcccacagcccagcgctcgctggagcc

SEQ ID NO: 332279 - DNA, 201 bp, Homo sapiens
agagctgcaggcgcgcgtcatggctgctttgagacagccccaggtcgcggagctgctggccgaggcccggcgagccttccgggaggagttcggggccgagmccgagctggccgtgtcagcgccgggccgcgtcaacctcatcggggaacacacggactacaaccagggcctggtgctgcctatggtgaggggctgcacggg

SEQ ID NO: 332280 - DNA, 201 bp, Homo sapiens
tgctttgagacagccccaggtcgcggagctgctggccgaggcccggcgagccttccgggaggagttcggggccgagcccgagctggccgtgtcagcgccgsgccgcgtcaacctcatcggggaacacacggactacaaccagggcctggtgctgcctatggtgaggggctgcacggggagcccctagcccgccgccgcctg

SEQ ID NO: 332281 - DNA, 201 bp, Homo sapiens
agacgactatgaggtgagctgcccagagctggaccagctggtggaggctgcgcttgctgtgcctggggtttatggcagccgcatgacgggcggtggcttcrgtggctgcacggtgacactgctggaggcctccgctgctccccacgccatgcggcacatccaggtgggcgggcaccagggcctgggcgggcaggagcggca

SEQ ID NO: 332282 - DNA, 201 bp, Homo sapiens
cagtgtcatcggagacgctgggcctctggctgcccgatggagagcgtagaacgtcatcgctgtacataaggaagctgtcgtagtcctccccgctctgggcrtccacgatagggatgtcagggatgatggggactgcagggcaggggagtgagccagggccctggctgctgccccctgcccccctgcccggtctgcccctca

SEQ ID NO: 332283 - DNA, 201 bp, Homo sapiens
ccccttcaatatcctctctgcagagacgactatgaggtgagctgcccagagctggaccagctggtggaggctgcgcttgctgtgcctggggtttatggcasccgcatgacgggcggtggcttcggtggctgcacggtgacactgctggaggcctccgctgctccccacgccatgcggcacatccaggtgggcgggcaccag

SEQ ID NO: 332284 - DNA, 201 bp, Homo sapiens
ggcgggactgccaccttctacctctctcaagcagccgatggagccaaggtgctgtgcttgtgaggcacccccaggacagcacacggtgagggtgcggggcytgcaggccagtcccacggctctgtgcccggtgccatcttccatatccgggtgctcaataaacttgtgcctccaatgtggtacctgcctcctctagaggtg

SEQ ID NO: 332285 - DNA, 201 bp, Homo sapiens
ctgcaccccgcagcctggcagccaccatgcctcaccgccgttcagcagctggtactccacactgtagccctgcagcggccgctcgcaccgcggctcctgcyagctcactctgagagatgtgggccccagggcagagaacaccaggcgggtgggcgtgtcgggcacaccagcagtcaggcgagagtctggggacaggaggcc

SEQ ID NO: 332286 - DNA, 201 bp, Homo sapiens
tccttccatcccctgcctggctgcctggctccttccctcagcctccaagacatgctcagttttcttccctcctaaaacaccacccactgtctcatttccaytcatttctttctttctttctttctttttttttttgagagggagcctcactctgtcacccaggctgaagtgcagtggcatgatctccactcactgcaacct

SEQ ID NO: 332287 - DNA, 201 bp, Homo sapiens
tgaactctggcctcaagtggtcctcctgccttggcctcccaaagtgttgggattataggcatgagccactgcgcccagcccatttgccgtgttttttttttggacacagagtttcggtcttgtcacccatgctggagtgcaatggtgcgatctcagctcactgtaacctctgcctcccgggttcaagtgattctcctgcct

SEQ ID NO: 332288 - DNA, 201 bp, Homo sapiens
ttctccctctgctagctccctgtcccaggagagccgggatcccctagccctcagtgctcacccactaggaagggctcggtggcgctggtgtgggtggtggwgatgctgctgtactcgctttgcagcgggtgctggaagagcccggcacggctgcccagctgcgggaagggtcctggggtgggcagataggccagtcagagg

SEQ ID NO: 332289 - DNA, 201 bp, Homo sapiens
ctgtcacccaggctgaagtgcagtggcatgatctccactcactgcaacctccgcctcccaggttcaagcaattctcctgcctcagcctcctgagtagctgsgattacaggcgcctgccacgatgcccggctaacttttgtatttttagtagagacggggtttcgccatgttggccaggctggtctcgagctcctgacctca

SEQ ID NO: 332290 - DNA, 201 bp, Homo sapiens
tcacaaccggtaatctctgtcatcggcagcatgacctttctacttgcatgcatcctttgcttacctcatattttgaaggatacctggcttcaaagacagtygtcagggatacagcacccgggcatctggtcccctaggtcaagctcccttgctggcctccttcctaaccctgaagcagggcagagaaagaaagaaaggcaa

SEQ ID NO: 332291 - DNA, 201 bp, Homo sapiens
cgtgtttgctgcccgtgggtcccttgttttcttcaagtcatgaaggaacaagaaaagcatctcatatttaatctttaaaaaaggattgtggcatagagggytcttggcggcgtataagccaccaggtcagcttagctgcgctgacaaccacacctctcccctaaaactagtccagctctctcctaaaattcaatcacagct

SEQ ID NO: 332292 - DNA, 201 bp, Homo sapiens
tcttccagaccaagtctttgaccaaagctctaggacttgggcctccttatccaagataataacattgtgtaaccgagcagagttcaagccaggacaggaamatgtccccatcatgaaggtaatgcttctgcagcacttggtcttaaatcacagccagtttgtagtcacttgctgaggtctgattgggtgcttgatttcatc

SEQ ID NO: 332293 - DNA, 201 bp, Homo sapiens
gtgtttgtggatagtccttctgggttctggaagggacctgtggaaggtcagggagtgttctttcactggcagccaaggagaccagcctgcaattgtttatmtgtgaccatttttgctcctgagccccagaatgcatttggtggggaagcccagtgctcccttcttccccaaaaacccctgtcaggtgtccacactgtctct

SEQ ID NO: 332294 - DNA, 201 bp, Homo sapiens
tggaaggtcagggagtgttctttcactggcagccaaggagaccagcctgcaattgtttatctgtgaccatttttgctcctgagccccagaatgcatttggyggggaagcccagtgctcccttcttccccaaaaacccctgtcaggtgtccacactgtctctggcccagagaactgtgggctggagagattctgggtggaaa

SEQ ID NO: 332295 - DNA, 201 bp, Homo sapiens
agagagagggaaagagagaaagagaaagagagagaaagagaaagaaagaaaggaaagaaagaaagaaagaaagaaagaaagaaagaaagaaagaaagaaagaaagaaagaaagaaggaaagagaaagagaaatgaatgcaaattctctggccccagcccagtcctcctgaattgggaagtctggaggtggggcgcaatgat

SEQ ID NO: 332296 - DNA, 201 bp, Homo sapiens
agagggaaagagagaaagagaaagagagagaaagagaaagaaagaaaggaaagaaagaaagaaagaaagaaagaaagaaagaaagaaagaaagaaagaaaraaagaaagaaggaaagagaaagagaaatgaatgcaaattctctggccccagcccagtcctcctgaattgggaagtctggaggtggggcgcaatgatctgt

SEQ ID NO: 332297 - DNA, 201 bp, Homo sapiens
gggaaagagagaaagagaaagagagagaaagagaaagaaagaaaggaaagaaagaaagaaagaaagaaagaaagaaagaaagaaagaaagaaagaaagaaagaaagaaggaaagagaaagagaaatgaatgcaaattctctggccccagcccagtcctcctgaattgggaagtctggaggtggggcgcaatgatctgtctc

SEQ ID NO: 332298 - DNA, 201 bp, Homo sapiens
ggaaagagagaaagagaaagagagagaaagagaaagaaagaaaggaaagaaagaaagaaagaaagaaagaaagaaagaaagaaagaaagaaagaaagaaaraaagaaggaaagagaaagagaaatgaatgcaaattctctggccccagcccagtcctcctgaattgggaagtctggaggtggggcgcaatgatctgtctct

SEQ ID NO: 332299 - DNA, 201 bp, Homo sapiens
gagagaaagagaaagagagagaaagagaaagaaagaaaggaaagaaagaaagaaagaaagaaagaaagaaagaaagaaagaaagaaagaaagaaagaaagaaggaaagagaaagagaaatgaatgcaaattctctggccccagcccagtcctcctgaattgggaagtctggaggtggggcgcaatgatctgtctcttagca

SEQ ID NO: 332300 - DNA, 201 bp, Homo sapiens
gtagagaagaaggaatgcgtttcacctttctgtaagtaacacgctcagttcattccttcccagctctccatccacgagatggatgacccccacggcaagcrcttcctcatggtgatgaagggggcccctgagcgcatcctagagaaatgcagcaccatcatgatcaacggcgaggagcacccactggacaagagcactgcc

SEQ ID NO: 332301 - DNA, 201 bp, Homo sapiens
gagaaagagaaagagagagaaagagaaagaaagaaaggaaagaaagaaagaaagaaagaaagaaagaaagaaagaaagaaagaaagaaagaaagaaagaaggaaagagaaagagaaatgaatgcaaattctctggccccagcccagtcctcctgaattgggaagtctggaggtggggcgcaatgatctgtctcttagcagg

SEQ ID NO: 332302 - DNA, 201 bp, Homo sapiens
ctgaggagggagaatcacttgagcccaggagtttgagaccagcctggccaacacagtgagaccctgcctgtgttagaaataatagtaatgataattttttwaaaaattaacatttttctctactcagctggttcaagaaagaaaaatgtttctttccaaacactagaaggtggtccattctcagtccgggtgaggtgtgga

SEQ ID NO: 332303 - DNA, 201 bp, Homo sapiens
atcataattcctattttatttctagtttcactgtgctaaggttactgaaactgtcccacaaaaagaaaatgattgtgtctatgtggaatgaaccacataamcagtaaatgcaatgagaagaatctcctagtgccttgaagtgaccatatctcgccctagtccatggtagatactaaaaggctttattggctgggcgcagtg

SEQ ID NO: 332304 - DNA, 201 bp, Homo sapiens
tgccacacctcaaagcaagggaccagaggcatctgccaaatgtttggaaattaaaaacactctatagtgagcttttttttcttgagacagagtttcactcycatcacctaggctagagtgcagtggtgctatcttgcctcactgcaacctccgcctcccaggctcaagtgattcttccacctcagcctcccaagtagttgg

SEQ ID NO: 332305 - DNA, 201 bp, Homo sapiens
aatggccttcccacctccaccctcccttttttccctagaaatcatctttgcccctctcaagcttcacctcacatgtgacctccttggggaagtctctcctratcctccaggcagctgaaatgtgtctctgccctgagatgtaccctatgcttgatccctttaactctgtgccccgctaaacttcagaagtcgagactgtgt

SEQ ID NO: 332306 - DNA, 201 bp, Homo sapiens
tcatcggcagcatgacctttctacttgcatgcatcctttgcttacctcatattttgaaggatacctggcttcaaagacagtcgtcagggatacagcacccrggcatctggtcccctaggtcaagctcccttgctggcctccttcctaaccctgaagcagggcagagaaagaaagaaaggcaaggacttcatcagggcctgg

SEQ ID NO: 332307 - DNA, 201 bp, Homo sapiens
acctttctacttgcatgcatcctttgcttacctcatattttgaaggatacctggcttcaaagacagtcgtcagggatacagcacccgggcatctggtcccytaggtcaagctcccttgctggcctccttcctaaccctgaagcagggcagagaaagaaagaaaggcaaggacttcatcagggcctggctgctcctatgaat

SEQ ID NO: 332308 - DNA, 201 bp, Homo sapiens
aacacgctcagttcattccttcccagctctccatccacgagatggatgacccccacggcaagcgcttcctcatggtgatgaagggggcccctgagcgcatyctagagaaatgcagcaccatcatgatcaacggcgaggagcacccactggacaagagcactgccaagaccttccacacagcctacatggagctgggcgggt

SEQ ID NO: 332309 - DNA, 201 bp, Homo sapiens
ctgactcctgcaggtcctgaccccgcagaggggcgctcagcacctcttcggaaaccccatttggggccaatattgcacctgggcttctctttcagaaaacmccagaaatttactccgtggagctcagcggaactaaggacatcgtgaaaacagacaagggggatggcaaggagaagtataggggtctgaagaacaactgcc

SEQ ID NO: 332310 - DNA, 201 bp, Homo sapiens
gcatgttctcctcttattttttttcgtttcctattctagtttcactgactcactaattcatctgtattacaggtttctgtcatctctacctgccagcagaygagtttccagaaacctactcatttgacatagacgctatgaactttccgacctccaacctctgttttgtgggactcttgtcaatgatcgatccccctcggt

SEQ ID NO: 332311 - DNA, 201 bp, Homo sapiens
actaaccagaaacatatgatgtaaaatactcaagccaagaaaccacatctcttacgtaaaaccaaagtgaaaatagagtgcgcaacagtcctaaaagactrttttaggatgagtattattatactaataatactagtgataataggagctattctgtgctaatttccacaagtattaaattattcattcgcacgacaacac

SEQ ID NO: 332312 - DNA, 201 bp, Homo sapiens
tgataataggagctattctgtgctaatttccacaagtattaaattattcattcgcacgacaacactgtggggtggctagaggatgaggaggttgaggtgcygcgcatcagtgcacagtgtgaagatggggttagatgatgcctccatcagcagcaggacttggagccctgctgaagctccatctcccatggtaaaggcatg

SEQ ID NO: 332313 - DNA, 201 bp, Homo sapiens
agccaaaagaaccctttgagatctaggggtttaaaagaatctttaaaatatggagcttttaaaatgaaacaacataaaggctgctgaattccccaaagcarcaagtgtgtcctttgggacaactctttggcatgcactggtcagtctctcttacacactcctgcttagggatcacaggaggcgtcgtgattgtacgtgaac

SEQ ID NO: 332314 - DNA, 201 bp, Homo sapiens
agtgtgtcctttgggacaactctttggcatgcactggtcagtctctcttacacactcctgcttagggatcacaggaggcgtcgtgattgtacgtgaacacragccacagcagcgtgtccgtgtttgctgcccgtgggtcccttgttttcttcaagtcatgaaggaacaagaaaagcatctcatatttaatctttaaaaaag

SEQ ID NO: 332315 - DNA, 201 bp, Homo sapiens
ggtctggccaaagctgtggactccatcctggggctgagctgagcacacagcagggtctgcagccagaggattgctggacagtgactcatggacggccagcycaacccacagcagccactgttctttctctgtcttccagaccaagtctttgaccaaagctctaggacttgggcctccttatccaagataataacattgtgt

SEQ ID NO: 332316 - DNA, 201 bp, Homo sapiens
acagcagggtctgcagccagaggattgctggacagtgactcatggacggccagcccaacccacagcagccactgttctttctctgtcttccagaccaagtmtttgaccaaagctctaggacttgggcctccttatccaagataataacattgtgtaaccgagcagagttcaagccaggacaggaaaatgtccccatcatga

SEQ ID NO: 332317 - DNA, 201 bp, Homo sapiens
cgctgtggtgactggcatggagctgaaggacatgagctcagaacagctggatgagatcttagccaactaccaggagattgtctttgcccggacatcccccmagcagaagctgatcattgtggagggctgtcagaggcaggtgggtggacagcagtgtccagaggactgacaggcccatcactgtccatgggcaagtgcaga

SEQ ID NO: 332318 - DNA, 201 bp, Homo sapiens
cctccatcagcagcaggacttggagccctgctgaagctccatctcccatggtaaaggcatgcccagttgcaaaagggagaaaaagcaggttccatgaggcytcatgtacaagttggaggagaaagtggctacacagagtgggactagaaaggggagaggggcctgtgtgagttcctgctgaagaggtcggaggtgctgtct

SEQ ID NO: 332319 - DNA, 201 bp, Homo sapiens
tccttttattcttgtatatcgattttttttgcatatcttattaggatggatctagaagtagaattgctgggtcaagagcattcctattaaaatggagactbctgtgactcggctgtcttcctgaaacattatacgtggaagtgtccacttcctcacaccccgccattttctatgacatccaagcaggaaaactgggtggac

SEQ ID NO: 332320 - DNA, 201 bp, Homo sapiens
tctcaaaaaaaaaaaaaaaaaatttaagagagaaagagagaaagaaaaagaaaaggcctatattttagaaagtgatagtgataattagctgggaggttttytgtttggtttggtttttgttggttggttggttttctcaatgtctttacttgatcattaaaaaaagcagcagcagcagctggtaaccctatttgccctata

SEQ ID NO: 332321 - DNA, 201 bp, Homo sapiens
tggaagatgagggtgccagaacctgtatgccctggagttcagattgaagcgaggtgcatggctttgttcagaaaagctgcaggcagcttctgggtagtaayagcaagtgcaggattgtgccgactcagggacagtcactcctgaggcagtgccatccttcgctgggcagctgcctggcacaggggttctttctctcctgtc

SEQ ID NO: 332322 - DNA, 201 bp, Homo sapiens
gctgctctgaacaaaaggtctgacctgttgagccagcactggccttgggctggcttcggactcctcttacatcaatattctcatctaagggtgatgtcttwtctccctagacaggttgaaagctctttcaggggataggcctggtatgatgctgcacacatgtcacaagcctccaatcaatagttcaggaataaataaatg

SEQ ID NO: 332323 - DNA, 201 bp, Homo sapiens
tcagtcttgaggctcagcccccataatccatgttcatcattactaggttaatattaagactgttgaagtaacatggggctacccccaagtagacactcacyagccctttcacaaataaagtggcatcaaaggggaagggcttcctttcatgtcagaggaggaagcgtatgaagcttaggagcaagggtagacccaatggga

SEQ ID NO: 332324 - DNA, 201 bp, Homo sapiens
tcagtcaaaagtcacaaagggactgcacttcctcttggtcactgccactctgctcatggccacaaaagggaagagtggattacacatttgtatacaaatcrccacactgagtgaagtggatgcttttgtgaatgttttcagttattcacttcatcagctctagtttcatgaccatataaaaattgcatcttagcaggtgta

SEQ ID NO: 332325 - DNA, 201 bp, Homo sapiens
agcttaggagcaagggtagacccaatgggattagtgtttcctccaaagacagttgtctcgtagatccagagctgccactgtaatcaccaaccacgttctcycagggcactacagagtaggtattactgaaccatccccactttggccaaccgagttcttcattacccgtgggccttctcgttgtctttgctctaggttatt

SEQ ID NO: 332326 - DNA, 201 bp, Homo sapiens
gtaaaagggaataataatagtacccatggccttaaagttgttttgagaataaataagtcgatgtggacagcacttagaacagtgcctggcacgtggtacayaccataaaagtgtttcatattatccctatgttttaaatgtaaaaagccttatcttggccaggtacagtggctcacacctgtaatcacagcactttgggag

SEQ ID NO: 332327 - DNA, 201 bp, Homo sapiens
gatcttgttcaaggcacaagatttcacacgctgacggccacaactagcctgcctaaagcagccagttttgcttgaaagatgagctccacttatccagagtsggtgccccactctgggctggggccaagtctagagctcttcgtcttacttggccacagaaagaaaaagggcggaacatgctgaggatgccattgtgcctct

SEQ ID NO: 332328 - DNA, 201 bp, Homo sapiens
ataaatgccaggtgggcagcagggaggccgaacacctgctcctctcacctctagtgcatcaggccctcgacctacgtggcctcgttccatgttcgcatccsgcctgtgaggtaggactgacgaatcctgactcagaggaggaagcaggcccttagaaagtgttgagagaccagagtcacacagcacccagtgttcccaagc

SEQ ID NO: 332329 - DNA, 201 bp, Homo sapiens
aggagcagcagccatactccaaagcataaatgccaggtgggcagcagggaggccgaacacctgctcctctcacctctagtgcatcaggccctcgacctacrtggcctcgttccatgttcgcatcccgcctgtgaggtaggactgacgaatcctgactcagaggaggaagcaggcccttagaaagtgttgagagaccagagt

SEQ ID NO: 332330 - DNA, 201 bp, Homo sapiens
gtggctgtgccgcacgccatcctgatctgggtgtatgatgaggtgcggaagctcttcatcaggctctaccctggaagtgagtagcctatgattttagaggmtctgtttacccacttcaacagactctccatttctgatgtacttttttctacctctacaggctggtgggataagaacatgtattattaagaccacctccct

SEQ ID NO: 332331 - DNA, 201 bp, Homo sapiens
cacaggcacacactctctctctcacacacacacacacacacactcacaccaccactatcaggtaccttctgccgtgaggagcagcagccatactccaaagyataaatgccaggtgggcagcagggaggccgaacacctgctcctctcacctctagtgcatcaggccctcgacctacgtggcctcgttccatgttcgcatcc

SEQ ID NO: 332332 - DNA, 201 bp, Homo sapiens
tgttatatctgtatgaaaaaattatccttacaccatgaacagaggaagaagaacacaattccctcctcatttagggtccttctcagcccctccgtggagcyaggcacccagcccgtccgagatcctgaacccccgcacgctccagggccattctgctattgggcagggatgccgtttttttctgcttcagaccagttctct

SEQ ID NO: 332333 - DNA, 201 bp, Homo sapiens
gggtatccaccccaaggaccatgttccaaacctgctggctctggggtctttcccagcatcagtataagaggcagggaatgaggtacccagctgtgaaccaycttcaacatttcttctaggtggataactcatctctcacgggggagtctgagccccagccccgctcctctgagtttacccatgaaaaccccctggaaacaa

SEQ ID NO: 332334 - DNA, 201 bp, Homo sapiens
gggatacagcacccgggcatctggtcccctaggtcaagctcccttgctggcctccttcctaaccctgaagcagggcagagaaagaaagaaaggcaaggacytcatcagggcctggctgctcctatgaatgagccatctctgtcacaggcacacactctctctctcacacacacacacacacacactcacaccaccactatc

SEQ ID NO: 332335 - DNA, 201 bp, Homo sapiens
gcggcaaggggtatccaccccaaggaccatgttccaaacctgctggctctggggtctttcccagcatcagtataagaggcagggaatgaggtacccagctrtgaaccaccttcaacatttcttctaggtggataactcatctctcacgggggagtctgagccccagccccgctcctctgagtttacccatgaaaaccccct

SEQ ID NO: 332336 - DNA, 201 bp, Homo sapiens
aagtagctgaaatcccttttaactctactaataaatttcaggtgagtttttcctcacaaccggtaatctctgtcatcggcagcatgacctttctacttgcrtgcatcctttgcttacctcatattttgaaggatacctggcttcaaagacagtcgtcagggatacagcacccgggcatctggtcccctaggtcaagctccc

SEQ ID NO: 332337 - DNA, 201 bp, Homo sapiens
cagatccctgcagacatcagggtgctgtcttctcaggggtgtcgggtaagcggcaaggggtatccaccccaaggaccatgttccaaacctgctggctctgkggtctttcccagcatcagtataagaggcagggaatgaggtacccagctgtgaaccaccttcaacatttcttctaggtggataactcatctctcacggggg

SEQ ID NO: 332338 - DNA, 201 bp, Homo sapiens
aacctctttgattccggtttatccctcctggggtctttctcgaatgccactaatttcccttaatggtgcttttatagtcacttaactttgctcaaaatctytccgtacttccctgttttctgcttctcaagtctagacctcaggctacctttcagggccctccaggtcttgccacaccctccacatccgcttgtaccttga

SEQ ID NO: 332339 - DNA, 201 bp, Homo sapiens
cggagcaatcgtgggcgaattaacccatctgtcagaaccccagttcctcacaggattttgatggtcaaatgaggcaccacccagggcagtgctggttagcscaaggcatcttctgttcctgctcctcagtgtttgtggatagtccttctgggttctggaagggacctgtggaaggtcagggagtgttctttcactggcagc

SEQ ID NO: 332340 - DNA, 201 bp, Homo sapiens
ccctcctgggctctcaggtctgtcctttgccacaccccgttacaaagctcatcccagaggaagcatggaactgaagggcctagaggacgatgcttggcctygggaatgtggtgtgcctatcgattgtgccagcccccagagagggctgcaagctggctgcacacccctcctggctgaggacccctggaataaagcatctac

SEQ ID NO: 332341 - DNA, 201 bp, Homo sapiens
gcagcgcctttgagactgcagttatttgcatctggacacagttcaagtcaacagaaaaacctactgtggggctcacactggcctggcagtgagagggaccragagggacagatgacccctggcctcaaggagaaagtggccgggtaggggaggcaaatgtgtatggaagtgtcctgagattcactctatccccctgggatg

SEQ ID NO: 332342 - DNA, 201 bp, Homo sapiens
ggtgagtgcggcggcagggccctgcccatcacctggtgggcacagagatgaggcaggcgccttgaggacctgtgacctagcccagtggccatggcatccaygtgaagcatgtaaaggagaacatgataagcaggatgggaacaaggagaggatgctgtgtgacagcaccaagcagggtgggatggcctccagagaggcaag

SEQ ID NO: 332343 - DNA, 201 bp, Homo sapiens
gcaggcgccttgaggacctgtgacctagcccagtggccatggcatccacgtgaagcatgtaaaggagaacatgataagcaggatgggaacaaggagaggaygctgtgtgacagcaccaagcagggtgggatggcctccagagaggcaagctcagggaagactttatggaaggagttaaatttcaaactgggccttaagtga

SEQ ID NO: 332344 - DNA, 201 bp, Homo sapiens
ggtggtgggggacattgtggaggtcaaaggaggagaccagatccctgcagacatcagggtgctgtcttctcaggggtgtcgggtaagcggcaaggggtatmcaccccaaggaccatgttccaaacctgctggctctggggtctttcccagcatcagtataagaggcagggaatgaggtacccagctgtgaaccaccttcaa

SEQ ID NO: 332345 - DNA, 201 bp, Homo sapiens
aatgagatggtgatgctttaggcatccaataacccacagtaccgggtattctacacgggatcgatgcccacttgcgtttgatttctcaaagcctgctccaytgacatttgcaaagcagtgggccaggctgaaaataaattggatgtgaaagctgatcacacaatcttggaggtcccaccagacacaagagtcccttccacc

SEQ ID NO: 332346 - DNA, 201 bp, Homo sapiens
tggaaattagaaaaagaaaccgcaaagtagctgaaatcccttttaactctactaataaatttcaggtgagtttttcctcacaaccggtaatctctgtcatyggcagcatgacctttctacttgcatgcatcctttgcttacctcatattttgaaggatacctggcttcaaagacagtcgtcagggatacagcacccgggca

SEQ ID NO: 332347 - DNA, 201 bp, Homo sapiens
accgagcagagttcaagccaggacaggaaaatgtccccatcatgaaggtaatgcttctgcagcacttggtcttaaatcacagccagtttgtagtcacttgytgaggtctgattgggtgcttgatttcatctctccagttgcttaaagtttgttcagtgcttgcaagagcaagtcagactcacaagacatccagaaattttt

SEQ ID NO: 332348 - DNA, 201 bp, Homo sapiens
caacctctcaggtgggctggcccctgtcctcctttgagacccccaccacatgttccccgaaaggctcaccccagctctctgcattttgtcatgagagcccrgtgaagcatttgccactgtggtagttgtgagtaaagagagatttaaaatgcaaagatttaaaacaaaaaatgtgaagacataagatacaagacacctgcg

SEQ ID NO: 332349 - DNA, 201 bp, Homo sapiens
ccagaggcaacaagctacatgtcataggattggattgacatgaaatgtgcagaacaggcacatccttggaagcaggaaccagatcggtgatgccagggcaygggacaggagcagggagtgacggcagaggggccggagggatctccaggcaggatggagatgctctgaggctgcggtggagggtggtgtcatggctctgta

SEQ ID NO: 332350 - DNA, 201 bp, Homo sapiens
gtggagggtggtgtcatggctctgtaaacttaaaaaaaaaaatcaataagttgcgcacttaacatgggcgaattccatggcctgtaaattataccagggcrtaactgccagcattgcatcctcccgtggagagctctagccccagggcccggctgcttcccactgctggtttctctgactgacgccctccttctcacccag

SEQ ID NO: 332351 - DNA, 201 bp, Homo sapiens
gcacagtgcctggctggtattaagcattacatagtctttcaaaaaagctgggcagctggagaagtgaggcacggtctgcttttctcgggaccttctttggscacgttaatgcctcaccccaagctgcaaaaatatgcagcccaacccctgagggaggaggaatgtctaattcgtatttgttttggttgtgcatgtgctttg

SEQ ID NO: 332352 - DNA, 201 bp, Homo sapiens
agcgagactctgtcgaaagaaaagaaggaaagaaagaaagaaggaaggaaggaaggaaagaaagaaagaaattgcagagagacacaaccagcaggacttgmggggatttttattgagcccctcatctcgctagtcatgtcacagcagcaggaggaggagagccggtcgggtgatgggctggggtgggggcagggaggtgag

SEQ ID NO: 332353 - DNA, 201 bp, Homo sapiens
ctggacccagtcaccacgttgaacctggtcgctaccattgacaggccaggtcccttcgacaggttacgtaatttctctgtgcctcaaattccacctctgcraatgacgagagggaggaataatggcccctgcctcaagggttattttaaagactaaatgagtgaatatacagagcacagtgcctggctggtattaagcatt

SEQ ID NO: 332354 - DNA, 201 bp, Homo sapiens
tccagaagcttccctatttcctggggagttactgcattgcccttagccctggtgagcagcttcttcattccaagtcctccttcatcaaattagtcctctcrccggataaacctctaagaaactaaaaccccttagcagagcagagtgcagtggctctggacccagtcaccacgttgaacctggtcgctaccattgacaggc

SEQ ID NO: 332355 - DNA, 201 bp, Homo sapiens
ccagcctgggcgacagagcgagactctgtcgaaagaaaagaaggaaagaaagaaagaaggaaggaaggaaggaaagaaagaaagaaattgcagagagacamaaccagcaggacttgaggggatttttattgagcccctcatctcgctagtcatgtcacagcagcaggaggaggagagccggtcgggtgatgggctggggtg

SEQ ID NO: 332356 - DNA, 201 bp, Homo sapiens
gcaagtgcagaggtctggatctcacatcaggctgtggtgcctttgaaacttcaagagagagttcttggctcatccccatcacctgacctctccaacctctyaggtgggctggcccctgtcctcctttgagacccccaccacatgttccccgaaaggctcaccccagctctctgcattttgtcatgagagcccggtgaagca

SEQ ID NO: 332357 - DNA, 201 bp, Homo sapiens
acactggcctggcagtgagagggaccaagagggacagatgacccctggcctcaaggagaaagtggccgggtaggggaggcaaatgtgtatggaagtgtccygagattcactctatccccctgggatggctacaagaagtagaaacgctatgctgggacaaaggtggattctgatggaaggggccagagccagctctcgggc

SEQ ID NO: 332358 - DNA, 201 bp, Homo sapiens
tggaagagaaatatggcacagacatcattatggtgagtcgtgggaaccagggatttggaagagaagcctcccaactctacagagggaaggctgtgtgtggyggggggctgtgtggaagagtagcggcacctttaggaggaggggcccctgcagcgcctttgagactgcagttatttgcatctggacacagttcaagtcaac

SEQ ID NO: 332359 - DNA, 201 bp, Homo sapiens
cccacccctctcccaggggaaaaatggaaacatttttggttaccacaactgaggggaggatgttagtgggtggagcccacaacaaagaattattctcccaraatggcagcagggccacgggtgagaaaccctgctgtagtctaatgattctgtagcagaattcacaagtggcagccacaatgctgtgggtttattcagcag

SEQ ID NO: 332360 - DNA, 201 bp, Homo sapiens
cattcttgctgttctgacagcctcatgctccagcagcaatgctgtgtccacagggccaggtgcaggctgcataacagcatggactcaacagtgagagtgaycaggaagttccaaggcctctgtcctggggttcggtgcggcacagacttgggggagggccggtgtccttccagggtctgaggcatctgtcatggttttttt

SEQ ID NO: 332361 - DNA, 201 bp, Homo sapiens
cccctagctgtcggtccccctccctgcgcgcgcgccggcgggtttcctaccctccgaggcgtccgctggcctgcgccctggcggggacgtgggcggggcgrgcggcatttaaggctggtgccacctccccggtgcagcggctggcgatcggccgcggaggtgcgtgcagggcccgcgccgccgccggtatctccaccgcca

SEQ ID NO: 332362 - DNA, 201 bp, Homo sapiens
tttcaaaggtgagggtgcctcacggatggcaggccccccagggcaggggctgctcacatgggctcagggcttgggtaggatttatgcctgtcaagatgaaygagaacttaggctggatgtgtagaaaggtggaaaaggagcaggcgtaaggatggaaactaaagccacatgctctctgtgcaggattccagaagcttccct

SEQ ID NO: 332363 - DNA, 201 bp, Homo sapiens
tgtccacactgtctctggcccagagaactgtgggctggagagattctgggtggaaaagacgcctcctgccaagcttgaagcaggagatcacctcgttaaartttccctgacactcgcaagattatcagcctccccagccccaccttcagtgttctgcccagacgcccagccaggattgctcacccttagtggtctcctttt

SEQ ID NO: 332364 - DNA, 201 bp, Homo sapiens
tggcccagagaactgtgggctggagagattctgggtggaaaagacgcctcctgccaagcttgaagcaggagatcacctcgttaaaatttccctgacactcrcaagattatcagcctccccagccccaccttcagtgttctgcccagacgcccagccaggattgctcacccttagtggtctccttttctaggaggcccaggg

SEQ ID NO: 332365 - DNA, 201 bp, Homo sapiens
acggggatctttgcttattaccaagaggcaaaaagcaccaacatcatgtccagcttcaataagatgatccctcaggtgagtggcagccacctatcctctgkcctctggtgactcccaggtgaggaagcctcagctgggaggggcacagggccctgagggctacgggtttccacttccttccctgtcggagcaatcgtgggc

SEQ ID NO: 332366 - DNA, 201 bp, Homo sapiens
ccaagaactctccataagctcaagaaaaagtagttcttagagtcttcaggcctcgggtgaagcagtcttctgtttcattcttgctgttctgacagcctcaygctccagcagcaatgctgtgtccacagggccaggtgcaggctgcataacagcatggactcaacagtgagagtgatcaggaagttccaaggcctctgtcct

SEQ ID NO: 332367 - DNA, 201 bp, Homo sapiens
ttgatccctttaactctgtgccccgctaaacttcagaagtcgagactgtgtattgccctagaacttggcaatatagcaagatatatttctagaacacagascctaatgagctcacagtgaattatatttggatgaaatatgtctttcctaaaaaaatgcattatggagttgaagaaattaaacaattctggcttattctaa

SEQ ID NO: 332368 - DNA, 201 bp, Homo sapiens
gaggggaaaaaatgagatgaggattttgtaattcacgtgctttaggggagtacaatattattattattaaggaagagctctggagttattaaaactagccttttttttttttttgagacagagtttcgctcttgttgcccaggctggagtgcaatggcgctatctaggctcactgcaacctccacctcctgggttcaagcg

SEQ ID NO: 332369 - DNA, 201 bp, Homo sapiens
gccccccaccccatccagccagtgccccacccaccccagcccccctcccctactgtgggtagagcagaacatcctggggttagacctcaccagcctcttcycctctagatcccctccattgccttggcgtacgagaaagctgaaagtgacatcatgaacaggaagcctcgccacaagaataaggacaggctggtgaaccag

SEQ ID NO: 332370 - DNA, 201 bp, Homo sapiens
tccataggaagcagctgcccttgctcaggcaaaagggatgggaattttttcagggtgatgggaatgggaaggagagatcagggcaagagacttcatagagrtagagtttggtaagatttagaacctatcagagaaggataatgtttaaaaatgattaagcttcccatttaacgactaggaagagagtgatgccagtgatgc

SEQ ID NO: 332371 - DNA, 201 bp, Homo sapiens
tggcactgtcacagaaacagggttcaagggctggactggaggtcatgagatggaggtcttgaacatctgggtgaggagccaggtttcatcctgcagtcagyagagagcactgagggctgtgccactagagtgagctgggcagtcgcagggctggggaagactttatggaaggagttaaatttctttaacttctttaaatgt

SEQ ID NO: 332372 - DNA, 201 bp, Homo sapiens
tccacctcctgggttcaagcgattctcttgcctcggcctcccgagtcactgggattacaggcgcccgccatcacacccagctaatttttgttgtttttagtagagacggggtttccccatgttggccaggctgctctcgaactcctgacctcagatgatccacccgcctcagcttcccaaagtgctgggattacaggcgtg

SEQ ID NO: 332373 - DNA, 201 bp, Homo sapiens
catggtcttgctggacgacaacttcgcatccatcgtcacaggggtggaggaaggtgagtgagtctcagggggtcttcccaagggccagggtggtctggggractagaagtaagttctgaaggagaaacctctctgcctaggtcgcctgatctttgacaacctcaagaagactattgcttattccctgaccaagaacattgc

SEQ ID NO: 332374 - DNA, 201 bp, Homo sapiens
gactctccatttctgatgtacttttttctacctctacaggctggtgggataagaacatgtattattaagaccacctcccttcctatgtctctcagcagcaygttggggcacacttgttcatcttctgaccgtttgctgggctattcccctgcagtgcagacatcgtcaaaattcagacaagaggaaattttcatgcagaaa

SEQ ID NO: 332375 - DNA, 201 bp, Homo sapiens
gaggtctggatctcacatcaggctgtggtgcctttgaaacttcaagagagagttcttggctcatccccatcacctgacctctccaacctctcaggtgggcyggcccctgtcctcctttgagacccccaccacatgttccccgaaaggctcaccccagctctctgcattttgtcatgagagcccggtgaagcatttgccact

SEQ ID NO: 332376 - DNA, 201 bp, Homo sapiens
ttatcttttcccctaaatgggcctttccgttcagctataatcatcctcgcaacctcaagagaaagggaagtcttgttgctcttgccaggcctgcaacccaytgggcctgctcactcccactttctccctgggtcccccgccataggatgctgttgttgctgtgaccggggatggagttaatgactctccggctctaaagaa

SEQ ID NO: 332377 - DNA, 201 bp, Homo sapiens
taagagtagtcaagtgcagtagtgagaagaggggaaagagtagaagtttgatctgtaactgactgtgaacaatcagttgagctaattcactactaccttcrgaccagccgagtcttctttttttagatacaaggtgtcctgtcagatcacccaggctggagtgcaatggtgtgatcatagctcactgcagcctcgacctcc

SEQ ID NO: 332378 - DNA, 201 bp, Homo sapiens
ggaagtcttgttgctcttgccaggcctgcaacccactgggcctgctcactcccactttctccctgggtcccccgccataggatgctgttgttgctgtgacyggggatggagttaatgactctccggctctaaagaaggcagacattgggattgccatggggatagcaggttctgatgcagccaaaaatgcagccgacatgg

SEQ ID NO: 332379 - DNA, 201 bp, Homo sapiens; identical to SEQ ID NO: 69795

SEQ ID NO: 332380 - DNA, 201 bp, Homo sapiens
ggatacacaaaacaccttgaatttttaagggggagaaaatctgcatccatgtgaagtagtttggggttctgtctcccccaagctaacctcttcctttaacrcggagagcagctgtgcctgccgagacatgagtaccaaatccacaaaactgaattggccaacgtgatgccaagagacagaagccagaggcaacaagctaca

SEQ ID NO: 332381 - DNA, 201 bp, Homo sapiens
tctagcagtcacagtgcaggttaaacaaggagctttccacctttattttgtgggacctcgtggatttgtcgttctttgcagtaaagcaagacaaatgaacragaagccccattcccattgggcagggttgggctatccctgtggatgagtcagggttcactttccatccctttgcttccagggctcagtactggtttgtgg

SEQ ID NO: 332382 - DNA, 201 bp, Homo sapiens
cggccaaataaatttacatctttcaggccgggtgcagtggctaatgcctataatcccagcactttgggaggctgaggagggagaatcacttgagcccaggrgtttgagaccagcctggccaacacagtgagaccctgcctgtgttagaaataatagtaatgataattttttaaaaaattaacatttttctctactcagctg

SEQ ID NO: 332383 - DNA, 201 bp, Homo sapiens
aggcagacattgcttctagcagtcacagtgcaggttaaacaaggagctttccacctttattttgtgggacctcgtggatttgtcgttctttgcagtaaagmaagacaaatgaacgagaagccccattcccattgggcagggttgggctatccctgtggatgagtcagggttcactttccatccctttgcttccagggctca

SEQ ID NO: 332384 - DNA, 201 bp, Homo sapiens
tgtaaaacagttgccaggtgctctccagcaataacgttttgtcagtcatgtttcatgttttaacttaggtgtattcatgtgtgacacttccatgttgacargcccggaaaggcctcatttttaactaaaagatgttttataaacccaggtttaattgtggtgttctaattggttcacatttttctagaatgaagagcatgg

SEQ ID NO: 332385 - DNA, 201 bp, Homo sapiens
aaacaaggagctttccacctttattttgtgggacctcgtggatttgtcgttctttgcagtaaagcaagacaaatgaacgagaagccccattcccattgggyagggttgggctatccctgtggatgagtcagggttcactttccatccctttgcttccagggctcagtactggtttgtggctgtgccgcacgccatcctgat

SEQ ID NO: 332386 - DNA, 201 bp, Homo sapiens
ggatggaaactaaagccacatgctctctgtgcaggattccagaagcttccctatttcctggggagttactgcattgcccttagccctggtgagcagcttcytcattccaagtcctccttcatcaaattagtcctctcgccggataaacctctaagaaactaaaaccccttagcagagcagagtgcagtggctctggaccca

SEQ ID NO: 332387 - DNA, 201 bp, Homo sapiens
gcagcaatgctgtgtccacagggccaggtgcaggctgcataacagcatggactcaacagtgagagtgatcaggaagttccaaggcctctgtcctggggttyggtgcggcacagacttgggggagggccggtgtccttccagggtctgaggcatctgtcatggtttttttctgcagcaagctctcgtcatccgagattccga

SEQ ID NO: 332388 - DNA, 201 bp, Homo sapiens
gcccccagagagggctgcaagctggctgcacacccctcctggctgaggacccctggaataaagcatctacttcccctgtaggcactgtcaccggcatggtyatcaacacgggtgaccgcaccatcattggccatattgcctcattggcctcaggagttggaaatgagaagacgcccattgccattgagatcgagcactttg

SEQ ID NO: 332389 - DNA, 201 bp, Homo sapiens
tgaggtgggaggattgcttgagcctgggaggtcgaggctgcagtgagctgtgatcgtgccactgcactccagcctggggcacagagtgggaccccgtctcaaaaaaaaaaaaaaaaaatttaagagagaaagagagaaagaaaaagaaaaggcctatattttagaaagtgatagtgataattagctgggaggttttttgtt

SEQ ID NO: 332390 - DNA, 201 bp, Homo sapiens
ctctagatcccctccattgccttggcgtacgagaaagctgaaagtgacatcatgaacaggaagcctcgccacaagaataaggacaggctggtgaaccagcygctcgctgtgtactcatacctgcacattggtacgatgagggcgcgtcttccccatcacacgagggcctgccccgagaattcactggagtggggggcacag

SEQ ID NO: 332391 - DNA, 201 bp, Homo sapiens
gaggtgggaggattgcttgagcctgggaggtcgaggctgcagtgagctgtgatcgtgccactgcactccagcctggggcacagagtgggaccccgtctcaaaaaaaaaaaaaaaaaatttaagagagaaagagagaaagaaaaagaaaaggcctatattttagaaagtgatagtgataattagctgggaggttttttgttt

SEQ ID NO: 332392 - DNA, 201 bp, Homo sapiens
agcctcgccacaagaataaggacaggctggtgaaccagccgctcgctgtgtactcatacctgcacattggtacgatgagggcgcgtcttccccatcacacsagggcctgccccgagaattcactggagtggggggcacagccagaaagtgtggttttcctgtggggcctgggttggggagggagggggaaccgagagtaga

SEQ ID NO: 332393 - DNA, 201 bp, Homo sapiens
aggtgggaggattgcttgagcctgggaggtcgaggctgcagtgagctgtgatcgtgccactgcactccagcctggggcacagagtgggaccccgtctcaaaaaaaaaaaaaaaaaatttaagagagaaagagagaaagaaaaagaaaaggcctatattttagaaagtgatagtgataattagctgggaggttttttgtttg

SEQ ID NO: 332394 - DNA, 201 bp, Homo sapiens
ggtgggaggattgcttgagcctgggaggtcgaggctgcagtgagctgtgatcgtgccactgcactccagcctggggcacagagtgggaccccgtctcaaaaaaaaaaaaaaaaaatttaagagagaaagagagaaagaaaaagaaaaggcctatattttagaaagtgatagtgataattagctgggaggttttttgtttgg

SEQ ID NO: 332395 - DNA, 201 bp, Homo sapiens
ctgtgcccaccccgcctcccctctacacggacggagaggaagccaaggtcggcgggaggtgggggagagactccactgtccgactccctccggcctccccrgaggagggaaggaaagggagaaggggctcctgactcctgcaggtcctgaccccgcagaggggcgctcagcacctcttcggaaaccccatttggggccaat

SEQ ID NO: 332396 - DNA, 201 bp, Homo sapiens
gaaaccgcaaagtagctgaaatcccttttaactctactaataaatttcaggtgagtttttcctcacaaccggtaatctctgtcatcggcagcatgaccttyctacttgcatgcatcctttgcttacctcatattttgaaggatacctggcttcaaagacagtcgtcagggatacagcacccgggcatctggtcccctaggt

SEQ ID NO: 332397 - DNA, 201 bp, Homo sapiens
catttctttggcagtttctacaacttaggcatttaggcacattgccacactccacttacctctcttacgaaaaaaaaaaaattcctcccatttttcctgcygaggactccagccctttcctggccaaccccagacccagctgtttgtatgggcccatgtcattcagtccctagagaagagccccctcctcctcagtctctc

SEQ ID NO: 332398 - DNA, 201 bp, Homo sapiens
gccgaggactccagccctttcctggccaaccccagacccagctgtttgtatgggcccatgtcattcagtccctagagaagagccccctcctcctcagtctstcctgtgggggtctcaaggggtaggagaggagggggtttatgtttccagttttgtgactacatgatcattggcctgctattgtcctgaccaaagaaaaga

SEQ ID NO: 332399 - DNA, 201 bp, Homo sapiens
tatctctagcatttaagattgaagacatatctgtttttcccttgacattacaagggtcctgtaattttcagcagcatattgaatgcttttgcctcccaacmtttcttggcaaattagtgcctaatgacaactgaagtatcccggcctttgaatgaaagggccaggcagtgacccgaggggtgggtggggtgctgccctgtg

SEQ ID NO: 332400 - DNA, 201 bp, Homo sapiens
attcccccacccctctcccaggggaaaaatggaaacatttttggttaccacaactgaggggaggatgttagtgggtggagcccacaacaaagaattattckcccagaatggcagcagggccacgggtgagaaaccctgctgtagtctaatgattctgtagcagaattcacaagtggcagccacaatgctgtgggtttattc

SEQ ID NO: 332401 - DNA, 201 bp, Homo sapiens
cattgcactccagcctgggcaacaagagcaaaactccatctcaaaaaaaaaaaaaaaaagggccgggcgtggtggctcacgcctgtaatcccagcactttrggaggccaagacgggcggatcacgaggtcaggagatcgagaccatcctggctaacacggtgaaaccccgtctctactaaaaatacaaaaattagtcgggc

SEQ ID NO: 332402 - DNA, 201 bp, Homo sapiens
cccctgtaggcactgtcaccggcatggttatcaacacgggtgaccgcaccatcattggccatattgcctcattggcctcaggagttggaaatgagaagacrcccattgccattgagatcgagcactttgttcacattgtggcaggagtggctgtctccatcggcatccttttcttcatcatcgctgtgtccctgaagtatc

SEQ ID NO: 332403 - DNA, 201 bp, Homo sapiens
tgtggaggtcaaaggaggagaccagatccctgcagacatcagggtgctgtcttctcaggggtgtcgggtaagcggcaaggggtatccaccccaaggaccawgttccaaacctgctggctctggggtctttcccagcatcagtataagaggcagggaatgaggtacccagctgtgaaccaccttcaacatttcttctaggtg

SEQ ID NO: 332404 - DNA, 201 bp, Homo sapiens; identical to SEQ ID NO: 69800

SEQ ID NO: 332405 - DNA, 201 bp, Homo sapiens
ctggggcacagagtgggaccccgtctcaaaaaaaaaaaaaaaaaatttaagagagaaagagagaaagaaaaagaaaaggcctatattttagaaagtgatagtgataattagctgggaggttttttgtttggtttggtttttgttggttggttggttttctcaatgtctttacttgatcattaaaaaaagcagcagcagcag

SEQ ID NO: 332406 - DNA, 201 bp, Homo sapiens
gtctttcaaaaaagctgggcagctggagaagtgaggcacggtctgcttttctcgggaccttctttggccacgttaatgcctcaccccaagctgcaaaaatrtgcagcccaacccctgagggaggaggaatgtctaattcgtatttgttttggttgtgcatgtgctttgtttggctttcccagggtctctccagcaccagag

SEQ ID NO: 332407 - DNA, 201 bp, Homo sapiens
tggggcacagagtgggaccccgtctcaaaaaaaaaaaaaaaaaatttaagagagaaagagagaaagaaaaagaaaaggcctatattttagaaagtgatagtgataattagctgggaggttttttgtttggtttggtttttgttggttggttggttttctcaatgtctttacttgatcattaaaaaaagcagcagcagcagc

SEQ ID NO: 332408 - DNA, 201 bp, Homo sapiens
catccaagcaggaaaactgggtggacaatgaggtgaggaggtgcagaaattcctgtcgcctcctcccctcctgagctcagaatagtttgggtctgaaagayggctgctccccacagggaggtagaggaggtgagatgcagaggctcgcagccccctaactctcacgggcaccctgggagatcttgttcaaggcacaagatt

SEQ ID NO: 332409 - DNA, 201 bp, Homo sapiens
tagctttgccattggtatagaagagtgaccagcccagccacacccacagtgcggccaaataaatttacatctttcaggccgggtgcagtggctaatgcctrtaatcccagcactttgggaggctgaggagggagaatcacttgagcccaggagtttgagaccagcctggccaacacagtgagaccctgcctgtgttagaaa

SEQ ID NO: 332410 - DNA, 201 bp, Homo sapiens
tcaggaccacagaatgacaaattcaaggaaacagaagtgtatggttgacgatccggctcattaaacaccatggaagtcctcaccaatacagatgcagtctrtggaatgtgtgtttctaaaggctattggagttggcaaatcagataaagcatataaatgagatggtgatgctttaggcatccaataacccacagtaccggg

SEQ ID NO: 332411 - DNA, 201 bp, Homo sapiens
gagaccagcctgcaattgtttatctgtgaccatttttgctcctgagccccagaatgcatttggtggggaagcccagtgctcccttcttccccaaaaacccstgtcaggtgtccacactgtctctggcccagagaactgtgggctggagagattctgggtggaaaagacgcctcctgccaagcttgaagcaggagatcacct

SEQ ID NO: 332412 - DNA, 201 bp, Homo sapiens
attggctgggcgcagtggctcatgcctgaaatcccagcactttgggaagctgaggcaggcggatcatctgaggtcaggagttccagaccagccatggccamcatggtgaaaccccgtttctactaaaaatacaaaaaaattagccagatgtggtggcacacacctgtaatcccagctactcgggaggctgaggcaggagaa

SEQ ID NO: 332413 - DNA, 201 bp, Homo sapiens
aacatttttggttaccacaactgaggggaggatgttagtgggtggagcccacaacaaagaattattctcccagaatggcagcagggccacgggtgagaaamcctgctgtagtctaatgattctgtagcagaattcacaagtggcagccacaatgctgtgggtttattcagcagaacttttccctgcagggtttctctgccc

SEQ ID NO: 332414 - DNA, 201 bp, Homo sapiens
tcatgcctgaaatcccagcactttgggaagctgaggcaggcggatcatctgaggtcaggagttccagaccagccatggccaacatggtgaaaccccgtttytactaaaaatacaaaaaaattagccagatgtggtggcacacacctgtaatcccagctactcgggaggctgaggcaggagaatctcttgaatccaggaggc

SEQ ID NO: 332415 - DNA, 201 bp, Homo sapiens
attttgggtgatgtgatggaaattagaaaaagaaaccgcaaagtagctgaaatcccttttaactctactaataaatttcaggtgagtttttcctcacaacyggtaatctctgtcatcggcagcatgacctttctacttgcatgcatcctttgcttacctcatattttgaaggatacctggcttcaaagacagtcgtcaggg

SEQ ID NO: 332416 - DNA, 201 bp, Homo sapiens
gctactcgggaggctgaggcaggagaatctcttgaatccaggaggcagaggttgcagtgagccgagatcacaccattgcactccagcttgggcaacaagastgaaactctgtctcaaaaaaaaaaaaaagaaagaaagaaagaaaagaaaagaaaaaaagaaagaaaaaaggctttattactcagtcttgaggctcagccc

SEQ ID NO: 332417 - DNA, 201 bp, Homo sapiens
ccaatgtgcccgagggcctcctggccactgtcactgtgagtccatgctgttagacagcctgcacctggccctgtggacacagcactggtgctggggaggcrcccacacaaactgcaatctcccccaagtccagagcaccacaccctccccgccagcgacaaccctggaacattctgcatagactgttccttacagagacaa

SEQ ID NO: 332418 - DNA, 201 bp, Homo sapiens
ttggccttgggaatgtggtgtgcctatcgattgtgccagcccccagagagggctgcaagctggctgcacacccctcctggctgaggacccctggaataaarcatctacttcccctgtaggcactgtcaccggcatggttatcaacacgggtgaccgcaccatcattggccatattgcctcattggcctcaggagttggaaa

SEQ ID NO: 332419 - DNA, 201 bp, Homo sapiens
cacccattgtcttttaaaaaagagaaagaaagaaagagaaagagagaaagaaagagagaaagagagagagggaaagagagaaagagaaagagagagaaagagaaagaaagaaaggaaagaaagaaagaaagaaagaaagaaagaaagaaagaaagaaagaaagaaagaaagaaagaaggaaagagaaagagaaatgaatgc

SEQ ID NO: 332420 - DNA, 201 bp, Homo sapiens
ggccttgggaatgtggtgtgcctatcgattgtgccagcccccagagagggctgcaagctggctgcacacccctcctggctgaggacccctggaataaagcrtctacttcccctgtaggcactgtcaccggcatggttatcaacacgggtgaccgcaccatcattggccatattgcctcattggcctcaggagttggaaatg

SEQ ID NO: 332421 - DNA, 201 bp, Homo sapiens
ctgtgacctagcccagtggccatggcatccacgtgaagcatgtaaaggagaacatgataagcaggatgggaacaaggagaggatgctgtgtgacagcaccragcagggtgggatggcctccagagaggcaagctcagggaagactttatggaaggagttaaatttcaaactgggccttaagtgactgcatttgaggggaga

SEQ ID NO: 332422 - DNA, 201 bp, Homo sapiens
aacacggtgaaaccccgtctctactaaaaatacaaaaattagtcgggcacggtggcgggcgcctgtagtcccagctactcgggaggctgaggcaggagaawggcgtgaacctgggaggcggagcttgcagtgagcggagatcgcgccactgccctccagcctgggcgacagagcgagactctgtcgaaagaaaagaaggaa

SEQ ID NO: 332423 - DNA, 201 bp, Homo sapiens
acggtgaaaccccgtctctactaaaaatacaaaaattagtcgggcacggtggcgggcgcctgtagtcccagctactcgggaggctgaggcaggagaatggsgtgaacctgggaggcggagcttgcagtgagcggagatcgcgccactgccctccagcctgggcgacagagcgagactctgtcgaaagaaaagaaggaaaga

SEQ ID NO: 332424 - DNA, 201 bp, Homo sapiens
tgaggcaggagaatcgcttgaacccaggaggaggaggttgcagtgagacgagatcgcaccagtgcactccagcttgggcaacagagcgagactctgtctcaaaaaaaaaagaccaagacagagtcctgccctttaagtagcttacaacataattagggagaagaggtatctacagacttgtccaccaaagatcgtctgtgg

SEQ ID NO: 332425 - DNA, 201 bp, Homo sapiens
ttccccatcacacgagggcctgccccgagaattcactggagtggggggcacagccagaaagtgtggttttcctgtggggcctgggttggggagggaggggraaccgagagtagacaggatgaggcagtttcctgaggccatcatagaacctgtgtcctatctctcttgttctttcaggcctcatgcaagccctgggagctt

SEQ ID NO: 332426 - DNA, 201 bp, Homo sapiens
acccattgtcttttaaaaaagagaaagaaagaaagagaaagagagaaagaaagagagaaagagagagagggaaagagagaaagagaaagagagagaaagagaaagaaagaaaggaaagaaagaaagaaagaaagaaagaaagaaagaaagaaagaaagaaagaaagaaagaaagaaggaaagagaaagagaaatgaatgca

SEQ ID NO: 332427 - DNA, 201 bp, Homo sapiens
cccattgtcttttaaaaaagagaaagaaagaaagagaaagagagaaagaaagagagaaagagagagagggaaagagagaaagagaaagagagagaaagagaaagaaagaaaggaaagaaagaaagaaagaaagaaagaaagaaagaaagaaagaaagaaagaaagaaagaaagaaggaaagagaaagagaaatgaatgcaa

SEQ ID NO: 332428 - DNA, 201 bp, Homo sapiens
ccattgtcttttaaaaaagagaaagaaagaaagagaaagagagaaagaaagagagaaagagagagagggaaagagagaaagagaaagagagagaaagagaaagaaagaaaggaaagaaagaaagaaagaaagaaagaaagaaagaaagaaagaaagaaagaaagaaagaaagaaggaaagagaaagagaaatgaatgcaaa

SEQ ID NO: 332429 - DNA, 201 bp, Homo sapiens
ttaaaaaagagaaagaaagaaagagaaagagagaaagaaagagagaaagagagagagggaaagagagaaagagaaagagagagaaagagaaagaaagaaaggaaagaaagaaagaaagaaagaaagaaagaaagaaagaaagaaagaaagaaagaaagaaagaaggaaagagaaagagaaatgaatgcaaattctctggcc

SEQ ID NO: 332430 - DNA, 201 bp, Homo sapiens
ggcgtcgtgattgtacgtgaacacgagccacagcagcgtgtccgtgtttgctgcccgtgggtcccttgttttcttcaagtcatgaaggaacaagaaaagcrtctcatatttaatctttaaaaaaggattgtggcatagagggctcttggcggcgtataagccaccaggtcagcttagctgcgctgacaaccacacctctcc

SEQ ID NO: 332431 - DNA, 201 bp, Homo sapiens
aagagaaagaaagaaagagaaagagagaaagaaagagagaaagagagagagggaaagagagaaagagaaagagagagaaagagaaagaaagaaaggaaagaaagaaagaaagaaagaaagaaagaaagaaagaaagaaagaaagaaagaaagaaagaaggaaagagaaagagaaatgaatgcaaattctctggccccagcc

SEQ ID NO: 332432 - DNA, 201 bp, Homo sapiens
ctgcccgtgggtcccttgttttcttcaagtcatgaaggaacaagaaaagcatctcatatttaatctttaaaaaaggattgtggcatagagggctcttggcrgcgtataagccaccaggtcagcttagctgcgctgacaaccacacctctcccctaaaactagtccagctctctcctaaaattcaatcacagctcacattgg

SEQ ID NO: 332433 - DNA, 201 bp, Homo sapiens
gagcagcccctggggtgacagccccgtcgttttctggggccagcccctgtgctgtgggtgggggtctcctttccatcccctgctcaggtagaagacggccytccttgcctggttatctcagcaagcagggctggccgacagtcagccatcacagcctccccatgttaagacaaatgacagttgggagccccaggtccccat

SEQ ID NO: 332434 - DNA, 201 bp, Homo sapiens
agagaaagaaagaaagagaaagagagaaagaaagagagaaagagagagagggaaagagagaaagagaaagagagagaaagagaaagaaagaaaggaaagaaagaaagaaagaaagaaagaaagaaagaaagaaagaaagaaagaaagaaagaaagaaggaaagagaaagagaaatgaatgcaaattctctggccccagccc

SEQ ID NO: 332435 - DNA, 201 bp, Homo sapiens
gagaaagaaagaaagagaaagagagaaagaaagagagaaagagagagagggaaagagagaaagagaaagagagagaaagagaaagaaagaaaggaaagaaagaaagaaagaaagaaagaaagaaagaaagaaagaaagaaagaaagaaagaaagaaggaaagagaaagagaaatgaatgcaaattctctggccccagccca

SEQ ID NO: 332436 - DNA, 201 bp, Homo sapiens
aagagagaaagagagagagggaaagagagaaagagaaagagagagaaagagaaagaaagaaaggaaagaaagaaagaaagaaagaaagaaagaaagaaagraagaaagaaagaaagaaagaaagaaggaaagagaaagagaaatgaatgcaaattctctggccccagcccagtcctcctgaattgggaagtctggaggtgg

SEQ ID NO: 332437 - DNA, 201 bp, Homo sapiens
gagaaagagagagagggaaagagagaaagagaaagagagagaaagagaaagaaagaaaggaaagaaagaaagaaagaaagaaagaaagaaagaaagaaagraagaaagaaagaaagaaagaaggaaagagaaagagaaatgaatgcaaattctctggccccagcccagtcctcctgaattgggaagtctggaggtggggcg

SEQ ID NO: 332438 - DNA, 201 bp, Homo sapiens
aagagagagagggaaagagagaaagagaaagagagagaaagagaaagaaagaaaggaaagaaagaaagaaagaaagaaagaaagaaagaaagaaagaaagraagaaagaaagaaagaaggaaagagaaagagaaatgaatgcaaattctctggccccagcccagtcctcctgaattgggaagtctggaggtggggcgcaat

SEQ ID NO: 332439 - DNA, 201 bp, Homo sapiens; identical to SEQ ID NO: 69806

SEQ ID NO: 332440 - DNA, 201 bp, Homo sapiens
tggaccagtagagaagaaggaatgcgtttcacctttctgtaagtaacacgctcagttcattccttcccagctctccatccacgagatggatgacccccacrgcaagcgcttcctcatggtgatgaagggggcccctgagcgcatcctagagaaatgcagcaccatcatgatcaacggcgaggagcacccactggacaagag

SEQ ID NO: 332441 - DNA, 201 bp, Homo sapiens
attttggacagaattcactcattccaagattgtttcattagttagcagatagattgcatttcttcttagatttaaggctgtttcttcacaattcactcttwtttgtgcctttatagagggtgctcgagaggaagacctcgatgctgtggaagcgcagattggctgcaagcttcctgacgattatcgatgttcataccgaat

SEQ ID NO: 332442 - DNA, 201 bp, Homo sapiens
ctggtcactaagaagatggaggaccgctgtgcaattaaatctatagtagtgtgcaactagaccactttgggattggcccgatgcacagaactccacaatgycatgtccctggtagatgtccagactgagcctggcttctgccaaaattttgtgcttgagtcaggatgtacctggaccagggacgtctgagaataggtgctg

SEQ ID NO: 332443 - DNA, 201 bp, Homo sapiens
tatttgcagaggatgcaaagtcgccctcttaggataggtgggcgagatttgttttgtgtttggattaaccattagattctagccatttgatgattgtgccytgtgttattagaggtctttttataaatacagatttcttggagctacagatagttgttggcctagctaagtggtgatagagagatacctcaagtttttggt

SEQ ID NO: 332444 - DNA, 201 bp, Homo sapiens
aagctttgctcagcttcttggccactcaacctcatatttgctttcagaattgacagcaattcttgtctaaagacaaggtggcttccgatgcctggcccacstctcagtctctctcttctcctggacccctctcccctaccgttgtgactcttcgaaagtcttcaagccaattttttgttttcactattcagcaagaggttt

SEQ ID NO: 332445 - DNA, 201 bp, Homo sapiens
accgtatatatttgcagaggatgcaaagtcgccctcttaggataggtgggcgagatttgttttgtgtttggattaaccattagattctagccatttgatgrttgtgccctgtgttattagaggtctttttataaatacagatttcttggagctacagatagttgttggcctagctaagtggtgatagagagatacctcaag

SEQ ID NO: 332446 - DNA, 201 bp, Homo sapiens
gatatttggtgatgataaggtaagggcttacagtagctattattaattaaacacaaagctaggcactggctaagtatttcttgagtattactccatttaaytgcaaaagtcctatgggataaataattactattctcattttataggtggattacccaaggcatgaaaaactaagtaagttgtggccaggcgcggtggctc

SEQ ID NO: 332447 - DNA, 201 bp, Homo sapiens
cattgaaccttgattgctgtcattactgatccagagtcaccaaggttttgtagtttgtttctagtttccttcaaagtttaataggactatacccaaatatkattgaacttttctgggtctgaaatatgatttaaattttttgtcctaaagtataacctattttgcatcgtatcttttaaatcctgtagttgattttaaaat

SEQ ID NO: 332448 - DNA, 201 bp, Homo sapiens
atgccagtagctgggatttctcttaaaatgggagagcaaagcaaaagattgagagacactgagaagagatgaggtgagaagttaatgcagggaggaaggaygaaaaaggagcttcctttcagctgccttgataaagctccagaaccatcagagagaccccaacacatgggcttactttaaaaggtaaattaccttagaaca

SEQ ID NO: 332449 - DNA, 201 bp, Homo sapiens
catttttgtttccaagctaattaccaatccgttatttgaaccactgatcattgaaccttgattgctgtcattactgatccagagtcaccaaggttttgtartttgtttctagtttccttcaaagtttaataggactatacccaaatattattgaacttttctgggtctgaaatatgatttaaattttttgtcctaaagtat

SEQ ID NO: 332450 - DNA, 201 bp, Homo sapiens
aaaagtttccttagccctggaaactgaataagctcatttttgtttccaagctaattaccaatccgttatttgaaccactgatcattgaaccttgattgctrtcattactgatccagagtcaccaaggttttgtagtttgtttctagtttccttcaaagtttaataggactatacccaaatattattgaacttttctgggtc

SEQ ID NO: 332451 - DNA, 201 bp, Homo sapiens
actaaatctgaaaatagatatttggtgatgataaggtaagggcttacagtagctattattaattaaacacaaagctaggcactggctaagtatttcttgartattactccatttaattgcaaaagtcctatgggataaataattactattctcattttataggtggattacccaaggcatgaaaaactaagtaagttgtgg

SEQ ID NO: 332452 - DNA, 201 bp, Homo sapiens
tagaagaaacgaataatactatttacttggtatgtagggtcgaatatttcaagaggaaactaaatctgaaaatagatatttggtgatgataaggtaagggyttacagtagctattattaattaaacacaaagctaggcactggctaagtatttcttgagtattactccatttaattgcaaaagtcctatgggataaataat

SEQ ID NO: 332453 - DNA, 201 bp, Homo sapiens
cgatgtattatggatttggttctattttctattttttcctctttctttagtcagatcttgtcttggtataggcctagttgtttttaatttattgctagacrtaatttgaattttggggtaatgttattttcttctagagattacttttgcttttggctagcagctagtcaatgggcagatcactgtaatgcaatcagggat

SEQ ID NO: 332454 - DNA, 201 bp, Homo sapiens
  misc_feature (1)...(201): n = A,T,C or G
gaaatctttatatagtaagaaagttatttgcttctaacattcgatgttttggggcagctgataacttgtgtagccatgactattgagtcagaactgttacnattcaggcaccctctataggtggactttccagtagttgctttaatgaaaacgtggtttttgtggcaatacttttttcctttaagtaaaaaattttaaaaa

SEQ ID NO: 332455 - DNA, 201 bp, Homo sapiens
tcattctttttacaaattaattatgtagggtagaatttacaggattgcaacactgttgtgttagaaatctttatatagtaagaaagttatttgcttctaayattcgatgttttggggcagctgataacttgtgtagccatgactattgagtcagaactgttacgattcaggcaccctctataggtggactttccagtagtt

SEQ ID NO: 332456 - DNA, 201 bp, Homo sapiens
tatctatataatttatttttgaaaaacaccaaaaagttatttggcaactgatagatttattatgaatagcaagtcggtaactgttaattcctggcaaatayttattatctctaaatggaacattcaggtattgtagggagtactggaggtaatactggttcataatagcctggttggcagaaatgatagattgattataca

SEQ ID NO: 332457 - DNA, 201 bp, Homo sapiens
ttttggacagaattcactcattccaagattgtttcattagttagcagatagattgcatttcttcttagatttaaggctgtttcttcacaattcactctttwttgtgcctttatagagggtgctcgagaggaagacctcgatgctgtggaagcgcagattggctgcaagcttcctgacgattatcgatgttcataccgaatt

SEQ ID NO: 332458 - DNA, 201 bp, Homo sapiens
gccctaataggctgaaaatagccatgataaccaaattaagggacagcggctgagactcagactcactccttgtacacattttacttaggaaggcggggagrggcgtgaagttaagccctcaacaattatttccttaatttgggagaagggccttcagctggcgtccctggctgattctcagctctgctcttgctgagtgga

SEQ ID NO: 332459 - DNA, 201 bp, Homo sapiens
ctaaggtcctccaggacttatttctccaccactatcacatttgcaccatccattctaaccaaatcagacctctgccagcatacaacacacttgcactttctttttttttttttttcctgtggctcaagctctcgaccttgcctggaatgccttgcctacctcttctcaacttggcaaggtggagaagatgccctctctacc

SEQ ID NO: 332460 - DNA, 201 bp, Homo sapiens
aaaaaaaaaaaaaaaaaaagtgtaatcccagtaactggtgacatcttgtcttaaactgtctagaaactaatggaaaaaagggaaatgggttgtatagtctyatgcagttaaagagagactttcagttctccggaagtttttcatggcactattttctagaaagcatttgccaaattgatctttatttgaacagcgaaagat

SEQ ID NO: 332461 - DNA, 201 bp, Homo sapiens
taccttcttcctgcagaattgatttgccatgtcaggtagatggcgtgcttcttgattgtaagggctgccttgcttatcttcctattcaaagattttttttyccccgagggcttgctatgtgccagtctgttaagtgttgagggtacagtagtgaacaacgcagataaggcaactcttatggagcttacagtccagtgggca

SEQ ID NO: 332462 - DNA, 201 bp, Homo sapiens
tattttaaataaagcagtatgaatattttagatttaggaaatttagaggtttgtgttataatgtgaaaacattattgtggatctcattggtgcccactttscatgttttactaagtgccagtgttttccctgttgggaggaaactaagaaatttgctttctcagtgcttcaaattagttttcaattcatttccttctattt

SEQ ID NO: 332463 - DNA, 201 bp, Homo sapiens
ctcgtctctactaaaaatacaaaaaattagccaggcgtggtggcatgcgcctgtagtcccagctactcaggaggctgaggcaggagaatggcgtgaacccrgcaagcggagcttgcagtgagccgagatcgcgccactgcactccagcctgggcgacagagcaagactccatctcaaaaaaacaaaacaaaacaaaaaaaa

SEQ ID NO: 332464 - DNA, 201 bp, Homo sapiens
tggagaggagtaatgataggatagcgggcatccttatctttctgattgcagagggaaagctttaagcatttcacctttaaataagatgtttgctgtagggttttttttttttttttttttgtagatattctttatcagattgaagatagtccctctgatcctagtttgggaagagggtttttgtttttgttttttaaatgg

SEQ ID NO: 332465 - DNA, 201 bp, Homo sapiens
tcctcacacatgaaccataccttatgtcctatatttcccattaagagtcaatgttaaaactcttaaataacatcagtttagagaacttccaggggttttgytgtttttttttttattttaaataaagcagtatgaatattttagatttaggaaatttagaggtttgtgttataatgtgaaaacattattgtggatctcatt

SEQ ID NO: 332466 - DNA, 201 bp, Homo sapiens
cttttcaaagagctggcttttgcctttgccaatcctttactgtatgtttgttttttatttcattaatttctttgatgtcttcgctttgaatttactgtgatttttttttttttttcctgacttgggatcattgcttagatcatagattttcagcctttcttatttttttaaatgaatttagagctctaaatttcccactaa

SEQ ID NO: 332467 - DNA, 201 bp, Homo sapiens
cattctgcttttcctctccctctgggattctagtgcacgtatcatagacctttctgccatgtcctcccatatgtgtcttaggctctttttgtgtttttccrtccctttttgtcttctgacctggcttccagtttataattccctctttagctttaaaactatgatttgctgttaaaccctttcagtgtattcttattttag

SEQ ID NO: 332468 - DNA, 201 bp, Homo sapiens
gtttgacattttcatcaattttggaaaattctctgctgttatctccaaatactgcttctacttcattctgcttttcctctccctctgggattctagtgcaygtatcatagacctttctgccatgtcctcccatatgtgtcttaggctctttttgtgtttttccgtccctttttgtcttctgacctggcttccagtttataa

SEQ ID NO: 332469 - DNA, 201 bp, Homo sapiens
gtatttatttcatcttcattgttgaagatatattcactggttatagggttttggtcagcagtgatttttcttcatcagtttgaagatatcattcttctgayttctattgtttcttttctttttaaagacagggtcttgctttgttgcccaggctggagtgcagtggcacaatcatagcccattgcagcctccaactcctgg

SEQ ID NO: 332470 - DNA, 201 bp, Homo sapiens
ttagtgattatattagagattaaaacattgcatctttgactttttaaagtctaatgtaaattagtattttttccacttcctggacaatgaaagaactttaraatgctttaactccaatcacctcctacctgccttttgatttattgtttttgtgattttgttttttaacatatttaatttccctgaaaacattcttatttt

SEQ ID NO: 332471 - DNA, 201 bp, Homo sapiens
gctataccatgtttctgtttttctatttgtcccacctgttcactgttccatttctgtaatcttcttaattatgttttattccattctcttctcctttcttyttttagtgattatattagagattaaaacattgcatctttgactttttaaagtctaatgtaaattagtattttttccacttcctggacaatgaaagaactt

SEQ ID NO: 332472 - DNA, 201 bp, Homo sapiens
ctcgaactcctggcctcaagccaccctcccacctcagcctcccaaagtgctgggattacatgcatgagccactgagtccagctaacttctattgtttctgyagagaatttagctgtcagtcttattgtttctcttttgaaggtaattataccctcactgcacccaccacactgcttttaaaatttatctttgtctttgatt

SEQ ID NO: 332473 - DNA, 201 bp, Homo sapiens
gccatactttcagccttttggggcctgagcagaggatccagttgagtcatatctagactcctgacctacagaaactgtgaaataataagtgctttaagctkctaatattacagcaggagaaaactacagccactgtgatcgtagatatcttttccccattttatttgtcatttaaaaatattttttaaagctcttattagg

SEQ ID NO: 332474 - DNA, 201 bp, Homo sapiens
ctcgaaatccagctgctattgacatgtttattataggtaggaaagaaaaaagtcttttttcccccttcttcttcttcctggatataataaaaaaattaaartggtaaaaactttttcagctactttagcagctggcaatttcatacttggatttctttaaggtttgctggtttataaagtactgcatctaggttttcatta

SEQ ID NO: 332475 - DNA, 201 bp, Homo sapiens
taaatatggcattaagatgtgttctgatggttgtataaatgcatgcattaggtattttcaggattgtagaatgggtatagaatattatgcattttagttayagacctctctaactagagttaatattctgacataatggcatggaacccaagagaaaacttgacagttggacataaaaaactggtgtatatacagaggaaa

SEQ ID NO: 332476 - DNA, 201 bp, Homo sapiens
tatctaaaataaatgctaatattattttaaaagatttaaaatctcatgtttttcatctatttagggaagagaaaacacagaagaatcagtgttggaaatcyctcttcatagatacttactctgatgtaggaagatacattgaccattatgctgctattaaaaaggcctgggatgatctcaagaaatatttggagcccaggt

SEQ ID NO: 332477 - DNA, 201 bp, Homo sapiens
ttggggtcagtccctgctgctgtgtaaaagcccctgtcccggccaggcgctcttctctgctgggtccggggcctgcggagtctggcgccggggtgggcagrtgggtgagcgagaggagaagataggcaaccccttactcccctggcgcgacttccccagcgccagaatcgctgtccgggctcactttcggacttcagtgcg

SEQ ID NO: 332478 - DNA, 201 bp, Homo sapiens
ccacaatgaattaaagtttaaaatttgattaattataagtgtaaaaaaatagtctgaaggtcattggaggattctctaacaatagttggggggatgaagarggggagaatcccaaggaaataaggtggatagaattgagaatagaaattgatcttataaataattagtacaattatatctataaatgtttctagttttggt

SEQ ID NO: 332479 - DNA, 201 bp, Homo sapiens
atgcaacctttgctatatccaaatacacatgtatagatatttgtcgtttacttgtttgatttagatcctgcctaggattgagatgtgctcaaaataaaaawaccaacacatacttatagggtactcaaagtgaaaataagagacaccagattcctagggaaaggggaaagtgatagcattgggaaacagagtcaaagtgta

SEQ ID NO: 332480 - DNA, 201 bp, Homo sapiens
ttttcaaagagctggcttttgcctttgccaatcctttactgtatgtttgttttttatttcattaatttctttgatgtcttcgctttgaatttactgtgatttttttttttttttcctgacttgggatcattgcttagatcatagattttcagcctttcttatttttttaaatgaatttagagctctaaatttcccactaag

SEQ ID NO: 332481 - DNA, 201 bp, Homo sapiens
tcacacatgaaccataccttatgtcctatatttcccattaagagtcaatgttaaaactcttaaataacatcagtttagagaacttccaggggttttgttgtttttttttttattttaaataaagcagtatgaatattttagatttaggaaatttagaggtttgtgttataatgtgaaaacattattgtggatctcattggt

SEQ ID NO: 332482 - DNA, 201 bp, Homo sapiens
tactagtgctaaaaacgtaaaattataccttctatgaattttaatgacattatttatataacttcttaatatcttactcaaagtaggtacatgatcagtgraccttgaatacaatagtgtttaataaatattgggtcagaatgggtcattaatagatattgaggaaagagccaactattatagtttgccttctctcagttg

SEQ ID NO: 332483 - DNA, 201 bp, Homo sapiens
agctggggctacaagcatataccactgtgcctggctcagctttttttttttttttttaagatttgttttataaacttttattattttaaatttttattttwttattattattattattattattagagatggggtcttactatattgcccaggctggtcttgaactcctaggctcaagggatcctcctgcctcagccttcc

SEQ ID NO: 332484 - DNA, 201 bp, Homo sapiens
tgaggcaggagaattgcttgaatccgggaggcggaggtcatagtgagctgagatcgagccactgcactccagcctgggcaacagagcaaggctccctctcaaaaaaaaaaaaaagaaaatgcttttcatagttgagacatgtgactctatataacattttacatatttaaagagcttttatagctttaactttttaaagca

SEQ ID NO: 332485 - DNA, 201 bp, Homo sapiens
atacttggatttctttaaggtttgctggtttataaagtactgcatctaggttttcattagaaccgtttttgtattgaatatttttaattttgaaaaaagcyagtccatatacaatctcatgctctgaggactcttctataaggcaatgaaatatgtagaagtgctgtgaatgtgtatatatttttcttaacatgcacatgt

SEQ ID NO: 332486 - DNA, 201 bp, Homo sapiens
catatatgctttgaatgggtctactccttttgtacttttatgaaagtaagctatttcagagacattgtgcttgtgaaatgctaataagaatttaaggagarctttgcactgttcttattggaacctggtgttcctttgtatgtgaagaatcatgtgaggctctgttacaatttcagatgagggttgaatgagtacagggaa

SEQ ID NO: 332487 - DNA, 201 bp, Homo sapiens
agacaactggtatttttcctatccagaagaatcaagaaaaagctgattttgatttagaaactatgggttaatagtatctatataatttatttttgaaaaamaccaaaaagttatttggcaactgatagatttattatgaatagcaagtcggtaactgttaattcctggcaaatatttattatctctaaatggaacattcag

SEQ ID NO: 332488 - DNA, 201 bp, Homo sapiens
ctttgggaggccaaggtgggcggatcacctgaggtcaggagtttgagaccagcctggccaatgtggcaaaaccctgcctctactaaaaatacaaaaatgakctgggcatcatggcaggtgcttgtaatcccagttactcaggaggctgaggtgggagaatagcttgagcccaggaggtggagtttgcagtgagctgagatc

SEQ ID NO: 332489 - DNA, 201 bp, Homo sapiens
gataattaataatcatactactcacatatcatgttttagaacttcctaagcctttccctttcccaccttttggacctcctaactgaatttcaaagtcttcrttccttagattaaaaaaataaatccaaagataaaagaatgtaatgtcttataagtcgtatcagtgtatattttctctgttattgttgttagtgttataat

SEQ ID NO: 332490 - DNA, 201 bp, Homo sapiens
agcgattctcctgcctccgcctcccaagtagctgggactacagtcacgaaccaccacacctggctaatttttgtatttttagtagagacagggtttcaccrtgttggccaggctggtcttgaactcttgaccacaagtgatctgcccgtgtaggcctcccaaagtgctgagattacagatgggagccaccgcacccagcac

SEQ ID NO: 332491 - DNA, 201 bp, Homo sapiens
ctactgtgtaaaaaataagtactggcttagtgaaatatttaccattaaaaccatactgagctgggctgggtcgcatgcacctgtagtcccagctactcggraggatgaggtgggagaactgcttgagcccaggagtttgaggctagcctaggcaacacagcaagaactcgtctctaagaaaaaataataatttttttaaaa

SEQ ID NO: 332492 - DNA, 201 bp, Homo sapiens
ggttgttctaatataaagatgtgtcaggagaggccttggtgacatttaagctgaaacgtgaaaggagcagagggaattaggtggatatgtgggagacgagwggtcgaagcaaaggagcagcacgtgtggaggttccgaaacagtaatgtgcttggtgtgcttgacccaaggaggccagtgtagctggagtgcagtgaacaa

SEQ ID NO: 332493 - DNA, 201 bp, Homo sapiens
actttttctcttttggtgctaatgcagtagcattaagatactaagtcacattagagacctccaaagcaagtctttagggactaatataaactctatgcctyataaactccttggtacaactagtttttcttggccttaaaagagtatttcttataggttttgagaacccttcaatttgtaagtaactacagctcacccctt

SEQ ID NO: 332494 - DNA, 201 bp, Homo sapiens
ccagtagaggtcatacttgattaatattttcatatcctcttttctgtaagtatatagcttaataattattattcagtatatgaatataagctcagtaaaaytgtatcttggattgttacaagtggtctgtttgctaccttctgtgaattaccaactactgtgtaaaaaataagtactggcttagtgaaatatttaccatta

SEQ ID NO: 332495 - DNA, 201 bp, Homo sapiens
tttaagctgaaacgtgaaaggagcagagggaattaggtggatatgtgggagacgagtggtcgaagcaaaggagcagcacgtgtggaggttccgaaacagtratgtgcttggtgtgcttgacccaaggaggccagtgtagctggagtgcagtgaacaacagggagaggggctggagattagatcagagtgttaatggggtgg

SEQ ID NO: 332496 - DNA, 201 bp, Homo sapiens
tgcttttgttttgagacggtcactcaggatggagtacagtggcatgatcttggctcactgcaacctctgcctcccaggttcaagcgattctcctgcctccrcctcccaagtagctgggactacagtcacgaaccaccacacctggctaatttttgtatttttagtagagacagggtttcaccatgttggccaggctggtct

SEQ ID NO: 332497 - DNA, 201 bp, Homo sapiens
catgtgtgttgtgagaatccactgttcaagtctatggaaattcatatttggcgtgtctggttgtttgaattctagataaatgagaatttacatgaaataaytaaaaaactgatagatgctcttcttatcaaaagattgttttctctttcaaggaaatgggtcctgatgaatatgaagagatggaagaagaggaggaggagg

SEQ ID NO: 332498 - DNA, 201 bp, Homo sapiens
gcattagttggtcttatgtcttttcttggtctaggtggtgtgtgtgtttggcttgtttggggcacttttagaggctccagctgcacatttccactcctctstgtgtgttcctctctgcatctgctgtttgtgtgtgtacactttttttctgagcaatctttctccttagccacattgagttctttaacagtttttctgttt

SEQ ID NO: 332499 - DNA, 201 bp, Homo sapiens; identical to SEQ ID NO: 69809

SEQ ID NO: 332500 - DNA, 201 bp, Homo sapiens
ggcaggcagttgagttactattgggtcgacttgatcctttggaatcttgtttgtttttaatgtttgttagggtgggtgtaaagttgtctttatttaaggayggtggttgtcaactttcagtctcatgaccccctgaaactctaaaaacttattgaggactccgaagaattcttgcttatgtggattgtattaatgcttacc

SEQ ID NO: 332501 - DNA, 201 bp, Homo sapiens
tgtgtttttatcgattgtattctttttctcacctaggaccaaatggctcgaaatccagctgctattgacatgtttattataggtaggaaagaaaaaagtcytttttcccccttcttcttcttcctggatataataaaaaaattaaaatggtaaaaactttttcagctactttagcagctggcaatttcatacttggatttc

SEQ ID NO: 332502 - DNA, 201 bp, Homo sapiens
tgatgcaagttattttttagaatgaaagtaaataaattgtatttgtagttacccttaacaaattaaagaagcatgggaattccctctttctcctttatagyaatccataagacaaaatctatagcttgaattagattttaccaaaataaatatatctcataaaaacacaatttttatcaatatatttgtatagttaaaatg

SEQ ID NO: 332503 - DNA, 201 bp, Homo sapiens
agtacaggcgcaccaccatgcccagctacttttttgtattttttgtagagatggggtcttgtcatgttgcccaggctggtcttgaattcctgggctcaaamaattcctgcctcagcctccaaaagtgctgggattacagatgcaaaccacccagactttttttttttttttttttttttttttttaagagatggtgtcttg

SEQ ID NO: 332504 - DNA, 201 bp, Homo sapiens
agcaaaagattgagagacactgagaagagatgaggtgagaagttaatgcagggaggaaggacgaaaaaggagcttcctttcagctgccttgataaagctcsagaaccatcagagagaccccaacacatgggcttactttaaaaggtaaattaccttagaacatataaattgcatcttgattcaactaagtttgcttagact

SEQ ID NO: 332505 - DNA, 201 bp, Homo sapiens
ctgcaacctctgcctcccaggttcaagcgattctcctgcctccgcctcccaagtagctgggactacagtcacgaaccaccacacctggctaatttttgtayttttagtagagacagggtttcaccatgttggccaggctggtcttgaactcttgaccacaagtgatctgcccgtgtaggcctcccaaagtgctgagattac

SEQ ID NO: 332506 - DNA, 201 bp, Homo sapiens
taattgaaaccagattacaaagaaattcattgttgaacaacattaattaaaggactaatacattccaggcactgagatgtattaacagtaaataatggggrgtctgacagagttatgttaaatattacctagaaggggtaaacattattaattcatgtaaatacttgttataatccaatcattagatcacagatatatggt

SEQ ID NO: 332507 - DNA, 201 bp, Homo sapiens
tataattatatgcaaatatgctaaggattattatgtatttttaatgacataattctttcatcattatgaaatctccatctttatcgctgataatattcctygtcctaaagttcaaagagcattgaggtgtgttttggcaggcagttgagttactattgggtcgacttgatcctttggaatcttgtttgtttttaatgtttg

SEQ ID NO: 332508 - DNA, 201 bp, Homo sapiens
agggggaaagggggtcggggccgctgacaggacccgagcttccgcgacaccagaaggtgacgccagggccgccctcatcctgcggagccaccggggaccgkggcgagacgggggcggaaagggcctcgccctgagtcttcctcctgtcctgggcccaggtatgagaagcgacgagatatctctctcccaggcctcggtgag

SEQ ID NO: 332509 - DNA, 201 bp, Homo sapiens
gtttccattactgttagtataaataggttagtttaaacaactttgaatctctgtcatctacgcaactgtgttaacccaactttgtctgtgatttactgttsatatttggccatggaagtaggaccttcactctagtgcttaccctgttttttctcatccttgggacccacatggttatttatcagaagggaaagctgaact

SEQ ID NO: 332510 - DNA, 201 bp, Homo sapiens
tgtcagatttcccttgtaatttaattttgatctatgacttttctagaaatgtgttaattttcaaacatttgggggagttttcagttatcttttggctatcrattttttaaatttattgtggttagagaatttgctctgtattttcaatcctaaatgttttatggcccaaaattatggtttatcttggtaaatgatccttgt

SEQ ID NO: 332511 - DNA, 201 bp, Homo sapiens
ttataattggtatatttttaagaataagttgaaatttatacgttattactattcatattttattaaagattagaaaactgaaaaaaaataagtagaaagaraaggagaaaatgagtgcctagcaattccaccatgccagtagtaacttttgttaaaatttttttatgtatatatcactttttgctatctgatcttcatttg

SEQ ID NO: 332512 - DNA, 201 bp, Homo sapiens
ccaacacatacttatagggtactcaaagtgaaaataagagacaccagattcctagggaaaggggaaagtgatagcattgggaaacagagtcaaagtgtaaycccaggctggacacggtggcccacgcctataatcgcagccctttgggaggctaaggtgagaggattgcttgagtttgggagttcaagaccagcctggaca

SEQ ID NO: 332513 - DNA, 201 bp, Homo sapiens
tacaactagtttttcttggccttaaaagagtatttcttataggttttgagaacccttcaatttgtaagtaactacagctcacccctttgctatttatcccrtcttggcttgtttggattttgatcatccagagaagattcctccagactgtccattttgctttttaagggtactgactgacatatattaaacatctacata

SEQ ID NO: 332514 - DNA, 201 bp, Homo sapiens
gttgccgtttatagtgactatctgcatgctcctaactcccaaacctgaatctccctccctgacttccccactgaggtctagaattgtttgcacaactgtcygctggacctttctattggctgtcccacacttattaactggattcagtaaatgttaacaaatttgacagaatcaaagtacagatgacagaaagtgggagtt

SEQ ID NO: 332515 - DNA, 201 bp, Homo sapiens
gcaattatactacttaacatgttaaacaggttttagaaaatagttttgtaattataagggtaataagtgaaaagtaagagaaacaaaaggcataaaacaamacaatgaatattttaatctttatttttaaattgttttcttacttttttaaatactatcggtgaatctggttactgccagctgttgttatgtcagtcgaag

SEQ ID NO: 332516 - DNA, 201 bp, Homo sapiens
agggtagaatttacaggattgcaacactgttgtgttagaaatctttatatagtaagaaagttatttgcttctaacattcgatgttttggggcagctgatarcttgtgtagccatgactattgagtcagaactgttacgattcaggcaccctctataggtggactttccagtagttgctttaatgaaaacgtggtttttgtg

SEQ ID NO: 332517 - DNA, 201 bp, Homo sapiens
acagggactgaaatactgtctccctttaactttttgcatacatactggtttgagtcagtacatagcagtggaagctgcagagggccgaaacaaaaatgaarttttctaccaatgtccagtaagtagaacgtgtgtttaaatatggcattaagatgtgttctgatggttgtataaatgcatgcattaggtattttcaggatt

SEQ ID NO: 332518 - DNA, 201 bp, Homo sapiens
ttgtgagaatccactgttcaagtctatggaaattcatatttggcgtgtctggttgtttgaattctagataaatgagaatttacatgaaataactaaaaaastgatagatgctcttcttatcaaaagattgttttctctttcaaggaaatgggtcctgatgaatatgaagagatggaagaagaggaggaggaggaagaggag

SEQ ID NO: 332519 - DNA, 201 bp, Homo sapiens
ttttttttttttttgagacagggtcttgctcggtccccaagcctggagtatagtagcatgatctcagctcactgcagccttgactcccctggctcaagcamtcctgccacctcagctgtcccagtagctagaagtacaggcgcaccaccatgcccagctacttttttgtattttttgtagagatggggtcttgtcatgttg

SEQ ID NO: 332520 - DNA, 201 bp, Homo sapiens
aaatcaaacaaaggcaattttgtttactatagatggtttttaacacaccttagtcatggccttgacaaacctgatgtgatttaagattctgttgatagctrttgcccaagtgagatctttgaatacctactttcaattaatataacttgtaatttctctctggaaaggatagagtcctaatcttaggttcattctttttac

SEQ ID NO: 332521 - DNA, 201 bp, Homo sapiens
gagcaatcatttgtccagagctgcatacactacactaaataaaattgttttgtcatattaaacacagtctataattgaatggcctgtttaaaatttaattytaaagaatgaagtatttattgtggaacttttttttttttttttgagacagggtcttgctcggtccccaagcctggagtatagtagcatgatctcagctca

SEQ ID NO: 332522 - DNA, 201 bp, Homo sapiens
agaaggctggcgttgctggaggtagggagtgactcacagacagtgatgagatgagggtggtgagatcatgcaggaccttgggaaccaaggtgaggaagtargagtttactttaaatgctttaggtagtaatcacaattttaaacagaagtgacatgatccctctgtaaatgtctgtggaaataaattgagttgaataccat

SEQ ID NO: 332523 - DNA, 201 bp, Homo sapiens
ctacctactatacatgtaaagagcaatcatttgtccagagctgcatacactacactaaataaaattgttttgtcatattaaacacagtctataattgaatkgcctgtttaaaatttaattctaaagaatgaagtatttattgtggaacttttttttttttttttgagacagggtcttgctcggtccccaagcctggagtat

SEQ ID NO: 332524 - DNA, 201 bp, Homo sapiens
  misc_feature (1)...(201): n = A,T,C or G
catacagtaaaggtatgtgcgatatattttaaccaaattcttcagaactcttgaaatgtgtatcttattacaggccaggcaaattattttgggagcttgangcaaattctacctactatacatgtaaagagcaatcatttgtccagagctgcatacactacactaaataaaattgttttgtcatattaaacacagtctata

SEQ ID NO: 332525 - DNA, 201 bp, Homo sapiens
aagaaagacatgtgttactacgcatgatctgtcaatgtttaaggctgttgttggttcttgtgactttgctaatatgtttttctcctgacaggttaacctgycctcttaactcagcagtggttctagcgtcctatgccgtacaatgtaagtcacaaagggagcatttcacggatggacaggttgttctgatcagtgtgtgga

SEQ ID NO: 332526 - DNA, 201 bp, Homo sapiens
tgcaagagttagaaaggagagcaggctggattcagcttgtcttctcagtgaatcagcaagtacaggaaatatgtgaaccagataagggaaagagggctgtrataggagttgtttacccctcagggcttggagtctctcccaaccctgggctggtactggggtttttctaggtgtgagggacagagtaattggaatggagta

SEQ ID NO: 332527 - DNA, 201 bp, Homo sapiens
tgaagccccatctctacaaaaaatagaaaaattagctgggtgtggtggtgcggtgcctgtagtcccagctactagggagactgagggggtagtatctgttkagccccagaggttgaggctgcagtgagccataatcatgccattgcactccagcctttgtgacagagtgataccctgtctcaaaaaaaaaaaaaaaaaatc

SEQ ID NO: 332528 - DNA, 201 bp, Homo sapiens
tcaaaacaggcgaatgggcctgggtggatttgaaccttcccttctccctacaatatacctgggacaggcccggccatttcacatccatatgggaagtggcrtggtcaccagtttgtattcttatgatctgtagaccttgtgaactctgtgtctgccaggccaatcagctgaggagactgagcctccccatgtctcagagca

SEQ ID NO: 332529 - DNA, 201 bp, Homo sapiens
agatgatcaggtctgagagcaggcactggctgaactacacaccctgctctggtctcagaacaggcaaaatagcaagagaaggctgacggactcctgaggtrgccctaggtctgcctatttccctaccaggaaagaacagaaatgaaggaggtgaagagcaaggtggctgggcctgcagcttacccacccacctgcatggaa

SEQ ID NO: 332530 - DNA, 201 bp, Homo sapiens
aggtagagccatttgcagctccagacctaagaaatctcctctaccagaagcccaaaccatcttggcctattaccctgttgacctactgtgtgatagatagwtaaggcagcaagatgatcaggtctgagagcaggcactggctgaactacacaccctgctctggtctcagaacaggcaaaatagcaagagaaggctgacgga

SEQ ID NO: 332531 - DNA, 201 bp, Homo sapiens
ctgacccttcttgagcagccaaaacactggccagcattagtcctttagtttcatggtatttgtgatggatattattttaaacatgaaaaggttttattttwaaaaaattttagtgtattacatttgcctttactgtttatgtgcagcataaagttgcttttgttacaattcatgttgttttgtaatggttgatcaaagcaa

SEQ ID NO: 332532 - DNA, 201 bp, Homo sapiens
aaagattccctactaattagcaacttggaataattagggcagggattctgaaaggtaacagtcttctccgtctgaatattgtgagcccactaaaggggaartattatttaatttaaaaacaagagggttagagggagtcacattcaatggataagaataaaaacttgctttagtagaatttagcattagattgctgaagat

SEQ ID NO: 332533 - DNA, 201 bp, Homo sapiens
gtatgggagtcgggggtggatcttgagaatgtttttcctttaaagaggtacacactgcaaaggggttccctctcgtgagctgctccaggacagaggctctyccgtactcagtcttctcaggatggtggtggaaggggaaggagaagagtctggtttccgtaggaggagatgagtgtggaaactgatgattccgtcaggaaa

SEQ ID NO: 332534 - DNA, 201 bp, Homo sapiens
tcaggccacaccatagtccaccctctgccctgatctgctctcggcctgatgttccaacattgccagcattgttcccctttatgccactcatgccccagacmaacctggctgatctgcagggcctcccagtgcctcccctcagtctgttccatctgctgggaatgcttttccctcccacttccctctgtcgaaatcctgcct

SEQ ID NO: 332535 - DNA, 201 bp, Homo sapiens
gtgaagtttgaagcctccctgtaccaaagactcacatttattggtacctccatgttgttgatgctgtgagctactcgtttttttgtttgtttgtttgtttgtttaacttaaaaaactttgttttgtttttattttaaaatgtttacagggaggagtggatcaaaagatgcctcttgtggtatcaaggataaacccagagtc

SEQ ID NO: 332536 - DNA, 201 bp, Homo sapiens
aggacaggtgcccagatttatgcagactggggatcaagacttttctccctgtgcatcagggcatggatagcagctcttcctgaggctgagtagaagcagcrgatagggctccaacaccgggcagtgtctagagcagcccacagccttagcacctgcgagtgctgacgaggaccctgtgggttaatgtcagtttcattttcc

SEQ ID NO: 332537 - DNA, 201 bp, Homo sapiens
atgcttccagatcagccctctaggatccgccccagctgtgggaaagaaggggaagggtgagagtaggcagctcagagcgagggaacccacatttctgtatwcaaggaaggaaaaggaaggaggatggccttacttagcccgatgtgagagccagggtggacaagagagacagggagatagacaaacacaaacacctcatac

SEQ ID NO: 332538 - DNA, 201 bp, Homo sapiens
tctgctgaaagcccctatatatatatatataaagcccatatatatatatattaaagcccatatatatatataaagcccatatatatatatatatatatatattttttttttttttaattattataagttctagggtacatgtgcacaacgtgcaggtttgttctagcagcactcgaagacatgctgtggagtccctctctg

SEQ ID NO: 332539 - DNA, 201 bp, Homo sapiens
tgtgttgaggaccagcgctcacaggccagatgcgctcacagggtgtgcccccttcccaggcctcgctcgcctctgctgaaagcccctatatatatatatawaaagcccatatatatatatattaaagcccatatatatatataaagcccatatatatatatatatatatatattttttttttttttaattattataagttc

SEQ ID NO: 332540 - DNA, 201 bp, Homo sapiens
cctgtaagtgccatttttaaaaaatgtgctgaactccttcacggtttgcttttatattttatgttttcttgtccaacagagatggctggaagcaagcaaasccatcaggaagcagttaaaaggttggtgtgatcttttcatttcagtcgaacattaggtgttagtgtatcacagcctgtttctcccctccaatcgtcagtg

SEQ ID NO: 332541 - DNA, 201 bp, Homo sapiens
agctgccatcatgcacagcctcatctgccccagcagctgtgttgaggaccagcgctcacaggccagatgcgctcacagggtgtgcccccttcccaggcctygctcgcctctgctgaaagcccctatatatatatatataaagcccatatatatatatattaaagcccatatatatatataaagcccatatatatatatata

SEQ ID NO: 332542 - DNA, 201 bp, Homo sapiens
gtgtctagagcagcccacagccttagcacctgcgagtgctgacgaggaccctgtgggttaatgtcagtttcattttcctgaggaggaaatggaatctcagwgaggttcagtaacttgtccaaagccacagatctgggaagtggaggaggcagcccagcactggagctggtttctgggggaggagtgggtccaggtatggat

SEQ ID NO: 332543 - DNA, 201 bp, Homo sapiens
ttaaaacctgacatggttatttggcatttaatagacattcagtgactatttggatggatggatggatggatggatggatggatggatggatggatggatggttggatggacggacggatggacggatggacggacggacggacggacagacggacaaatggttagatgaaactagatggggccccgagatacaaactccta

SEQ ID NO: 332544 - DNA, 201 bp, Homo sapiens
cgatctcttgaccttgtgatctgcccgcctcggcctcccaaagtgctgggattacaggcatgagcctctgtgcccggccttacttcctttttttaaaaacwtgccaactgtgacgcattaaattgattgtacaaccaactgggaggttccaaccccaagtctggacggcactgcctaaactagtgattgtcacctgcctcc

SEQ ID NO: 332545 - DNA, 201 bp, Homo sapiens
tctcctctacagagcaaccaatagacacccctagtgacgggaggctcagccctcctcctccccagtcccagcttggatccattacaacaagccagaaggcrcttcccctagccttacttcatgtgccccaacacccctgcagtgacgtggccttgcccattcaggacaagtgctggtcctgaaagagcagtgtgtgtgcca

SEQ ID NO: 332546 - DNA, 201 bp, Homo sapiens
cttaaaacctgacatggttatttggcatttaatagacattcagtgactatttggatggatggatggatggatggatggatggatggatggatggatggatggttggatggacggacggatggacggatggacggacggacggacggacagacggacaaatggttagatgaaactagatggggccccgagatacaaactcct

SEQ ID NO: 332547 - DNA, 201 bp, Homo sapiens
tctcagcgctgagaagggtcttcagcgtctcctggtccagcccgtatgtgaccctaagtctcctctacagagcaaccaatagacacccctagtgacgggargctcagccctcctcctccccagtcccagcttggatccattacaacaagccagaaggcacttcccctagccttacttcatgtgccccaacacccctgcagt

SEQ ID NO: 332548 - DNA, 201 bp, Homo sapiens
ccttaaaacctgacatggttatttggcatttaatagacattcagtgactatttggatggatggatggatggatggatggatggatggatggatggatggatggttggatggacggacggatggacggatggacggacggacggacggacagacggacaaatggttagatgaaactagatggggccccgagatacaaactcc

SEQ ID NO: 332549 - DNA, 201 bp, Homo sapiens
tccttaaaacctgacatggttatttggcatttaatagacattcagtgactatttggatggatggatggatggatggatggatggatggatggatggatggatggttggatggacggacggatggacggatggacggacggacggacggacagacggacaaatggttagatgaaactagatggggccccgagatacaaactc

SEQ ID NO: 332550 - DNA, 201 bp, Homo sapiens
ctttggacagtgaattctttgagggcagggatagtgccctattcacctctccttccttaaaacctgacatggttatttggcatttaatagacattcagtgrctatttggatggatggatggatggatggatggatggatggatggatggatggatggttggatggacggacggatggacggatggacggacggacggacgg

SEQ ID NO: 332551 - DNA, 201 bp, Homo sapiens
aggaggctggccctcctgagggtctgggaacccccattgctccaggtaagaagtacagactggtctgtacctggtgagagaaaaaaagaaaaaaaaaaaaacctgttggttagtttctgtgagtatttgcaaaatgtttacaaaatatttgacatgttttatacagcagatttgtgttaagaggcaaaaagaagcattctg

SEQ ID NO: 332552 - DNA, 201 bp, Homo sapiens
tggtgtgggtgatgcagagactcaagggtcctgtcctgtacagtgacagcagggatggttaatccctgtgactctgaggggttagaaataggggtcttggragtgggctctgcatggtctggagagggaagaaaggcttaggacgcacatcggtcaggtttctgtctgctaagccgggggaaagccatgtgaccctgggca

SEQ ID NO: 332553 - DNA, 201 bp, Homo sapiens
gcctctcctggccttacacagtaccctagacatctgagcatctccactgtaacatgataatattattacttggttaattgtatttcttctcctttggacartgaattctttgagggcagggatagtgccctattcacctctccttccttaaaacctgacatggttatttggcatttaatagacattcagtgactatttgga

SEQ ID NO: 332554 - DNA, 201 bp, Homo sapiens
catcagtcgtccctcactcctccttttctttcactgtccctatgccatttctcatcgtgttgattctacctcccagacatctcttacatttgactcctccrccatccccactgcactgcccccatgcagccaccatcgtctcttgcacagtctagctcagtcatatccaaatcgttcccctgtctttggtgtcacctcctt

SEQ ID NO: 332555 - DNA, 201 bp, Homo sapiens
  misc_feature (1)...(201): n = A,T,C or G
ggatatttaagtaggaaacccttctttttaataaaatcatttgcagaattccaaaatacagaacagatgaaagcaggtctgctctgtgacctgtgatgganccagtagggtcctcaaagcccagcctcttcagtcttccttcactggcccccagggagccctaggctaaacagaccatcatgtgaaaaccactgttacagg

SEQ ID NO: 332556 - DNA, 201 bp, Homo sapiens
gatatttaagtaggaaacccttctttttaataaaatcatttgcagaattccaaaatacagaacagatgaaagcaggtctgctctgtgacctgtgatggaaycagtagggtcctcaaagcccagcctcttcagtcttccttcactggcccccagggagccctaggctaaacagaccatcatgtgaaaaccactgttacaggt

SEQ ID NO: 332557 - DNA, 201 bp, Homo sapiens
taaattgtagttaataatatatattaaatgtaatataaaatcatacataaataattccgacaaggggagcagctagctttttgacatctggtaatgtgcartgtgtggtctgggtcattctttccccacctattgtgattcttttctgatggatggtgccctgggtagaaggagcaggaggtacaagcgctgttgggcagg

SEQ ID NO: 332558 - DNA, 201 bp, Homo sapiens
aaagcacattggcataatgtctggctccttgtagatgttcagtaaattgtagttaataatatatattaaatgtaatataaaatcatacataaataattccracaaggggagcagctagctttttgacatctggtaatgtgcaatgtgtggtctgggtcattctttccccacctattgtgattcttttctgatggatggtgc

SEQ ID NO: 332559 - DNA, 201 bp, Homo sapiens
cggagcctctcggtgcctctgctcgttggcaagggagatggtgatgactactacactttgcaaagttgctgcaaagattagagatcatatataaaaagcayattggcataatgtctggctccttgtagatgttcagtaaattgtagttaataatatatattaaatgtaatataaaatcatacataaataattccgacaagg

SEQ ID NO: 332560 - DNA, 201 bp, Homo sapiens
attatgcagaatagatacctgtatatgtgaattatgcacttcagaggaggagatgtagtaggaacaaacagacctgagtcaggcagtcagactgtccttcwgctgatggtgcaaggcacggagcctctcggtgcctctgctcgttggcaagggagatggtgatgactactacactttgcaaagttgctgcaaagattagag

SEQ ID NO: 332561 - DNA, 201 bp, Homo sapiens
cgtgaagatgacctcttgagggcaggggccaggccaggaggccttttcttattataaatgtgttttttgttattacattttaatttctcttgagaactggrtgaattatgcagaatagatacctgtatatgtgaattatgcacttcagaggaggagatgtagtaggaacaaacagacctgagtcaggcagtcagactgtcc

SEQ ID NO: 332562 - DNA, 201 bp, Homo sapiens
gtgattctcttggtctgaatcagagcctctggtgaggccggaaggtttgcatttctaacaagctctctggtgatgccactcattcggacgccagggactgycctttgaggtccgctgcccagggtttcatgacacttttagataatatgctctgcgctttgcggccaggggggccctccctgctcttgccacagtggccag

SEQ ID NO: 332563 - DNA, 201 bp, Homo sapiens
agcccaccttgtgaccaggagcagatgtcagggaagctgacttggatatcagtcgttcttctctcagcccagggagcgagccctggtggtgacctggtgcmgtgaagatgacctcttgagggcaggggccaggccaggaggccttttcttattataaatgtgttttttgttattacattttaatttctcttgagaactggg

SEQ ID NO: 332564 - DNA, 201 bp, Homo sapiens
ctctctggtgatgccactcattcggacgccagggactgtcctttgaggtccgctgcccagggtttcatgacacttttagataatatgctctgcgctttgcrgccaggggggccctccctgctcttgccacagtggccagggactgctcacttgttaagaccagaggcaggttctcatatctcagcccatttggtcagagaa

SEQ ID NO: 332565 - DNA, 201 bp, Homo sapiens
agaagtaatcagttctgctgtgggcatattgtgggggagaggcctgttattcatctgtgtagcagtataggaatggtacgagatagaagagtcaggaggtwaggggatgggtccaggctggggatacagatgtggatgtcaccaggatagagatgggatttcaagcttgaaactggaggagatcccctgagaagcaagtgg

SEQ ID NO: 332566 - DNA, 201 bp, Homo sapiens
tcttttctccaaccctgcaaaatgtatgctataagccagggcttcccaagttttcatgttaaaatgcaaatacatactcagcaggtttgggctgggtcctktactctgcctttccagcaccgtcccaggtgatgccaggatggggtccgtaagccaccacatgttgagtggctggactctaggggagatctgtgtttcaca

SEQ ID NO: 332567 - DNA, 201 bp, Homo sapiens
ggttaccattgtatagacgtaaccagagacgtccccactgatgagatgaaagaaccaggcgttcatctggagggagcacatcccagggagaaggaacagcrgtgcaaaggccctgaggctggagcccacttcctttggttgcagaacacagtggagtctggagtggaatgagcaaggggggagggtagcagaagataagct

SEQ ID NO: 332568 - DNA, 201 bp, Homo sapiens
gttctgggtacaaaaaatggcaacagtgcacaaaacagaacaaaatccctgcgtttttgaagctaacatcccagcaggggagatgggccataaaaaaataygtgctgagtcgggctttgcagaaaaataaagtagagcaagagggagagagtgccagggcaaggtgaggttaccattgtatagacgtaaccagagacgtcc

SEQ ID NO: 332569 - DNA, 201 bp, Homo sapiens
ccctcaattctagctcctagccaagtggctgttcctcacttcagattcagatgtccatcctcagctccaagtttccacagaggtggctcggccaggctgcygtgctcagtgttagctctcagcacaggtggtgagcctgggaccatcaccgggcccccactccctcactccagggccctgctcgagcctcctgagtttcgg

SEQ ID NO: 332570 - DNA, 201 bp, Homo sapiens
gagcacttactatgggctaagctttgttctgggtacaaaaaatggcaacagtgcacaaaacagaacaaaatccctgcgtttttgaagctaacatcccagcrggggagatgggccataaaaaaatatgtgctgagtcgggctttgcagaaaaataaagtagagcaagagggagagagtgccagggcaaggtgaggttaccat

SEQ ID NO: 332571 - DNA, 201 bp, Homo sapiens
cagcccagatttcttgtataggaccttctcttcctcatttgcctttgttatatgggtcttttttttcttattttaatggattcatagttacatatctgtaygttttggggtaaactcgcaaatcatttttttaagtaggtaagacatagattataaattaggttaaagcatgatagtaaaggatcaactgttaggaaatca

SEQ ID NO: 332572 - DNA, 201 bp, Homo sapiens
ttaggctcaattgtattcacttccctcagcccagatttcttgtataggaccttctcttcctcatttgcctttgttatatgggtcttttttttcttattttratggattcatagttacatatctgtacgttttggggtaaactcgcaaatcatttttttaagtaggtaagacatagattataaattaggttaaagcatgata

SEQ ID NO: 332573 - DNA, 201 bp, Homo sapiens
aagacagcgattctgaagtttctcagaaccgaagcccgcaccaagagtaagaaactcgtgttgttttatttctgggtatttgctttttggctgttgcggartttgctcaggtccaggttgccatttgagaggaaccaagagctggtgcctgcagccagctcccacaggtgccttctgccaggataagaacataaatcagac

SEQ ID NO: 332574 - DNA, 201 bp, Homo sapiens
gtcatcctgccttaaaaaaaaaatgagaaaaataaaacctcctctgtacatataagccaaaaagaaaaagtggaatgtttcacatgttatgggaaaagcayttattttctctctaaaaacgcatcttgggcaacttacttggcctctctagacttccattccttcttttttattttattttattattattatactttaagt

SEQ ID NO: 332575 - DNA, 201 bp, Homo sapiens
tacagaggagaaaactaaggttcggagagttaaaataatttgaaaagtcacaaagctaacagaagatgggaccagacttgttctgtgtttctaattcaatygtccacatgcccctgtactgagtggcttccattcaggtgtttgtttttgccagtgatgaaactgtctatttctctccatgtaatgagtgtcatcctgcct

SEQ ID NO: 332576 - DNA, 201 bp, Homo sapiens
aggcccccaagaacagtgcaactagaatttatcatcccaaccagaacaatttgagaataaaaaggggtcctattaataattgcacatgactgacgggtctmagccgggactgccctaggtaaatccggacgtgtggtcacgtccggatttaagagtgacttcgaggttgagatcagtgcagggtgagccagcatggaaaac

SEQ ID NO: 332577 - DNA, 201 bp, Homo sapiens
agtagctgaggcatttattgaacttctgtatggcagatgtagtgctgagtggggatgtggggtgcaccccagagaatccaggttgcctgcatccacttccrtgcaggaaagggcaggccctggtcaggccagacaggtggtgggccctcagacagcttggagcaggagaaaaagcccaagttaccatggaagcagattcag

SEQ ID NO: 332578 - DNA, 201 bp, Homo sapiens
ttcaacatgctgaattaccgatcttgcaaaaacttgtggaaatcctgtgttgagcaccatacgttctttcaggcaaagaagctactacctcaggaaaagartgttctgtctcagtactggactatgggctctcggaacaccaaaaagtgagtgtgctgtaaagactgtgtccacactaggctgagatgtaaatgcatcctg

SEQ ID NO: 332579 - DNA, 201 bp, Homo sapiens
tcagactcggaacagttggggaatagtgtttatgctaatgaggcagagctgcagatggggctgggaactgaactctggtttacttggtatgataaaaatamtgctcggaataatcggtaaatttttctcttccccgcagatgacaccacccgggtattattgcagggaaatgaagattatattaatgcaagttacgtgaac

SEQ ID NO: 332580 - DNA, 201 bp, Homo sapiens
ccagggttaactgcttgcaggaacaccccacagacggggctcactcactctcggtggtttcttacagaccaaatgtcaccagtactggccagatccccccracgtcatgaaccacggcggctttcacatccagtgtcagtcagaggactgcaccatcgcctatgtgtcccgagaaatgctggtcacaaacacccaggtgag

SEQ ID NO: 332581 - DNA, 201 bp, Homo sapiens
gccagtgggtggaggctacagggaggcagattttagcacagaatgagtaataaacagtgtgtgtctgtctcttctaaaattcactggttgacaactgacaycccacccccaccttccatcttaagaagggtggtatcccgttgtggagtagaatgtaactatgaccttctgggatttgggcaccagatttatcttactgca

SEQ ID NO: 332582 - DNA, 201 bp, Homo sapiens
ccctggtgatgaagacgctgcgtcctcctcctccaggctgcagcctggggctgagcggagacctgtggcctagtccctggcaggctgcccccaccccgccytgagaaacagctgatggacttggctgagtttgttttctcccatcagtgctctcgggtgtgcatgagaggatgcctaacccgtccacctgtccagggttaa

SEQ ID NO: 332583 - DNA, 201 bp, Homo sapiens
gcggagacctgtggcctagtccctggcaggctgcccccaccccgccctgagaaacagctgatggacttggctgagtttgttttctcccatcagtgctctcrggtgtgcatgagaggatgcctaacccgtccacctgtccagggttaactgcttgcaggaacaccccacagacggggctcactcactctcggtggtttctta

SEQ ID NO: 332584 - DNA, 201 bp, Homo sapiens
ggagacctgtggcctagtccctggcaggctgcccccaccccgccctgagaaacagctgatggacttggctgagtttgttttctcccatcagtgctctcggktgtgcatgagaggatgcctaacccgtccacctgtccagggttaactgcttgcaggaacaccccacagacggggctcactcactctcggtggtttcttaca

SEQ ID NO: 332585 - DNA, 201 bp, Homo sapiens
ttagatgacttccacagggtgaccaaagggggctccaccgaggacgccagccagtactactgtgacaaggtgagcgagcgcaggcagccgggtgatccacmcacccagggcttcccggcctcttgtgggcagctgagtagctctaactaaatgaaaatatcttatcaccaactgctggagagagatgtgatgcaaatgacc

SEQ ID NO: 332586 - DNA, 201 bp, Homo sapiens
agaggggatggggatctttggggaaggaggggaggaattgctaggggccacagcagggctgtgcgcagagggagaaagcatcaggagacagggccaccctrtgtctgggttggggctgggtcctcatgctcaccacctggatgggctcaccaaggccactgcatctcccacagaccggggaagaacacacagtgacacatc

SEQ ID NO: 332587 - DNA, 201 bp, Homo sapiens
cggtgtgcccgatgactcctccgactttctggaatttgtaaactatgtgaggtctctgagagtggacagcgagcccgtcctagttcactgcaggtatggcrcttgctgttttgttaggtttggaatcctttccctgtcggaaaaggcctggagacaattggcaggcgccagacccaccctacatcccacaaagtcgtgtgc

SEQ ID NO: 332588 - DNA, 201 bp, Homo sapiens
aaggccaagggaggaaagcccctttggagtcagcggggaactgctcgctgggccatgcagaaaggctactcagacaaatcccaagtctgtcttctctcccstctccagtgctggaataggtcgaaccggtgtgttggtcactatggaaacagccatgtgcctaactgagaggaacctgcccatttacccactggatattgt

SEQ ID NO: 332589 - DNA, 201 bp, Homo sapiens
tctgcatggcctgcaggcctgatgtttgtggctttggtccccacacctctgtggtcccacctccagtaggatgccactcccagctttgtgcctgccacacyggccttttgtcagctctcacctcactatggtacctgtctgccacaaggactggcagagtctggaacgtcactcacataccctggctggatggaggagcag

SEQ ID NO: 332590 - DNA, 201 bp, Homo sapiens
tttgttctagaaacaagacactggccaggttcttctggatatggtgcacaaccacctgggtgtgactgaaaaggaatattttggtttacagcatgatgacractccgtggactctcctgtaagtgccatttttaaaaaatgtgctgaactccttcacggtttgcttttatattttatgttttcttgtccaacagagatggc

SEQ ID NO: 332591 - DNA, 201 bp, Homo sapiens
tggtctgtagattccagtagcaattcctgttccccagttgttccaatcaaaaatgcctccagtattgtcagatgtcccctagggagcaaaatgccaccccmgcacccctttagaaccaccaatttaattcttgctttctgtcattagcccgagttgtttgagaatttcatcttgtgcttttgtaataactaacctttgcat

SEQ ID NO: 332592 - DNA, 201 bp, Homo sapiens
tggtagttcatttctttcttttgctgtatagtagtatatggtatgactgtaccacagtttatccgttccacatttgataaatggggtcttttccagcttargattattatgaatattcttttttgttgttgttataaattatgattttattagatacatattttggtccaaatctttgaattgtcgtgactttaaaaaaaa

SEQ ID NO: 332593 - DNA, 201 bp, Homo sapiens
ggaaattggggtcagcctgggaaggcgatgctgagctggagccctaggaaccacaggaggcctgccaggccctcctacccctgtatatgaagccaggggtrgggggagtaagaggtccacagatacccatgggccaaacaaggcaaggtaagaactcaaaaggggagttgattctcctgactcgttctgcagaacaggaat

SEQ ID NO: 332594 - DNA, 201 bp, Homo sapiens
ctccgtctgaatattgtgagcccactaaaggggaagtattatttaatttaaaaacaagagggttagagggagtcacattcaatggataagaataaaaactygctttagtagaatttagcattagattgctgaagattgataacataaggcatttaataaccttacagaaatggtatcaaatgttctagattttttaaaatt

SEQ ID NO: 332595 - DNA, 201 bp, Homo sapiens
gatttcagttattcctcaggaacgcctgctaaatcagtttctgtggagttcccataccatgcgtgcattttcccccccaacctttgcacatgggttttgcrgtgtctggaatgctgcagcttctccctggccaataccccttatcctgcaagactccccatgaaatttctgtgaaccggtcctgacacccaccccaccctg

SEQ ID NO: 332596 - DNA, 201 bp, Homo sapiens
aacaggaaagggaatggcccagggactgagaaagaaggcaggtgggaagggcaagaatgcataggcagcattcacagagctggtgttgagtggctgtggcrggccaggccctgtgctgcgttaagaatgaaatctctgctccctatagttattcacaggggaggaaactaagacaaaacattaatttgttcaggttcatgt

SEQ ID NO: 332597 - DNA, 201 bp, Homo sapiens
gacggataaacctgagtattgctacacaagtcagatgcactgtcttgtacgttacagctgtccgctcatttgctgacttcaagtctgaagatgaactgaaycagcttttccccgaagccattttccccatgtgtccggagggtggggacactttggagggatccatggcacagctaaagaagggcctcgaaagcgggacgg

SEQ ID NO: 332598 - DNA, 201 bp, Homo sapiens
acctgtgcgtggttctgagtcgagtctcccaatcttgtaaaatggttaacagcagtgctaccttccaggcccagtcaaaatcaatcagtcaggagtgaggrgtgtaaaaatacttggaaatcgctgaagccctgtagcacaggaagcccagaaacaggaaagggaatggcccagggactgagaaagaaggcaggtgggaag

SEQ ID NO: 332599 - DNA, 201 bp, Homo sapiens
gacacaagccttctaaaagtgcaggtgtaatccctgcgcgcattagttgttcattcattcatttgtgcatttcacacacatttcttaagcgcctatgggcagaggctccattttctatggcctgatcagcaggggagcagctgccagcatcttggacctgaccgaaaggcgggggagtttctgactgtacacaatgtccca

SEQ ID NO: 332600 - DNA, 201 bp, Homo sapiens
aggaaaatctctgcaactaaaactttttttcatgtctgaatatatcctgacagcaggttcctagaaatggaattacttagtcagactgccttccagccccrttggaatggtatgctgtgttagcgctgacacaagccttctaaaagtgcaggtgtaatccctgcgcgcattagttgttcattcattcatttgtgcatttca

SEQ ID NO: 332601 - DNA, 201 bp, Homo sapiens
tgaggaggaaatggaatctcagagaggttcagtaacttgtccaaagccacagatctgggaagtggaggaggcagcccagcactggagctggtttctggggraggagtgggtccaggtatggattaaaaggccagagcattgcagaggtggtagggcagggcagacagtggatagtgggagggaacccaggaagaggaagca

SEQ ID NO: 332602 - DNA, 201 bp, Homo sapiens
atgcacttcggtggcttctccaggagtaggagccacaggtgtgtcctgaggagccaacagaaaccaccctggggttagcatttcattgtggataatccacyggaggccacagggagttcactgtgattatgagagctgagttttccgatttagacattatcacttgggaattgcagctaagggggaaggaagaaatcttag

SEQ ID NO: 332603 - DNA, 201 bp, Homo sapiens
accagatttatcttactgcaacaggagccatggtgggagccacccccataactcttatagagctggtgggccaccaggactgccagatatatatatatatwttttgaaacagggtcttgctatgttgcccagactggcctcaaactcctggactcaaaggatcctccctcagcctcctgagtagctgggattataggcaca

SEQ ID NO: 332604 - DNA, 201 bp, Homo sapiens
ggaacccctggagggccgcattgtcagaaaggcggagtggttcacatcttgggtacttcacgggctgccatagaaactgtgttccccacttcccactgggktgctgggaagaatttttaaagtcccagtggctcccagtgttgctgttaaggattcctccgtttatcagagacctccccacccttcaagcccttcttcctg

SEQ ID NO: 332605 - DNA, 201 bp, Homo sapiens
gtataaataaaaatacaaaaattagccggatgtggtggcacatgcctgtagtcccaactactcaggaggctgaggcatgagaaccacttgagccttggagrcagaggttgcagtgagctgagatcgcaccactgcagcccagcctgggcaacgtgtctcaaaaaaaaaaaaaaaaatgtaaacactgccataacacttttt

SEQ ID NO: 332606 - DNA, 201 bp, Homo sapiens
ttccccacttcccactggggtgctgggaagaatttttaaagtcccagtggctcccagtgttgctgttaaggattcctccgtttatcagagacctccccacycttcaagcccttcttcctgccctcccctaacctgttctgcccagcagtgacccctgctccaggtctgctggtgagctcctgggcaggccgtggagtctgc

SEQ ID NO: 332607 - DNA, 201 bp, Homo sapiens
ccttctaaatttggcccatgactcccactaaaccctatctggtccatcttcctgagatagtgctctctctccttctttggcatgttatccatcgttagaawcctgttcttctgaaatccagggtgcatatttcctcccttttcctccctctcctgttacaaacccttggatgaccagatgacccgagccctttatccctaa

SEQ ID NO: 332608 - DNA, 201 bp, Homo sapiens
cgagtgagcatcatatcaagccttacaacaggctgggtgcagtggttaatgcctgtattctcagcactttgagaggccaaagcaggaggatcccttgagcycaggagtttgaggttacagtgagctaattgtaccactgcactccagcaggggcagtggagcaagaccctgtctctaaaaaaataaaaaagtcttagagcc

SEQ ID NO: 332609 - DNA, 201 bp, Homo sapiens
cccccagagccccacaacaagacaggtgaggaggggaggactgctcatgtggggtccccagcctcgtcctgtgtggtcctctgctgcgtggtggtcttggygcaggcattgtgtgctttcctttagtagggttcagctttaccctggccctctccaacatggataagcaaccctcttccttcctctcaggggtgtggggaa

SEQ ID NO: 332610 - DNA, 201 bp, Homo sapiens
tgtctcacccacttcccttctgagattggccacaaagtatcaccatatctttcccatactctgcccttgtaacagagaaggagttatttgatttggaaatytttggtgttgaattgagagtcctcaggaggctcctggcattgcagcgagctacaggaagaaattcattaaaatatttggaaagatcaggactaatttttt

SEQ ID NO: 332611 - DNA, 201 bp, Homo sapiens
tctagaaacaagacactggccaggttcttctggatatggtgcacaaccacctgggtgtgactgaaaaggaatattttggtttacagcatgatgacgactcygtggactctcctgtaagtgccatttttaaaaaatgtgctgaactccttcacggtttgcttttatattttatgttttcttgtccaacagagatggctggaa

SEQ ID NO: 332612 - DNA, 201 bp, Homo sapiens
atttcattgtggataatccactggaggccacagggagttcactgtgattatgagagctgagttttccgatttagacattatcacttgggaattgcagctamgggggaaggaagaaatcttagacaattaaattaaactcgtattgtcttgtgttgatgtcatttttcttagccctacttcccatatgtgctgtgtggcttc

SEQ ID NO: 332613 - DNA, 201 bp, Homo sapiens
gtgatcttttcatttcagtcgaacattaggtgttagtgtatcacagcctgtttctcccctccaatcgtcagtgcctgtgacatctggtacctgtagttccrggtgtccaggagtcatgagtgagccgacttctccctgtctgacttctgagtcagcagagatgcttccagatcagccctctaggatccgccccagctgtgg

SEQ ID NO: 332614 - DNA, 201 bp, Homo sapiens
tctcacgctgctaataaagacatacccaagactgcgttatttataaagaaaaggagtttaattgactcacagttccgcaaggctggggaggccttgggaamcttacaatcatggcggaaggggaagcaaacacaacctccttcacacagcagcagcaaggagaagtgcagagcaaaagggggaaaagccccttataaaacc

SEQ ID NO: 332615 - DNA, 201 bp, Homo sapiens
gcctgttgtcctcagctgagagcagtctcggtaaaggtggcaaagattctgtgacctcagaccggggaccaaatgcttgggagtctgatggccgggctggrccaccattctcatagctctcattctgtttggagcaaccaaaggatttgtgtgaagttatttggaaaaggaccttaactgagcagtaatcttttttctgta

SEQ ID NO: 332616 - DNA, 201 bp, Homo sapiens
cattgaagcagttaggcatttcttgctgagtttctctatgtagaagttgctaggctgtctttttcttcttttcgttttcatgtagaaaagatgatatatamcttccattgaatttccatatcctgtagcagtgtttctcaaactatagcacatcagaatcacctggaaggctggaaggctgtttaaaagaggctgttaggc

SEQ ID NO: 332617 - DNA, 201 bp, Homo sapiens
ctttggcaaaggcagggaagcaggtggcattggggacccaggcagaagaggatgggcattggatggacagtagatgcagacagggacttggatgcagagawaccaggcaggaaaccagcatctagggatcccagtaacaaggtcactacagggccatttatcaggaagtctagatttgtaatatcaagtgaccagacactc

SEQ ID NO: 332618 - DNA, 201 bp, Homo sapiens
gaccacaggtcccggttctcaggactgaagggatattccaagagggagcatccaggactgtgcaggggccatggctgcctgaatgctgtgctgatgagggkcccctggcgtaggagtggggttggagacctggcccatgcatgtcacctccctcagccacatcagctcaagggctagcccagaggttctcggtgagggagg

SEQ ID NO: 332619 - DNA, 201 bp, Homo sapiens
ttttgtctgggtttcactgaatgacttggtctctgcgcttctcccctcacttcactttggatgaggttagggtggggcagagtcttagaatgtaggagagycccatagtcatcagctctgtaaggtgtctgtgctgggcctgtggctccggaaggggctggtgtgggtgatgcagagactcaagggtcctgtcctgtacag

SEQ ID NO: 332620 - DNA, 201 bp, Homo sapiens
ggctgcagccaacatttgaacccaagtctgtgcctagacaaatcatctgttgtcaaagtcaaataaaatataaaaacagatgtttctctaaatttaaaacrttttgcttgggaagtaagaataataatttgggaaatctatacagactaggtggtctttggtttggaaaacaaagagaatgttgggagttttattagaatg

SEQ ID NO: 332621 - DNA, 201 bp, Homo sapiens
tcacttcactttggatgaggttagggtggggcagagtcttagaatgtaggagagccccatagtcatcagctctgtaaggtgtctgtgctgggcctgtggcwccggaaggggctggtgtgggtgatgcagagactcaagggtcctgtcctgtacagtgacagcagggatggttaatccctgtgactctgaggggttagaaat

SEQ ID NO: 332622 - DNA, 201 bp, Homo sapiens
tagtgcatggcttagattccgcagagcctgtattctaaggccatccatccaaaacacaccctgaggttccctggaaacccactcctttagtcctcgtcttyctggctgttactttgagggctcccaaagggaatgtgatcctgcgccacacctgaggatgctgaatcaccactgggggtgcggggacaggcaggttttaaa

SEQ ID NO: 332623 - DNA, 201 bp, Homo sapiens
aagattatgtgcccattcaaaagccccatttacgtaaggtttgggagcttatgatataagatcaactgtcattggtaataataaccttatgtcactccagrtgcaacagcttaaaaggatagactttaacattttggccccaagaataaaacagtaacaggagactagaacatttaaaggtaatctgtagcctacaaacac

SEQ ID NO: 332624 - DNA, 201 bp, Homo sapiens
gtacatcctgttgatcagaactttgtcacagggccatacctactgcaaggaagagagtagagggaaggtcatttttattccaggaaaccatgtgcctaacmaattcagggcttctatctgagaaacaaaataataggtttgagggacaattagtgctctctgccatcgctcaaccctttggctgcccttcttctgtgacat

SEQ ID NO: 332625 - DNA, 201 bp, Homo sapiens
ttcctaccacagtaattcatatttaaatatgcttttagattagtgtggatactattgctgctgtgttgctacctgacctttttctggggggggtacctcakaaatgagcatttgagggcaagcgaaaaagccctcttcatcctccagaggcaacaaagaggcagcagaaatggggaaagattgtgagaggcagggcttggg

SEQ ID NO: 332626 - DNA, 201 bp, Homo sapiens
cttgaccaagtccctcttccccaggaatcctgctgggcagcatatctctggctgtccagatatgtgtttctactcagactggcactctcctgtagcatggrgatgttagattaaggaaggtggttaaggggaaaggaatgaatgaactgtggtgtgaaattttctccaagggagcccatcagacagcagacagctgttgca

SEQ ID NO: 332627 - DNA, 201 bp, Homo sapiens
tttatccattggtagaaacctgttcttctgaaatccagggtgcatgtttcctccctcttctgttgcaaactcttggatgacaggatgacctcagccctttrtcctgaaggccctaacccgtccacatcaccacccaccagttcttccagattaggagtccatcactccaggcagcagctttgcgcctttctctgagagatg

SEQ ID NO: 332628 - DNA, 201 bp, Homo sapiens
taagccctgggaatccagtccagatcaaatttggactctcccctcaaggagcccacagccaagtgtgcagacagcccagagggttcgacattctatgatartagtaagcacacgataggggacagccagaaagaaaaagaggctatgcctgcagcgcagagatgaaaagttttagaagagggggaggggaggtgaacaagc

SEQ ID NO: 332629 - DNA, 201 bp, Homo sapiens
tgagtttgttttctcccatcagtgctctcgggtgtgcatgagaggatgcctaacccgtccacctgtccagggttaactgcttgcaggaacaccccacagayggggctcactcactctcggtggtttcttacagaccaaatgtcaccagtactggccagatccccccgacgtcatgaaccacggcggctttcacatccagtg

SEQ ID NO: 332630 - DNA, 201 bp, Homo sapiens
tccagggttaactgcttgcaggaacaccccacagacggggctcactcactctcggtggtttcttacagaccaaatgtcaccagtactggccagatcccccygacgtcatgaaccacggcggctttcacatccagtgtcagtcagaggactgcaccatcgcctatgtgtcccgagaaatgctggtcacaaacacccaggtga

SEQ ID NO: 332631 - DNA, 201 bp, Homo sapiens
tttgctgtttatctgttacctgtccctctttccccaaactccactgggggacagaatttttgtctatttgttccccacgcgagaaaaaccagaataggtgytcaataaatatttgctgaaaatggataaatcactgttaaatgctatgaagaaaacagagtacacggagtggtcaggagcagagggctaatcgaggaaggt

SEQ ID NO: 332632 - DNA, 201 bp, Homo sapiens
ataagcctctggatggcagtggctccatgtcctcttccctctgtccccagggcctggcatagaactttgtacatcctaggctctcagtgcattttttttttcttataaatgagtgaagggcagtagggagccccgctgaggccccaagcctggaaacgacaagagttcatgtctgtgcataatcagatttgacagctcagg

SEQ ID NO: 332633 - DNA, 201 bp, Homo sapiens
cacccaaaccattcatttgtttccttgttcactcaattttgatttcctttgctaatttgctctgtcacacctgcttcatactccctctgttgtgatctcaagtatcatatttaaatgcaattctacccttcatcaagcaaatttggttttgttataagcatgtgatttctgttgggtactgatagtgaatactgcctggac

SEQ ID NO: 332634 - DNA, 201 bp, Homo sapiens
aggcccctacagtcagtagtgtttgctctaataaaatattaacccagttattaatatctcctccttccccatgatgaaggagtttatccgagaacaatccrgcacaaagctacctgacccagaagtcatccagttctgtgtctccatcttcaaatgctccaggctcctgctcacctgacggcgttgatcagcagctcttag

SEQ ID NO: 332635 - DNA, 201 bp, Homo sapiens
ttggctaggctggtctcaaacctctgaccgcaggtgatccacccgccttggcctcccaaagtgctgggattacaggcgtgagctaccatgcccggctgcaytgccctttcaacttcatggtgaaattcacccaagcagctacctgtctcacccacttcccttctgagattggccacaaagtatcaccatatctttcccata

SEQ ID NO: 332636 - DNA, 201 bp, Homo sapiens
gattgcttgaccccaggaattagagactgcagtgagccatgatcatgccactgcacaccagcctgagcaacagagcaaccccatctcttaaaaaaaaaaaagtgatcttcaggtaaagtacccaaaaatatacaatgatggaaaattgttaatggcctgccaaggctttatgaggctcaaagaataaagtatattttttgg

SEQ ID NO: 332637 - DNA, 201 bp, Homo sapiens
ctgttttatttcctttttttttttttttttttttgagacggagctcgctctgtcacccaggctggagtgcagtggcgcgctctcagctcactgtaacctckgcctcccgggttcaagcgattctcctgcctcagcctcctgagtagctaggactacaggcgtgtgccatcaagcccagctaatttttgtatctttaggaga

SEQ ID NO: 332638 - DNA, 201 bp, Homo sapiens
cgcctcccaggttcaagcgatcctcccacctcagcctcccgagtagctaggattacaggcaggtaccaccatgcctggctaatttttttttttttttttttaacggagatggggtttccatgtcgtccaggctggtctcaaactcctgacctcaagtgatctgcctgcctcagcctcccaaggtgctgggattataggcat

SEQ ID NO: 332639 - DNA, 201 bp, Homo sapiens
aaatattctgtgtctgcactaacccataggggagccccccagccgcatgtggcaattggacatttgaaatatacctgaataactaatttttttttttttttcctgaaacaaggtctttctctgtcacccaggctggagtgcagtggtgtaatcccagctcactgcagcctcaacctcctgggcttaagcaatcctcccact

SEQ ID NO: 332640 - DNA, 201 bp, Homo sapiens
gaaatattctgtgtctgcactaacccataggggagccccccagccgcatgtggcaattggacatttgaaatatacctgaataactaatttttttttttttttcctgaaacaaggtctttctctgtcacccaggctggagtgcagtggtgtaatcccagctcactgcagcctcaacctcctgggcttaagcaatcctcccac

SEQ ID NO: 332641 - DNA, 201 bp, Homo sapiens
tttgtaggtgggaaacattgttgtaacaagtgaaaactccagcaaggaaattcagttgtctagttaggtgtctccaaagtctaattagaggggctacaacrtatacctgtgacctgtttcttcagaagccactttggaggaaaacatcctctcaggaggactgtccaaaagaatattctgcaattctggaaatattctgtg

SEQ ID NO: 332642 - DNA, 201 bp, Homo sapiens
gtttgaaatcaggattgccctacaaaatctggaatctgtagacagcacccaatggcattagaagtttaacgttaataaaatgcctttcattgagtgcctgrtatgtgtcccacatgtgctaggcactttccatgtgcaactctaactctcatggtctttattgtgcccctactgtttacaaagtgaggtgttgcctcttgc

SEQ ID NO: 332643 - DNA, 201 bp, Homo sapiens
caactagaatttatcatcccaaccagaacaatttgagaataaaaaggggtcctattaataattgcacatgactgacgggtctaagccgggactgccctagktaaatccggacgtgtggtcacgtccggatttaagagtgacttcgaggttgagatcagtgcagggtgagccagcatggaaaaccctctagcactaggaatc

SEQ ID NO: 332644 - DNA, 201 bp, Homo sapiens
cctggtgttccagttctctaccttctccagtgtggttggcaggtgggcgtcctggctgatgggggtgtacactggacaggagtaggaagaggaaggggctrttccccagcagggcccactgcaggtgtccacaccacccactccatggcacgaaagacctgccctggggtagccttaattcccttctgcgagagctggttt

SEQ ID NO: 332645 - DNA, 201 bp, Homo sapiens
ttttgttttattttttgaagggtgaacattctcaaaatttctttcaaaaggaaaaagttcttcatacatcagcgacagaaacaggtgagtagttatgtctytgcttgctttgtttcgtgcatatgtatgtgtgtggttagagacagggtctcgctatgttgcccaaactgagctcaggggatcctcctgcctcagcctccc

SEQ ID NO: 332646 - DNA, 201 bp, Homo sapiens
attttaagtagagatggggtttcaccatgttggccaagttagtctagaagtcctggcctcaagggatctgcccaccttggccccacaaagtgctgggattwcaggcatcagccaccatgcccggcccaaaagattgcatttttaaaaacggttttccaaatagtttgttgtttttgtttgtttgtttgttttttaaggaaa

SEQ ID NO: 332647 - DNA, 201 bp, Homo sapiens; identical to SEQ ID NO: 69819

SEQ ID NO: 332648 - DNA, 201 bp, Homo sapiens
tgccaaaagaagagataaaggcagagagacctaaagattccctactaattagcaacttggaataattagggcagggattctgaaaggtaacagtcttctcygtctgaatattgtgagcccactaaaggggaagtattatttaatttaaaaacaagagggttagagggagtcacattcaatggataagaataaaaacttgct

SEQ ID NO: 332649 - DNA, 201 bp, Homo sapiens
tttcagagagtccctattaataacccatgacacattaaaccttggagttgggcagtttgctccccttgttttgatcctgtgctcttcatcactggcagtgwggtttctgatgtaggcctgcctcagaggaaagagtctcccagtgatgctgttgtgagcattttgatcagggtgacaacagcatttcttaatgtgaattag

SEQ ID NO: 332650 - DNA, 201 bp, Homo sapiens
tcagactgttccagttactttcctaatacattgataatcattagggaacttgtaaactgaataagtagctaatttctgttagtatcagtgatactatttgyggtgctaaatgctatctctcagcttctgatgaaccaagagtgaatatattaagtttttagctcttataatactgtttagtatttgtatacattcagtaga

SEQ ID NO: 332651 - DNA, 201 bp, Homo sapiens
taatatataaatttttaaattctaatttagattaaaatttattctctaaataaaatgatgtacagtaaaagaaatggatgtacattgatatatataattcrtatatacattttaaaattctaattaagataaatttattctctaaatgaaataaccatgcagtttgtatttttgttttctttgttctaagactaccctcta

SEQ ID NO: 332652 - DNA, 201 bp, Homo sapiens
ggatgtaaatttatatatatttatgtataaatatatataatatataaatttttaaattctaatttagattaaaatttattctctaaataaaatgatgtacrgtaaaagaaatggatgtacattgatatatataattcatatatacattttaaaattctaattaagataaatttattctctaaatgaaataaccatgcagtt

SEQ ID NO: 332653 - DNA, 201 bp, Homo sapiens
agcagtaacacacactaggaagagtatctccagaaggggtgagcccagacactcttctcatccttagactattaacctgtagtcaccccaaaaaatttacktcacagttacatctaccaacagatcgttgaaaatagatgtgtattaggtaatatctaatatgtaatagaggtatattgctgatccatctgggggatgtcc

SEQ ID NO: 332654 - DNA, 201 bp, Homo sapiens
tatatgaagccaggggtggggggagtaagaggtccacagatacccatgggccaaacaaggcaaggtaagaactcaaaaggggagttgattctcctgactcsttctgcagaacaggaatttttgcatctgccagttggcacaggagaatcgtgaggagactcccccgacttcagggagatggcagagcagtaacacacacta

SEQ ID NO: 332655 - DNA, 201 bp, Homo sapiens
ctttgagcttctccagacctcagtttcattacctgacccatgaggataataagtgtctccttcaagggttgtagtgaagatgaaatgagtgactgtatgtraaactattagaatagtgcatggcacgtgtcaagtgttagctcttactgtattttcatgtctgcccagaagaaagctgtcagggaattgcctgttgtaaac

SEQ ID NO: 332656 - DNA, 201 bp, Homo sapiens
ggccagtcctaacaggatcagtcccaaccctgaactggctgctaggatctgccccaacctgtaaagttcagtgtgcaaggaaagacatcagaagagaagaygggatgagagaacaattgagggaacaataaaaggccacaagaatgcaaagggtgacaaaaactgatccctgggtcttccgcacaccccatacaagtttgc

SEQ ID NO: 332657 - DNA, 201 bp, Homo sapiens
ccgggaggaggagcttgcagtgagccgagatcacgccactgtactccagcctgggggacagagcaagactctgtctcaaaaaaacaaacaaacaaacaaamaaaaaaactgtatccacaatagagcttcgtttgctattgtttaaaacattctaaagctataatggatttttaaactcatgcaaagaacaagcttggcttc

SEQ ID NO: 332658 - DNA, 201 bp, Homo sapiens
cagttcttctggattaggagtcggtcactccaagtgagcagatttatccctttctctgagagctgaaattttcagtatgtcccatttgtgttcacccataycatgcatttagtagagcaggactcacagcaggcgtatggcttgtcttccacccagcttgtggcttgtttcctctggtccagaaagacacatcctttcaga

SEQ ID NO: 332659 - DNA, 201 bp, Homo sapiens
gaagcaacccagggaaagttgagacctgtggaatttgggggtgtgctgtttgacactgcatcataatcagatttcctaaaactctttaaaaaaaaaaaaaagaacttctaacacaatctaatttttaaaaaactcaggaggatggcgttgtaagtcaggagagagtggtcacctgtggaagggagtgtctggaagaggaca

SEQ ID NO: 332660 - DNA, 201 bp, Homo sapiens
gtattctaaggccatccatccaaaacacaccctgaggttccctggaaacccactcctttagtcctcgtcttcctggctgttactttgagggctcccaaagrgaatgtgatcctgcgccacacctgaggatgctgaatcaccactgggggtgcggggacaggcaggttttaaaagctcctcaggtgattctgatgtgcacct

SEQ ID NO: 332661 - DNA, 201 bp, Homo sapiens
taaagccatccgatctcatgagactttttcaccaccacgagaacagtatgggggaaacctcccccatgattcagttgtctccccctggctccactcttgaygtggggattattacaatccaaggtgagatttgggtgggggacacagcaaaattatatcacctggtgtggcaaattctatacccaaattaggttccaccat

SEQ ID NO: 332662 - DNA, 201 bp, Homo sapiens
aaaaactgtgtttttaaattcccatagagttaataaaaaccactggtgagaaaggattaaagggaaaaagcagtcatatagaaaagaaaacataagccttsgagtcagatctgagttcttgtttgtgatctcgaacaaagcattgaacttgcaaaataagaatacaattaatatctcttacagggctgttgtgaaaatcac

SEQ ID NO: 332663 - DNA, 201 bp, Homo sapiens
gagctgtcaggtggggaaattggggtcagcctgggaaggcgatgctgagctggagccctaggaaccacaggaggcctgccaggccctcctacccctgtatwtgaagccaggggtggggggagtaagaggtccacagatacccatgggccaaacaaggcaaggtaagaactcaaaaggggagttgattctcctgactcgttc

SEQ ID NO: 332664 - DNA, 201 bp, Homo sapiens
tgagttcttgtttgtgatctcgaacaaagcattgaacttgcaaaataagaatacaattaatatctcttacagggctgttgtgaaaatcacatcagataccrtacaaatatgtctaatacatgactttagatatgcaaagattgtgttgtttgagatttttcgtagtgattacatgtgtagggaagtacctctgtaaatgaa

SEQ ID NO: 332665 - DNA, 201 bp, Homo sapiens
ctggagctggccatgggcatgaggagcagcaggagaggggccaggtcatggagggcttcacgggccataggagcctataggctcagttcttagtgctcttrtgagactctaggcattcctgcatgcagtgctcacagttacagtgatttacttccatgcatcattctttatgtggttcctgtctccctcactggattataa

SEQ ID NO: 332666 - DNA, 201 bp, Homo sapiens
aggggactagaaactagtaatttttgtaagaccattttatattatggttttaaaaggcaaaaaataggtataaattcatttttcaggtgacggtttaaggrgccaagatttctactacttaatctcaagtgttgctcaaattggagatagttactcatatatgatagtttttttaaaaagattatggtgatataattgtta

SEQ ID NO: 332667 - DNA, 201 bp, Homo sapiens
caggcctaggcccccaagaacagtgcaactagaatttatcatcccaaccagaacaatttgagaataaaaaggggtcctattaataattgcacatgactgaygggtctaagccgggactgccctaggtaaatccggacgtgtggtcacgtccggatttaagagtgacttcgaggttgagatcagtgcagggtgagccagcat

SEQ ID NO: 332668 - DNA, 201 bp, Homo sapiens
gcggaccctcgacttctatggagtagaactgcacagtggtagggtatgtattcttgttacgtcttggctcaaacattatgtttttattttaatctctgagmgtttgaaaaattctttgatgaaactatttctttttcattataacaggactttttaaaagatatttggaaggtttattaagtaatgctgaattttttgttg

SEQ ID NO: 332669 - DNA, 201 bp, Homo sapiens; identical to SEQ ID NO: 69822

SEQ ID NO: 332670 - DNA, 201 bp, Homo sapiens
ctaaaacaatcagaagcagaatcctgctatatcaacatagcgcggaccctcgacttctatggagtagaactgcacagtggtagggtatgtattcttgttaygtcttggctcaaacattatgtttttattttaatctctgagcgtttgaaaaattctttgatgaaactatttctttttcattataacaggactttttaaaag

SEQ ID NO: 332671 - DNA, 201 bp, Homo sapiens
agcccagtttaatcattccctgttctggaggtacagactctagggccatgctaactctgatttctctagattattaaagttttaccatcacatgatttcaratcattggaaatatgcttgcttctaaaagccttctccgaacaacagggttctgaggggttttgttttcaattaatagttagtataaagaaacaaacgtta

SEQ ID NO: 332672 - DNA, 201 bp, Homo sapiens
ttgtttgctataattagcttttgcatgtgttgctttctcacagataggaaaatggattacttaggagtttggagcatatagtatagtaagtaggtaagagyagggactatggtcagagtctagcctccaaattagcagctgagcaacagtggcagacccctttgggtctgtttccttatgtgtttagtggggataaaaagc

SEQ ID NO: 332673 - DNA, 201 bp, Homo sapiens
cagcagcttaatttatctgaaaatctcatcggcagcaatgccaggggcccagagagcccaggactggatccaggggaacagcggggttggatgttgccacrctcgtggcccggagctcctgtggctatttataggtcctctcctgaggagtcacaagagcctttttacttctgctttggacacagcattattgattatcca

SEQ ID NO: 332674 - DNA, 201 bp, Homo sapiens
tcaggttggagttgaatgaatagcaggtaaaagtctttccaagtacaacagccgggcagcttgaaatgctgtactttggaacctgggatataccctctctwtgctgcaaaacataaaatattatcaaccagaagaaagcatggaacttaaaatgacaaggtatttcccacataagcacttccttttttgtttgctataatt

SEQ ID NO: 332675 - DNA, 201 bp, Homo sapiens
atttgagagcaggactttgcctcctttcacaggcggcggggcggggaggtctttaattttctagggtttagggagagcttcgtgcgggagtgtctctttcwtgggagtgtttctttctgatgcctgctgcctttacagttcagaagcatgtgttttctggagggtgaatacttgtttgtctgcctgatggtcagtctgtgt

SEQ ID NO: 332676 - DNA, 201 bp, Homo sapiens
gctactcaggaggctgaggcaggagaatcgcttgaacccaggaagtggatgttgcagtgagctaagactgtgccactacactccagcctgggtgacagagygagactccatctcaatcattcaatcaatcaatggcacttagactggaaagtacctgcattgctgcctgatgggagcagaggtttgaaggacagcctctac

SEQ ID NO: 332677 - DNA, 201 bp, Homo sapiens
aaggggtcctattaataattgcacatgactgacgggtctaagccgggactgccctaggtaaatccggacgtgtggtcacgtccggatttaagagtgacttmgaggttgagatcagtgcagggtgagccagcatggaaaaccctctagcactaggaatcttctacctggataaagacaaaactaacctctgcatggcctgca

SEQ ID NO: 332678 - DNA, 201 bp, Homo sapiens
cttgtcaaatagttgtcataaagacaaggtttcacttaccatgctccattacctgagacccagacccttcctatggcattttttcaaattaaaaaaaaaaattattaaagagtttagtcagtttctcatggaactgtagaatttcttattgggaagattttcttttagtatataacacataatcactttaaaatgttaaga

SEQ ID NO: 332679 - DNA, 201 bp, Homo sapiens
ctcattgacataattcagataattcagaaataaccaaagtaaaatagtctcctgactcctatccccttcagtttcttccctccacttttttttttttttttaaattgagatggagtctcgctctgttgcccagcctggagtgcagtggcgcgatctcggctcactgcaagctctgcctccctggttcacgccattctcctg

SEQ ID NO: 332680 - DNA, 201 bp, Homo sapiens
cttacccctcccttctcttcacttcccacatccactcaccacggtctgccgctgccagtctcccctctctgtcccccaaaccctcaccttctctcagagcytttgcatttctcttccaggagcagcagcagcagcctccttagtggcttcctggcctagaggctcccccagcccccgtcttgtccatcccttggcacagct

SEQ ID NO: 332681 - DNA, 201 bp, Homo sapiens
aagtttgaagcctccctgtaccaaagactcacatttattggtacctccatgttgttgatgctgtgagctactcgtttttttgtttgtttgtttgtttgtttaacttaaaaaactttgttttgtttttattttaaaatgtttacagggaggagtggatcaaaagatgcctcttgtggtatcaaggataaacccagagtcacc

SEQ ID NO: 332682 - DNA, 201 bp, Homo sapiens
taatggcaagtaccatagcagcaaatggaggagatcactgggcagaggagatcactgggcagaagtgatcaaggaaggcagccctgcaggacaggcccacrgctgagcctgagaggggatggggatctttggggaaggaggggaggaattgctaggggccacagcagggctgtgcgcagagggagaaagcatcaggagaca

SEQ ID NO: 332683 - DNA, 201 bp, Homo sapiens
tgtggtatagcagaatcaaagatctcattactctaattctggttttgtcaccagctgtgtgacctaaggcaagtcacctctaattggcttatctgtaaaakggggctaccagtagcagcgtagcccactcatagtcatggtggtgttgaaatgcaggaatgtacatgaaaatgcttgaaacttataaatggctacacaaac

SEQ ID NO: 332684 - DNA, 201 bp, Homo sapiens
gaagtttgaagcctccctgtaccaaagactcacatttattggtacctccatgttgttgatgctgtgagctactcgtttttttgtttgtttgtttgtttgtttaacttaaaaaactttgttttgtttttattttaaaatgtttacagggaggagtggatcaaaagatgcctcttgtggtatcaaggataaacccagagtcac

SEQ ID NO: 332685 - DNA, 201 bp, Homo sapiens
tgaagtttgaagcctccctgtaccaaagactcacatttattggtacctccatgttgttgatgctgtgagctactcgtttttttgtttgtttgtttgtttgtttaacttaaaaaactttgttttgtttttattttaaaatgtttacagggaggagtggatcaaaagatgcctcttgtggtatcaaggataaacccagagtca

SEQ ID NO: 332686 - DNA, 201 bp, Homo sapiens
cagaactccaacccctgcctccatcttcacgtggccctctcctctgtgcttctatcttcttctcttctgtctcctataaggacacctgtcattgtatttarggcccacccgggtaatccaggatctaatctccagatccttaagttaattacatccgcaaagatgttcttttgacatgtggtcacattcacaggttccagg

SEQ ID NO: 332687 - DNA, 201 bp, Homo sapiens
ccaggtcagtggagcctgacaaggaagggaaggagggagggagtgagtgacggagggagggagcccttcggggaggggccaggcttaatgcaaggagatascacatcccaaggagccccctttcctactgtaaccacattctgctgagagctcacatgtatcacctcactcaaccttcccaagcaccctgttagtccattt

SEQ ID NO: 332688 - DNA, 201 bp, Homo sapiens
ataacctaatcattctacaagcactgtattatgggtctggggagtcagcagaagagaagaacagagggctaggagatactataacaagtgatctaactgasaacttttattattttattagaatattatattttattatatttttaacagcagattattgtattagttgaacatcaaatgttattggcattccgtcaagac

SEQ ID NO: 332689 - DNA, 201 bp, Homo sapiens
cggcggcggcctaaaacaacagaaatgtattcttgcaccgctctggatgccacaattctgagcacccccttgcaggctccaagggagaacccatcctctcrccgcttccagcctctggtggccgcagaactccaacccctgcctccatcttcacgtggccctctcctctgtgcttctatcttcttctcttctgtctcctat

SEQ ID NO: 332690 - DNA, 201 bp, Homo sapiens
aaaacaccttaatgcggaatgacggccaggggcacaccgctctgcctctgcctccccacatttcctctcctctcacaccagcttccccgcacggagtctcrtcagaatggctccggagcatggcatttgtttgaccatctcattaccagagagagagagagagagagagacacactgagagagaagagaaaaacaacacaa

SEQ ID NO: 332691 - DNA, 201 bp, Homo sapiens
agtatcgggtctataaatggagataaagatcagcacctggagggagtggtttctcgagggctgagagcctcgcccacaaactgtagtcagcatcttcactraagttggcctgtcttggatatttcttctctcctccccttcccccacctcccctcctaattcatcaactgctgaaacatctgcctggctgaaaccgccttc

SEQ ID NO: 332692 - DNA, 201 bp, Homo sapiens
gatgggtgcagcacaccaacatggcacatgtatacatatgtaactaacctgcacattgtgcacatgtaccctaaaacttaaagtataataaaaaaaaaaaatagaggctagaacaagtcaaagatggcagcttggaagaacaaagattaatcaagagaagatgaagcattgagattaatcatttcaatgaagtaaaataaa

SEQ ID NO: 332693 - DNA, 201 bp, Homo sapiens
tgatgggtgcagcacaccaacatggcacatgtatacatatgtaactaacctgcacattgtgcacatgtaccctaaaacttaaagtataataaaaaaaaaaaatagaggctagaacaagtcaaagatggcagcttggaagaacaaagattaatcaagagaagatgaagcattgagattaatcatttcaatgaagtaaaataa

SEQ ID NO: 332694 - DNA, 201 bp, Homo sapiens
cacaggctgcaggggaagagtgaaggctgggacactctgaccctcatacccccacatccaaagcttcgcacccttctagctgcagggctgtgaggtttagyacacatgcatagtacacaacctacactgatgcgccacccaatagatctcaacaagaataggtcaagaagaggtctccatgtgtgtgccaaagagtatgtg

SEQ ID NO: 332695 - DNA, 201 bp, Homo sapiens
agggggagagagagcagacacaggagagcactgtaagagctgttgtagaacaatgagcatactgctgtgtagagagagggagcacagagggaaaggagccyggaactctacttgcaggaggttacaccagagagggcacttcaggggaagcttcacagaggagagggtagcctttgaatacttgctgctgtttccccaact

SEQ ID NO: 332696 - DNA, 201 bp, Homo sapiens
gaggctggaaagtccaacatcaaagtaccagcaggttcagttcttggtgagagcttgtttcttggcttgcagatggccgtcttcttgccatattctcccayggcagaaagcagagagacagaggcaagctctggtgtctcatgtctcttcttataaggtcaccaatctcattcaagaacgccccaccctcatgacataatt

SEQ ID NO: 332697 - DNA, 201 bp, Homo sapiens
aggatcatgttgcctttttctccggcaggtgcaacctggccccagtacaggagtatgcccgggatgtggggctcaagacagacctggtaaccatgaacccstcggtcatccagcgggcctttgaggacttggtcaatgccacgtggcgggagaagctgctgcaacggctgcacagcctcaatggcagcatcctgtggatcc

SEQ ID NO: 332698 - DNA, 201 bp, Homo sapiens
aaagacaaagccatgccaacattaaatgaggtgctgacattaatttaggggtgtggtctgttctatcactatgatcctaactgcagctttcaggtacaggragacagagaaatgtacctattttgctcaggcctagaaactgaggcctgagatcaagccaaacccacagcattagacttcgtaggtgagtgatccagccag

SEQ ID NO: 332699 - DNA, 201 bp, Homo sapiens
attccaggttccactcttgatgcttgcctgggattcttgccctttcctgaaacacagtcaccagtggtgactcaggcagaggctcagtcaggcttccccamtcattggttttgttttgttggatatgattttttgctgctgtgggatgcaggataatcatggtggtgtatgggaggcaaagacaggaattatcaagggaca

SEQ ID NO: 332700 - DNA, 201 bp, Homo sapiens
gactggtaatgagcaaaccatcaccttgaatagcctctgagaggtacacagtgaagggccagaggatgacagaaacagaaagagggtctgaggaccagaaragaacaggaaatgttcactgagcactaactagacgctttacatgggctagatcatttaattctcatagctacccatttgaggttgacattattattattc

SEQ ID NO: 332701 - DNA, 201 bp, Homo sapiens
tcacccctgctcccaggttctccaggcaagaaactaggggccaggtggccgatttgggcgtttagaccactgggcaagacaccagagcctcactgcactgytgtttctgtggcagctactttgggtgactggctttcctctcttgttttccacagacacatcctcgacccaaagcagatattctgtgtagctgatgtgtgt

SEQ ID NO: 332702 - DNA, 201 bp, Homo sapiens
gctcatatacctgctccttgtagagtttcttatcaatagcttgaataagaaatattactcttctgacagtgactgccaggttttaccaggaaaaaaaaaawcactaggggcaggggaagaagaataagtttatcaccctccttcctgtctccaacaatgtatgtaggttataccttagggacagagtttctgcattactgg

SEQ ID NO: 332703 - DNA, 201 bp, Homo sapiens
gggtgtgcctttgacttcccaaactgctctgcaagcatgaagctctcagctctgtccaagggtttcccagtgccttttttttttattattgaaggaatgcrgagggactcagctttgcttcctggaccttttttaaggttcagggaaacaattcctcctcctcctcctccagcttcttagttgatggccaaaggatgaaag

SEQ ID NO: 332704 - DNA, 201 bp, Homo sapiens
gtcttggatatttcttctctcctccccttcccccacctcccctcctaattcatcaactgctgaaacatctgcctggctgaaaccgccttctcgccgcgcgmtgggggctgtccccaggtgttggtctttgtgtcgagaaaactttgcgaggaggcgagggagctggacaaagagcgggcgagggagggcgtttgccagcct

SEQ ID NO: 332705 - DNA, 201 bp, Homo sapiens
acacgacatgtgtctgtattacacgttggcagtcgaggttcctcctgacactttcaagcacttgggatcccgattcactcccctgggaaatccagcatccmgcctcgctgtgtgggtgtgcctttgacttcccaaactgctctgcaagcatgaagctctcagctctgtccaagggtttcccagtgccttttttttttatta

SEQ ID NO: 332706 - DNA, 201 bp, Homo sapiens
ggctccaactggggagagcagcggccccgacacgacatgtgtctgtattacacgttggcagtcgaggttcctcctgacactttcaagcacttgggatcccrattcactcccctgggaaatccagcatccagcctcgctgtgtgggtgtgcctttgacttcccaaactgctctgcaagcatgaagctctcagctctgtccaa

SEQ ID NO: 332707 - DNA, 201 bp, Homo sapiens
acatcactagatatgctgtgtgagaatctaaactttctttttctaaaccactgagaactgtttgttgtttatttcaaaacataagtctagtctctcctagytaacacaaaaccacacacacagaatttttaatcaccattttggtgcataatgttaaatgagtactcaaggatcaccagagttctgagaaaagtctctaat

SEQ ID NO: 332708 - DNA, 201 bp, Homo sapiens
ccaagggtgagctggtacctttttgtacaccaataaaagctgattaacaagcaaaagtttgctggaatcgaagcaaaaagataaatccaatcaagctaatrtttaaattgaaggcagaagggatggcaagaaaagaactgagcagtcaataaggagagctcaggagtcatcataaaaagagagacacccaaaattctcccc

SEQ ID NO: 332709 - DNA, 201 bp, Homo sapiens
gttgagattagtcactctcttgggtggcatctgggctggttttaaattctctttagtctcctgcaatttatcacccagctaggaagctgcccggtgtcctracgggacctgtgtgtcccatgttttctcagctttggctgtcactgacttcgcgacgatggcaaggaggaaacggctccaactggggagagcagcggcccc

SEQ ID NO: 332710 - DNA, 201 bp, Homo sapiens
ccaacagccccaaattctaagacgaagtcctcagctctccaatactgcagagatggtgtctcattctgagatatcctgcagcacaccagaggcctcaacastgttcccaaagaaaggacagccgtgggctgtagggcccctggatcacggctgaggctgccaatgcagaggacaggagagcaggagcccgaaagttctgtt

SEQ ID NO: 332711 - DNA, 201 bp, Homo sapiens
tcctgagttcaagcgattctcctgcctcagcctccggagtagctaggattacaggcgtgcaccaccacgcccagctaattttttgtattttgattagagayggggtttcaccatgttggccaggatggtctcgatctattgacttcgtgatctgcctgccttggcctcccaaagtgctgggattacaagtatgagccactg

SEQ ID NO: 332712 - DNA, 201 bp, Homo sapiens
ctgccagtttaggtaaaaaccaaagatctagagcccagatgccaagcctctgccggctgttggttctccagagagccctttccagccctccactgcccacrgtgctgctgaggctgccccctcctgcctggaaggacagccggccccgtctaccttaatccccttcagggcttccatagtggcgttgagagcagaccagga

SEQ ID NO: 332713 - DNA, 201 bp, Homo sapiens
ccatttttgtattgcttacaggttccccaaaatgtcctaggatttcatacctctgtgcctttgcacatcccgctcctgctctgtggaatgccctccttgcrcacacaccatccttcctgctgttgccctgctcctcccaggcccttcctttctctcactgctctgtcttcttccaggctaagatctggtatctcctagacc

SEQ ID NO: 332714 - DNA, 201 bp, Homo sapiens
tttgggacctgtgcagggctggggaattgaaaggcatgagctctggggacctagcagctgagaaaccatctgaagtagctgactccctgccaccctgcactccttacttaccgcctcttcagaggcctcctggtggccctccatccccctcacgaagccctaacaaccgccccctttgatcagggacaccgtggagtcagc

SEQ ID NO: 332715 - DNA, 201 bp, Homo sapiens
gtgcacgtggatgggaaagaaaatgaccttgagcagttgcagtccaggcactctgtaagaagtacacgtttgctcaacacgatgcatttttttttaaaaaagcccattcttctccctagtactggtgtacttcactgaagtataagcatgattggaagataaaataggagagaaagatctggttttaactcacttgctcca

SEQ ID NO: 332716 - DNA, 201 bp, Homo sapiens
ataccagctactcgggaggctgaggcaggagaatggcttgaaacctgggaggaagaggttgcagtgagccaagatcacgccattgcactccagcctgggcracagagcgagactccatctcaaaaaaagaaaaaagaaaagaaaaagaaagaaagaaactcactgagccttgggacaagaagagagcatagggctctccct

SEQ ID NO: 332717 - DNA, 201 bp, Homo sapiens
gctttggtaaaataggccctgatcaattcatgcacactcccaagttttagatccaattcgaccaagttgtaagctaaaatcttctgattgtttcttggccyttaatcttgagtgtaacttccactaggggattgtgaggcgtagctgtcttgcccatcatggtgtccatggaactgggcacacaaggcattcaataaacat

SEQ ID NO: 332718 - DNA, 201 bp, Homo sapiens
agaagcaatggcaacaaaagccaaaattgacaaatgggatctaattaaactaaagagcttctgcacagcaaaagaaactaccatcagagtgaacaggcaamctacagaatgggagaaaatttttgcaatctactcgtctgacaaagggctaatatccagaatctacaatgaactcaaacaaatctacaagaaaaaaacaaa

SEQ ID NO: 332719 - DNA, 201 bp, Homo sapiens
atttttattagagacggggtttcaccatgttggccaggctggtctcaatcacctcaggggatctgcccacctcagcctcccaaagtgctgggattacaggygtgagccacccctcccggcacaagtgaggttttaacactaaattcattcttggaattaccccaactttgggcagctgggctcagtgcccaataagagcct

SEQ ID NO: 332720 - DNA, 201 bp, Homo sapiens
gaacagagccctcagaaataatgccgcatatctacaaccatctgatctttgacaaacctgacaaaaacaagaaatggggaaatgattccctatttaataartggtgctgggaaaactggctagccatatgttgaaagctgaaactggatcccttcctcacaccttatacaaaaattaattcaagatgcattaaagacttaa

SEQ ID NO: 332721 - DNA, 201 bp, Homo sapiens
acaaggctacagtaaccaaaacagcatggtactggtaccaaaacagagatatagaccaatggaacagaacagagccctcagaaataatgccgcatatctamaaccatctgatctttgacaaacctgacaaaaacaagaaatggggaaatgattccctatttaataaatggtgctgggaaaactggctagccatatgttgaa

SEQ ID NO: 332722 - DNA, 201 bp, Homo sapiens
aagaaccaatatcatgaaaatggccatactgcccaaggtaatttatagattcaatgccatccccatcaagctaccaatgactttcttcacagaattggaaraaactactttaaagttcagatggaaccaaaaagagcccgcattgccaagtcaatcctaagccaaaagaacaaagctggaggcatcacactacctgacttc

SEQ ID NO: 332723 - DNA, 201 bp, Homo sapiens
ccttttctgcatctattgagataatcatatggtttttgtcattggttctgtttatatgctggattacgtttattggtttgcgtatgttgaaccagccttgmatcccagggatgaagcccacttgatcatggtggataagcttcttgatgtgctgctggattcggtttgccagtattttattgaggatttttgcatcgatgt

SEQ ID NO: 332724 - DNA, 201 bp, Homo sapiens
tcctccctaacaacgtgaaaatgaaaacctagagccataggggcatccggagaacccaggaactgacatgacacccgaccagaaagcagaggtctgtttarccagagagcagctctcgtcctgatctgtgcagagtgatgttttcagagcactgcagccatcatcgggtagtggcaatggggaaccgtagagaaggaatta

SEQ ID NO: 332725 - DNA, 201 bp, Homo sapiens
ttcccaggcataaagagtccttacttgttggggtctgcctgggagtcacatcccctttcagtgacagtcctccagtttgttcctggagagctgctccctcyctcagcccttgggcttgtataggctgctcctccctaacaacgtgaaaatgaaaacctagagccataggggcatccggagaacccaggaactgacatgaca

SEQ ID NO: 332726 - DNA, 201 bp, Homo sapiens
aatgagtcaagtaaccagccatcataccttccacttgttgagtgtctgctgtgtgccagctatggcatcgagcactttgattaggccactcattcctccaycaccccctgtgaggctggtgttatttatctctattttatggacaaggcccatggcttgtcccatagctagtaagtggcagaacagggatcaaactcaggt

SEQ ID NO: 332727 - DNA, 201 bp, Homo sapiens
ctggcctcagccccagtgtttgttagccaggaccttaggcaagtgattttacccctctgagccttggcttccccatttaattagaataatactgcagtgtmttctttgaggagtgtttaaggattagaaccaccaaatgtaagaatctatctaacccaacacctgatatgttaaaggtacttatttgatgcttgttactac

SEQ ID NO: 332728 - DNA, 201 bp, Homo sapiens
tctggcttctgagagtttcctttcctgattccaggctgggctcggttttgtctggtgggtttttttgccactgccgttgtgttagtggcatccaggtctcyggattactgcatgcttgcagtgggaggaaaggcctgtctaccatgttctctgcctccccttcatgttctgtgaggagaggggccttgtctggcatgttca

SEQ ID NO: 332729 - DNA, 201 bp, Homo sapiens
gcatgcttgcagtgggaggaaaggcctgtctaccatgttctctgcctccccttcatgttctgtgaggagaggggccttgtctggcatgttcaccgaggcaktcctgaccactagaactgtgcttggcacagagtaggcacttaataaactcctgctgcatgaacaaaagaacaagtgtggatgcttcaaaggaagacttgc

SEQ ID NO: 332730 - DNA, 201 bp, Homo sapiens; identical to SEQ ID NO: 69862

SEQ ID NO: 332731 - DNA, 201 bp, Homo sapiens
gccactgccgttgtgttagtggcatccaggtctccggattactgcatgcttgcagtgggaggaaaggcctgtctaccatgttctctgcctccccttcatgytctgtgaggagaggggccttgtctggcatgttcaccgaggcattcctgaccactagaactgtgcttggcacagagtaggcacttaataaactcctgctgc

SEQ ID NO: 332732 - DNA, 201 bp, Homo sapiens
tgagagtttcctttcctgattccaggctgggctcggttttgtctggtgggtttttttgccactgccgttgtgttagtggcatccaggtctccggattactrcatgcttgcagtgggaggaaaggcctgtctaccatgttctctgcctccccttcatgttctgtgaggagaggggccttgtctggcatgttcaccgaggcat

SEQ ID NO: 332733 - DNA, 201 bp, Homo sapiens
cacacaagtttaaacatctctggaagctgatcacggacatcttcctggctcacggtcagaactgagaaacaatgacatatctgctcactagtttatggtcyacctccacttctaggatgttccaggggtacttgttttccacaggggtcacctatgccctggaaggtggaagtggccctcctccaaagtaattgttgatga

SEQ ID NO: 332734 - DNA, 201 bp, Homo sapiens
ttacccaggaggctctttcctggcttgtgcaggctttagaactccaccccctagccccaccccaaagacctttatgagctcagctggacattggaaccackggaggagctttaaaacctcctgaaacctaggtctggccttcagggaatctgattccttggtctggggtatggcccgggcatctcctgaagctcaccaggt

SEQ ID NO: 332735 - DNA, 201 bp, Homo sapiens
agccatttttataattgcacacattaagcaaactataccaacctagataatcacatatggtgcaggtcaaggggacccaagcctgaatcacttccaagagraagaattagtggagcccttcagacagaagtggcctttcttttgtagcagaccacaaggcatgtgcacagggactgtgccttgtttgttgcttgattggaa

SEQ ID NO: 332736 - DNA, 201 bp, Homo sapiens
ctcagcagtgctccaagtaatttgcatgcacagcgttatgtttgagaaccactgctacccacaaagtcaaaaccaatgaacctcccaggggcaaacttgcrgtcagaccactgagcagctggccatgatcttctccaaatcatgcagaattagagaagggaatcagggacaggcaatctctgtcccaattttctaaacagg

SEQ ID NO: 332737 - DNA, 201 bp, Homo sapiens
atggatgcgtatttcttgcttggaagcagatctgtggaaagctaccaggcttattggttacaagagccatttttataattgcacacattaagcaaactatrccaacctagataatcacatatggtgcaggtcaaggggacccaagcctgaatcacttccaagagaaagaattagtggagcccttcagacagaagtggcctt

SEQ ID NO: 332738 - DNA, 201 bp, Homo sapiens
cttgggtggtgactcagaaaggctcagaaatacagtcacacattctgcatgctgctctcgatggcttgccacaggacatgtaggaaaacagctgaggggcrcatactaccatagtgaacgcttacatgccgcacgccatgccaagtagcattatctcatgtcatgagaggactactgccattatccccattttaaagatag

SEQ ID NO: 332739 - DNA, 201 bp, Homo sapiens
catatggagtgaaggctttgtgcttcttacgatccattcttggttgtcttagttccatggttttcaagactattttggcaacctattttatttttccccaratgaaattagcaaacagaattccttcatttgaagaaagcatggggtggggaggtggcggtgggggagactcatggctcttcttctccccataaggagaaa

SEQ ID NO: 332740 - DNA, 201 bp, Homo sapiens
ataatgtacgtgaaatgcgtagtaaaattgcggtagaaacatttaatgttatcatcaatcatcgctatctttatgtctcagtgcaatattctctaactctrcagagcacatcttactgattgggctgagatcttcaaaggagcgtctcttaggatatgtttttgtccacaaggtcttctctctaagatggaggggaacttt

SEQ ID NO: 332741 - DNA, 201 bp, Homo sapiens
caatttgtttccaagtgtctttattttctaaaatgagactgtaatggtggagctgctggacaaagtcaatgaagggatgactggcccgtcagaatcatgartgcttaacagaagctgtgtgttccagggaagaccactctgaggcaagctgttttactgcattctcattccagtggcctaggtgggcaagaatataactca

SEQ ID NO: 332742 - DNA, 201 bp, Homo sapiens
atgtgtactgcctcatgaatgtccttaatgctatccccaatgacactgacagcctgccccagcctctgtctctcaccaacactgccgaatgtcatctcttstcatctttatctctattctttgcttcctgtcttcagggctcttcccttggcattcaccaggagcagagtgagcccagagagctgagtggtatcccttctt

SEQ ID NO: 332743 - DNA, 201 bp, Homo sapiens
ccggatgtgggcactgcccggctcagatcacttgctgacctttgcccatgtgagagggaaggcccggcgctgcccattgtcctgttataaaaacataagtkctgtgcttatccaggcacccctaggtcagccattcactgaattcttaccaaataccttccacatgctgggaacttttaatttttaaaatgcaatcaggag

SEQ ID NO: 332744 - DNA, 201 bp, Homo sapiens
tggtgatgatgatggtgatagagatgttgaaaagcggtaagcgcctgctctgtgccatgcatcacactacacgtgacgcaccagttgtccgagttcattcytacagtcccttcatgagattggcactgtcctccctacttcacagatgaagaagctggagttcaaagagtaagctgtcaaggtcacgaagacagaaagtgg

SEQ ID NO: 332745 - DNA, 201 bp, Homo sapiens
ggatccaggaggtccacaccctataaaatgtttgggctgtgtctggggccaggactttgcccattctgcagagtccagaatgaggtctcttccaccctctrtagttttccaggtgggctatgggatctcctggcaattgaagagggctttgcaaagatgagctgggtttataaataatgcatttcctttgtcttgcaggaa

SEQ ID NO: 332746 - DNA, 201 bp, Homo sapiens
gtgcgcacttgaggcgcgggacgcaccggctgtgtgtcccaggggctgagactcgcgccccgccccgcagccttcggctcgccgggccgggcccctctccrgaacctccaaagggcggtagacgacaggtggggaggcagccggggttctgaggaggcccgaggagagcttcctggccctgggcaaggggaaggtgaggtc

SEQ ID NO: 332747 - DNA, 201 bp, Homo sapiens
ggtcagagatgggtatcagagagggggtcctgcagcagggacagcaaggaaatctgaagacgctcaggaggcaaggatggaatcaggaatgcagatccgcraggggacgccctgtgggactcttggaaaggcagcaggcaccacacaagagccagtggtttctcagaggtcagcaaactgctgctcaagggccaagtctgg

SEQ ID NO: 332748 - DNA, 201 bp, Homo sapiens
gcacggccgctttctcgccttggcaaagtgggcagggggcgcgcagggatctctgagctgggggaggggttcctcgggccggagcggagggcggggttctscatgggctactgggaagcggaatgtcccctgcacacacagacaggcacacgcgcctcccgccggcccgggagcccggcgtaggagctggcaccactagag

SEQ ID NO: 332749 - DNA, 201 bp, Homo sapiens
actataattttctctaaaatatcagctctcattttccagttgcctgggacatttgcacacaaggttgcccatggccctgccacctgacccccaacccactrcagtcatggaaacaaggctttgctgtctccaggtcaaaattagggcacgcggagcctcgagtttcattccagccggctccccagccctggcagaaccgca

SEQ ID NO: 332750 - DNA, 201 bp, Homo sapiens
aaaaaaatcactaggggcaggggaagaagaataagtttatcaccctccttcctgtctccaacaatgtatgtaggttataccttagggacagagtttctgcrttactggaagataaatagacttccttctcttctcaggtaataactgcaattttgctcttctggagaagtttacattcaagcccgtgcaaaaacaaaacta

SEQ ID NO: 332751 - DNA, 201 bp, Homo sapiens
gggaggcaggagtttctttgtctccagcacggccgctttctcgccttggcaaagtgggcagggggcgcgcagggatctctgagctgggggaggggttcctsgggccggagcggagggcggggttctgcatgggctactgggaagcggaatgtcccctgcacacacagacaggcacacgcgcctcccgccggcccgggagcc

SEQ ID NO: 332752 - DNA, 201 bp, Homo sapiens
tttgctgatcccctgaggtagagcctggtacaaaaggttggtaagaaaatctcctgggctggccagttgttggttcaagtttgcaaaactctttgtaagtrtcttgggagggggtgccctactagtgactttattaccctgttctcaaaatctgggaagtgcgggagtaacagagaaacttgaattttgtacctgactata

SEQ ID NO: 332753 - DNA, 201 bp, Homo sapiens
tagtctcagctacttgggaggctgaggtgggagaatcagctgagcccgggaagtcgaggctatggtgagccatgatcacgccactgcactctagtctgggygacaggagtgagaccctacctcaaaaaaaaaaaaaaaaaaaaaggcttcggtagagtgcctggcacatggaggggctcaagggaatgaagttcttaatat

SEQ ID NO: 332754 - DNA, 201 bp, Homo sapiens
tagccattcattttcatccccgtcagaggatggccctaaatccccctaagacagtgagggtaatgtaagctcaccaaatgtctgggtgtgccccagactgkggggctttcagggacatggggctttcagtgcccgagccaggcagtcctggggaaactggggtggtgggccacccttccttctggggcccgctgtgaggag

SEQ ID NO: 332755 - DNA, 201 bp, Homo sapiens
gtaattgttgatgactctgcctggggtgctggcaacaggcttgcaatgtgaccatatccctggtgctctcagcaggtacaggccagctttgaatttcccarggatgacactttaccccctgcagctccagataaatgtccagcatttttacccattagctgagctagtgggtggaatttttccagtccccatttgacccac

SEQ ID NO: 332756 - DNA, 201 bp, Homo sapiens
ctgagccatccagccccagatcatagtttctctagaatcgtcctagctgtctgcagccaaagcccaatagaaccacccaacaaagagcactaaaggtcccytgtggcctttctcagtcttcctcaccatttcctcagccacctttccctagaacctgggggatgggaaatggggctactgtgggcttccaagaaccatgcc

SEQ ID NO: 332757 - DNA, 201 bp, Homo sapiens
tccagacatgtgtactgcctcatgaatgtccttaatgctatccccaatgacactgacagcctgccccagcctctgtctctcaccaacactgccgaatgtcrtctcttctcatctttatctctattctttgcttcctgtcttcagggctcttcccttggcattcaccaggagcagagtgagcccagagagctgagtggtatc

SEQ ID NO: 332758 - DNA, 201 bp, Homo sapiens
tcgacccagtctaaagtgggtgccattcacggaggagagggaggttggagacttcaaccgggcaaaggagcacaaggaaaccaagcagcagaggccccatsagcacagagggcctcgttccacgaacgtagagtttgactgcctaagggacagcacgaatgactcacatgtttcagacaggcctccacggctatggagaga

SEQ ID NO: 332759 - DNA, 201 bp, Homo sapiens
ggcagaaggcaggctgctgggcaggataaaatttttgtcttcctggaaaggatgactcacagacccatgtttcttttctttttttttttttttttttttttccagatactggctgaccaacaaagtccacatcaaaagacccaccaccggcctcttgatgtataccctggccacacgtttctgcaaacaaatctacctcta

SEQ ID NO: 332760 - DNA, 201 bp, Homo sapiens
tgtccgagttcattcttacagtcccttcatgagattggcactgtcctccctacttcacagatgaagaagctggagttcaaagagtaagctgtcaaggtcaygaagacagaaagtggcagcccaggatataaacgccagtgttcctgccccacagcccaggcggagattaaagaggaaaagttggcatggctgtccctctga

SEQ ID NO: 332761 - DNA, 201 bp, Homo sapiens
atgtggagcagggagagatttcggagaaatgcctggggggctactaggtggaggacagatcacggtgatgggctgccactgcagagacttctgagagagagcacagggaagaaatgacgaagatctcagtgtccacaaacacttgctcctgttatttttcaattgcactgtgtttgcagttaccagccagagccattgccc

SEQ ID NO: 332762 - DNA, 201 bp, Homo sapiens
atggagacataaccagacgctctctctgaggatcaggtactggtaattacctacaggacaagaggtagacttggtcttgagcatacacgggcaaattgctkctcttcgtcatctaaagaagtcaggatagaaataaaatgtttacctcccactgaggcaggtttcatctgtaagtgatcaatcggaaataaaaacccgaga

SEQ ID NO: 332763 - DNA, 201 bp, Homo sapiens
tatgtggagcagggagagatttcggagaaatgcctggggggctactaggtggaggacagatcacggtgatgggctgccactgcagagacttctgagagagagcacagggaagaaatgacgaagatctcagtgtccacaaacacttgctcctgttatttttcaattgcactgtgtttgcagttaccagccagagccattgcc

SEQ ID NO: 332764 - DNA, 201 bp, Homo sapiens
tggtaggtgagggtaagatgctgagagagggccagatctcagctgggtgatacagagggaagggaggagctgtgcagtgtggttaggaaggtttggagagmgagaaaggggcatgaaatgggcctttcaaacgagacatttagcccagagctcagagcaaagtggagacatgggccagttatctaataaccctgatcacaa

SEQ ID NO: 332765 - DNA, 201 bp, Homo sapiens
gggcacacgtgcagccccagctactgctcagtcactgaactacaccctacccactcccgagttcctggtgatgatgatggtgatagagatgttgaaaagcrgtaagcgcctgctctgtgccatgcatcacactacacgtgacgcaccagttgtccgagttcattcttacagtcccttcatgagattggcactgtcctccct

SEQ ID NO: 332766 - DNA, 201 bp, Homo sapiens
ctcaagagagtgatggggctgccagggaggagggtgaagccacaggctacaatgacattgtcctggtatgagttcttgttttctcttttaagtttgtaagmccatcatttgatactttgttgctcatatacctgctccttgtagagtttcttatcaatagcttgaataagaaatattactcttctgacagtgactgccagg

SEQ ID NO: 332767 - DNA, 201 bp, Homo sapiens
aaaactctgtgtggggaacacaagcttgtaagtcctggtgggacacatggcacgcaaaatgcaactatcttgcaaaacctagtgcctcctagggagtccarggcaggcttccggcagaagcggcattggagtgtggcttgcctttgaccagtaaaagtggtgaggaggaggaaacagcatgaagaggggtgtggaagcaag

SEQ ID NO: 332768 - DNA, 201 bp, Homo sapiens
ttaatctctttaaactttagttgcctcttcagggaaatatgagtgggaatggtaacattggaggatgtgaagactaaatgagataatgtacgtgaaatgcstagtaaaattgcggtagaaacatttaatgttatcatcaatcatcgctatctttatgtctcagtgcaatattctctaactctacagagcacatcttactga

SEQ ID NO: 332769 - DNA, 201 bp, Homo sapiens
atagaacaaggctcctgccctccattggctcatagatttgctctgtgaggctccaggtgtagaactagggttgggggaggaagccagattccttccggacrctgggaagaatattccaacaaataagatcatctgaaatgggcttggctgcctcttaagaggtggtgaattcagcatctttggagatattcaggcagcagc

SEQ ID NO: 332770 - DNA, 201 bp, Homo sapiens
aattaaggctcagaaatgcaaagtaaattgcccaattggaatttacagaacatcaacatatgagtctgggggaaagggaaaattcaacccgtaacagctgrgttagatggcctcccttcccacgctgagattctctcattcaacacatctgagtctctgctcgcacggtgtacttatgaaatttctgcctatctgaggcag

SEQ ID NO: 332771 - DNA, 201 bp, Homo sapiens
gcatgaaccccatcagcacaggcaaaatctcactcctttctgggaaggacgaaagccatttgggttttacgagtcctgggaggtggagttataggaccccrtcagtcattcccactgctgttgttgagggtaggaaaccatccttccagatggcagggagactaacaactccagggggctgctttttgataaatctcttca

SEQ ID NO: 332772 - DNA, 201 bp, Homo sapiens
aatgtgtcatcacaaatccacttattctaactgggagaatctgctgtcagcacagacaaaaagaactttggatgtgacccacatatatctgtgtgcatccrgcagcaaggcggctaactcttacactgcctttaaagatagaattgtaacctagtttatagaaacctactagcatagatttcaagcctctgaattcaagcc

SEQ ID NO: 332773 - DNA, 201 bp, Homo sapiens
gtaattcaccttaatctctttaaactttagttgcctcttcagggaaatatgagtgggaatggtaacattggaggatgtgaagactaaatgagataatgtaygtgaaatgcgtagtaaaattgcggtagaaacatttaatgttatcatcaatcatcgctatctttatgtctcagtgcaatattctctaactctacagagcac

SEQ ID NO: 332774 - DNA, 201 bp, Homo sapiens
gaccagggattagtatagtcatttcacatctggacgtaagtcagctaccttgacaaagcaacttgacggacagtttagggaatcgaaggggacaaatgttracttctcagaacaacctgataagatagatattattttcctctcctttctactcataaggaaattaaggctcagaaatgcaaagtaaattgcccaattgga

SEQ ID NO: 332775 - DNA, 201 bp, Homo sapiens
tgcaacttcctaagctgcccctgccccagctcctctctgcaacccagccctctcctgagctctaggctgggattacacccgctggagggacactcaccccrtctgctcccacggcagcaccatcaactcaacaagtcagaagccaagtggatcatctgtgtccccttcccccacaatccctcctttttctagtaaaagacc

SEQ ID NO: 332776 - DNA, 201 bp, Homo sapiens
catcatcatcactgttatcccttaccattttttggccactttgaacgtaccaggtgctattctatgtacttcatgtttattaacttatttaattatcacarctattctgtatggagcactctgtttttatcctggctttgcagtgaggaaattgaggcagagagaggcaaatgccacacagctagtgagggctggagccag

SEQ ID NO: 332777 - DNA, 201 bp, Homo sapiens
ttctcaggcccaccccagacctggtgaatcagaaactctaggagtggggcccaccaatctgtgtctcagcagtgctccaagtaatttgcatgcacagcgttatgtttgagaaccactgctacccacaaagtcaaaaccaatgaacctcccaggggcaaacttgcggtcagaccactgagcagctggccatgatcttctcca

SEQ ID NO: 332778 - DNA, 201 bp, Homo sapiens
gagactcaatccatctttgggggtggaaggacttgacatgaaaagaagccagtcccatgactttggatgacaaactgcctcctggcttggagggatctttrggctcatggatgaatggcgagccacctgttgtcagctgccccaagcctctgggatatgtggattcggagaaagctgaggcccagaggggacactcgaccc

SEQ ID NO: 332779 - DNA, 201 bp, Homo sapiens
gggggtggggctgtcttgaggctcaatgggaacagacgccatgaacatgggaggagagatggcggctggcaagtcacataccatcccaggtgtgtgattttcaagaaaatcaggatcagatgcacttgacttcaagtaattcaccttaatctctttaaactttagttgcctcttcagggaaatatgagtgggaatggtaac

SEQ ID NO: 332780 - DNA, 201 bp, Homo sapiens
atcatgttcctatcatatcatagcagtgtgctcaaggtcacgctgctggtcaacaacaaagaccagactcccagttcagtgctctttcaaccaccccaccycgaattaatgggagaaggagcccttgcctcttacttacctttggcccatccctcccatcaagtcctttcaaaaactgaaggcttattctagttgtatatg

SEQ ID NO: 332781 - DNA, 201 bp, Homo sapiens
gactcaatttttctctctcctagctccaccttctcctcctatgcctctagccatggcagatgcctcctctaactggccacttaacaattccagttgttggyttctgggaactctgaagacccttcagagatgctctctgctagggtctcattatctttccagttgaatttcttgggcaaagtcccttttaaggcatctcca

SEQ ID NO: 332782 - DNA, 201 bp, Homo sapiens
aaggatgaataatcaaattgcaaaatagcaatagaataaaatattactcagcaataaaaaggaacaaactattaatagatgaatgaatttagattgttttycatccttgaaatctttgctgctttcatgcctgattgtgagagagtggaaaaggaaaggaagactcaatttttctctctcctagctccaccttctcctcct

SEQ ID NO: 332783 - DNA, 201 bp, Homo sapiens
ctactaaaaataacaaacaaaaaaaaaatatggggcatggtggcacacgcctgtagtctcagctacttgggaggctgaggtgggagaatcagctgagcccrggaagtcgaggctatggtgagccatgatcacgccactgcactctagtctgggcgacaggagtgagaccctacctcaaaaaaaaaaaaaaaaaaaaaggct

SEQ ID NO: 332784 - DNA, 201 bp, Homo sapiens
aacttgccatctcacaactatttgctgagtaacccttgcttcctcttaattctctggggcctcctcgacatatatttaggcaggaggtgaagggcaggackcagggggccactttctgcaggcataggaggttgggcttcatgcagaccacaatcaaatccttgctctgctgctttgcttgctgggtggccctgggcaaat

SEQ ID NO: 332785 - DNA, 201 bp, Homo sapiens
ctacaatagaaaaggaaaaatgacatctgaggttaacaatgtatctgcagtgcaaggcccagtgactgtcaataatggacgctgagtaactaagcaatggyggattgcatgaattttcatataaaactgctcctatacatcgctttgagtgtctgggtcacgccttatccttatagtgtaatgtgagcggagagtctagct

SEQ ID NO: 332786 - DNA, 201 bp, Homo sapiens
catccccctgcccactaccacttccagctcgctgtggagctcattctcacacccctcccaagatctcttgctgatagtctcggaaatatttacagcaatcrcctgagtacatttcttttctttccttggctaaactataattttgctatttaaaaaaagttacaaaaggaatgcaaatgtgcccgttaacttttccatatt

SEQ ID NO: 332787 - DNA, 201 bp, Homo sapiens
tgtagtatatttctcctacaatagaaaaggaaaaatgacatctgaggttaacaatgtatctgcagtgcaaggcccagtgactgtcaataatggacgctgartaactaagcaatggcggattgcatgaattttcatataaaactgctcctatacatcgctttgagtgtctgggtcacgccttatccttatagtgtaatgtga

SEQ ID NO: 332788 - DNA, 201 bp, Homo sapiens
ggacatcaaaactgagagaggtctagggctgcaaaactagaacccatcaggaaccagaactccagtcccctctgccggtggtcccatccatcctccttccrtctgacaccaaggcttcctgagtggtaaccaccatggctgctggagcagaggaagtggccgttgccttagaaccaggcaggtggggaaggggacacatca

SEQ ID NO: 332789 - DNA, 201 bp, Homo sapiens
cctggggccaccatcctctctatgacccgtcaccaccccacccgtacccaccacaagctatcgtggcattagttggacgcagccatttcccatgccctaartcaacatggctggagttaatttcttccaccctgaacacatatttgggctttcccctagccaatcaggaagtggctcacagggaggacccaagaggcagaa

SEQ ID NO: 332790 - DNA, 201 bp, Homo sapiens
gtggaagaaaatgggccggtaaggagtgagaggcgcctgtcatctggctttctgctcctagacaaatttattatccttttttcaaaatctaggaagtgtgrgagtagcagagaaacttagattttatacctagccattcattttcatccccgtcagaggatggccctaaatccccctaagacagtgagggtaatgtaagct

SEQ ID NO: 332791 - DNA, 201 bp, Homo sapiens
gatgcctttcttgtgcctacagtgctctagcatggtattcctaacctgcttggctataacactacctgaagagaaagagcttgtgaaaaataggtatcgawgcttaggctcacctgctgaatcagaatctccagccgaggaacccgggaatctatatttttaacgagcgcctggggtgattcttctgacttggcaaactgg

SEQ ID NO: 332792 - DNA, 201 bp, Homo sapiens
aattctaaaccgtccctgtcactctcctgctccagaaccctcagtggctccctattgcccccagaaccaagtccctggcacacaggtcctttgatatctcmctctgcttgcctccccaagcccatctcctccacacaatatgctccagtcggaccagatcacttgcctttccctaaacacccatgctgtttctcacctctc

SEQ ID NO: 332793 - DNA, 201 bp, Homo sapiens
tgggccacccttccttctggggcccgctgtgaggagctcactccagccctaatggagtgattccacagggcagttttcacctagcaaaggaagagggtgtmaccctggcaacccccatattggccaccaccgtagttgcttctgggccacttctggccatccctggctggaacctgttctcgagggcatctgaactctcat

SEQ ID NO: 332794 - DNA, 201 bp, Homo sapiens
gtggccaaaaattctaaaccgtccctgtcactctcctgctccagaaccctcagtggctccctattgcccccagaaccaagtccctggcacacaggtccttygatatctcactctgcttgcctccccaagcccatctcctccacacaatatgctccagtcggaccagatcacttgcctttccctaaacacccatgctgtttc

SEQ ID NO: 332795 - DNA, 201 bp, Homo sapiens
aagtctagtctctcctagctaacacaaaaccacacacacagaatttttaatcaccattttggtgcataatgttaaatgagtactcaaggatcaccagagtwctgagaaaagtctctaatataaaaaatagaggctagagcatgaagggttgttgaattttgtcaaaggccttttctgcatctattgagataatcatatggt

SEQ ID NO: 332796 - DNA, 201 bp, Homo sapiens
tgggttttaattgctttggtttctgggattttgagtgttaaggatttcagaatgcagcattatcttagaagtctgttttttgttgttgctttgtttgtttstttgagatagagtctcgctctgtcgccaggctggagtgcagtggcgcgatctcggctcactgcaacctccgcctcctgagttcaagcgattctcctgcct

SEQ ID NO: 332797 - DNA, 201 bp, Homo sapiens
caagtctggccacacccatgtgtgttgtctgtggccctttcatgctacagctacacaacggtcaagtagtattgggattgttgtggcccaaaagccaaaamtattgatcatctagccccttacagaaaaaggttgccagctcctgcttgagctgtccacgggcctgagttcaagtcaagtgctgcccctttctacccaggt

SEQ ID NO: 332798 - DNA, 201 bp, Homo sapiens
gcccgggaagtcgaggctatggtgagccatgatcacgccactgcactctagtctgggcgacaggagtgagaccctacctcaaaaaaaaaaaaaaaaaaaaaggcttcggtagagtgcctggcacatggaggggctcaagggaatgaagttcttaatatttttaattgatgtcttggaatctgcatccatgtctaaggaaga

SEQ ID NO: 332799 - DNA, 201 bp, Homo sapiens
tttgtggtaaggaaaatgtcttcccaccaagccataagcattgccttttaagggattcagcctagggtaagtggaagcttttactagaaataaagacattrgaccacacatcagcatgcgttctgagtcccagagggagaataactgtgatggaacgtaagaggatgacaaatagaatggatgttttcccactttgggaga

SEQ ID NO: 332800 - DNA, 201 bp, Homo sapiens
agcccgggaagtcgaggctatggtgagccatgatcacgccactgcactctagtctgggcgacaggagtgagaccctacctcaaaaaaaaaaaaaaaaaaaaaggcttcggtagagtgcctggcacatggaggggctcaagggaatgaagttcttaatatttttaattgatgtcttggaatctgcatccatgtctaaggaag

SEQ ID NO: 332801 - DNA, 201 bp, Homo sapiens
gctcatgcctgtaatctcagcactttgggagaccgaggcaggcaaatctcctgaggtcaggagttcaagaccagcctggacaacgggcgaaaccccatctytactaaaatacaaaaattagccgggtgtggtggcattcgcctgtaatcccagctactcaggaggctgaggcaggagaattgcttgagcctgggtggtgga

SEQ ID NO: 332802 - DNA, 201 bp, Homo sapiens
cgattcctctctccccctttctggtcataacattgatggcctgaaaagaaattcatttctgaaagccttcccctactaagaccttgctatcagaaaataarcaaaccattgtttatctggcctgtgttagggcttgagttcacttaggaagtaaacatcggggtgatgtttcatgcagggacaccgtggtggctcgacgat

SEQ ID NO: 332803 - DNA, 201 bp, Homo sapiens
ttgaattcaagagaagtgatatcagccagaaggagtcagaaatattgaggaatggaggtgggtgcatgaagggaatgtgtgagacaacatgcacccctaarcgaagtccttctctacctgcaaaagtcaaactagggccaagcatggtggctcatgcctgtaatctcagcactttgggagaccgaggcaggcaaatctcct

SEQ ID NO: 332804 - DNA, 201 bp, Homo sapiens
cagggcagttttcacctagcaaaggaagagggtgtaaccctggcaacccccatattggccaccaccgtagttgcttctgggccacttctggccatccctgsctggaacctgttctcgagggcatctgaactctcatcatactctgcgtgtttgctgggctgcagccaccgtgcagggcgaccctggataggaaaagctggg

SEQ ID NO: 332805 - DNA, 201 bp, Homo sapiens
cctttcctgattccaggctgggctcggttttgtctggtgggtttttttgccactgccgttgtgttagtggcatccaggtctccggattactgcatgcttgmagtgggaggaaaggcctgtctaccatgttctctgcctccccttcatgttctgtgaggagaggggccttgtctggcatgttcaccgaggcattcctgacca

SEQ ID NO: 332806 - DNA, 201 bp, Homo sapiens
ctgttgccaaataatgttgaaaagacaatttatctggaaaagacatgtacatataagcatgcacacacatgtgtgtgcacatacaatgtgatatatacaartatgtgaatcctaaggaaatcagatacaaaatccagacttaaaaccagtgtgtggataggcaataactccccccgcagtgttctcatttaatgacaaggt

SEQ ID NO: 332807 - DNA, 201 bp, Homo sapiens
tgagaagcatcaccctagactgaacccaccttaagccatgagacaccagagcccagtcactgatttctgatgagtacatcagctagcctcttagtgcgatractcctcatcaccaacattaaagcatttctgttgtgcgtgcctactgaggtaggcttcaacaaagctggggtgaagccgctaattctgtgtcgctgaggt

SEQ ID NO: 332808 - DNA, 201 bp, Homo sapiens
  misc_feature (1)...(201): n = A,T,C or G
tagcctgttgccaaataatgttgaaaagacaatttatctggaaaagacatgtacatataagcatgcacacacatgtgtgtgcacatacaatgtgatatatncaagtatgtgaatcctaaggaaatcagatacaaaatccagacttaaaaccagtgtgtggataggcaataactccccccgcagtgttctcatttaatgaca

SEQ ID NO: 332809 - DNA, 201 bp, Homo sapiens
gctcctccctaacaacgtgaaaatgaaaacctagagccataggggcatccggagaacccaggaactgacatgacacccgaccagaaagcagaggtctgtttagccagagagcagctctcgtcctgatctgtgcagagtgatgttttcagagcactgcagccatcatcgggtagtggcaatggggaaccgtagagaaggaat

SEQ ID NO: 332810 - DNA, 201 bp, Homo sapiens
ataagagaagtagaaacaaagctgatggtaatcatctggaggtggttaacagtctgactggggagatgacagtagaacaaaggcaatatttccaggaagayaggatgcacgtgcttagtttctggaggtgggaaagagagttcaccacagggatcagtggggaaaggcatctaggcgagcacccagcacgtgtggaggccc

SEQ ID NO: 332811 - DNA, 201 bp, Homo sapiens
gacagggcaaaagtgcaaaggagtgttgatctgagccttgataggaggaggtgccatgaaacagcatagtaatgaattttcagcctgggctgctaagcacrataagagaagtagaaacaaagctgatggtaatcatctggaggtggttaacagtctgactggggagatgacagtagaacaaaggcaatatttccaggaaga

SEQ ID NO: 332812 - DNA, 201 bp, Homo sapiens
gctctcttccaatcagggattcggggatctaggattcttccatcttaggctgacatcttctgaccaggagactttgaagttctccaaggcaggggaagaaraagtgggagagcctgctcttgaacaccaaccaagaaagtacacattgtctttgtcgcaggctatcgggccagaactagtcacttgaccccagcccagtta

SEQ ID NO: 332813 - DNA, 201 bp, Homo sapiens
atccttgaaatctttgctgctttcatgcctgattgtgagagagtggaaaaggaaaggaagactcaatttttctctctcctagctccaccttctcctcctaygcctctagccatggcagatgcctcctctaactggccacttaacaattccagttgttggcttctgggaactctgaagacccttcagagatgctctctgcta

SEQ ID NO: 332814 - DNA, 201 bp, Homo sapiens
atttggagacaatctgtcagacagaggtgtattcaaatcccgcctagagctccctcctcactgtcaatcttggcatgcgatgcttaacatctctaagtcarttggaggaagaaaaatgccgaactcatagggttgggacagggatgaaaagagtaaatccacagcagggactgccatgtggcaagggcccaggcagcatta

SEQ ID NO: 332815 - DNA, 201 bp, Homo sapiens
cttcttgccatattctcccatggcagaaagcagagagacagaggcaagctctggtgtctcatgtctcttcttataaggtcaccaatctcattcaagaacgycccaccctcatgacataattatctccccacctcctaatacctcctaatactatcacctgggggctaggatttcaacctatgaatttcgaggggatttctt

SEQ ID NO: 332816 - DNA, 201 bp, Homo sapiens
gacattttcacatctcaatggaacgtcctgataaacttgcaggacggggagcaacagcatcgtcactgctgcacccttcagtccacttagaggaccgttgygtcacagcaggattggtgttcccgtcaaatgacatcctgtataccgagttttagaaaagcacatgagtgcacgtaacgggatgtagaaaagctattttca

SEQ ID NO: 332817 - DNA, 201 bp, Homo sapiens
ttcaaaactcagggttcagcgtggttggtcccatctgagggctgtgagggaaggatctgcaccaggcctctcaccttggcttgcagatcgccatcttcttkttcccatggccttctacctgtatgcctgtttccaaatcccccctctttgcaaggacatcagtcatattggattaaggcccaccctagtgacctaatttta

SEQ ID NO: 332818 - DNA, 201 bp, Homo sapiens
atttgacattttcacatctcaatggaacgtcctgataaacttgcaggacggggagcaacagcatcgtcactgctgcacccttcagtccacttagaggaccrttgtgtcacagcaggattggtgttcccgtcaaatgacatcctgtataccgagttttagaaaagcacatgagtgcacgtaacgggatgtagaaaagctatt

SEQ ID NO: 332819 - DNA, 201 bp, Homo sapiens
ccatgcgtccatgatgtattccatggtgtatatgtaccacattttctttatccaatccaccacttctgggcacctagtttgattccatgtccttgctattrtgaatagtgctgctatgaacatgccagtgcatgtgtcttttggtagaatgatttgttttcttttggatactcatccagtaatgggattgctgggtggaat

SEQ ID NO: 332820 - DNA, 201 bp, Homo sapiens
gtcctctctagaacacactgggtgtgcgggaaatacaccctcccacagcaacgcagagatgagcaggacccgcatcctgtgcctggccatggtctggggasggggtgctgaagccgaacgcatagagataatggtggctgaatatagggggcacccttctgcaggtatgtccaggacgccgaggcagggtgagaggcccag

SEQ ID NO: 332821 - DNA, 201 bp, Homo sapiens
gtaatgacgaggaatgtgtctggaggtgagagtttcggggtctgggctttggttgtggatttgccaccaccaggccattgccctaagggcaggccctaacrtctttgggcctcagttttcgcatttataaaaagtggactcaatggacctacaggtcttcacttgctctagagcaacaaaactggagagctgtctcaagga

SEQ ID NO: 332822 - DNA, 201 bp, Homo sapiens
ctcacacctgtaatctcaacactttgggaggccgaggtgggtggattacctgaggtcaggagtttgagaccagcctggccaacatggtgaaaccctgtctytactaaaaatacaaaaaaaaaaaaaaaaaaattagctgggtgtagtgctgcatgcctgtagtcccagctactcggaggctgagacaggagaataggttga

SEQ ID NO: 332823 - DNA, 201 bp, Homo sapiens
tatatctgaagaccaactcatccccagtggttcttctaaaggcccagagttttcctgagagcctggtctggccttagtagtttctccatcagtcatttagraagacagaaggtgaatgaggaggaccagaggaggactctgagcacatctccccaaaatgtccctctagtccagctaagttcagtgccatgctggaggaca

SEQ ID NO: 332824 - DNA, 201 bp, Homo sapiens
tttcctggaggtttccaagcaggtctcctctccaggcatccacgggagaattcctctgcagctccttctttcctgagcctagtgccatccagtgtgccccmgtctctgagaagcatcaccctagactgaacccaccttaagccatgagacaccagagcccagtcactgatttctgatgagtacatcagctagcctcttagt

SEQ ID NO: 332825 - DNA, 201 bp, Homo sapiens
cgaaacccatgcatgctcttgaccattgtgctagactgccctgtcctctgagttattttttttaccctgagctaataatgttaacgaatatatctgaagascaactcatccccagtggttcttctaaaggcccagagttttcctgagagcctggtctggccttagtagtttctccatcagtcatttagaaagacagaaggt

SEQ ID NO: 332826 - DNA, 201 bp, Homo sapiens
ggccctgagataggaagtgacttgtccacagtcacctcaatggtgggcagctggggaccaattcgtaagagaataacaggagagaagttaggctggaggtyaggctagatctgaagccctctgggggagatggcagttgaagctcttagtgtagataaaatctctaaagtagaaaagaccccagaattaagcttgggtctt

SEQ ID NO: 332827 - DNA, 201 bp, Homo sapiens
tttatctctctccctttccagcctttgccatcttgtgtccaggagaagtctggaaacctttcctggaggtttccaagcaggtctcctctccaggcatccaygggagaattcctctgcagctccttctttcctgagcctagtgccatccagtgtgccccagtctctgagaagcatcaccctagactgaacccaccttaagcc

SEQ ID NO: 332828 - DNA, 201 bp, Homo sapiens
gaggacaggagagcaggagcccgaaagttctgttcccagctttgctgctgatcgttcacaaagcatcactgagtctcccttgatgaccacctgtgaggcawtcctgctccttagggacatcatcagctttatcccacagtgcttttagcttcttggaggaagcccttttggtccccttttccaacagtgacagccactatt

SEQ ID NO: 332829 - DNA, 201 bp, Homo sapiens
gccaatgacattctttacagaaatagaaaaaacaatcctaatattcatatggaaccacaaaagacctgaatagccaaagcatcctgagcaaaaagaacaargctggaaacactacttgactttaaaatttaccacaaactacagtaaccaaaacagcatggtactaacataaaaacaagcatatagaccaatggagtaaaa

SEQ ID NO: 332830 - DNA, 201 bp, Homo sapiens
attgaaaaggaatatctcaactcaccaatccaacgtgtttgtgcagcacacagcatgtaaaacctgtgaaccgaggtggaccctggagttttctaatccaycccctttattttacagataagaaggcagagtctagaaatctgaagtgacttttccaagtcccccaggtagactgcaactgagccagggttaaaatccctt

SEQ ID NO: 332831 - DNA, 201 bp, Homo sapiens
gattgaatataattttgtttctttggagtggcatcgattgaaactccagaatccagccagaaggcttaagcccccaagaaatggtcttgctggacctcctsctgggccacaggggacagagatgatacctgggcatgagcagtagtctcaccactcctggcggggcccgccatgtagcaggaaaaacccccagtgccatac

SEQ ID NO: 332832 - DNA, 201 bp, Homo sapiens
cgtgcaccaccacgcccagctaattttttgtattttgattagagacggggtttcaccatgttggccaggatggtctcgatctattgacttcgtgatctgcstgccttggcctcccaaagtgctgggattacaagtatgagccactgcacccagccagaagtctgtattttaaaggctgtctcctttataagatgggtgcag

SEQ ID NO: 332833 - DNA, 201 bp, Homo sapiens
aacaacaattaaacaccctctgcttgatctggaagccccctgcttttcctgtgtatctagcgtggagggtgcatcccagtgaagagcacagtctggctatracgttattcaccattgcggaatgtttggggccaatggaaataaaagctgctttctaatttgtaaaagcagaggacccagtggtgtttgccccctgccagt

SEQ ID NO: 332834 - DNA, 201 bp, Homo sapiens
tggcactgattcagcttgcctctggccagggccagaggggccaggtcagcaaagccagccctgctgcagagacttgagggcccaaggtgagagaagagtawgcaaggtgcaaaaagatagggagagaccagcacaggttgctggtggctcctcccagacaggaccatggcaatccagagagtgtgtccctagggctggtcc

SEQ ID NO: 332835 - DNA, 201 bp, Homo sapiens
aatcgcctgagtacatttcttttctttccttggctaaactataattttgctatttaaaaaaagttacaaaaggaatgcaaatgtgcccgttaacttttccrtattcttaccactctgagtctgattttaaagcggaaaacgttgcatttgtgagaatactcaaatttaatgtaaatttctcaagataaggcaaattctctc

SEQ ID NO: 332836 - DNA, 201 bp, Homo sapiens
ccacagagagacctctctgaaccagccacggggcttggtgtctgtccccatttttaccaataacttaaatgacagcatcagtggtctgcttagcacattcmctggtgatgtgacttttgggggattctccatatttggggtctcagaattagaaccaactcaaccaaagaggaaaaagtttgacatggacaaatgcaagat

SEQ ID NO: 332837 - DNA, 201 bp, Homo sapiens
aaatttaaaaagtccctcccatacactcctcagccctcatcaaagatttgatgaatatcctcttccctgttcttaccagtttcttgtgggtttctttcttyaaatattcaactgttttggccaggctggctgggtgcagtagctcctccctgtaatcccagcactttgggaggccgaggtgggcagatcacctgaagccga

SEQ ID NO: 332838 - DNA, 201 bp, Homo sapiens
tgagttgtgtctttaaaagatccctccagcaagaatgaaagctggaatatttgttgggaagctgctgcaatagctctggcaggaaataatgatggcttagrctaggattatggcatgggatatctaagagttggtcagatttgctataaaattttgaggtaaaggcagcaggatttgccggtggattctatttaaggacca

SEQ ID NO: 332839 - DNA, 201 bp, Homo sapiens
ggatggtgagaaagaaaactacctttctactttcaacactcctcttcgaggaagcttcctccaactgaccatgatctgtcatctacaaaaatgcttcaaasctaagaaatatgcttatcaccctccctaatgaggaggaatagagggtgaattaaaaaatgctttttatttttgcttcatgaatagcagtggtacagaact

SEQ ID NO: 332840 - DNA, 201 bp, Homo sapiens
aagtggaggtagagtgtaaaatgatggttacctgaggctgggaagggtggagaggagggaggaatgaagagaggttgattaaagggtatgaaaatgcagtwagatagaagaaaccagttctagtgttcaatagcacagtagggtgactacagttaataataatttattatatatttcaaaacagctaggagagaagatttg

SEQ ID NO: 332841 - DNA, 201 bp, Homo sapiens
atatgaatggataaagaaaatgtggtatgtatacacaatgaaatgtcattcagctataaaaaagaatgaaatcttgtcatttgcagcaacatggatggaamtgaaggtcatgtgttaaagtaaaataagccaggcacagaaagataaatatcacatgttcttactcatatgtgggaactaaaaaagtggaggtagagtgta

SEQ ID NO: 332842 - DNA, 201 bp, Homo sapiens
attccttttagttcttctctgttgtctggtacctgacttcatgctttggttcaatactgccttgaatgccagctgaagagtttgttaaactcccagcaaawcaaacaaacaaacaaaaaaacattgaaccatccccctgcccactaccacttccagctcgctgtggagctcattctcacacccctcccaagatctcttgct

SEQ ID NO: 332843 - DNA, 201 bp, Homo sapiens
gctggaggacagaatggcattaaccccaacctgttacacaaggtcacctgccataggtatgagcattccagactctgaggtggagcctggggctaaagtgrcaggaggaaggaaagctcctattccattgcaaacctgattctgatgtcaatcaaaagggcctgcctcgatactacgtgctgtatatttgggcatctaggt

SEQ ID NO: 332844 - DNA, 201 bp, Homo sapiens
gcaggggagatagtaaagatatttaacaactgctccctctccagcaccaacctgttagaatggacatctgacccatcagaactgatgccatccagtacacmacggccaggggtcctagtgcacctcagccaaacaccaggccctgtctgggaaaacactagacaaggagaggctagctctgatcatcagccatgacgagat

SEQ ID NO: 332845 - DNA, 201 bp, Homo sapiens
aggaggactctgagcacatctccccaaaatgtccctctagtccagctaagttcagtgccatgctggaggacagaatggcattaaccccaacctgttacacraggtcacctgccataggtatgagcattccagactctgaggtggagcctggggctaaagtgacaggaggaaggaaagctcctattccattgcaaacctgat

SEQ ID NO: 332846 - DNA, 201 bp, Homo sapiens
agctgcaaaaggaacaattttgcaaaaataaagaagtatttgggcttctagaaaacctgtccctcccaccccaacctttcagctaaaagcactaaatcatrttaaacagtttcatctttcagcaatatgtaaatgttttctctgacatgtctttacttctggcctgaatttaatgggtgtgtttgattatacagtcacatg

SEQ ID NO: 332847 - DNA, 201 bp, Homo sapiens
ccagatctcagctgggtgatacagagggaagggaggagctgtgcagtgtggttaggaaggtttggagagagagaaaggggcatgaaatgggcctttcaaaygagacatttagcccagagctcagagcaaagtggagacatgggccagttatctaataaccctgatcacaacgcagcctcctaaaaattccaaggcatcttg

SEQ ID NO: 332848 - DNA, 201 bp, Homo sapiens
agaggctgcagctgacattcacagggatgttgtgtctgaatgcgggtacatcaggaagggaacaaaagagagggaagaaagcctggttgaaggcaggggtmtttcaagtcccctcgaggcagactcaagagcaaagcatggcacactggatgggcgttctgcttctctttaaagagcatggatttatccataccatgtgac

SEQ ID NO: 332849 - DNA, 201 bp, Homo sapiens
ataaaaatgaattttaagcataataaaatgtgaaaaattgcccaactttcctcacaaatgagtaaaagccaatttaaatgataagaaatgaataaatgcayattaaagcaataatagttttgcttatcagttgagcaaagatctagaagtgtagtaacacccagggttgatgaggtatgggttgtgggaaaacaggaattc

SEQ ID NO: 332850 - DNA, 201 bp, Homo sapiens
ctgtgtgtgggtaataagacttgcctcctctttccataactccagtttatttctatttggggccatctccacagggctagaaaaagtcttcctcggtcaaygcaggattctctcgcctcccagtgactgcacctaaactttgagacttacgtggtgccagtgcaggggcaccatctggtccttgatgtcagctgtcaactt

SEQ ID NO: 332851 - DNA, 201 bp, Homo sapiens
agggacagttacttgtgaatgggtattgtttatacaccatgcgtccatgatgtattccatggtgtatatgtaccacattttctttatccaatccaccactkctgggcacctagtttgattccatgtccttgctattgtgaatagtgctgctatgaacatgccagtgcatgtgtcttttggtagaatgatttgttttctttt

SEQ ID NO: 332852 - DNA, 201 bp, Homo sapiens
tgagcttgtagtttaaaggagattatctctcaatttaatgagagtcatggtgaaaacagcgtccccaggaaaagagagaaaatgccacaataaaaagaagraaagcatatccatccatccaatcggcctctctaacacgacctcattatgcacccacttctgacatttgccagtggtgttagatttgagctataaaaacgt

SEQ ID NO: 332853 - DNA, 201 bp, Homo sapiens
ttctgcttttttcattttccgctcgatgattcttcatgagggaagggcccatttctttcctgttcatttctgtatagcgagtgcatgacacctggtacatrctcagtaactatttctcaaatgcagcattgcagcatcaccagcacagactgtgtgccacgagccaccctgctggaaaagccaatctgctcctgattaggt

SEQ ID NO: 332854 - DNA, 201 bp, Homo sapiens
gttgtttttattttctgtcttggaaataggcagagattagctgccggagagggttgttctgtctggactaggtggtctatttacttttgttctgcttttttcattttccgctcgatgattcttcatgagggaagggcccatttctttcctgttcatttctgtatagcgagtgcatgacacctggtacatgctcagtaacta

SEQ ID NO: 332855 - DNA, 201 bp, Homo sapiens
gggtgagaaaaacaggcctggatgttgcctggatgaagcttctaatcaagtggaacaataacctaatcattctacaagcactgtattatgggtctggggartcagcagaagagaagaacagagggctaggagatactataacaagtgatctaactgacaacttttattattttattagaatattatattttattatatttt

SEQ ID NO: 332856 - DNA, 201 bp, Homo sapiens
ggcttaatggtacctaatcttaccttttgaagctcacgcatttgggagttgagatcaattgagataaaataaagtaaaatgtgttgactttgggatttgtrgtcttcatcagagtcccattgtgtagtgttgtttttattttctgtcttggaaataggcagagattagctgccggagagggttgttctgtctggactaggt

SEQ ID NO: 332857 - DNA, 201 bp, Homo sapiens
tcccaaaatgctgggattacaggcatgagctaccatgcccagctgagtaccgtcttatttagagaagacacccactttcatttttgcccctcatttcatgrggaaagaccagcccacagtttaagtaagtattcctaacaggcgaatccgcagttctatatgggctctgaggtctcgtgcacagaagccaaaggactggag

SEQ ID NO: 332858 - DNA, 201 bp, Homo sapiens
gtcattgccaggggacagcttgatgcaggacagcgtgcaaacccaggcttgcccctggctgtggctacaccatgcttctgagtccccattctccatcaatracaagtgccccatagctatggcctgtagtcttataagcttgagcttaaggagcggtggaaggaagtgccaagttatatgatgtaaacaaaggctactact

SEQ ID NO: 332859 - DNA, 201 bp, Homo sapiens
ggagggtgtgttcaaggttcaaccaagagacaaatgtggttgaaacagagtgagcaaggagaaaggggaaggagatgatgttggtgagagaggcaggtgcyagaatgcacatatgtttgtgggccatggtaaagagtttgggtttgattctaagtttgaggggcagtgaaggaggtgagggagaagacctgagttgtgtct

SEQ ID NO: 332860 - DNA, 201 bp, Homo sapiens
ctcatggagtaaaactagacagagaagagaggctgagaagaaaagcagtagtagcttcatagataaccaagccaggtaaacatgacccagtatttttttaytctggcctggaaagagaaggacttttctttgacacgaagagcagagtctaagcacctcatgatgtcttcagccagaatcccaccaaagttcttacaatct

SEQ ID NO: 332861 - DNA, 201 bp, Homo sapiens
gtcccaccgagaggggaggatgccttaggcccaagaagacctttcacccctgcaacaccactagattagaccctcatctcaccatcctctgaagctccctrcctctctctggcacatctccccacaccatgtttgttgcatggtttcttgcctgcttgttagcttgtagctccttgaaggctaggaccgtttcagatgtgt

SEQ ID NO: 332862 - DNA, 201 bp, Homo sapiens
gttaaccctgattattgaacgtacgctccaaattctgaaagagtgtttctacttcatgtaatggtgcagaacagtcattgccaggggacagcttgatgcargacagcgtgcaaacccaggcttgcccctggctgtggctacaccatgcttctgagtccccattctccatcaatgacaagtgccccatagctatggcctgta

SEQ ID NO: 332863 - DNA, 201 bp, Homo sapiens
cagtccagtctttcaggaaatactatggggtttcccaggattatgatcaactgcacaggccactgaggtgcagatcagctttctccttgtctttctcgggracaatagaagtctctcgccattgtctcatggagtaaaactagacagagaagagaggctgagaagaaaagcagtagtagcttcatagataaccaagccagg

SEQ ID NO: 332864 - DNA, 201 bp, Homo sapiens
agtatgtgaatcctaaggaaatcagatacaaaatccagacttaaaaccagtgtgtggataggcaataactccccccgcagtgttctcatttaatgacaagrttcctttcaatacacagcttccccagtgattttcattatttatttggagtctgccaacaccttgactgaaaggctaaatggaactttaaaaactgagaaa

SEQ ID NO: 332865 - DNA, 201 bp, Homo sapiens
ccaattgtccttccctgcccattcagagttcaatttgagcctccactgcagttcctggtgtgggccagctggtgttgggtggccccagggagtcacacagyctgtacccggccccgagatcctctgctgtaactgcagggtcacaggcatcccgggagaatgggcctccaccctcagccagccctcactgctgacaggcac

SEQ ID NO: 332866 - DNA, 201 bp, Homo sapiens
gagcgtgttgagtgggtcaacgagcttatcctgaagcaccacgtcaacgtgcgcactgcatacccctcgctgcgcctgctgcacgccgttcgcgggtgagyggcctccctacaggccagtaggaccgtcactaagtgtgggagattcttggtaggcagtatccctttcccaggtgcatttccatcccagctccaccactca

SEQ ID NO: 332867 - DNA, 201 bp, Homo sapiens
gcatcttccaggaggtggcatcccagactggccaacattgcagttgggagtatatttcctgcttcacccctcgtgagccgccagggtcaggtgccacatcsccttcattctccttgcctctttcacagcccctcctgccccatggttgatcccaatccatctgaactgcatggagtccacttggccctgctctcaggaccc

SEQ ID NO: 332868 - DNA, 201 bp, Homo sapiens
tctcttcctcactgcattcttggctaaggtgcaccctgcacccttctctcttcacttctctttgtttcctctcgtaaccctttaacagacgacttgaggcmggaagcggggactctgtttcagaggtggatacaccaagatgtagtgagcagtctttagaagaaagagagtgggcagaacccagccttgcatggcaaacca

SEQ ID NO: 332869 - DNA, 201 bp, Homo sapiens
cttctgggaagcatcctttcccattctgaaataaccatccacttcttcagccgtcatgagccatagcacagagacagcaggagagataaccttccaggacsccagagctcagtgtgtaaggcaggcatggacactgcagcccctggcgcacaggtctccatgggtgcccagagggacaaacttagcacagctcagagatgg

SEQ ID NO: 332870 - DNA, 201 bp, Homo sapiens
ctggcccttgattcctatgcatgacactaggcattgccaccagggcttaactcaaaaggccttggctctataccagaggattaaataatgtcaaatgttckcacatatgtgtttatagggggtaggtccaagatgcctaacatacatccagagtagacttaacatcagtgtacgttaactgagtcccaataatcttctcaa

SEQ ID NO: 332871 - DNA, 201 bp, Homo sapiens
ttggctataacactacctgaagagaaagagcttgtgaaaaataggtatcgatgcttaggctcacctgctgaatcagaatctccagccgaggaacccgggartctatatttttaacgagcgcctggggtgattcttctgacttggcaaactggagaagcactcttttcgtgtaccttgtccactaacagacttctgcttagt

SEQ ID NO: 332872 - DNA, 201 bp, Homo sapiens
tttgcttttttaaaaaaattatactttaagttctgggatacatgtacagaacgtgcaggtttgttgcataggtagacacgtgccatggtggtttgctgcamgcatcaacccatcatctacattaggtatttctcctaatgctatctctcccctagccccccacccccttacaggccctggtgtgtgatgttcccctctctg

SEQ ID NO: 332873 - DNA, 201 bp, Homo sapiens
gctccctattgcccccagaaccaagtccctggcacacaggtcctttgatatctcactctgcttgcctccccaagcccatctcctccacacaatatgctccrgtcggaccagatcacttgcctttccctaaacacccatgctgtttctcacctctctgcccttggatgcctttcttgtgcctacagtgctctagcatggtat

SEQ ID NO: 332874 - DNA, 201 bp, Homo sapiens
aagagaatgaaagtcagaaaaaactaccactaatttcaggaaattagaacatacaggaacctcaggaagctgccaccagaacctgtgtctctcaccacccmaaagagggtaaactgtagcaggaggtcccgtaagccactggcgaaacctccggcaggtctactgtttcctgactcccaggtgattctgtcttgttgcagg

SEQ ID NO: 332875 - DNA, 201 bp, Homo sapiens
caaatgtttctctttcttactaagaaaatataagactactcattctcaccttctttttgcatttttttgcactttattctgcagatatgttagtaagattyggtcaggaaaacagaaacttctccaagcatttcaaataaagaaggatttaatgcagataatttgaggcttaccacactgttggatgaactaagagaatga

SEQ ID NO: 332876 - DNA, 201 bp, Homo sapiens
ctctaaggtaggtaccatttctatccccatttattgatgaagaaaccgaggcctggagaggttgtataccctgctgataaacttgtgataaagcagctctrtggaaggccgaaacccatgcatgctcttgaccattgtgctagactgccctgtcctctgagttattttttttaccctgagctaataatgttaacgaatata

SEQ ID NO: 332877 - DNA, 201 bp, Homo sapiens
agctctgaaaactttcacaaatgctgcgcagttaatacacaacgtgccaccaattcccacgcagagataaacatgctacttttcatagctgctcgcctcaraaacgtggattggaaaggaaatcgggcaagtcacgtcttggggtaatggaagatgcggtgaggagggccttcctctaggctctccggcttctgattccgg

SEQ ID NO: 332878 - DNA, 201 bp, Homo sapiens
tagaaggaggatagcaaacgttcccaacacagacaaatggtaaatgtttcagatgatggataagctgattaccctgatctgatcacccactgtacattatrtgtactgaaatatcattatttcaatacgtggggtacagtaacgacaccccatgaatatgtacacttattattttccaattaaaaaataacatgaaatgaa

SEQ ID NO: 332879 - DNA, 201 bp, Homo sapiens
gaagggaaggggatgggaagtgtactgaccacctggggctgactctggaaccctctctttctccctactccacttagcctatcagtgggcttctcagcacrtgtgctgggtcacccagatgagcatcagagactgatgccattcctgtgccagccactcctcactgagcaatcttaccaccctttgccaagtcactgtccg

SEQ ID NO: 332880 - DNA, 201 bp, Homo sapiens
gcctgttccatcaccacaggtaccagcttcacctcagcccagttcctcagccctctttccaagcaggcaagcctaggggagggagaggcatgggcttccaytgcccccgtccccggggaagccctgtctttctggcctgacccagcagcgctgattttatcccaggtttgtggagtgaagggaaggggatgggaagtgtac

SEQ ID NO: 332881 - DNA, 201 bp, Homo sapiens
agggagtggtttctcgagggctgagagcctcgcccacaaactgtagtcagcatcttcactgaagttggcctgtcttggatatttcttctctcctccccttyccccacctcccctcctaattcatcaactgctgaaacatctgcctggctgaaaccgccttctcgccgcgcgctgggggctgtccccaggtgttggtctttg

SEQ ID NO: 332882 - DNA, 201 bp, Homo sapiens
gatattggtattctatctatggtagtggtataaagattccttttgtgataaattcatttaagtttttaagtgagtcaatttaaaggaaagtattaagtcartaaagtctagttagcaaaacgcatgaaggtagacccggaaaatgtttgaagtttatgcaatgacatcccagcctttcttctccccgatagtcattatctg

SEQ ID NO: 332883 - DNA, 201 bp, Homo sapiens
cctctcaggtatgagcttttcaaaaccacacaggagcaccatctccccaggactctgcctactaggagagagagtggtaaagaagtgggagtcatcgagasgtgaggtttggagtcaggagatctgggttcaaattctagccatgattcaatctggcagtgtgatctgggcctcacagaagctcccgttgatctatttgta

SEQ ID NO: 332884 - DNA, 201 bp, Homo sapiens
gacttgcttaaacagaggggtaagcaggaggggaggggtcagggtggccaagccaagcacatgcccatgtggcagttcacatcaccagtctgacattctcygccaatctcatcagtcttcctctttccagattccaggaacaaactcattttgcagaggcagcaacgggtggtgtatgtacacaatcacttgttaaaggag

SEQ ID NO: 332885 - DNA, 201 bp, Homo sapiens
gtcacagttccctagagttctgggggttcctgagtggatctggtggcctgcccagcctgcggtccagttccaaactgcactctcagttataaaaagcaggrgaatggagagggaaggcctctaggggtgatggaaggcaagtctaggggagccttttaaaaccaatctgctcttccagataaagaaagtctccaagcaggc

SEQ ID NO: 332886 - DNA, 201 bp, Homo sapiens
ggtggcccaggctctagcacaagtggcccagagaccaaggcagaagctgcatcacatttttagaccacatagtgtcacttctattatcatctactagtcayctagtcattaaattagcttagaatcaaggggagtagacatagatcctgcctctcaatgggaaagtgccaatttgtgtacatgttttaaaacttacacaca

SEQ ID NO: 332887 - DNA, 201 bp, Homo sapiens
ctccacagggctagaaaaagtcttcctcggtcaatgcaggattctctcgcctcccagtgactgcacctaaactttgagacttacgtggtgccagtgcaggrgcaccatctggtccttgatgtcagctgtcaacttagacatttaccaacacccccttcattccattcctttatgccctgcaggctgctctcccctgcttct

SEQ ID NO: 332888 - DNA, 201 bp, Homo sapiens
caaaccctagacctgccgaatctgaatccgctcagtaacaagcccccaggtgaagtgtatgcacactttgctgggggaatgattggtttccctgccttctrcagagcgcctgccctaagcagtgaccttggcccatcacaccaggggtagcctgtcagtgtagctccactgcccatcacagagtcagcctagagggacctc

SEQ ID NO: 332889 - DNA, 201 bp, Homo sapiens
tcaggtgcagtcagactggctagaagtaaaacagtggggggctgaagcagctggggttgaccatgcgtctctctctctttatgttatattagggtttctcyaaatgatctctccgcatgggctagattgggcttcctcacagcatagtagccttagagtggtcagacgtgtacatggtggcccaggctctagcacaagtgg

SEQ ID NO: 332890 - DNA, 201 bp, Homo sapiens
gggctgattttgagggttagggtccagctggtggcatgtgagcagacagtgacccacgggccatagcacatccagcaatgcccttgggacccaacccaggkgaatgtgggttacaggacaggagctgacccgacattcccggaccccaacatggaagtacaagaacactgttatcccaaggagatatttccaaggggaaat

SEQ ID NO: 332891 - DNA, 201 bp, Homo sapiens
gcaccccaggggacgccactgctggtgtgtgactgcacgtggacaggtgcagccggggtgtgctctgcctcactcctgggagtcacgtccacacccatccrcacatacttggaaaatatgggtcaaaaatgccaaggagcaagttacttcaaaaagtgcagttgttctttgtcccttaggcctatgtccatggctctgaaa

SEQ ID NO: 332892 - DNA, 201 bp, Homo sapiens
gccaaacatctgcagcccagtttctttgaatgatggtcttccctgttctatgaacaactgagaggtgaagcagtgtcttgtacaagtgtaaataatgtgcrggaacacagcacataaactgcagggacgacttcagaagaaaacccccacttaactcttgaagcctgatttgcttcactgagtcccaatggggcaaagcac

SEQ ID NO: 332893 - DNA, 201 bp, Homo sapiens
gatggtaaattgcatgttatgtgtattttcccacaattgaaacacacacgcgcgcaagcagccagaagagtgcctggcaggtgctcgggacacactgacttattttaagagcacagttgtgattttcaacaaagcaacatcaatgtgggtattacttaattttaaaaataatacaggaccaaaaagcagatacaggggaaa

SEQ ID NO: 332894 - DNA, 201 bp, Homo sapiens
agcctaaagtttggttggaacacagccatgccacccgttttcatatcattgatggctgttgtctcactacaaggagagtggagtcactgggcacggttaartcattgggtgaaattgcagagtcagaacagagagatcatatcacctgcaaagccaaaaatgtcattatctggcgctttatagaaaaagtttgctgatccc

SEQ ID NO: 332895 - DNA, 201 bp, Homo sapiens
gactctcccatgagaaactgtaaacgtgggaaattctaacacagctaggagattccaacatactggaccttaccttacctataaataactgggcttggtgyatatatcaaaatatcatgatgtaccccataaatatacacagttacgaattttcaattaaaaaattattaaaaatgaaataaaataaacaattgggcttgg

SEQ ID NO: 332896 - DNA, 201 bp, Homo sapiens
gtcaaattgatggagacagaaagtagaatggcggttgccagggtctggggaaggagaaggggaatttgtttaatgggtataaagtttcagttttgcaagakgaaaagagttcagcagacggatggtaatgatagctgcagaataatatgaatgtcttaatgctactgaaccgaacacttaaaaatagctaagatggtaaat

SEQ ID NO: 332897 - DNA, 201 bp, Homo sapiens
cttcgcctccaatgtccagaatgtacctcaaaccaattaaatcaatggaggagaggggaagagaggcgtggcaggggtgcgggcaacccagggagcccagktcattctgatttacagccaaggttgagaatcactgatccacagcaaagatgggcagatgctggcctgcagcctaaagtttggttggaacacagccatgcc

SEQ ID NO: 332898 - DNA, 201 bp, Homo sapiens
gtacatgaggcatctggaatggtcaaattgatggagacagaaagtagaatggcggttgccagggtctggggaaggagaaggggaatttgtttaatgggtawaaagtttcagttttgcaagatgaaaagagttcagcagacggatggtaatgatagctgcagaataatatgaatgtcttaatgctactgaaccgaacactta

SEQ ID NO: 332899 - DNA, 201 bp, Homo sapiens
tgtgaccctgttgggctcctttgagcttctgaaaagcctcttggccctctgtccctcattactacaaactgcccagggccttaccagttgcctgaatagcktatatactcaattaatttgagttaaaatgttaatgggtggtaatggcctttaatttgccaccacttcctcattttaacccaaacattcaatgacttagtc

SEQ ID NO: 332900 - DNA, 201 bp, Homo sapiens
caagataaggcaaattctctcatttattagcagtgcagaaacacaatagccaatgaatgtatcccgactatgatactctacctgttgacatcaccctcccrtcctacccagtcccaacacacatacagttcccccttcagagatgatgaaaaagcaagaccattaccactttgtagttatttcacattctaaattgctctt

SEQ ID NO: 332901 - DNA, 201 bp, Homo sapiens
catcagaatcacttggggagcttcgcctccaatgtccagaatgtacctcaaaccaattaaatcaatggaggagaggggaagagaggcgtggcaggggtgcrggcaacccagggagcccaggtcattctgatttacagccaaggttgagaatcactgatccacagcaaagatgggcagatgctggcctgcagcctaaagttt

SEQ ID NO: 332902 - DNA, 201 bp, Homo sapiens
tccatcttgggctcaccctgccataacctcccctagctcaagtctgcttgtgattcttctctctgaccccacacaccgagtagaccccagagtggctgacscctgactcttcctggggagcctccaaagaaatcattcctggggcagtccagatgggtaaagacaggaatttcctgggccccaacccccaggcactccatt

SEQ ID NO: 332903 - DNA, 201 bp, Homo sapiens
ccccaaaaatatatatctcttctgggaagcatcctttcccattctgaaataaccatccacttcttcagccgtcatgagccatagcacagagacagcaggaragataaccttccaggaccccagagctcagtgtgtaaggcaggcatggacactgcagcccctggcgcacaggtctccatgggtgcccagagggacaaactt

SEQ ID NO: 332904 - DNA, 201 bp, Homo sapiens
agaaagggcctttaaatcttttaacatgtgtggctgacatgaatcatagtccccagttctgtgtgtgggtaataagacttgcctcctctttccataactcmagtttatttctatttggggccatctccacagggctagaaaaagtcttcctcggtcaatgcaggattctctcgcctcccagtgactgcacctaaactttga

SEQ ID NO: 332905 - DNA, 201 bp, Homo sapiens
ggtatagcggcttcatttgcctgtccatcttgggctcaccctgccataacctcccctagctcaagtctgcttgtgattcttctctctgaccccacacaccragtagaccccagagtggctgacccctgactcttcctggggagcctccaaagaaatcattcctggggcagtccagatgggtaaagacaggaatttcctggg

SEQ ID NO: 332906 - DNA, 201 bp, Homo sapiens
tgcccatctccctggaattccttctgtgaactccgctgggcttccagaacccctctccctgcctctttctcctctcattctcggtttccccaagagctctsaaaactttcacaaatgctgcgcagttaatacacaacgtgccaccaattcccacgcagagataaacatgctacttttcatagctgctcgcctcagaaacgt

SEQ ID NO: 332907 - DNA, 201 bp, Homo sapiens
gtggccttgctaagtggctctcccctcttcatcacatcactttctcctagtccttatagaatgagacccactctcttgatttacttaacacttttaattcyaccaacataacagaactatgcccacacacatataaaaataacactattcctttacaagccgcctaaatcatttctaaacaaatacatgttcattacttgt

SEQ ID NO: 332908 - DNA, 201 bp, Homo sapiens
agttttcatggtttgtttatggatcttctgattgtaataccagtcaccaggccagccattgagggaatgctatagtttcctaggcttactgtcaattgcakaagcaattgagatgcagatcagttttctcctggtgtttctgggggaggatggatgtttccaactaccctcctgtgggagtcaaagtggaaagaaatgggg

SEQ ID NO: 332909 - DNA, 201 bp, Homo sapiens
gtccccaggtgttggtctttgtgtcgagaaaactttgcgaggaggcgagggagctggacaaagagcgggcgagggagggcgtttgccagcctgaggggtgmgccgggcggtgcgcgcacttccctgggctcagctccgtacccggtcgctcgcggtggccagagcccagtctctctaggccaggagtggcgtccggctgca

SEQ ID NO: 332910 - DNA, 201 bp, Homo sapiens
acttgcttaaacagaggggtaagcaggaggggaggggtcagggtggccaagccaagcacatgcccatgtggcagttcacatcaccagtctgacattctccrccaatctcatcagtcttcctctttccagattccaggaacaaactcattttgcagaggcagcaacgggtggtgtatgtacacaatcacttgttaaaggagc

SEQ ID NO: 332911 - DNA, 201 bp, Homo sapiens
ggggccaggtgtggtggctcacacctgtaatctcaacactttgggaggccgaggtgggtggattacctgaggtcaggagtttgagaccagcctggccaacrtggtgaaaccctgtctttactaaaaatacaaaaaaaaaaaaaaaaaaattagctgggtgtagtgctgcatgcctgtagtcccagctactcggaggctgag

SEQ ID NO: 332912 - DNA, 201 bp, Homo sapiens
gacagaacaaatttatttctcatagttccggaggctgagaagtccaagagcaaggcaccagcagggcagggcccagtctctttgcttgcaagatggcacgktgagcactgcctcctccaaaggggaggaccactgtgtcctcacgtgacagaatggcagaaaaaagtgaacccactcccaaaagtcctctttatagtggca

SEQ ID NO: 332913 - DNA, 201 bp, Homo sapiens
caaaaaaacattgaaccatccccctgcccactaccacttccagctcgctgtggagctcattctcacacccctcccaagatctcttgctgatagtctcggamatatttacagcaatcgcctgagtacatttcttttctttccttggctaaactataattttgctatttaaaaaaagttacaaaaggaatgcaaatgtgcccg

SEQ ID NO: 332914 - DNA, 201 bp, Homo sapiens
tccacttctgggtgtatattcaaaagaattgaaagcaggggccaggtgtggtggctcacacctgtaatctcaacactttgggaggccgaggtgggtggatyacctgaggtcaggagtttgagaccagcctggccaacatggtgaaaccctgtctttactaaaaatacaaaaaaaaaaaaaaaaaaattagctgggtgtagt

SEQ ID NO: 332915 - DNA, 201 bp, Homo sapiens
aagtgtccaagccagtttagagcctgggagtctgccttcagatccctcactctgtcacctaatgggccagatcactcttggcaacagcatcatcatcttgyggactgaggactggcttacttgcttctttcctcctctcctagatcctgaactccagaagacaggcatttacatccacagggtctagcaaagttctaggta

SEQ ID NO: 332916 - DNA, 201 bp, Homo sapiens; identical to SEQ ID NO: 29849

SEQ ID NO: 332917 - DNA, 201 bp, Homo sapiens
tgggaatgtaaaatggtacagctactatggaaaacagtatgacggttcctcaaaaaatttaacgtagaattaccatatggtccagcaattccacttctgggtgtatattcaaaagaattgaaagcaggggccaggtgtggtggctcacacctgtaatctcaacactttgggaggccgaggtgggtggattacctgaggtca

SEQ ID NO: 332918 - DNA, 201 bp, Homo sapiens
ctgttttccatcaacagatacgaattattctacaagggtggtttcccctacatgatagcaagagaggcaggtcatcaataaggaaagacaatggatgagamgcgccgagcttaccaagtgttctagctgccccctggctgccccggaggctcttgaacctggacacacattaaagtcacccggggagcttttgagagcaat

SEQ ID NO: 332919 - DNA, 201 bp, Homo sapiens
cttgtagagtttcttatcaatagcttgaataagaaatattactcttctgacagtgactgccaggttttaccaggaaaaaaaaaatcactaggggcaggggragaagaataagtttatcaccctccttcctgtctccaacaatgtatgtaggttataccttagggacagagtttctgcattactggaagataaatagacttc

SEQ ID NO: 332920 - DNA, 201 bp, Homo sapiens; identical to SEQ ID NO: 159488

SEQ ID NO: 332921 - DNA, 201 bp, Homo sapiens
gaaggagggagggagtgagtgacggagggagggagcccttcggggaggggccaggcttaatgcaaggagatagcacatcccaaggagccccctttcctackgtaaccacattctgctgagagctcacatgtatcacctcactcaaccttcccaagcaccctgttagtccatttgcagatgaggaaatggagactcagagag

SEQ ID NO: 332922 - DNA, 201 bp, Homo sapiens
ccgaggtgggtggattacctgaggtcaggagtttgagaccagcctggccaacatggtgaaaccctgtctttactaaaaatacaaaaaaaaaaaaaaaaaaattagctgggtgtagtgctgcatgcctgtagtcccagctactcggaggctgagacaggagaataggttgaacccgggaggcggaggttgcagtgagcctag

SEQ ID NO: 332923 - DNA, 201 bp, Homo sapiens
aatccaggatctaatctccagatccttaagttaattacatccgcaaagatgttcttttgacatgtggtcacattcacaggttccaggggttaggaggtggrcatatattttagagggggtcaccattctccccactacaccaccgtgaatgaaatcctcctgccagtatgagctacccatggtccccaatgtccctttctc

SEQ ID NO: 332924 - DNA, 201 bp, Homo sapiens
cagggaaacaattcctcctcctcctcctccagcttcttagttgatggccaaaggatgaaagaacccctaggtcagtggttcccaaatagtgagccacagakgagtggtgatctgaaaggagccagaaaaaaaaaaaaaagtgcaatgtagccatgattattaatagtttcaagttgccagctgccattgcctgaaaagaac

SEQ ID NO: 332925 - DNA, 201 bp, Homo sapiens
tgaagctctcagctctgtccaagggtttcccagtgccttttttttttattattgaaggaatgcggagggactcagctttgcttcctggaccttttttaagrttcagggaaacaattcctcctcctcctcctccagcttcttagttgatggccaaaggatgaaagaacccctaggtcagtggttcccaaatagtgagccaca

SEQ ID NO: 332926 - DNA, 201 bp, Homo sapiens
tctctgagtaagttgctgttacataagcctcccatttctctaggctgctaccaatactgcctcttccagatctctctggaggggcatagttgagatggggktgggggtggtggtgagaggaaagcagcgaaatttcatattgatgaaatatgcattaacttagagatgaaaaagcgaagacagagtttaagtaactcagtc

SEQ ID NO: 332927 - DNA, 201 bp, Homo sapiens
agacatttcaaattcaagagtcttattgttgagattgaagatttcctaaaaataactaaagagtatagccttggcaagttaaatagcctttatgggttaattttttttttttttttaatggtaagtgctagtgtggcttgataggttggggcctaaggtgaaattgtataaaagcctagacctgatggtagtgtttctctt

SEQ ID NO: 332928 - DNA, 201 bp, Homo sapiens
aaacagcctggccagataaacccttctgtcactttacttgcatcctggctgtctttctgcttctttgatccccacttttagtctccttcatgcattactctttttttttttttgagagggagtttcgatcttgtcatccaggctggagtgcagtggcacaatcttggctcactgcaacctctgcttcccaggttcaagcag

SEQ ID NO: 332929 - DNA, 201 bp, Homo sapiens
tggtgcctggccatgtgtgtttacatttaataaacctttattaaatataatctcactgtatttatgaatttatactgttttaattatagcttcaaaataaygcctgtagctttttcccttaggattattttttaaattgacaaataaaatttgtatatatttttggtgtacagcacgatgttttgaaatatatatatatgt

SEQ ID NO: 332930 - DNA, 201 bp, Homo sapiens
ttacaggtgtgtgccaccatgcctgctaattattgcatttttagtagagacggggtttcaccatgttggtcaggctggcctcgaactcctgacctcaggtratccacctgccctggcctccaaagtgctgggattacaggcttgagccaccacgcctggcccacaaatttttttattggcagtttttgctgagattatagg

SEQ ID NO: 332931 - DNA, 201 bp, Homo sapiens
ccagataaacccttctgtcactttacttgcatcctggctgtctttctgcttctttgatccccacttttagtctccttcatgcattactctttttttttttktgagagggagtttcgatcttgtcatccaggctggagtgcagtggcacaatcttggctcactgcaacctctgcttcccaggttcaagcagttcttctgcct

SEQ ID NO: 332932 - DNA, 201 bp, Homo sapiens
tttgacaaaaaatcttattagctaaccttcttcattaaccttagtcttggttcttttgtgatcaactgcaaatttcttttatttttattttccccgagacrgagtttcactcttgttgcccaggctggagtacagtggcgcaatctcggctcactgcgacctccctctgcctcccaggttcaggcgattctcctgcctcag

SEQ ID NO: 332933 - DNA, 201 bp, Homo sapiens
ttttaatagataccagacattttgaatttcaccgtgttgggtgctggatgtttttgtttttctggactgttgactccagctcttcaattcattttctttcttttttttttttttgagatggaatcttgctctgttgcccaggctggagtgcagtggtgcgatcttggctcactgcaacctccgcctcccggattcaagtga

SEQ ID NO: 332934 - DNA, 201 bp, Homo sapiens
agtcttgctctgtcacctgtgctggagtacaatgccacaatctcggctcactgccacttccgcctcccgggttcaagcaattctcccgtgtcagcctcccragaagttgggattacaggcgcatgccactaccgctggctaatttttatatttttagtagagagaggatttcatcatgttggccaggctggtcttgaactc

SEQ ID NO: 332935 - DNA, 201 bp, Homo sapiens
tttagtgatttgaaccatatcagtatattaccagttcaggggctgaacgtggtggctcatgcctgtaatcccagcactttgagaagccaaggcaggaggaytctttgagcctaggagttcaagaccagcctgggcaatatagtgagaccccatctccataaaaaaataaaaaaattagcctggtgtggtggagtgtacctg

SEQ ID NO: 332936 - DNA, 201 bp, Homo sapiens
gttgtctcctgtatttttttctgattttttggttgtttcaggtgggagagagtaaatccagttagcgtttcttcatcttgtccaaaagttgaaggcttggkgggtgggtggtgggaagagtagggcttttagtactagtgcgaggacagagtcagtgctgcacactagttataataacctcaaactgtaaacaacccaaac

SEQ ID NO: 332937 - DNA, 201 bp, Homo sapiens
taaagtggcttgctggctttacttcagtaaattctggccatgtgaagaatacctaaatcaactatcagagttcttaacagtgaacctgtcataactatgatttttttttcttttttgcaattatagaattgattttttttttccttttgaggcagagtcttgctctgtcacctgtgctggagtacaatgccacaatctcgg

SEQ ID NO: 332938 - DNA, 201 bp, Homo sapiens; identical to SEQ ID NO: 69870

SEQ ID NO: 332939 - DNA, 201 bp, Homo sapiens
gaatcttgctctgttgcccaggctggagtgcagtggtgcgatcttggctcactgcaacctccgcctcccggattcaagtgattctcctgcctcagcctccygagtagctgggattacaggcacgtgaggccacacctggctaattattttttgtatttttagaagagatagggtttcaccatgttggccaggctggtctcg

SEQ ID NO: 332940 - DNA, 201 bp, Homo sapiens
taaaaaagcattaaaggctgggcatagtggctcatgcctgtaataccagtactttggaaggctgaggtgggcagatcacttgagcccaagcattcaagacmagctcgtcgtctgtactaaaaatacaaaaattagccaggtgtgatggtgcacacctatagtcccagctactcgggaggctgaggtgggaggattgcttga

SEQ ID NO: 332941 - DNA, 201 bp, Homo sapiens; identical to SEQ ID NO: 69864

SEQ ID NO: 332942 - DNA, 201 bp, Homo sapiens
accatgttggccaggctggtcttgaactcccaacctcaggtgatccacctgcctcagcctcccaaattggctgggattacaggcatgagccactgcacccrgcctttcacttgtttcttatgcctttctggtttgtgtgcttgtctctttcttttggacctttgcaatatttttcccttgccttccatctcccctgcctgt

SEQ ID NO: 332943 - DNA, 201 bp, Homo sapiens
accagtactttggaaggctgaggtgggcagatcacttgagcccaagcattcaagacaagctcgtcgtctgtactaaaaatacaaaaattagccaggtgtgrtggtgcacacctatagtcccagctactcgggaggctgaggtgggaggattgcttgagcctgggaagttgaggctatagtgagccaagatcacgccactgc

SEQ ID NO: 332944 - DNA, 201 bp, Homo sapiens
tttatgaatggcaccactagttaccatagcctgacccaggtatacccctcattatccctcattccccctccagcaataccatcatcagttattggctaaamtccttgattctgagttctcaccttctcttgactttgcttccttcgcttgtttcttttgtgtgtgtgttttgttttgttttgttttgttttgagacagtct

SEQ ID NO: 332945 - DNA, 201 bp, Homo sapiens
agccctgagttgagagcagctgttttcattagtgaggaaattcttgggaccctgactgtaccctggcagtgaacagctgtgcgcaggaaatgcctgcggtyttattgccagctgaacacagtctaacctcttgccttgtagtattcacttcctgttctagagttcagttctttatattgttctttcaaacattcgatctga

SEQ ID NO: 332946 - DNA, 201 bp, Homo sapiens
ccagattttatgaatggcaccactagttaccatagcctgacccaggtatacccctcattatccctcattccccctccagcaataccatcatcagttattgrctaaactccttgattctgagttctcaccttctcttgactttgcttccttcgcttgtttcttttgtgtgtgtgttttgttttgttttgttttgttttgaga

SEQ ID NO: 332947 - DNA, 201 bp, Homo sapiens
ttgccttgtagtattcacttcctgttctagagttcagttctttatattgttctttcaaacattcgatctgaaaagaaccgctggccccctccccccagccyttttttttttttttttttttttttttttgcgacagagccttgctctgttgcccaggctggagtgcagtggcacgatctcggctcactgcaacctccactt

SEQ ID NO: 332948 - DNA, 201 bp, Homo sapiens
ttcacaaaatatattttatattaatgggcattctactaaaaacaaattttcttttctccccctctctgccttttttttaaattgtagtaattccagatacrcttactgacatggtgaatcaaatgacagaaaaagtaggcttggttcacgggctgccttacgtagcagacagacagggctttgctgccaccttagagcagg

SEQ ID NO: 332949 - DNA, 201 bp, Homo sapiens
catgataaacatttagggattttaacactgtataaggtgaaggtattaaaaattcatgatgatattggcctcataaaatataacctttagtagtagtcatyacagaacagaaataggttgaggaaggggtgtaaattccctttctaaccacctatatgtccgtgtgaagtagagatccctgagtaaaccttctgaaactca

SEQ ID NO: 332950 - DNA, 201 bp, Homo sapiens
ggtcttattgccagctgaacacagtctaacctcttgccttgtagtattcacttcctgttctagagttcagttctttatattgttctttcaaacattcgatytgaaaagaaccgctggccccctccccccagcctttttttttttttttttttttttttttttgcgacagagccttgctctgttgcccaggctggagtgcag

SEQ ID NO: 332951 - DNA, 201 bp, Homo sapiens
tgtaccctggcagtgaacagctgtgcgcaggaaatgcctgcggtcttattgccagctgaacacagtctaacctcttgccttgtagtattcacttcctgttytagagttcagttctttatattgttctttcaaacattcgatctgaaaagaaccgctggccccctccccccagccttttttttttttttttttttttttttt

SEQ ID NO: 332952 - DNA, 201 bp, Homo sapiens
ttccttatttattctgcttgcagataggctcctaattagaagcttcactccattaaagcaacacttgttatcataagtgtttgcatccattgtgaatgctstcttttaaaactttgcataatacagttgcttgttttttcctgtgctttttgttcaatcaatacatgctagtaagtgcttatttttttaaagaatttaatt

SEQ ID NO: 332953 - DNA, 201 bp, Homo sapiens
atgtccactcaagttgcaatgcaaaactctggctcatattcaatttctcagtttcaatccagaatgatcaggtaaatcaactgttttctttttatacttcrttaaaaggaaagtggggaggggggtggtaatttttacaggtttaatgtagttaaatgaatgtacctaaaggttgaagatttttgtttagttgcagaaaat

SEQ ID NO: 332954 - DNA, 201 bp, Homo sapiens
tgaaaagaaccgctggccccctccccccagcctttttttttttttttttttttttttttttgcgacagagccttgctctgttgcccaggctggagtgcagkggcacgatctcggctcactgcaacctccacttcccaggttcaaacgattcttctgcctcagcctcccaagtagctgggatttcaggtgtgctaccacacc

SEQ ID NO: 332955 - DNA, 201 bp, Homo sapiens; identical to SEQ ID NO: 69872

SEQ ID NO: 332956 - DNA, 201 bp, Homo sapiens
atttgtcagtgaattatatgatactttgctaagaagccactgaaagattcatatgactgacttagcatttctctatcacaaaatacttgttttgttttggttttttttttttttttgagacagtctcgccctgacatccaggctggagtgcagtggcgcaatctcggctcactgcagtctccgcctcctgggttcaaacga

SEQ ID NO: 332957 - DNA, 201 bp, Homo sapiens
atgctgtgcctcagagagcttgtgtatttaccttacggtggatggcttctgtatttttatctctaggctaaccttacctgctgagctctctgtatctgttyatttatttactcttcatttattcaaaattatttttaaaaattgagaacatactgtgtattattgctttgctgggctctggagaatttatattctactgta

SEQ ID NO: 332958 - DNA, 201 bp, Homo sapiens
tgggatgaggtgggaagatcgcttgagcctgggagattgaagctacagtgagtgccactgcactccagcctgggtgacagagcagaaccccgtctcaagtaaaaaaaaaaaaacaaaacaaaaaaagtttaaagagaatggtctttctatcacagggtaaaaaaattgattatttgagggaaaaaaaaaaggatttgtctt

SEQ ID NO: 332959 - DNA, 201 bp, Homo sapiens
tgtcaggtttcagtagaaactagtgtttgtttactgttatcacatttcaactcccattcatttactttttaaccgatttttagctgtctacccttatcctycatgaactgccccaattcttgccaaaagtgctcagagatagcagcaagtacatatgtaatctactggacattaccattcttaccttggtctctccagcag

SEQ ID NO: 332960 - DNA, 201 bp, Homo sapiens
tctcctcagaaaggtggttgagattcattttattagatccatatgtttaaaataatgtattttattaagaatgtaataacaattcacaaaatatattttayattaatgggcattctactaaaaacaaattttcttttctccccctctctgccttttttttaaattgtagtaattccagatacgcttactgacatggtgaat

SEQ ID NO: 332961 - DNA, 201 bp, Homo sapiens
ggtgggaagatcgcttgagcctgggagattgaagctacagtgagtgccactgcactccagcctgggtgacagagcagaaccccgtctcaagtaaaaaaaamaaaacaaaacaaaaaaagtttaaagagaatggtctttctatcacagggtaaaaaaattgattatttgagggaaaaaaaaaaggatttgtcttgtagccag

SEQ ID NO: 332962 - DNA, 201 bp, Homo sapiens
tccttaaatattagctaccctcaagtaaaacagaggtccttttttacctggaggtgtatatgtatatgtgtgtgtgtgtgtgtgtgtattctttctttgakacagggtcttgctctgttgcttaggctggagtgcaatggcacgatcttggctgactgcaaccaccgcatcccaggctgaaatgattctcctgcttcagct

SEQ ID NO: 332963 - DNA, 201 bp, Homo sapiens
gtggctgatgcatttcatggctatcatctacacgtgagtgagggaccgcaggaggggctcggggcaggggtccgggcctcggagacaggcgagaatgggawacgtttgcgctttgaaggggactgggctcgggcgggggtggagaaagctgatcgtcaggctgttccccccgttccctcgcccctcggaccggcggtggcg

SEQ ID NO: 332964 - DNA, 201 bp, Homo sapiens
aatttatgtgtccttaaatattagctaccctcaagtaaaacagaggtccttttttacctggaggtgtatatgtatatgtgtgtgtgtgtgtgtgtgtattytttctttgatacagggtcttgctctgttgcttaggctggagtgcaatggcacgatcttggctgactgcaaccaccgcatcccaggctgaaatgattctcc

SEQ ID NO: 332965 - DNA, 201 bp, Homo sapiens; identical to SEQ ID NO: 69879

SEQ ID NO: 332966 - DNA, 201 bp, Homo sapiens
gcttcctcttagtatttttttcttaattttttcacatattaccctgaattcacccagtattttacttcgttatatgagagctagagccctaattatagttycttctaaatatttagagacttgtccagaattacttatcagatgattatttgattattccactgttttgaaatatttttattataaactaaattctgcttt

SEQ ID NO: 332967 - DNA, 201 bp, Homo sapiens
aataaataaggacataggcagtcctgtgacttaagtatggcttttctacattggttgcctgttaaaatcacctggagaacttgtaaaaaaaaaaaaaaatacacaacacacaccctgggccctgtacacaacacacacacacaccctgggccctgtacacaacacacacacacaccctgggccctgcccacatagattttg

SEQ ID NO: 332968 - DNA, 201 bp, Homo sapiens
agaagtggtgcacattttaaactttgatacatattggccccatggaaatgttatgtatattcacagtcctggtaacattgtatgatggccccattttgccktacaaacactaagtagcaggcatttcactgttttctgtttctattttcattcctttaaagttacattgagcacttttaaaatatgtttatatgctagtta

SEQ ID NO: 332969 - DNA, 201 bp, Homo sapiens
atcaccatgttggtcaggctggtctcgaactcgtgatcttgtgatccgccctcctcggcctcccaaagtgctgggattacaggcctaagcccctgcgcccsgcctgtttttttccttaaactttgagaagctagcagtttttggaaggaatcaagaggtgaccctgtcaagtctatcttatcaacatcctacaagcccatt

SEQ ID NO: 332970 - DNA, 201 bp, Homo sapiens
cattctagaaggaaggagcagataaaatctaaataaggttatgagattgtgacgaagcgtgtaagtaaaatagaactgggtgatggcgtgaatagagacakgggttatgtggctagtttggtatatccactgtttaaggtgaaatctgcctctgtaaagaaatgaaaaaattatatagagcacattactgatatcgattca

SEQ ID NO: 332971 - DNA, 201 bp, Homo sapiens
ccaaaagcctacaggcttatttgaaagacttgtagaggtgtgtttgccattagtgtttttttttttttaacatagagctgatgtggtctctctaaaaaacmagtaagtcgtataaaatgatatcagatctttgctatttgaagatcgggcaatgatttaaattttttattagcttaaaatgcaaatttgaaaattaatata

SEQ ID NO: 332972 - DNA, 201 bp, Homo sapiens
tttcatctgggccgagatgtatggtgtattgtttttttctcccgacctgggccacgtttctgttagggtggtgattgtgtccacttttctgggagctgctsacagctatctggacacctctctgtggattttcttcttcctggaagggctctatgcgcttagataggtgtgaagcacctgtccaccctgaaaaatgtccac

SEQ ID NO: 332973 - DNA, 201 bp, Homo sapiens
ggtagaccttaagtcatgtgctaatcatgaaagctgggctcaccctgaataccggcagttgcctggtctttataatgattactgaatgcataaccagttaygcttgcatgtgttcatcatcataacttattttctaattatcttaattttcagaggttggaggtttgcaatgtccactcaagttgcaatgcaaaactctgg

SEQ ID NO: 332974 - DNA, 201 bp, Homo sapiens
gcatgtatatatacacacatatacgtaacatacaaatatgtatattgatcccagtaaagtagatgtgtgtgtatatttacatgaacaccctaaaaacaagrtacattgaatatttgttaatattttatatatcaatgagtgatatttttaccttattttgtatctaaattaagttttatttggatgcatttttagcttact

SEQ ID NO: 332975 - DNA, 201 bp, Homo sapiens
catttggatatgagttagcatagcagctgagaagaacacagcagctgagaagaacatgaactctagtaaactctagtcactcccctggaccacacccacayatataaacacaggataccagtggtttatcaagatcaggccctgaactgataatttgcctggaatctttgtatcatttaaaggcaatttacagtaacacag

SEQ ID NO: 332976 - DNA, 201 bp, Homo sapiens
ctaaatttgacagatgaaaatgtacatcattctttaaatatatggctttttaatggctggtaagatcgagtatttttgtatgtatgatttttatcatttaktcattggattttcttccacttcttaatcttatttatttatttatttatttatttatatttatttatttatttagagaccgagtctcgctctgttgcccaa

SEQ ID NO: 332977 - DNA, 201 bp, Homo sapiens
agttttatttggatgcatttttagcttactaactgtgcttgctctatgaaagcaatattgtctaccactttttattcaggtagtctacgtaagaataatargatattcactcaatcatacttataaaaaaaccattgggaaaaacagttcgtgaacaccatgcttttaacatgaaattctaatcatacacgtttgtggttt

SEQ ID NO: 332978 - DNA, 201 bp, Homo sapiens
ttctttatattgttctttcaaacattcgatctgaaaagaaccgctggccccctccccccagcctttttttttttttttttttttttttttttgcgacagarccttgctctgttgcccaggctggagtgcagtggcacgatctcggctcactgcaacctccacttcccaggttcaaacgattcttctgcctcagcctcccaa

SEQ ID NO: 332979 - DNA, 201 bp, Homo sapiens
taatgttataaggacagatatgtgatttcagtctttaaatatgtcaacttgctcttaagcatatctgcatttatattcttttgaattgcagtcttatgatygccacatatctgaaggggtaaaggtacattgtgggaacttgcatctggcctttggcagtttgaaccatgagctctttcttaatattgcctgtaaatatat

SEQ ID NO: 332980 - DNA, 201 bp, Homo sapiens
gagatgtttgctaaagattgggcaataatttaaattttttattagcttaaaatgcaaattagaaaatgaacataaatgttgcactcctatgagttaatcargaccattacagatctatcagctggtcagagatgatgttcattcttcatatttgctatcttaaattatttactatcatatgtttttcagtgtacagatctc

SEQ ID NO: 332981 - DNA, 201 bp, Homo sapiens
gcttggagtgatgataaaatggtaagaaataatataaatgttgaagaaagcatcacaacagaactataggagtctaaatttaataaatctttaaaaaaaamcagtgtctagaatatataccatgttttattatttaaaatcattgtcttaaatttttgttcaaaaaataaaaatttgaatacaatcaaaacgttagcaata

SEQ ID NO: 332982 - DNA, 201 bp, Homo sapiens
ataacatctctgtgatgtgtatgtcaataaacatctcccagaatacacccattgccttagtgtaggtttaatctctggaagtcactctgccatacttagarttaatcattctcaactgtaaagagcacattcagctcagtgactaacatctcattcctaagacctcaataactactaaggaattaagatatgtgcctctgt

SEQ ID NO: 332983 - DNA, 201 bp, Homo sapiens
tgtaatcccagcactctgggaggctgaggcgggcggatcacaaggtcacgagatcaagaatatcttgaccaacatggtgaaaccccgtctctactaacaayacaaaaaccagtcaggcgtggtggcgtgcgtctatagtcccagctactctggaggcggaagcaggtgatcgcttaaatccgggaggtggaggtttgcagt

SEQ ID NO: 332984 - DNA, 201 bp, Homo sapiens
gaggagaaagctattttgacattcattgtaagatgaagaatagcatctgcagattattttattctttgttagtacagaattttattttctaattataaacktatatttagctgtataaatagaaagtttggaaagcagaggagaagtgcaaagtacctgcaatctaagggaaatatttgatttcacagcattttatttact

SEQ ID NO: 332985 - DNA, 201 bp, Homo sapiens
aaaagtaggcttggttcacgggctgccttacgtagcagacagacagggctttgctgccaccttagagcaggtgagtatggtggttataaatcatgttcatrgtatcagacccctcatttcccagaagcttgagactatgggagctggaattaggtatctcaagttaactgtattaagtccatttgggaacctgctgtgttc

SEQ ID NO: 332986 - DNA, 201 bp, Homo sapiens
cctgccacctcttggcttcatttaattctccatttagcctagagcccacagttcatcacttcattatcttgcctcttgcctcacctcgtatcagtctgccmtgttatcttgaatccatccaataattatagctgctcaactttgaaaatcctacagagggtaatcacacagccatgtggactaatactactacacattggt

SEQ ID NO: 332987 - DNA, 201 bp, Homo sapiens
agaagagatagggtttcaccatgttggccaggctggtctcgaactcctgacctcaaattatcctcccgccttggcctcccaaagtgctgggattacaggcrtgagccaccgcacccagcctaccttattttctgtgtcataggaatcactgtcttcctttgcttgatgtccagtatcttcaaaactgttgtctcctgtatt

SEQ ID NO: 332988 - DNA, 201 bp, Homo sapiens
ttaagaataaacattagtggttcgagctaggaaagtatggattaaaacaagattaagcatgaaattttaaaagaaaatgaatatgtgatttaatttaattwatttatttatttttgagaaagtctcactctgttcccaggctggggtacagtggcacgtgatctcagctcactgcaacctctgcctcccaggttcaagcaa

SEQ ID NO: 332989 - DNA, 201 bp, Homo sapiens
ccaccatgcctggctaattttttgtatttttgatagagacaggttttcaccgtgttagccaggatggtctcgatctcctgacctcgtgatccaccctcctyggcctcccaaagtgctgggattacaggcgtgagccaccacgcccggcaggaagtttctggttttaaaaataaacattgtatcatttggacactttggagt

SEQ ID NO: 332990 - DNA, 201 bp, Homo sapiens
ttttcatgtgatgaatttggaagggccctttaaatttattataatgggattttatatgaaatttgttgcaccttcatgaaataatattaagtatagagacraagcttctagagagaggttgtgtttattttgcttccttttgatgtcactttttactctgctaggcaccctgtgagcagttagtaaatcttcagtagtgat

SEQ ID NO: 332991 - DNA, 201 bp, Homo sapiens
gccctgtgatatagtctggcttattttgagtagaaatttcagatatagtacttaacaattctctttatccataaacctagagagggctttgtggctgttgrgagagtcagaatgaatctatgataaaatactgcattctcaacatgaaaagttcttcaaaggaggaggtgtatctaatgatatttaaagtaaaacatcttg

SEQ ID NO: 332992 - DNA, 201 bp, Homo sapiens; identical to SEQ ID NO: 69867

SEQ ID NO: 332993 - DNA, 201 bp, Homo sapiens; identical to SEQ ID NO: 69868

SEQ ID NO: 332994 - DNA, 201 bp, Homo sapiens
aaaaaaaaggatttgtcttgtagccaggatattgttttaaagaaaatcctttttgtttttccaggtggaccaaactacgaattaacatgcttcctgctacrataatttgtgagccaatttcagaatgctttgttgccagtttaattattggatgggcagcccaccatgtgttcagatgggatattatggtatttttcatgt

SEQ ID NO: 332995 - DNA, 201 bp, Homo sapiens
tttatgaatttatactgttttaattatagcttcaaaataacgcctgtagctttttcccttaggattattttttaaattgacaaataaaatttgtatatatwtttggtgtacagcacgatgttttgaaatatatatatatgtacacattgtggaatagctaaattaagttaattaacatatgcattaccacacatatttatt

SEQ ID NO: 332996 - DNA, 201 bp, Homo sapiens
ataaaagaatgaaaaggtgatgcagttcattttccacagcattgaacactcatttgtcaccagcgtagaagggatttggggagagattaagcagtagcagkaatagtcaataatctgcgtctaaagtggcttgctggctttacttcagtaaattctggccatgtgaagaatacctaaatcaactatcagagttcttaacag

SEQ ID NO: 332997 - DNA, 201 bp, Homo sapiens
cgtcctcttcttggtgctgtggctgatgcatttcatggctatcatctacacgtgagtgagggaccgcaggaggggctcggggcaggggtccgggcctcggrgacaggcgagaatgggaaacgtttgcgctttgaaggggactgggctcgggcgggggtggagaaagctgatcgtcaggctgttccccccgttccctcgccc

SEQ ID NO: 332998 - DNA, 201 bp, Homo sapiens
gttttttcctgtgctttttgttcaatcaatacatgctagtaagtgcttatttttttaaagaatttaatttacatacaatgctttttgactagtatgaagtrctcctttgtgtacaagatcatgatgatccagccattgatgtatgtaagaagcttcttggaaaatatccaaatgttgatgctagattgtttataggtaagt

SEQ ID NO: 332999 - DNA, 201 bp, Homo sapiens
gaacctgctgtgttctagaagccctgagttgagagcagctgttttcattagtgaggaaattcttgggaccctgactgtaccctggcagtgaacagctgtgygcaggaaatgcctgcggtcttattgccagctgaacacagtctaacctcttgccttgtagtattcacttcctgttctagagttcagttctttatattgttc

SEQ ID NO: 333000 - DNA, 201 bp, Homo sapiens
tacgtgtcaggctgaaggtggtggcttggtttgattgtgctggggattcgtgtaatttttcatctgggccgagatgtatggtgtattgtttttttctcccracctgggccacgtttctgttagggtggtgattgtgtccacttttctgggagctgctcacagctatctggacacctctctgtggattttcttcttcctgga

SEQ ID NO: 333001 - DNA, 201 bp, Homo sapiens
tcttaaattaaataataggtgccattatttgttttcacagtctctagactagcattgtctagtagagctttctgtgataataggaatgttctgtatattgkttagtacagtagccactagccatgtgtgaatactgacttctagttttcagtggctagtgcaactaaaagacaggatttttaaattttatttaattcaaat

SEQ ID NO: 333002 - DNA, 201 bp, Homo sapiens
ttcatggttttaggcccagttataccactttttttttttttaaatgataacatcaaaagtctaaatttagttcaaaaacaggctggccatgatggctcacrcctgtaatcccagcactttgggaggctgaggcgggcggatcacataaggtcaggtgttcaagaacagcctggccaacatggcaaaaccccatctctactt

SEQ ID NO: 333003 - DNA, 201 bp, Homo sapiens
gcctggccaacatggcaaaaccccatctctactttaaaaaaaaacatacaaaaattagctggatgtggtggtcgcgcctgtaatcccaactacttggaagkctgaggcatgagaatcacttgaacccaggaggcgcaggctgcagtgagccaagatggcaccactgcactccagcctaggtgacagagcgagactctgtct

SEQ ID NO: 333004 - DNA, 201 bp, Homo sapiens
cttgaactcctgacctcaagtaatctgcctgtgtcggcctcccaaagtgctgggattacagacgtgagtcactgcacctggcctcaagtttagatcttcarcgctcattgtggttactggactctgaatgtgataagagaattatgaagtaatttttagaatagcaaagcataaaagctggatcttggaaattccccattt

SEQ ID NO: 333005 - DNA, 201 bp, Homo sapiens
gccaagatggcaccactgcactccagcctaggtgacagagcgagactctgtctgaaataaataaattaatttagtttaaaaacatagagaaactgtaagtrcttggtagcttggacttgaaactactcttgttaaagcttgaatttactttggttttgcatttgtacagttaaaacttagacaaacgtattgtcttagagt

SEQ ID NO: 333006 - DNA, 201 bp, Homo sapiens
gtcaaaactgatcaggcattgactctttctctgcaactaactagcttctggatatggggcagatttttcccttacttccatttttctcatctgagaaagcrggtgatgaccaccaactctgtggcacttaaatgaagtaatgcataccaactgtctagtgtgaagcctggtggacagtaaacatacagcaagtgttcccac

SEQ ID NO: 333007 - DNA, 201 bp, Homo sapiens
aacaatgatggagtcagaccccaaaagcatgtaattctgaggctacttttgatgtgttttggttatattttctctttgtgaagttaactgggccataagawcatcaattccatgcatgaccttggcctcattgccactacactacaattaactgagccaattaggcagaagagttctcattatattttcttataagttatt

SEQ ID NO: 333008 - DNA, 201 bp, Homo sapiens
aattgatacatagtaaatgctcaactagttggattttgtccttttttttctaaatctgaatgacgcttgagttaatagcacttaatgtcagtgtgtgcactgatgtttttaagtttgattgcccactaatctttttcatttatacagcagactgagaggaagatgaattgttgagctatctgcttaggggtgaaaatacta

SEQ ID NO: 333009 - DNA, 201 bp, Homo sapiens
tttagaactacctatgggtgtcaaaattatttaacccttattgggtgaccttgcttagctaaaatagaagaaataatccatttagactttgtcaaatgctrgactcaaacatctctgaagagacctttttcccttcatttattagtcagatcttcactcttacaggtctctagagaaaacattctgtagtttttttctatt

SEQ ID NO: 333010 - DNA, 201 bp, Homo sapiens
atctgagctttattgtatgtatctcgagaactgttctttgaaaattgaattgctttcgagcattgctgaactggcctagtaacgtgctgaaactaaccagwcatatggcttaaatagatgtgtcagacaaaggaagcattaaccttaatcttatggaatgttttattcaagtgaagttagggataaagtaaatgatcgtat

SEQ ID NO: 333011 - DNA, 201 bp, Homo sapiens
tagatattttccaaatttaacatgtttaaaaagtacatttatttccccccgattcttcactgctcacttttataccgactgattacaaagaaaaacagatkgaaaacacacacatacacagaaagcttaactgttgttctatcttcagtagcagcagcaccagcaaccttatcaaataagcaacatcttcagggttgtctt

SEQ ID NO: 333012 - DNA, 201 bp, Homo sapiens
gataatcattttcagtttcttaaaattcatgattatgataatcacttcagtttttttgtttaccatatgtgcttcatgcagtatttttgttttttttttttctctgttgaacagtttacttttacagaatatttttgacacaggaattactgaatttttcttaattctgataatttcgaggggtataagtatgctccacag

SEQ ID NO: 333013 - DNA, 201 bp, Homo sapiens
gtaacaggaatttctgtgaattgtgcttatacatcaaaaatattggtaaggtttttgaaataatttatgaaaattaatttttaaatctataatgatcagaytatatgtaagtcttcagaccaccattactgtatgtaaactgaactgttaagtttttaaaaggcatatatttatttatataatggtttttaaatttgtgtt

SEQ ID NO: 333014 - DNA, 201 bp, Homo sapiens
cactgtgtaaatttaaaaagtttctgtggtatttatggtttggggtggtttttttttccatttgtatagacaatttagttaaaaattgcatcatagataaraaatgttctgttaagtttcagtagaagtaggaaaagtatactattgattaatcgttgaaccaataaatgttgtaattttcaataattgactaaaataaca

SEQ ID NO: 333015 - DNA, 201 bp, Homo sapiens
tgcttatacatcaaaaatattggtaaggtttttgaaataatttatgaaaattaatttttaaatctataatgatcagactatatgtaagtcttcagaccacyattactgtatgtaaactgaactgttaagtttttaaaaggcatatatttatttatataatggtttttaaatttgtgttatgagtgaggtctgctgatcaac

SEQ ID NO: 333016 - DNA, 201 bp, Homo sapiens
ttgaacccaggaggcagaggttgcagtgagccaagatcgcgccattgcactctagccagggagagaagagcgagacttcatctcaaaaaaaaaaaaaaaaatacattgtcattttgttctgtaatttaatccaatatgcagcataggaaaaactgaccttagagaatgtttttataaaaataatgttacctggaaaaaggg

SEQ ID NO: 333017 - DNA, 201 bp, Homo sapiens; identical to SEQ ID NO: 69883

SEQ ID NO: 333018 - DNA, 201 bp, Homo sapiens
aacaaaacagaagatgtggatttgggaattacctccctagaagcaggaagagatggcatcatcaagggagaggagtatagagaggcattatgaaaaacaaactttaaataggtatatagtatgatttttattcattatgtaatgaaagaaaaggtagtagtgtcactgaaaataacttttggcattaactctcattctgat

SEQ ID NO: 333019 - DNA, 201 bp, Homo sapiens
cattcagagattttccagcaggagaaccagaaccagagtgggataatgaaaatgatattgtcaccggccttacatgcattgctgttgtggggattgaagaycctgtgagacctgaggtggtgaaacattctgtgttctgcatgtgcagaatctcataactatagaggacctaggccttaattgtaaccagttttctagtaa

SEQ ID NO: 333020 - DNA, 201 bp, Homo sapiens
tggttttgtaggtacatgatcttgtttggatttgttatatttcatatattgtttaccttgataatcattttcagtttcttaaaattcatgattatgataakcacttcagtttttttgtttaccatatgtgcttcatgcagtatttttgttttttttttttctctgttgaacagtttacttttacagaatatttttgacaca

SEQ ID NO: 333021 - DNA, 201 bp, Homo sapiens
ttgctggaactgatgtagctaaagaagcatccgatattattctcacagatgacaactttacaagcattgttaaagcagttatgtggggacgaaatgtctaygacagcatctcaaaattccttcagttccaacttactgttaatgtagtagcagtgattgttgcttttacgggcgcctgcattactcaagtaggtgatgact

SEQ ID NO: 333022 - DNA, 201 bp, Homo sapiens
atagaaagctgggagttttctaattttaaaacaatttataatcattttaatgtaatgaggtgattggttttatatgcagcttaactagtttttttttttttggtcactgtagaaaatgatgaaagataataacttagtaaggcatctggatgcttgtgaaaccatgggaaatgctacagctatttgttcagataaaacagg

SEQ ID NO: 333023 - DNA, 201 bp, Homo sapiens
tagtttatgcattagctttatttgatgtcatgaaatctgactagattgtttcttttgagcaatttaataatattgtatgttggctttgtattctgttaatkttttaatgtctgtcaactcaactgaaccttttaataaccctttaatgcaggacacaggcttagaatagttgtgtgtatttaaattaaaaatataattgaa

SEQ ID NO: 333024 - DNA, 201 bp, Homo sapiens
atgttgtaattttcaataattgactaaaataacattttctttcaggtttttagtaaatagcaaactttctaaaagccttataagctataaatcttactgaraattcatggcgcattctcaatatattggaggcattaaagatgtaaaccccaaaatttacagagctacctaaggttagccttgaagtagacagagacctat

SEQ ID NO: 333025 - DNA, 201 bp, Homo sapiens
tgtattcgaaggaatctttaacaatgccatcttctgcacaattgttttaggcacttttgtggtacaggtgggtaattggaaaagatagtttcaaatttgcstgttaaatgggagacattaggtaaacagcttgttctagcaatcacttgtgtggaacatgtgtggaactgttgccttggtgacatatataatatcatggtg

SEQ ID NO: 333026 - DNA, 201 bp, Homo sapiens
tgacatatttctgtattttctgatatttacagattcgagtggtgaatgcatttcgtagttctttatatgaagggttagaaaaaccggaatcaagaagttckattcacaactttatgacacatcctgagtttaggatagaagattcagagcctcatatcccccttattgatgacactgatgccgaagatgatgctcctacaa

SEQ ID NO: 333027 - DNA, 201 bp, Homo sapiens
agaatatgggaactgaatctcctgttcttagaagtaaatgccacaaccaactagacaaacagttttatttcttccaactgtaaagtgaaagatattatttyttaggaaacaaagtcagccaatcaattaattgtttcccagcattttagtattctttttacatcccacattataccaaaaaaaagatcaggtttaaatttt

SEQ ID NO: 333028 - DNA, 201 bp, Homo sapiens
agtttaacgttttgtgattgaaagttttccagacttgtttcatcatagaactagtttttatttgaataccaattaacaccatagagttacttttagaaatkttaaggattttgagcaagggaatggtgagatttgcatttgtataatatgggtatgatgagaatcaagaaatcccattgagtttaagtgtgttaaatatat

SEQ ID NO: 333029 - DNA, 201 bp, Homo sapiens
tctccagccagcgaaggactagaggaaccttgagaagctgcagagaggatgaattaagggagaaaacagtgcagactttccacttaatgcgtgtttgttcygtatttacttaagtatattttcatttgatattttttaaaatgtggtgaaacaggcacagtaagaactgtccctgttttacaggtgtgaaaactgccttag

SEQ ID NO: 333030 - DNA, 201 bp, Homo sapiens
cttgaacagttctcatcacccatcaagtttgctggctgatcctctaatttgtattctcctccgtgcctacgggctgctgataccaacaaatttttttttaraaagttatctttttgcattttaagctttacagtttgttattaggacagtcaggatacttgctgaatgttcacatgtataaaatgtgaattttaagacttc

SEQ ID NO: 333031 - DNA, 201 bp, Homo sapiens
gttttaaaatgttaactaccaaaattatttttgattttaatatttgggaactagttaactgccatatcaaagagaggcctgtcagactcacaggagggtgratattgttaattgattctttttttaaaaaattatttattttttaattaagacagggtcttgctatgttgcctaggctggtcttgaactcctgggctcaag

SEQ ID NO: 333032 - DNA, 201 bp, Homo sapiens
ggaatgtagttgcttggggttatattggaaacagtataaaattattattcttggtcataagaattttactttttagtaagcgtaatttaaacatgaaataygcatgcatcaaaaatattgggcagagattttactttatttcagttgtctttttttctaagaggcaaagtggactggaggggaaagaggaaaggtctattt

SEQ ID NO: 333033 - DNA, 201 bp, Homo sapiens
aactcctccctcccctttcctcctaattcttcaattctcaaaattgcctgtcttggaatatgactaccatccacccacttaagtgcttgaagacccctccycctcgcaaaaaaaaacaaaaacaaaaacattctttccctttcatcctacatccagtccttaagtacgttgtctgatctccttccaaaatacctggcaaat

SEQ ID NO: 333034 - DNA, 201 bp, Homo sapiens
aagtaaatggggggaaaaaagacatgtctgatgctagttcagctaattcatttagttaatgcacaataataatagctggccagcatttattgatgtttgcwatgtgctaggcactgttctaagtaccttaaatatattatctcagataactttcacagtaaccctatgaattagattgtgttacctcccttttacaatgag

SEQ ID NO: 333035 - DNA, 201 bp, Homo sapiens
tacttgcaaatgcatgtcattattttttaaatgtgacagtgatttatgcattgttcattttaagcccattactataaaactaatttatagaaaatctaacmttttcatagatgaaggttaatatatattatggcatataatttgcatgagctaatttattgtcattctgcaaatcagtgaaaccagactttcaggttttcc

SEQ ID NO: 333036 - DNA, 201 bp, Homo sapiens
cagttagtggtggggatatgaccaagacttaaaactgtttactttgcctgagcacattcactgccaacatctgattacctgtggtaaggcaaaatagaacstaaacaattggagtctggagaaaaccagaattgttaaaagaaataaattatctactttttcactatcttgaattatatttcttgttttccctgcactttc

SEQ ID NO: 333037 - DNA, 201 bp, Homo sapiens
acaatgatggagtcagaccccaaaagcatgtaattctgaggctacttttgatgtgttttggttatattttctctttgtgaagttaactgggccataagatsatcaattccatgcatgaccttggcctcattgccactacactacaattaactgagccaattaggcagaagagttctcattatattttcttataagttattc

SEQ ID NO: 333038 - DNA, 201 bp, Homo sapiens
tcatggtgtaatccaataatcaaatacatctatggtagtaaaacctaaggtaattaaaatacttttatttaaattttatttggattaatgcgggactccaratattgagactgtgttcagtattccagtcccggaacattagaagtgaagagttgctgtctcctaaaaattcacagcacatggaaataattacaggacagt

SEQ ID NO: 333039 - DNA, 201 bp, Homo sapiens
tcagacctcactcttttcataaaggagagcaaatctgagatcacctcacctgagttagcccatatttcatagaactttccaagttgcctttcttctcatayagtctgtgtttatcttagtatgtctaaatgttaactagaaataaacagctatgtggaatttttttaatattgtgcatttttccagtaacatacagtcttt

SEQ ID NO: 333040 - DNA, 201 bp, Homo sapiens
ttcattattagacctgtcttgataagaattttttttgcttactgtttgagtttattttcttttcaggcatttaacaactttcatttcaaaaataaagtggtaaatgtatcaaagtgataagatacagtataatcatctatctgtcctttgttgatattttaaagtaatttgaaatatttggggtaaatacaagttttggac

SEQ ID NO: 333041 - DNA, 201 bp, Homo sapiens
attatattttggtttcactgagctttcttttaatcttcttcacatttctattctactatacttaatgtgcttggtttttgaacacaagactaggacttcaytttgacaccttacatttctcttgttatattcagcccatcattagatatcaaaatctttttaaaatgttgatccattgtatctactgtccctccaagtgtt

SEQ ID NO: 333042 - DNA, 201 bp, Homo sapiens
gtgcacttaagagagtggcaaaggaaagtttgtagttgttgctttatcaaggtttgagatgtttacttctttattctgtgtcctatgttcttggagttatycagggagtaaatcatatctcgttaatacagttgtcattatacaccaagagttgcagtaattatgttgctgttaccataaatgtctttcaaccttgttggt

SEQ ID NO: 333043 - DNA, 201 bp, Homo sapiens
cttcattattagacctgtcttgataagaattttttttgcttactgtttgagtttattttcttttcaggcatttaacaactttcatttcaaaaataaagtggtaaatgtatcaaagtgataagatacagtataatcatctatctgtcctttgttgatattttaaagtaatttgaaatatttggggtaaatacaagttttgga

SEQ ID NO: 333044 - DNA, 201 bp, Homo sapiens
tcttttccccctgagtcttatacactggttttattaatctagtctagaacattccccagaaattaacatctaatttgttgactccctttttttgttgttgwtgttttttttttaaagaacagggcaacattttttcttctgtgggcctccagcccttctcccattcccttgactgccttagcgattactcagaagcagtcc

SEQ ID NO: 333045 - DNA, 201 bp, Homo sapiens
taaagacttacttggtagggtgaaggaatggcaaaatggatgttcatccaactagctctgtcttaacctcctcatatctttctaattccatactccagacrataaatgttacatcctacagtatacctcctacagtataccttttaccttaagtgacaataggtacattcaatagcaccacctattacttctaagaaagat

SEQ ID NO: 333046 - DNA, 201 bp, Homo sapiens
tacttttacagaatatttttgacacaggaattactgaatttttcttaattctgataatttcgaggggtataagtatgctccacagagtaggtttaaatagwtaataaataggaattgaattttaaaactggataaaataaataggcttggattttcaaaagcctgtaattaagtttacttatatttctacttaaattgaat

SEQ ID NO: 333047 - DNA, 201 bp, Homo sapiens
tcttcattattagacctgtcttgataagaattttttttgcttactgtttgagtttattttcttttcaggcatttaacaactttcatttcaaaaataaagtggtaaatgtatcaaagtgataagatacagtataatcatctatctgtcctttgttgatattttaaagtaatttgaaatatttggggtaaatacaagttttgg

SEQ ID NO: 333048 - DNA, 201 bp, Homo sapiens
ttagcactaattaggagttccttaacaagtcagccacccatcctctctgttgctcagttttattatttatgaagtggttagaaaaaaaaaatctctaataytgttcaacaaattcagataggaaaaatcttctcagaattgaagttttgctaagaagggatttaatctttctttgcctgccaccggtgtatgtgtgtgatt

SEQ ID NO: 333049 - DNA, 201 bp, Homo sapiens
cgattctcctgcctcagcctgagtagctggtattacaggcacgcaccaccatgcccagctaatttttgtatttttggtagagatggggtttcaccatgttyggctggtctcgaattcctgacctcaggtgatccacccacctcgacttcccaaagtgctggggattacaggcgtgagccactgcgccaagccagctgccct

SEQ ID NO: 333050 - DNA, 201 bp, Homo sapiens
tttcttcctgccggtgtcttagtcatgtcgtcactgcaatgttaataagattttaagtatgatttgtggtacaggttgagtatcccttatccgaaatgctkgggaccagaagtgtttcagatttcagattttttttttttttttttttggattttggaatatttgcatgtacataatgagatatcttggggaagagaccca

SEQ ID NO: 333051 - DNA, 201 bp, Homo sapiens
gctaattttttatttttagtagagacagggtttcaccatgttggccaggctggtcttgaactcccgacctcagatgatccacccaccttggcctcccaaartgctgggattacaggcatgagccaccacacccgactgcccgttgtcgttttataacatcccttcctcctccctctctacccctgctcttcctcctccctc

SEQ ID NO: 333052 - DNA, 201 bp, Homo sapiens
tgcaaaaaaatcagagtaattacatttataaacaccattataaataggataaaagttccaattctaatatagacttaacgtttcatcaaaaaaaaaaaaaatcttgagatgtgtataccttcagtatcctgtgccacttagaacattaggagatatacgtaatgctaaatgacgagttaatgggtgcagcacaccaacatg

SEQ ID NO: 333053 - DNA, 201 bp, Homo sapiens
tagagacacactatgcgatatcatatgactcctagaagctcatttttaaaaagcagtttaacgttttgtgattgaaagttttccagacttgtttcatcatrgaactagtttttatttgaataccaattaacaccatagagttacttttagaaattttaaggattttgagcaagggaatggtgagatttgcatttgtataat

SEQ ID NO: 333054 - DNA, 201 bp, Homo sapiens
aaattgaaagtaaaagataaagctgggcacagtggctcatgcctgtaatcccagcactttgggaggctgaggtgggaggattgcttgaggccaggagttcraggccaatctgggcaatgtggcgagatcccatctctacagaaaattttaaaatgagctgggcgtggtggcatgcgccttgtggtctaagctacttgggag

SEQ ID NO: 333055 - DNA, 201 bp, Homo sapiens
tgggggcaatatcctcaggtcagggaaatgtttaactccaatatgaaaaccatcagactgtcacaacagttctgattgctaacatctacaagatggtatargatagtacgatcagaaataagcagttctggccaggcatggtggctcacatttgtaatcccagcactttgggaggctgaggcaggtgcatcaccttaggtc

SEQ ID NO: 333056 - DNA, 201 bp, Homo sapiens
aagagtagaagcagggaagctaatgagattattgcagtgatcccaggcaagagatgatcatggcttggcccacagttgtggcataggagatggaaagaaargaatgatttcaaagtaagtggagatagaaccagtaggaagtaatatgttgggtttggatacgctgtttttgacattgttgaggtgtctgagacatccaaa

SEQ ID NO: 333057 - DNA, 201 bp, Homo sapiens
aattatgtcttcaaattatgaaaataggaatccctctcaggtttcacgacagcactttgagaactacttctctgtactgttaatgtacaaacttggtacawcacccaatgaatagctcaactaggaggttttaaaatggaatatttgccttgtggtagagagtattgactgaatttagattgtgcatgtctctcagttgaa

SEQ ID NO: 333058 - DNA, 201 bp, Homo sapiens
ccctttcctcctaattcttcaattctcaaaattgcctgtcttggaatatgactaccatccacccacttaagtgcttgaagacccctccccctcgcaaaaaraaacaaaaacaaaaacattctttccctttcatcctacatccagtccttaagtacgttgtctgatctccttccaaaatacctggcaaatccacttatcccc

SEQ ID NO: 333059 - DNA, 201 bp, Homo sapiens; identical to SEQ ID NO: 69887

SEQ ID NO: 333060 - DNA, 201 bp, Homo sapiens
tttttttttttcaactgagaaatctaaaatactttccgtattgcccagtatggaccctgttatagttgcaagtgagatcattttctgaaatctttgaatcktgttgaatccttcaatgaagtaaataattactttaaagctatatgttcatttctcattatttattctaatgtatttatattccctcttctactctttgcc

SEQ ID NO: 333061 - DNA, 201 bp, Homo sapiens
cccacagctccactaagcagtgccctagtggggggactttgtgggtgctccaaccctacaattccccttggcactgccctagtggagtttcactatggggsctctgcccctaggcgggcttctcttgtggcaccaagcctttctgatatttcctttgaaatctaggggaaaactgccaagcctcctccacacttgaattct

SEQ ID NO: 333062 - DNA, 201 bp, Homo sapiens
ggcctttgtatttgcttttgctgctgggaatgttctgctcgaaagtcttctcacccttgacccctggaagttcagacagaagccaaatgttagctccttaraaaggctaatgtagcccactaagagagttctattggcccttttttattgtcttcattgtacttgtctgtagttattttaattgtctactgtctacctcca

SEQ ID NO: 333063 - DNA, 201 bp, Homo sapiens
agcaagttccctgccacataccaaatttttggctcccaaaggaaactgttttagctgcttcttttacttagttatgtacctttatatctctgaatcacatrattctggtgctttttgatttttttaatataaggctttaactactgactttcattaatgaaggtgaggacttagtgctttcacaagcatatagaccacatt

SEQ ID NO: 333064 - DNA, 201 bp, Homo sapiens
ttctgtgtgtgttcatttttgtgttgttataaagaaatacttgagactgggtaatttataaagaaaagagatttaatgggctcacaattctgcgggctatrcaggtagcatggcactggcatctgcctggcttctagggatgtctcagagtgcttttactcatggcagaaggtgaagcaggagcaggcacgttacatgatg

SEQ ID NO: 333065 - DNA, 201 bp, Homo sapiens
tgtcatcaattcagaatctttttgataagcattttctttctttccaaatagtttgtggagaagtttctgttggggaggaagaaggtgaaggtgaaactggktggattgaaggagctgcaatcctcttgtctgtagtgtgtgtggtgttagtaacagctttcaatgactggagtaaggaaaaacagtttagaggtttgcaga

SEQ ID NO: 333066 - DNA, 201 bp, Homo sapiens
gggtttctggtatacaggcctccagccctaggatcatgtttgttattcagagttctacattaaaaaaggaattcatttttataaatgaattcataaaaatkaaaggcaggtgccaagtggtattctgtaagaggcatggcttcatggacttgtaaagggcaagaaagcaaatgagacactaagcttttaagtggtggttgc

SEQ ID NO: 333067 - DNA, 201 bp, Homo sapiens
tgctcactacctatcccatcatctgccagcagagttatatcataatttagatttgatcaatattcagtccttactgtgactgtaaatgctgtttcaacctratctgtgtggtctactgtaattacttttccttccttacacagctttttatgttccctataatttgttgtcttttacttgctttcttttaatttttatttg

SEQ ID NO: 333068 - DNA, 201 bp, Homo sapiens
tgtcttctggctagagggaggaatggagcggggagagtcattcttacagccttgactgttaaacagaatgtaaatcataaaatcactttaactggttattrtacacaatgacacatggtgatttcttgagcttgaaaataattaaaatagaaattctggtatttgtgttggagggggttctgttggattatcctgcttgta

SEQ ID NO: 333069 - DNA, 201 bp, Homo sapiens
atatctaagacttaataattcatgaacaataaaagtttatttgacttgaggttctggaagtgagtaaatccaagagccagggtgccagcatctggtgaggrccttcatgctgtgtcatgtcatgggagaagggcaagagaacaccgcaagtgagcacaaaagcaagagggggtcaaactcacctttataatgatgtcactc

SEQ ID NO: 333070 - DNA, 201 bp, Homo sapiens
ttccatttggtctccagccagcgaaggactagaggaaccttgagaagctgcagagaggatgaattaagggagaaaacagtgcagactttccacttaatgcstgtttgttctgtatttacttaagtatattttcatttgatattttttaaaatgtggtgaaacaggcacagtaagaactgtccctgttttacaggtgtgaaa

SEQ ID NO: 333071 - DNA, 201 bp, Homo sapiens
ttggtctccagccagcgaaggactagaggaaccttgagaagctgcagagaggatgaattaagggagaaaacagtgcagactttccacttaatgcgtgtttkttctgtatttacttaagtatattttcatttgatattttttaaaatgtggtgaaacaggcacagtaagaactgtccctgttttacaggtgtgaaaactgcc

SEQ ID NO: 333072 - DNA, 201 bp, Homo sapiens
gaaacaggcacagtaagaactgtccctgttttacaggtgtgaaaactgccttagagtttaaataacttctctacgactaataagcagaggccgcatgatgyaaagcaaagtgttccaagtgactcgctaacattaagatattaaatttacatagagggacagctagaactcttccttttaaaaattacctacctgaataaa

SEQ ID NO: 333073 - DNA, 201 bp, Homo sapiens
gttgtataaccttcaggccgagcacggtgactcgcacctgtaattccagcactttgggggctaagacgggagacaattatggagaccagcctgggcaacayatactctgtctctacaaaaaaaaaaaaaaagttgtataaccttgggcaagtttctagaaaatgagaatagtaatgcctgccaacttgcaaaattgttttg

SEQ ID NO: 333074 - DNA, 201 bp, Homo sapiens
gactaataagcagaggccgcatgatgcaaagcaaagtgttccaagtgactcgctaacattaagatattaaatttacatagagggacagctagaactcttcyttttaaaaattacctacctgaataaaatggtaaccataaattgcctagccttaggcctgatacaataaaaatgcctcttcctccctgtatctgtggattt

SEQ ID NO: 333075 - DNA, 201 bp, Homo sapiens
cgtttctaacaagttcccaggagtttctgattgttctgtggaccacactttgagagctactgataaatatgccagatagctcattaggatttaagaaactrtgtttgggcatattttaactttgataaacacttatagattgagcaagagaggatagacaagatttggccaaaacttcgagtacttgcaagatcatctcct

SEQ ID NO: 333076 - DNA, 201 bp, Homo sapiens
gcaggtgtgagccagctcagtgtcatgccttagatcaagagtgctttcttatgttctttataagtagaaagtaaaacaactctggttcgatgattcctggwtaatctgagctttattgtatgtatctcgagaactgttctttgaaaattgaattgctttcgagcattgctgaactggcctagtaacgtgctgaaactaacc

SEQ ID NO: 333077 - DNA, 201 bp, Homo sapiens
gagactccgtctcaaaaaaaaaaaaaaaaaaaaagaaaaaaattctatgtgaattgttgctgctttgggctattagataaattcatgcattatcccctctytaattcgtagacagtttttgctcatgttcttcctagtattgtgaatttaatatttactaaaatttgtataaacttgtcctcactgtttatatatacacaa

SEQ ID NO: 333078 - DNA, 201 bp, Homo sapiens
cgcagtccggcctgggcgacagagcgagactccgtctcaaaaaaaaaaaaaaaaaaaaagaaaaaaattctatgtgaattgttgctgctttgggctattarataaattcatgcattatcccctctttaattcgtagacagtttttgctcatgttcttcctagtattgtgaatttaatatttactaaaatttgtataaactt

SEQ ID NO: 333079 - DNA, 201 bp, Homo sapiens
ggtaacataaaatattggtccctgttataaccaatatgttaagatttggccaattattttttagtggtgataattatcaggtgttacaggtatgtcatatrtatgcaattaatggtagtctttatacagtgtgagttaggctcatataaccactatctccatttttttttctttttgctggtaagagcattcaaacacaag

SEQ ID NO: 333080 - DNA, 201 bp, Homo sapiens
ttgattttggactcacaactagattacagcccgaagtcaaaaagcactgttctgttattcttcaccattattgactatagagttttggctcattctctccsccctccccacctcccaccccacatccttttgtgatctctattctgccatttgtactgattttaatctctccctggattttttttttcttagatggctggt

SEQ ID NO: 333081 - DNA, 201 bp, Homo sapiens
tatccctcttttttcatttaatagcacatcactatgtttttcttcatggcacttgtcgatatgtgaaattaattatttgtgtattattatctgaattcttyatataccgtccccagtctgagtatggattccatgaggagagagagcttgtgtgtcttactcactactgtatttctagcccctaaaatagtgtctggcacc

SEQ ID NO: 333082 - DNA, 201 bp, Homo sapiens
cgaagtcaaaaagcactgttctgttattcttcaccattattgactatagagttttggctcattctctccgccctccccacctcccaccccacatccttttstgatctctattctgccatttgtactgattttaatctctccctggattttttttttcttagatggctggttctctaccaatatttggtagctcaaatgtca

SEQ ID NO: 333083 - DNA, 201 bp, Homo sapiens
tattacatggtaagtgagtagtagattgagctttgaacttggatatgactgattagagttaaaaccttaagcacaagaaataagttttatttaatgtcttrctaaatgtattttattgatcaagacatggtggctcacatctgtaatcccagcactttgggtggccaagacaggaggattgcttgagcccaggagtttgag

SEQ ID NO: 333084 - DNA, 201 bp, Homo sapiens
tatttaagagtcatatatgcatatttctatatgcatatggttatacataatctctacattatggtcataaattataggggagggattatgttgtttagatrttacctaacataacacacaggaaaagaaatttagtattctttagttctcagtttaaggaccctgtatgcctcatcctcattacctagcacaacattttca

SEQ ID NO: 333085 - DNA, 201 bp, Homo sapiens
agtagattgagctttgaacttggatatgactgattagagttaaaaccttaagcacaagaaataagttttatttaatgtcttgctaaatgtattttattgaycaagacatggtggctcacatctgtaatcccagcactttgggtggccaagacaggaggattgcttgagcccaggagtttgagaccagcctgagcaatatag

SEQ ID NO: 333086 - DNA, 201 bp, Homo sapiens
agcctgggcaacacatactctgtctctacaaaaaaaaaaaaaaagttgtataaccttgggcaagtttctagaaaatgagaatagtaatgcctgccaacttscaaaattgttttgcgggacatagaatttaatccatgttcccatctctgattcctagttttctgtaatgaaattttatgttagagtagtggatgagtaagt

SEQ ID NO: 333087 - DNA, 201 bp, Homo sapiens
gtaatgaaataaagtaatggagagagactgcattaagaatttctgaggatgtggcatttgagttgcaatctgatggttcatagtgggtctgccatgtaaayagctgcaagaagagcattccaagcaaaacgagaaatgcaagtgaaagtgagaaaagtagctattttaaaggtggaaaagaggccagtgtggctataaatg

SEQ ID NO: 333088 - DNA, 201 bp, Homo sapiens; identical to SEQ ID NO: 69886

SEQ ID NO: 333089 - DNA, 201 bp, Homo sapiens
gatggaaattgaaggtatgggaataggtaaggtaacacttaaaagatatggattgtgagccacccttaaccctaaacaaaagaataccaacattttactcrtgtaatctgggtagtaaaaccagaagggtagaaagccaaccagaaaagaattgcctaatggttgcctggggaaatggtgctttaaaaagccttctgtaaa

SEQ ID NO: 333090 - DNA, 201 bp, Homo sapiens
ctgtaagaaactgatttttaaaatttctttaaaatgttaatagtgatatgtgcctttaaagtatagtgaagttctatttgctcttaaatgtagcaaaagcmcaggatggtgcagccatggaaatgcagccattgaagagtgaagaaggtggagatggtgatgaaaaagataaaaagaaagcaaatttgccaaaaaaggaaa

SEQ ID NO: 333091 - DNA, 201 bp, Homo sapiens
tactggttatgggaatttttagttatgtctctaatgttaaagttctgcactgaatggagtcgttgtagtgcggctgaagtttctatattactgccatcacwagaaaatacctgttaatacagccattctttaagggaaaaagcagagctctgaggttagaaacagcatgacctccagcggtagcatctttttggaagaaca

SEQ ID NO: 333092 - DNA, 201 bp, Homo sapiens
acaatgtcaagttataaggtgcaagaaagaagtaatttctcagagaaattcaatactatcaagcaagttataactctttacagtgtttaatttatatctgkcaagggttagtgtctggaaatttaataatcacatttttctttcatttctattctgaaaggtctgttgatgtctgccatcacagttatcattctagtatta

SEQ ID NO: 333093 - DNA, 201 bp, Homo sapiens
tttctctagaaatgttgtcattgatgccctgtacctcccaccagttgaatatctctgaaggagacctgtgcattccacatagggcagccttgacacaatamtaagcacgactctgctgggcaaagttctagcataattttctctacgtgatagttatattgtcaagtcatgtcacctcctctttcccgtctgtaaaattaa

SEQ ID NO: 333094 - DNA, 201 bp, Homo sapiens
gtttattttcttttcaggcatttaacaactttcatttcaaaaataaagtggtaaatgtatcaaagtgataagatacagtataatcatctatctgtcctttkttgatattttaaagtaatttgaaatatttggggtaaatacaagttttggacacatagaacagtcattttaccgaactgccattagttcattttgagtagt

SEQ ID NO: 333095 - DNA, 201 bp, Homo sapiens
tttttttttttttttttttttttgcttggttgtgcagtggtttcaggggaaatcactgtgtaaatttaaaaagtttctgtggtatttatggtttggggtgktttttttttccatttgtatagacaatttagttaaaaattgcatcatagataagaaatgttctgttaagtttcagtagaagtaggaaaagtatactattga

SEQ ID NO: 333096 - DNA, 201 bp, Homo sapiens; identical to SEQ ID NO: 69930

SEQ ID NO: 333097 - DNA, 201 bp, Homo sapiens
ttggaagagatttgacggtgtagtgtcttcaagcttgctttttgtgtggggattggggagctgtcggggcggctgccatttggtagctgttgagggagttsagagggagcgtattgtgcggatgaaagcgggacgcttcgaggcagacgaaggaacatctgttaggtgcggcgtttcgggaggtgtttttggggtggccgg

SEQ ID NO: 333098 - DNA, 201 bp, Homo sapiens
ttggtagctgttgagggagttgagagggagcgtattgtgcggatgaaagcgggacgcttcgaggcagacgaaggaacatctgttaggtgcggcgtttcggkaggtgtttttggggtggccgggcattctgtgggagcgaggggaccacttccaaagccctggtgctgttggggtaggagggcggccggcatcagccatgtg

SEQ ID NO: 333099 - DNA, 201 bp, Homo sapiens
gaacgccagcgggcgttgcggcctatgcgcgaggggcggggcgattaggtcatagagcggctcccagcgttccctgcggcgtaggaggcggtccagactayaaaagcggctgccggaaagcggccggcacctcattcatttctaccggtctctagtagtgcagcttcggctggtgtcatcggtgtccttcctccgctgccg

SEQ ID NO: 333100 - DNA, 201 bp, Homo sapiens; identical to SEQ ID NO: 69933

SEQ ID NO: 333101 - DNA, 201 bp, Homo sapiens
taggtcatagagcggctcccagcgttccctgcggcgtaggaggcggtccagactacaaaagcggctgccggaaagcggccggcacctcattcatttctacsggtctctagtagtgcagcttcggctggtgtcatcggtgtccttcctccgctgccgcccccgcaaggcttcgccgtcatcgaggccatttccagcgacttg

SEQ ID NO: 333102 - DNA, 201 bp, Homo sapiens
ggaacatctgttaggtgcggcgtttcgggaggtgtttttggggtggccgggcattctgtgggagcgaggggaccacttccaaagccctggtgctgttgggrtaggagggcggccggcatcagccatgtggctgagtcgcgagtacaaaatgccggcctcggacatggcggcggcgcctttgttaccccgcccggcggagga

SEQ ID NO: 333103 - DNA, 201 bp, Homo sapiens
agagagagattttcacgaaggacagtgctaggtttacctctcgaagtctgttttcagtggtttttagcttgtgccaatggatgacaaatctatacagaaayctgggtatagccatttgaaaatgtgaataacgttttttttcattccaggtttggtgcacctcgatttggaggaagtagggcagggcccttatctggaaag

SEQ ID NO: 333104 - DNA, 201 bp, Homo sapiens
gagagattttcacgaaggacagtgctaggtttacctctcgaagtctgttttcagtggtttttagcttgtgccaatggatgacaaatctatacagaaacctrggtatagccatttgaaaatgtgaataacgttttttttcattccaggtttggtgcacctcgatttggaggaagtagggcagggcccttatctggaaagaag

SEQ ID NO: 333105 - DNA, 201 bp, Homo sapiens
aaagcaaatgggagaaatatcgctgaattctttttctcagcaaggaacatccctgggaaagagaatacacgcctgggggcaggtctacagacggtcccccrggcgtggccatcttttatggtctgtagactgtagggctgaaatagacctcagtctcccatatcgctcccaggcttattaggaagaagaaattcccgccta

SEQ ID NO: 333106 - DNA, 201 bp, Homo sapiens
ggaaagaccagaagaaggtgaggtcaagagagtgcagaatgaggcattccaatggtgggtgggccctgacctgagagagtggcgcggggaggggtgaaagsgcggcgatcctggaacgccagcgggcgttgcggcctatgcgcgaggggcggggcgattaggtcatagagcggctcccagcgttccctgcggcgtaggagg

SEQ ID NO: 333107 - DNA, 201 bp, Homo sapiens
gagctgttttgggtattggacaacacatgaagaaaggatctgctagtataataagttagcagtttaaaactagtatccaggtttgtgctgaaagctgtttstctttccttagtgtttggtgctggcaccaactcgggaactggcccaacaggtgcagcaagtagctgctgaatattgtagagcatgtcgcttgaagtctac

SEQ ID NO: 333108 - DNA, 201 bp, Homo sapiens
ctgccatttggtagctgttgagggagttgagagggagcgtattgtgcggatgaaagcgggacgcttcgaggcagacgaaggaacatctgttaggtgcggcstttcgggaggtgtttttggggtggccgggcattctgtgggagcgaggggaccacttccaaagccctggtgctgttggggtaggagggcggccggcatcag

SEQ ID NO: 333109 - DNA, 201 bp, Homo sapiens
gaaaaaccaatctgagaagaacaacctaccttgtccttgatgaagcagatagaatgcttgatatgggctttgaaccccaaataaggaagattgtggatcarataagagtaagtgtcctttgaaatatgtgatcaaactgaattgtgttttcactcttaagagtctgatactaatttttccccccaaaatccattagcctga

SEQ ID NO: 333110 - DNA, 201 bp, Homo sapiens
actttcaccctaaatagtatttgcttcctgccattgtccacatcaatcatcagccattcctagagagaggcgatgggcctattgtaagtatatatttttayttttattagaagcataatgtgtagattttagactacatagctaaagatgtaatcatttgtggtggttttatatagaggttagctcatcctattcagctgg

SEQ ID NO: 333111 - DNA, 201 bp, Homo sapiens
ggttaccagaaactcattaatggaggctgcttcgcacttgcaatagtattggtcttgtgtttacccaattatcttgtgcaagtcagggtttctctggtgcyggaaaaagtggtgattaaacttaggctgttaagaactggtataataacaacatcaacggtaatgcatttgttagtttttcttttttattatatcgatcta

SEQ ID NO: 333112 - DNA, 201 bp, Homo sapiens
gctgccatttggtagctgttgagggagttgagagggagcgtattgtgcggatgaaagcgggacgcttcgaggcagacgaaggaacatctgttaggtgcggygtttcgggaggtgtttttggggtggccgggcattctgtgggagcgaggggaccacttccaaagccctggtgctgttggggtaggagggcggccggcatca

SEQ ID NO: 333113 - DNA, 201 bp, Homo sapiens
gtgggtgggccctgacctgagagagtggcgcggggaggggtgaaagcgcggcgatcctggaacgccagcgggcgttgcggcctatgcgcgaggggcggggmgattaggtcatagagcggctcccagcgttccctgcggcgtaggaggcggtccagactacaaaagcggctgccggaaagcggccggcacctcattcatttc

SEQ ID NO: 333114 - DNA, 201 bp, Homo sapiens
aagaccagaagaaggtgaggtcaagagagtgcagaatgaggcattccaatggtgggtgggccctgacctgagagagtggcgcggggaggggtgaaagcgckgcgatcctggaacgccagcgggcgttgcggcctatgcgcgaggggcggggcgattaggtcatagagcggctcccagcgttccctgcggcgtaggaggcgg

SEQ ID NO: 333115 - DNA, 201 bp, Homo sapiens
ccgaaggcttgcgccattttgatattcacgtcacagtgattggaagagatttgacggtgtagtgtcttcaagcttgctttttgtgtggggattggggagcygtcggggcggctgccatttggtagctgttgagggagttgagagggagcgtattgtgcggatgaaagcgggacgcttcgaggcagacgaaggaacatctgt

SEQ ID NO: 333116 - DNA, 201 bp, Homo sapiens
cggcttggacttggcctttccgggctatcttgggacttcctttcccgaaggcttgcgccattttgatattcacgtcacagtgattggaagagatttgacgrtgtagtgtcttcaagcttgctttttgtgtggggattggggagctgtcggggcggctgccatttggtagctgttgagggagttgagagggagcgtattgtg

SEQ ID NO: 333117 - DNA, 201 bp, Homo sapiens
agttactaaattatgaagttaggggcttatcaattacgtatttagctaggggtggtgtcatgaattttaagactgttataatttgttttgcagcaagaggyggaaacatacagaagaagcaaggaaattacagttagaggtcacaactgcccgaagccagttctaaatttttatgaagccaatttccctggtaagtgctac

SEQ ID NO: 333118 - DNA, 201 bp, Homo sapiens
ctctaccgcggcgttcccccagctgggtttgctagcagaagtgtttctgagaaaacccttgttctgttatcgctgactgtactgtttaggttcttaccacyaaagctgtttggttccaaaacggccatatgagtaacatcgtcgtgatgctcttcggttcatgtagccttgttattgctgatagtgaattgctaggctggt

SEQ ID NO: 333119 - DNA, 201 bp, Homo sapiens
acctaataacataaagcaagtgagcgaccttatctctgtgcttcgtgaagctaatcaagcaattaatcccaagttgcttcagttggtcgaagacagaggtkcaggtaaggatgactgataggaaatgttggtagttacgagtcacatcgttgtctacaaatccatttaaatggtattggagggtgagtaaaaccttgaatg

SEQ ID NO: 333120 - DNA, 201 bp, Homo sapiens
gtatatatttttacttttattagaagcataatgtgtagattttagactacatagctaaagatgtaatcatttgtggtggttttatatagaggttagctcaycctattcagctggagctgttttgggtattggacaacacatgaagaaaggatctgctagtataataagttagcagtttaaaactagtatccaggtttgtgc

SEQ ID NO: 333121 - DNA, 201 bp, Homo sapiens
tagagttacatgttctgacttcataattgggaaaggtgtgactcacttttggatataggtggctttgggatttttacttaaattaggttgagtataacaakaaattttttttttcataatagggtgttcataggtgggtccagattaaaatgaaggctactttaaactagttactaaattatgaagttaggggcttatcaa

SEQ ID NO: 333122 - DNA, 201 bp, Homo sapiens
atcattgtttggtgagttgttttaggttatttcagttggtgtgatttcatttagttagcctactaatcctgaaaatttcttgaatccttcaaataatggcygtcaccatttatagctttcctatagaaggaattcatgtgtcccctggttgacttaaggaccaagggtcgaactgctcgataagtggattagcaggcgttt

SEQ ID NO: 333123 - DNA, 201 bp, Homo sapiens
tcataatagggtgttcataggtgggtccagattaaaatgaaggctactttaaactagttactaaattatgaagttaggggcttatcaattacgtatttagstaggggtggtgtcatgaattttaagactgttataatttgttttgcagcaagaggtggaaacatacagaagaagcaaggaaattacagttagaggtcacaa

SEQ ID NO: 333124 - DNA, 201 bp, Homo sapiens
tgcctaaatttgagaagaatttttatcaagagcaccctgatttggctaggcgcacagcagtgagtaaattcatgtggcttcatcaggctgtaactcgatcrtggattctagtaaatgaaattctgacaggtgttttgcaaataactcaattttggtagagttacatgttctgacttcataattgggaaaggtgtgactcac

SEQ ID NO: 333125 - DNA, 201 bp, Homo sapiens
cttattcgtctaatggaagagatcatgagtgagaaggagaataaaaccattgtttttgtggaaaccaaaagaagatgtgatgagcttaccagaaaaatgargagagatgggtatgtgtgagctcctccattgaagcagattgattaaaacagcttaggaaagggcaaacttggatcacgagcagtggatttttttcatatc

SEQ ID NO: 333126 - DNA, 201 bp, Homo sapiens
cctatagaaggaattcatgtgtcccctggttgacttaaggaccaagggtcgaactgctcgataagtggattagcaggcgtttcctctttgacttccagccrtgtaaattgaacttaatgttttgctgaccataaatgtgtggccctagcaatggtcttttaaaactcaggatttttcctttctctctcctattattagact

SEQ ID NO: 333127 - DNA, 201 bp, Homo sapiens
gctctaccgcggcgttcccccagctgggtttgctagcagaagtgtttctgagaaaacccttgttctgttatcgctgactgtactgtttaggttcttaccaytaaagctgtttggttccaaaacggccatatgagtaacatcgtcgtgatgctcttcggttcatgtagccttgttattgctgatagtgaattgctaggctgg

SEQ ID NO: 333128 - DNA, 201 bp, Homo sapiens
ttcataatagggtgttcataggtgggtccagattaaaatgaaggctactttaaactagttactaaattatgaagttaggggcttatcaattacgtatttasctaggggtggtgtcatgaattttaagactgttataatttgttttgcagcaagaggtggaaacatacagaagaagcaaggaaattacagttagaggtcaca

SEQ ID NO: 333129 - DNA, 201 bp, Homo sapiens
ctcgccgctgattggtcatcagaggagcacttcctttcacaggacgtgaaacgggggcggtttgggaagtttagagaccattctccgccgaccaaaacccstcaaaggattatcagacacgcgggtcggacggtccacatcagccggcagcccgggcgggtcccggggtgcgagcagcgcacttccggtgagctatttcgt

SEQ ID NO: 333130 - DNA, 201 bp, Homo sapiens
agctttttatttactcatttttgagtgagtttttcctctactgtaggaggtttatgtgtgaacaaggccattctggttcacagttattttttcttagcacmtttaagattttgttttcttacttctattgttactcttgaaaagtctgctgttttcaaatcaccatatctttgaaggcaatctctcttccctctggttgcg

SEQ ID NO: 333131 - DNA, 201 bp, Homo sapiens
atcttagccacaaagtgaccaagccacatgtactaagggttgaaatcaaagatatgtacagggtattaagcaaatctggttatatgttttaaaacaacttytaagacaaattgatggcaagtttgtgtgaaagttttatatcaaagttgttataagaggttcctgagcaaaccaattgaaatacagtcatgcattgcttaa

SEQ ID NO: 333132 - DNA, 201 bp, Homo sapiens
cttgaacccaggaggcggagattgcagtgagccgagatcacaacactgcactccagcctgggcgacagaccaagactctctctcaaaaaacaaaacaaaamttaaaactctaatttttataccctttgatccagtaatttcacttgtaagactttattccaaagaaataatcaaaagatgcaatcaaagatttgtgtgaag

SEQ ID NO: 333133 - DNA, 201 bp, Homo sapiens
ttgctctatattctcaacagcatttggtctttttaaaaattgttttgggccgggcgcggtggctcacacctgtaatcccggcaattttgggaggccgaggygggtggatcacctgaggtcaggagtttgagacaagcctgaccaaaatagagaaaccctgtctctactaaaaatacaaaaattagccggtcgtggtggcag

SEQ ID NO: 333134 - DNA, 201 bp, Homo sapiens
gcttatcttcttctgttcttgatagtttcatttgcagatcaaaagttttacatttagtgaagtgcagtgtatcaattctttcttttttgtccaacacaagrtcatctagctattctcctatgttatcttttaagagttttatagttttgtactttatatttagatctatgatctgttttgagttacttcttgtgaagggta

SEQ ID NO: 333135 - DNA, 201 bp, Homo sapiens; identical to SEQ ID NO: 69952

SEQ ID NO: 333136 - DNA, 201 bp, Homo sapiens
acgtaagttctattttccataagtgtcagctggctgagaaataaagagagacagtacaaagagaggaattttacagctgggccgccaggggtgacatcacrtatcagcaggaccatgatgcctgcctgagtctcagaccagcaagtttttattaagggtttcaaaaggggagggagtgtaagaacagagagtagatacaaa

SEQ ID NO: 333137 - DNA, 201 bp, Homo sapiens
gaacccacctggactgggtgatctctgttttaaaatattttgaattattgattcaatttctctaatacatataggcctcttcagattgtctgtttttcttktgtgagttttagtaaattctgtcttttaagaaattggttatcattttcttttttttttcctttgagatggagtttcgctcttgttgcccaggctggagtg

SEQ ID NO: 333138 - DNA, 201 bp, Homo sapiens
agttgttttttgtttgtttgtttgttttgttttgttttttctgtttgttttgagacggagtctcactctcatgccaggctggagtgcagtggtgcgatctyggctcactgcaatctccacctcccgggttcaagcaattctcctgtctcggcctcccaagtagctgggactacaggcacccgccccctcgcccagctaatt

SEQ ID NO: 333139 - DNA, 201 bp, Homo sapiens
tgcagtggtgcgatctcggctcactgcaatctccacctcccgggttcaagcaattctcctgtctcggcctcccaagtagctgggactacaggcacccgccmcctcgcccagctaattttttgtatttttagtagagatggggtttcaccgtgttagccaggatggtctcgatctcttgacctcgtgatctgcctgcctcgg

SEQ ID NO: 333140 - DNA, 201 bp, Homo sapiens; identical to SEQ ID NO: 70006

SEQ ID NO: 333141 - DNA, 201 bp, Homo sapiens
aatttttgccagtcttatgaaggtgagaaatgatagctatttcattgttgtaatttgcacttctctctcactaatgagattgagcatcttttgagatgttygtgggtcacttttctttgtccttctgtgaatcacctgtttatatcctttgcacattttcagtagtggttgcttttttcttattgatttatgatagctgtt

SEQ ID NO: 333142 - DNA, 201 bp, Homo sapiens
tgggattacaggcaaaaacctcatttatttacacctttttttcctctaggtgctccagcgcctgagttgtatggccatcaggggagatatgttcttggtgrccaatcttgggacaaaggagccttgtcatagcagtgacccaaggtgcccaaaagatgggagataccagttcaacacaaatgtcgtgttcagcaataatgg

SEQ ID NO: 333143 - DNA, 201 bp, Homo sapiens
gactattctttgatgttttcattttcaggatgtacagattatagtgtttccagaagatggcattcatggattcaactttacaagaacatccatttatccakttttggacttcatgccgtctccccaggtggtcaggtggaacccatgcctggagcctcaccgcttcaatgacacagaggtgattcctgcctttttcctcag

SEQ ID NO: 333144 - DNA, 201 bp, Homo sapiens
tcctgccatctgataacagactattctttgatgttttcattttcaggatgtacagattatagtgtttccagaagatggcattcatggattcaactttacargaacatccatttatccatttttggacttcatgccgtctccccaggtggtcaggtggaacccatgcctggagcctcaccgcttcaatgacacagaggtgat

SEQ ID NO: 333145 - DNA, 201 bp, Homo sapiens
ccaaccccactcaggcgggacagaatggggctagagttgggtatttcccttcccccaggtcagttaagctttgataaaaccccaataggtaaaaatagttyctctggaggagaggcctgctaaagaccagaatgctttgtttcctttccctcttcctctggcagaagcatgggaggatttttttctccagtcttcattgtg

SEQ ID NO: 333146 - DNA, 201 bp, Homo sapiens
agactgtttgaggctcgtttccggtctctatgtcggactacgatcagtctgagaccttcgcccagatagaactgaccccaaactgacaaagggaaggtcartgccagcctttgtgaaggcttcctggttggcctgaatttcctgctcccttcaggaagggtggggacaaaggagaggcccccctgggggcaaagagggaaa

SEQ ID NO: 333147 - DNA, 201 bp, Homo sapiens
ttcctcctgtacactttaaatcatctctagatcccttacactacctaatacaaactaaatgctatataaataattgttatactgtattttttaaattgctrttattttttattgttgtgctattatttttattgggctccctcctccccctcccaccccagtaatttcaatccaaggttggtggaatccatggatgcagaa

SEQ ID NO: 333148 - DNA, 201 bp, Homo sapiens
tgcagcaggatccccaggtgatgctttcacatggcaagtatgagaagcccaggactagatccccagttctcaagtgtggttgtacataagaatcacgaggyaagtggtaaacactatggctgcccgggtcctggagagtccgttgtaattggtgtggaaggggtgtggactggcactgggattgttttaaggctccccagt

SEQ ID NO: 333149 - DNA, 201 bp, Homo sapiens; identical to SEQ ID NO: 70005

SEQ ID NO: 333150 - DNA, 201 bp, Homo sapiens
aatctcctgacctcatgatccacccgcctcagcctcccacagtgctgggattacaggcaaaaacctcatttatttacacctttttttcctctaggtgctcyagcgcctgagttgtatggccatcaggggagatatgttcttggtggccaatcttgggacaaaggagccttgtcatagcagtgacccaaggtgcccaaaaga

SEQ ID NO: 333151 - DNA, 201 bp, Homo sapiens
tcttgtagacaacatatagttgagtcatgttttttatctactgtaatgatctcttgtttcgaattgatatatttataccattgacttttaaagtgattatwgatatagttggattattatctatcatatttgttacttttttctacttgctgcctttgttcgtagttcctgtttttgtcttccagtctttttctgagtttt

SEQ ID NO: 333152 - DNA, 201 bp, Homo sapiens
tcctgacctcatgatccacccgcctcagcctcccacagtgctgggattacaggcaaaaacctcatttatttacacctttttttcctctaggtgctccagcrcctgagttgtatggccatcaggggagatatgttcttggtggccaatcttgggacaaaggagccttgtcatagcagtgacccaaggtgcccaaaagatggg

SEQ ID NO: 333153 - DNA, 201 bp, Homo sapiens; identical to SEQ ID NO: 69972

SEQ ID NO: 333154 - DNA, 201 bp, Homo sapiens
caccacacctggctaatgttttgtatttttcatagagatggggtttcaccatgttagccaggatggtctcaatctcctgacctcgtgatccacctgcctcrgcctcccaaagtgctgggattacaggcgtgagccactgtgcccagccaatagtattatgttttaaatttaaaagtccactgttttttgctgatatatgag

SEQ ID NO: 333155 - DNA, 201 bp, Homo sapiens
gaattatgattgttttttcccgttttccaaattttctacagtaaaacttttgaagcttttataaccaggaaaaaaatttaaaagtttgcaatgcattccaraaataagtgtctcaaactttgctaatttgaattgttcatgccttctctgcctgccttctccaccttcctccctggggctggtgttcccggcttgacattt

SEQ ID NO: 333156 - DNA, 201 bp, Homo sapiens; identical to SEQ ID NO: 69973

SEQ ID NO: 333157 - DNA, 201 bp, Homo sapiens
tccatttgttccagcaccatttgttgaaaagactgtctttgctccatcacattgcctttgctcctttgtcaaagatgagttaactatagcctggtgtgcastggtacacacttgtagtcccagctgctcagtagagttcaatagttttctttaggaggctgaggtagaagaattgcttgagcctaggaatttgagtccagc

SEQ ID NO: 333158 - DNA, 201 bp, Homo sapiens
cgcaacccctgcctcccaggctcaagtgatgctcccatctcatccttccgagtagctaggactacaagtgcatgccaccatgcccagctaattaaaaaaawttttttttggtagagacagtgtttctccatgttgcccaggctagtttcaacctcctgggctcaagcaatcctcctgcctcaccctcccaaagtgttggga

SEQ ID NO: 333159 - DNA, 201 bp, Homo sapiens; identical to SEQ ID NO: 69974

SEQ ID NO: 333160 - DNA, 201 bp, Homo sapiens
catacagtatgagtgcctctttttccatcctttggtcaatgcaagatagaataatcttttgagcctgggcacagtgcttcacatctgtaatcccagcattytgggaggccaaggctggtggatagcttgagctcatgagttcaagaccagcctggccaacatggtgaaacctcgtctctacaataaatacaaaaattagct

SEQ ID NO: 333161 - DNA, 201 bp, Homo sapiens
acctactgaatcagaatgtgcattgcagcaggatccccaggtgatgctttcacatggcaagtatgagaagcccaggactagatccccagttctcaagtgtrgttgtacataagaatcacgaggtaagtggtaaacactatggctgcccgggtcctggagagtccgttgtaattggtgtggaaggggtgtggactggcactg

SEQ ID NO: 333162 - DNA, 201 bp, Homo sapiens
tttatgtagaagtcagcagtttcttggcaccaaataaataattttgtgctgaataaagggagagttatccatagtatttattactaaccaaagaaatgcarggagaattgtaattcattaggttttgatggccaggaaagccaagctgtgttattagggtcatgacaatcacagacattacggatggctgacctgtagtat

SEQ ID NO: 333163 - DNA, 201 bp, Homo sapiens
ccagcctgggcaatgtaacaagaccctgtctctgaaaaaaaaaaaaaagaaaagaaagaaaaaaaaaagaagaggaagcaaaaggaaggattttaaaaackcatttatttaatttatttatttatttatttatttatttatttatttatttattttgagacggagtcttgctctgtcgcccaggctggagtgcagtggcgc

SEQ ID NO: 333164 - DNA, 201 bp, Homo sapiens
atcttatgggaccaccatcacatatgtggtctgtcattgaccaaaatgtcatcatgcagtgcatgactatatttctgtctcagtaggggcattcatagggraaaaacggagtctagtttcaagatgattaggctgggcagtcacttgggattgtaaccttcattcctcagaaggaaggggttcttgatctcattgagatct

SEQ ID NO: 333165 - DNA, 201 bp, Homo sapiens
tgttctgtaccccgacatcggtggtacccagctctcagttgagaaagagatgtaatgtgaatgccactcttggccccaggcactcctcacttgcccccackggggactggttcataccctcctctcctggcctcagtttccatacctcttagtgaggcctttgcgttatacttcagaaatattgtcagtatgactttgaag

SEQ ID NO: 333166 - DNA, 201 bp, Homo sapiens
gaagaggaagcaaaaggaaggattttaaaaactcatttatttaatttatttatttatttatttatttatttatttatttatttattttgagacggagtctygctctgtcgcccaggctggagtgcagtggcgcgatctcggctcactgcaagctccgcctactgggttcacgccattctcctgcctcagcctcccgagtag

SEQ ID NO: 333167 - DNA, 201 bp, Homo sapiens
ctgtctcccagatgctttctattggcttattgtaaggactttgacttctgcgctacgtgaactggggagtcactggaagagtttcagaggtgcaccttggwagactcaggctttctctggatctcactggctgctcttatgagtccagaatggaagaggatgaggacaaatgcagggggatgttaggagaccactaagcag

SEQ ID NO: 333168 - DNA, 201 bp, Homo sapiens
atcatttttgtgatttctttaaattcagatcatataaattaggtgaagatagacattatttctcctgtttatgtaaaagaatttagacaatgaagtcacgraattcatgagaataatttaaagactgttggaacttcccaatgtttttcttggcattcagtcactacacatagaaatgtatactatgccggttcctaatga

SEQ ID NO: 333169 - DNA, 201 bp, Homo sapiens
tttcatagagatggggtttcaccatgttagccaggatggtctcaatctcctgacctcgtgatccacctgcctcagcctcccaaagtgctgggattacaggygtgagccactgtgcccagccaatagtattatgttttaaatttaaaagtccactgttttttgctgatatatgagaaataaattgatgtttgcatatgaacc

SEQ ID NO: 333170 - DNA, 201 bp, Homo sapiens
agaggcggtctaaattcgtccacttcccgggagaggtgagaatgtaaacacgcgcgttctccaatcagaactgcgctctcttctcggctcctccattcgcscgccagaatgccagagggaggcgggactagcaggagattgctgcctatgcaaagcaggtaagaagccgaactctgaggcctctcgccattgtctccgagt

SEQ ID NO: 333171 - DNA, 201 bp, Homo sapiens; identical to SEQ ID NO: 69982

SEQ ID NO: 333172 - DNA, 201 bp, Homo sapiens
cattgggtgataaagctattttaaaaaacaaagaagtgatgagtataaaagtcagggtcatggttacttgatccctcatgggtaatgttgtcagatttagaaaaaaaaaaaaaaacaggactccaaaactcccagttgaatttgaactttagatgaacaatgcataattttttttagcgtaagtatgttccaacatattta

SEQ ID NO: 333173 - DNA, 201 bp, Homo sapiens
tgttctgttcctttctttcttgagttttgctatctcttttcaagctataaattgaaatatgcttttatttctggtgagttttcttcaattacatctttaattttttttttttttgcttcattatatgttgtctattgttgtataaaaatttaccctacgacctattcagcagcttaaaacaagacccatttattatctcaa

SEQ ID NO: 333174 - DNA, 201 bp, Homo sapiens
gattgcagtgagccgagatcacaacactgcactccagcctgggcgacagaccaagactctctctcaaaaaacaaaacaaaacttaaaactctaatttttawaccctttgatccagtaatttcacttgtaagactttattccaaagaaataatcaaaagatgcaatcaaagatttgtgtgaagtgtataattatgcaataag

SEQ ID NO: 333175 - DNA, 201 bp, Homo sapiens; identical to SEQ ID NO: 69995

SEQ ID NO: 333176 - DNA, 201 bp, Homo sapiens
atgttctgttcctttctttcttgagttttgctatctcttttcaagctataaattgaaatatgcttttatttctggtgagttttcttcaattacatctttawttttttttttttttgcttcattatatgttgtctattgttgtataaaaatttaccctacgacctattcagcagcttaaaacaagacccatttattatctca

SEQ ID NO: 333177 - DNA, 201 bp, Homo sapiens
cattgtttacagtgtcccagatgaatggcaacaaatcctggggtttggtgtttggatggtacatttccctggggaaagaaataacagtttgagatggaacsgggttggggtgggagaatacttctcattctgaggaatatttaattttgccaagatgagcatttctagttcttagtctgttgacgaaaagagctatggttt

SEQ ID NO: 333178 - DNA, 201 bp, Homo sapiens
cgtctctatttgttttccaggggccaggattaagctgttgatatgatcacttttagaatttacagatatctcagctcccatacgtggttatatgttttttrtttgtttgttttccagcagcacttttatttttccttacacgatgacatgttgctggggcctattgttctcacataacagtagaaaaccaaaatttgttgt

SEQ ID NO: 333179 - DNA, 201 bp, Homo sapiens; identical to SEQ ID NO: 69946

SEQ ID NO: 333180 - DNA, 201 bp, Homo sapiens
ctcattaaatctgtggacttcagagtaccaaagctcagcaacaggcttgaaacaaacccagtgaaaagcaactttattattgagctgaggattgatatcartaataactcattaataaaaaagcttgataataaaaactcccagtgcctgatgccagctgacagacactgggagttttcccaggtaccctgtgacctagag

SEQ ID NO: 333181 - DNA, 201 bp, Homo sapiens
aatgtgcattgcagcaggatccccaggtgatgctttcacatggcaagtatgagaagcccaggactagatccccagttctcaagtgtggttgtacataagartcacgaggtaagtggtaaacactatggctgcccgggtcctggagagtccgttgtaattggtgtggaaggggtgtggactggcactgggattgttttaagg

SEQ ID NO: 333182 - DNA, 201 bp, Homo sapiens; identical to SEQ ID NO: 69947

SEQ ID NO: 333183 - DNA, 201 bp, Homo sapiens; identical to SEQ ID NO: 69948

SEQ ID NO: 333184 - DNA, 201 bp, Homo sapiens
attacaggcaaaaacctcatttatttacacctttttttcctctaggtgctccagcgcctgagttgtatggccatcaggggagatatgttcttggtggccartcttgggacaaaggagccttgtcatagcagtgacccaaggtgcccaaaagatgggagataccagttcaacacaaatgtcgtgttcagcaataatggaacc

SEQ ID NO: 333185 - DNA, 201 bp, Homo sapiens
ggctgaatattatgtggctgccgtgtatgagcatccatccatcctgagtctgaaccctctggctctcatcagccgccaagaggccttggagctcatgaacyagaaccttgacatctatgaacagcaagtgatgactgcagcccaaaaggcaagaatgctcctcggaacctgagtttctctcatacagagcagattgctctt

SEQ ID NO: 333186 - DNA, 201 bp, Homo sapiens
gtctttctgtccttcatggtctttaaaatctaaaccccttggatatcaagattgggacatgttccagtatcacctcaccactccagttttcagttacttgwttttagtttttattttttaaatgctttttttaaaagagaagttttatgctcacaataaaattgagcagaaagtacagaaagtttacatatactccctgtc

SEQ ID NO: 333187 - DNA, 201 bp, Homo sapiens
ggaggagagcgtggctgaccatcacgaggctgaatattatgtggctgccgtgtatgagcatccatccatcctgagtctgaaccctctggctctcatcagcygccaagaggccttggagctcatgaaccagaaccttgacatctatgaacagcaagtgatgactgcagcccaaaaggcaagaatgctcctcggaacctgagt

SEQ ID NO: 333188 - DNA, 201 bp, Homo sapiens
gtgtgaaaatcgtttgcaatgtgcaatatctgaaactactgccttggagtcattagaccctctgctcagtgacaataaacataaaatttccaattgtaatraacagtggaacttttaattttttgaggatttggagtcattttaagcaaaaagaacagtgataagtggacagtaaagagatgagaggggagtgggtcatgg

SEQ ID NO: 333189 - DNA, 201 bp, Homo sapiens; identical to SEQ ID NO: 70000

SEQ ID NO: 333190 - DNA, 201 bp, Homo sapiens; identical to SEQ ID NO: 69953

SEQ ID NO: 333191 - DNA, 201 bp, Homo sapiens; identical to SEQ ID NO: 69954

SEQ ID NO: 333192 - DNA, 201 bp, Homo sapiens
cagaatgccagagggaggcgggactagcaggagattgctgcctatgcaaagcaggtaagaagccgaactctgaggcctctcgccattgtctccgagtcggycagctggagcgttttcggggctgtaaagggagaatggcgcatgcgcatattcagggcggaaggcgcgctaagagcaggtacggagggggcgtggtgcggc

SEQ ID NO: 333193 - DNA, 201 bp, Homo sapiens; identical to SEQ ID NO: 70003

SEQ ID NO: 333194 - DNA, 201 bp, Homo sapiens
gtgttcaattgttaacttgggcttgatgattcagcagaaagaagtgatttgagttctggctcactggattaacagggccaaggagcaagtcctttgcaatscaattgtaattacagccagcttgtccaacccttggcccaggatggctttgaatgcggcccaacacaaattcataaactttcttaaaacattatgagattt

SEQ ID NO: 333195 - DNA, 201 bp, Homo sapiens
tgcctgtcaccaaagtaatactgttgattaatttggattgacaggttcaagactgatttgacattgacagaacaagctgtatcgatggtagtcagttcacygggcctacttctgtgtcaaaagaaacagtgacagaaccactcagtatgaagtgcaatgaaaactgaactctgaattggaacaaataactggaattcagtt

SEQ ID NO: 333196 - DNA, 201 bp, Homo sapiens
gcaggacctctcccaccagatgacggagtttgctttctcgcccagcgcagctcccaccaggcgtgagctggcagtccagaagcggccccagatgtggctayccaccgcccagtctgcttccctgcctcaaaccccagggagacagaaattacctaaaaatgcatatcattgccttatgccaagatgattcaaataagcctg

SEQ ID NO: 333197 - DNA, 201 bp, Homo sapiens
gaaactcaggaagcaaatggcaatcttgaccacaacatggagacaggaaatcaaatgcatttttggctaaaccagacttgggggaagtggcttggtttgcrtggtttctcatgtaggtgcagctgtgcttttctgtggtttttctcacacgggaagtgagaggcacagtgagctgtattcacactggatttaaaagccctg

SEQ ID NO: 333198 - DNA, 201 bp, Homo sapiens
cagcaaggacttggaattcctgagcaagccttgggttccccacgccctaggaagtccctctggaaggggagcaggacctctcccaccagatgacggagttygctttctcgcccagcgcagctcccaccaggcgtgagctggcagtccagaagcggccccagatgtggctatccaccgcccagtctgcttccctgcctcaaa

SEQ ID NO: 333199 - DNA, 201 bp, Homo sapiens; identical to SEQ ID NO: 69958

SEQ ID NO: 333200 - DNA, 201 bp, Homo sapiens; identical to SEQ ID NO: 69959

SEQ ID NO: 333201 - DNA, 201 bp, Homo sapiens; identical to SEQ ID NO: 69960

SEQ ID NO: 333202 - DNA, 201 bp, Homo sapiens; identical to SEQ ID NO: 69961

SEQ ID NO: 333203 - DNA, 201 bp, Homo sapiens; identical to SEQ ID NO: 69962

SEQ ID NO: 333204 - DNA, 201 bp, Homo sapiens
ctcgcccagcgcagctcccaccaggcgtgagctggcagtccagaagcggccccagatgtggctatccaccgcccagtctgcttccctgcctcaaaccccarggagacagaaattacctaaaaatgcatatcattgccttatgccaagatgattcaaataagcctgagaaagagaggccagcgctaaatacagacttggcag

SEQ ID NO: 333205 - DNA, 201 bp, Homo sapiens; identical to SEQ ID NO: 69963

SEQ ID NO: 333206 - DNA, 201 bp, Homo sapiens; identical to SEQ ID NO: 69964

SEQ ID NO: 333207 - DNA, 201 bp, Homo sapiens; identical to SEQ ID NO: 69965

SEQ ID NO: 333208 - DNA, 201 bp, Homo sapiens; identical to SEQ ID NO: 69966

SEQ ID NO: 333209 - DNA, 201 bp, Homo sapiens
gcattgcagcaggatccccaggtgatgctttcacatggcaagtatgagaagcccaggactagatccccagttctcaagtgtggttgtacataagaatcacsaggtaagtggtaaacactatggctgcccgggtcctggagagtccgttgtaattggtgtggaaggggtgtggactggcactgggattgttttaaggctccc

SEQ ID NO: 333210 - DNA, 201 bp, Homo sapiens
acctcatttatttacacctttttttcctctaggtgctccagcgcctgagttgtatggccatcaggggagatatgttcttggtggccaatcttgggacaaakgagccttgtcatagcagtgacccaaggtgcccaaaagatgggagataccagttcaacacaaatgtcgtgttcagcaataatggaacccttgttgaccgct

SEQ ID NO: 333211 - DNA, 201 bp, Homo sapiens
tcattagaacagcatgggaaaaatcccctccccatgattcagttacttcccactgggtccctctcaccacatgtggggattatgggagctataattcaagrtgagatttggatgaggacacagccaaactgttctgcccctggcccctcccaaatatcatatcctcacatttcaaaaccaatcatgccttcccaacagtcc

SEQ ID NO: 333212 - DNA, 201 bp, Homo sapiens
taggtgctccagcgcctgagttgtatggccatcaggggagatatgttcttggtggccaatcttgggacaaaggagccttgtcatagcagtgacccaaggtrcccaaaagatgggagataccagttcaacacaaatgtcgtgttcagcaataatggaacccttgttgaccgctaccgtaaacacaacctctactttgaggca

SEQ ID NO: 333213 - DNA, 201 bp, Homo sapiens
ctctgaaatctaggcagaggttcccaaacctcaatttttgacttctgtgcacctgcaggctcaacaccatgtggaagctgccaaggcttcaggcttgcacygtctgaagccaggcctgagctgtacattggccctttttagccatggctggcatggctgggatgcaggacaccaagtccctaggctgcaaacagcaggggg

SEQ ID NO: 333214 - DNA, 201 bp, Homo sapiens; identical to SEQ ID NO: 69977

SEQ ID NO: 333215 - DNA, 201 bp, Homo sapiens
tgggtttttattttctactgcatcgtcagtctgcagatttttcaaatttgtatgctctgcttcctctggaacactttgccatttagaaatttcttctgccrgataccctaaatcatctctctcaagttcaaagttccacagatctctaggacaggggcaaaatgccactagtctctttgcatagcaagagtgacctttact

SEQ ID NO: 333216 - DNA, 201 bp, Homo sapiens; identical to SEQ ID NO: 69978

SEQ ID NO: 333217 - DNA, 201 bp, Homo sapiens
tgatatagttggattattatctatcatatttgttacttttttctacttgctgcctttgttcgtagttcctgtttttgtcttccagtctttttctgagtttkggtgttttaattgaacattttatgtgattttgtcacatgattttgtctgaaagtatcttatttctctgcttttgaaggttaattttgtaggatgtttata

SEQ ID NO: 333218 - DNA, 201 bp, Homo sapiens
gcccaggatggctttgaatgcggcccaacacaaattcataaactttcttaaaacattatgagatttatgcaccgacccttttttttgttgttgtttttggttttttttttttttttttagctcatcagctatcatttgtgttagtgtattttatgtatggcccaagacaattcttctttttccagtgtggcccagggaagc

SEQ ID NO: 333219 - DNA, 201 bp, Homo sapiens
cgatctcttgacctcgtgatctgcctgcctcggcctcccaaagtgctgggattacaggcgtgagccaccacgcctggcccagttttaattttttattttgyatataagttcaaagccttccaaagtgtttgtttatgatttattttcttgttaaaatctgttcttgttcattgcctgtttataagtgttgtcttgatgttt

SEQ ID NO: 333220 - DNA, 201 bp, Homo sapiens
cctgagggttctgcaggagactaggacttatctcaatccttacctcaactgcacaagacagacattcccagaacggccgtttatagacctccccccaggarcgcattcctttcccagggtattaatattaatattccttgctaggaaaagaatttagcgatatgtttcctacttgcacatccatttataggctctctgcaa

SEQ ID NO: 333221 - DNA, 201 bp, Homo sapiens; identical to SEQ ID NO: 69979

SEQ ID NO: 333222 - DNA, 201 bp, Homo sapiens; identical to SEQ ID NO: 69980

SEQ ID NO: 333223 - DNA, 201 bp, Homo sapiens
caggaccccgtggataccgaaaccctcagatgctcaagtcccttatatcaaatggtgtagaatttacatgtaacctaaacacttcctcctgtacactttaratcatctctagatcccttacactacctaatacaaactaaatgctatataaataattgttatactgtattttttaaattgctattattttttattgttgtg

SEQ ID NO: 333224 - DNA, 201 bp, Homo sapiens; identical to SEQ ID NO: 69981

SEQ ID NO: 333225 - DNA, 201 bp, Homo sapiens; identical to SEQ ID NO: 69985

SEQ ID NO: 333226 - DNA, 201 bp, Homo sapiens; identical to SEQ ID NO: 69984

SEQ ID NO: 333227 - DNA, 201 bp, Homo sapiens; identical to SEQ ID NO: 69983

SEQ ID NO: 333228 - DNA, 201 bp, Homo sapiens; identical to SEQ ID NO: 69987

SEQ ID NO: 333229 - DNA, 201 bp, Homo sapiens; identical to SEQ ID NO: 69986

SEQ ID NO: 333230 - DNA, 201 bp, Homo sapiens; identical to SEQ ID NO: 69989

SEQ ID NO: 333231 - DNA, 201 bp, Homo sapiens; identical to SEQ ID NO: 69988

SEQ ID NO: 333232 - DNA, 201 bp, Homo sapiens; identical to SEQ ID NO: 69990

SEQ ID NO: 333233 - DNA, 201 bp, Homo sapiens; identical to SEQ ID NO: 69991

SEQ ID NO: 333234 - DNA, 201 bp, Homo sapiens; identical to SEQ ID NO: 69992

SEQ ID NO: 333235 - DNA, 201 bp, Homo sapiens
tggacatacttattcattctgtcatttttctgttttctaatttaatttccactcttatttttatttccttccttttgctttcttgagcatgccattactcytttcctcactgttaccaccttttgttagttttacaatttctacattgccagagttaataacatttgcactgtgttctataaatataatcctcatgtttat

SEQ ID NO: 333236 - DNA, 201 bp, Homo sapiens
atttctgtattttattattaaaattctcacctattataccttcaaacatgtgtaatgtgtcatgtgtcattttatgtattttctccctctttctttctttyttttttttttttttttaagtcaaggtcttgctctgtcgcccaagctggagtacagtggcacagccgtagcccactgcagccttaaactcctgggctcaag

SEQ ID NO: 333237 - DNA, 201 bp, Homo sapiens
aatcattgggattgtttaaacttgctttcacctttgcacctttcagttcaggatgcagtgttcaattgttaacttgggcttgatgattcagcagaaagaartgatttgagttctggctcactggattaacagggccaaggagcaagtcctttgcaatccaattgtaattacagccagcttgtccaacccttggcccaggat

SEQ ID NO: 333238 - DNA, 201 bp, Homo sapiens; identical to SEQ ID NO: 69993

SEQ ID NO: 333239 - DNA, 201 bp, Homo sapiens
aattagtcacacatggtagcatgcacctgtagtcccagctacttgagaggctgttggggagggatcacttgagcctaggagtttgaggctgctgtgagctrtgtatgatcatgccactgtactccagcctgggcaacagagcaagaccctgtctcaaaaaaaaaaaaaaagaaaagaaaagaaaaagaagctataggacat

SEQ ID NO: 333240 - DNA, 201 bp, Homo sapiens; identical to SEQ ID NO: 69994

SEQ ID NO: 333241 - DNA, 201 bp, Homo sapiens
ttcttttcttgtaatgtctttgtctgtttcagtattggggtaatgctgccctcatggaatgagttaagaagtattccctctgtttctgtcttctggaagasatagtagagaattggtataatttatttctgaatgtttggtagaattcaccaatgaacccacctggactgggtgatctctgttttaaaatattttgaatta

SEQ ID NO: 333242 - DNA, 201 bp, Homo sapiens; identical to SEQ ID NO: 70004

SEQ ID NO: 333243 - DNA, 201 bp, Homo sapiens
tgtctttataaagtgggtttcttgtagacaacatatagttgagtcatgttttttatctactgtaatgatctcttgtttcgaattgatatatttataccatwgacttttaaagtgattattgatatagttggattattatctatcatatttgttacttttttctacttgctgcctttgttcgtagttcctgtttttgtcttc

SEQ ID NO: 333244 - DNA, 201 bp, Homo sapiens
ttttttatctactgtaatgatctcttgtttcgaattgatatatttataccattgacttttaaagtgattattgatatagttggattattatctatcatatwtgttacttttttctacttgctgcctttgttcgtagttcctgtttttgtcttccagtctttttctgagttttggtgttttaattgaacattttatgtgatt

SEQ ID NO: 333245 - DNA, 201 bp, Homo sapiens
tgacctcaggtgatctacccaccttggcctcccaaagtgctgggattacaggcatgagccaccatgcccagccccaagggttattcttttgatttggggarcagggttccttggccctattacccaccacattgttctccactctttgcatcctgagcatctccatctgcatttttcactcctgagtactggcagagatga

SEQ ID NO: 333246 - DNA, 201 bp, Homo sapiens
ggcagaaataccacttgcctaagggtcagaaaatccgatttctattataagttccagctttgtcagtaattagctgtgagcctgggtaaatcaattaaccycattaggcctcagtttccacatttggatacagatgagatgattctcaagcttctgcagggcataacatttcataattctatgaaataaaataatagctat

SEQ ID NO: 333247 - DNA, 201 bp, Homo sapiens
tgaacgcgggaggtggaagttgcagtgagctgagattgtaccattgcactccagactgggtgaccgcgagactctgtctcaaaaacaaaaaacaaacaaamaaaaagctttaaaagaagttattaccttaaggggagggagtggatggggtaaatgataacacagaaatataatcttaaaactctagactgtccccgcccc

SEQ ID NO: 333248 - DNA, 201 bp, Homo sapiens
cagcatcagcatcagcagcagtagcagcagcgggcggccgcgtgggtgtttttgtcgggtctcggggtctggcagcagcatggcggactacctgatcaccrgcagcaccggctacgtgcccagggatgggctcactgtgccccagctcttcgtcggcgctgacggcctcacccacaacgacttcctgattcttccaggatt

SEQ ID NO: 333249 - DNA, 201 bp, Homo sapiens
atggtgaggcagaaataccacttgcctaagggtcagaaaatccgatttctattataagttccagctttgtcagtaattagctgtgagcctgggtaaatcarttaacctcattaggcctcagtttccacatttggatacagatgagatgattctcaagcttctgcagggcataacatttcataattctatgaaataaaataa

SEQ ID NO: 333250 - DNA, 201 bp, Homo sapiens; identical to SEQ ID NO: 70008

SEQ ID NO: 333251 - DNA, 201 bp, Homo sapiens; identical to SEQ ID NO: 70009

SEQ ID NO: 333252 - DNA, 201 bp, Homo sapiens; identical to SEQ ID NO: 70010

SEQ ID NO: 333253 - DNA, 201 bp, Homo sapiens
tttaaagaaaagaaaaatagggcattttctaaacatagcactaattctttgagcagttcagaacagccagggctaggcagtagcccagggtctcaagtgtsagagaaatgtattctgccctcctaagataatcaaggtcaaggcaaccttctgcagctatgtacaacttttccttctcctgctctgttactctgtcctgtt

SEQ ID NO: 333254 - DNA, 201 bp, Homo sapiens
ggtagcttcattcctgagttttcctaacagcagtctaaagcatgcaggaagattcagaacgcaaaatagcggggtagaagagtgaaagtttaataggaagrtagaagagtgacaaattttaccgatagcctctgttagcttgctgaccatagaggaagctaggcaaggaatcaagagtagtcagaagtgtggtgatgaggc

SEQ ID NO: 333255 - DNA, 201 bp, Homo sapiens
tgctccttatgctgcccttggccctcccaccataggtaccatggggaaccgcctgcagaggatcaaggtggaaaacactgaagagaaccgccggcagttcygagaaatcctcttctctgtggacagttccatcaaccagagcatcgggggtgtgatccttttccacgagaccctctaccagaaggacagccagggaaagct

SEQ ID NO: 333256 - DNA, 201 bp, Homo sapiens
ctgcacccccaactgtcttggtcatgcatccatctgagccacccatggttctgtgcacaactctcgcacactcttttccagacctgtcaccatggcccacygatttccagccctcacccaggagcagaagaaggagctctcagaaattgcccagagcattgttgccaatggaaaggggatcctggctgcagatgaatctgt

SEQ ID NO: 333257 - DNA, 201 bp, Homo sapiens
cagcatgtctgcacccccaactgtcttggtcatgcatccatctgagccacccatggttctgtgcacaactctcgcacactcttttccagacctgtcaccayggcccaccgatttccagccctcacccaggagcagaagaaggagctctcagaaattgcccagagcattgttgccaatggaaaggggatcctggctgcagat

SEQ ID NO: 333258 - DNA, 201 bp, Homo sapiens
gatgctgccacctcttatctacttgatgatgttcacatttggggcttgactttccaacacggagaagcattgttttcttcgggccaagaaggtatctaccratagtgtctattaggcatttgaaaatgtggcagtagaggtcagtatgaggattgaggctagagagaattttgaattatccacactagagtatagttgatg

SEQ ID NO: 333259 - DNA, 201 bp, Homo sapiens
ggtgttgactttgggaagtggcgtgctgtgctgaggattgccgaccagtgtccatccagcctcgctatccaggaaaacgccaacgccctggctcgctacgmcagcatctgtcagcaggtgctctgccttccccttgggctgaaaaagagtaggctagagttttcttcagagcttttcttttcaattatactataactacaa

SEQ ID NO: 333260 - DNA, 201 bp, Homo sapiens
accagtctcctctctcatatttgtcttctaggctaactgccaggcggccaaaggacagtatgttcacacgggttcttctggggctgcttccacccagtcgstcttcacagcctgctatacctactagggtccaatgcccgccagcctagctccagtgcttctagtaggagggctgaaagggagcaacttttcctccaatcc

SEQ ID NO: 333261 - DNA, 201 bp, Homo sapiens
acttttgcttccttgattttcctttttagaatggactggtacctattgttgaaccagaggtaattcctgatggagaccatgacctggaacactgccagtawgttactgagaaggtaagttttaaatatgaaggccccaattctagttgaaaaatcttagttttaggtaacagctgttacttaacatataacagctgttata

SEQ ID NO: 333262 - DNA, 201 bp, Homo sapiens; identical to SEQ ID NO: 70020

SEQ ID NO: 333263 - DNA, 201 bp, Homo sapiens
ttatgaagcgggccatggtaagatgctgccacctcttatctacttgatgatgttcacatttggggcttgactttccaacacggagaagcattgttttcttygggccaagaaggtatctaccgatagtgtctattaggcatttgaaaatgtggcagtagaggtcagtatgaggattgaggctagagagaattttgaattatc

SEQ ID NO: 333264 - DNA, 201 bp, Homo sapiens
aaagaagcctttctctcttttgtgacttgcagggcttgatggcctctcagagcgctgtgctcagtacaagaaagatggtgttgactttgggaagtggcgtsctgtgctgaggattgccgaccagtgtccatccagcctcgctatccaggaaaacgccaacgccctggctcgctacgccagcatctgtcagcaggtgctctg

SEQ ID NO: 333265 - DNA, 201 bp, Homo sapiens
cttatctctagcccaactagcttcagcaaaagcaaactgatttctcagtttgctttaaggcaaattaagcagagaaaagactgagacattacttttctggyaggttcattgcttgctttctcaagcagggtatataaggtgggactaatagagtgaaatggcttctctcctaccaggcatctgctttttgtctggtggcat

SEQ ID NO: 333266 - DNA, 201 bp, Homo sapiens
ccagcatctgtcagcaggtgctctgccttccccttgggctgaaaaagagtaggctagagttttcttcagagcttttcttttcaattatactataactacamatggacctccttttccctcaccagtatatcctagtggcatttttcacaacttttgctatagccaactgtggtagggaaagatttggtcccacaagccagt

SEQ ID NO: 333267 - DNA, 201 bp, Homo sapiens
ttgtctggtggcatgagtgaagaggatgccactctcaacctcaatgctatcaacctttgccctctaccaaagccctggaaactaagtttctcttatggacrggccctgcaggccagtgcactggctgcctggggtggcaaggctgcaaacaaggaggcaacccaggaggcttttatgaagcgggccatggtaagatgctgc

SEQ ID NO: 333268 - DNA, 201 bp, Homo sapiens
tgagaaaactgaactacgaagagtaacataacttgcccacacaacaaggcaaggtcagagccagtttaggctaattctcaagctcatgacttttgcctttrctatgtagagagtagaggttgtatccttaattctctttacctcctgtactaacacaacacctggtgcatgcaggtgctcaataaatgttagggtagacac

SEQ ID NO: 333269 - DNA, 201 bp, Homo sapiens
gagtgtattggagggagagaagattagagaaaggaggagaccctggcattggataggaagctacccaagataatcttcattaccattttttctttggtagsccaacctatgcaaaaagcactctttgtaacacccaaagtgagggctctttgagcttgcattttcaagattaacccaaagtggcatccgaacaggggcaac

SEQ ID NO: 333270 - DNA, 201 bp, Homo sapiens
tttgtctggtggcatgagtgaagaggatgccactctcaacctcaatgctatcaacctttgccctctaccaaagccctggaaactaagtttctcttatggaygggccctgcaggccagtgcactggctgcctggggtggcaaggctgcaaacaaggaggcaacccaggaggcttttatgaagcgggccatggtaagatgctg

SEQ ID NO: 333271 - DNA, 201 bp, Homo sapiens
ctgcactccagcctggatgaccctgtctcaaaaaaaaaaagagtaagatcctgtctaaaaaaaaaaaaaaagaaagaaaaaagaaaagaaaaagtttataktgcgtaattattgttaatggtaactatcataattattgaagcatttactattctatcttataactaggtcttccaatagtgcataaacttctcaaaagtg

SEQ ID NO: 333272 - DNA, 201 bp, Homo sapiens
gtgaaggtttgactggtttcccatgagaggcagacagggtcaaggtggggtcacatttactctaaccagtctcctctctcatatttgtcttctaggctaastgccaggcggccaaaggacagtatgttcacacgggttcttctggggctgcttccacccagtcgctcttcacagcctgctatacctactagggtccaatgc

SEQ ID NO: 333273 - DNA, 201 bp, Homo sapiens
aggtcgaagctggagtgagctatggtcataccactgcactccagcctggatgaccctgtctcaaaaaaaaaaagagtaagatcctgtctaaaaaaaaaaaraaagaaagaaaaaagaaaagaaaaagtttatattgcgtaattattgttaatggtaactatcataattattgaagcatttactattctatcttataactag

SEQ ID NO: 333274 - DNA, 201 bp, Homo sapiens
ttcaggtcctggctgctgtctacaaggccctgaatgaccatcatgtttacctggagggcaccctgctaaagcccaacatggtgactgctggacatgcctgmaccaagaagtatactccagaacaagtagctatggccaccgtaacagctctccaccgtactgttcctgcagctgttcctggtaaggccttctttcttctct

SEQ ID NO: 333275 - DNA, 201 bp, Homo sapiens
tgctggtggctgggacataatgggccttagaaggtcatcttctctagaaattgttgcccactagcttgtcctattaccccagtaacagcattgcagtttcrttcttttggggtaagacaagaacctctgttgaaatggagaggcaacaatgagatcatcagttataccttctcatgaattagctcagtggctactgacttt

SEQ ID NO: 333276 - DNA, 201 bp, Homo sapiens
taccaattgcaactgttgaatctcctcctaaggaaaggataacagtgagcacagcttcacttttgcttccttgattttcctttttagaatggactggtacstattgttgaaccagaggtaattcctgatggagaccatgacctggaacactgccagtatgttactgagaaggtaagttttaaatatgaaggccccaattct

SEQ ID NO: 333277 - DNA, 201 bp, Homo sapiens
gttgtgtattttgatacatttgctctactatctgaaaaataggcattgtgagaatatgttgcctttttaaaaaataacttctctttaaatagttacctagrgctccattagacaatttggatgcaccagagcttgaactctgctaccctgctattcatcactttagctaaggcacatctgggtagcacccaggcccaggtt

SEQ ID NO: 333278 - DNA, 201 bp, Homo sapiens
gaaaagcagcgattatattgtagggtgaaccaagcattctgggaataaagacagaagaatttctttctttcatgtttatttgtttgtttgtttgtttgttttgagatggagtgttactctgtcacccaggctggagtacagtggcacaatctcggctcactgcaacctccacctcctggattcaagcaattcttctgcctc

SEQ ID NO: 333279 - DNA, 201 bp, Homo sapiens
agaaaagcagcgattatattgtagggtgaaccaagcattctgggaataaagacagaagaatttctttctttcatgtttatttgtttgtttgtttgtttgttttgagatggagtgttactctgtcacccaggctggagtacagtggcacaatctcggctcactgcaacctccacctcctggattcaagcaattcttctgcct

SEQ ID NO: 333280 - DNA, 201 bp, Homo sapiens
aggtacaaagaagcctttctctcttttgtgacttgcagggcttgatggcctctcagagcgctgtgctcagtacaagaaagatggtgttgactttgggaagyggcgtgctgtgctgaggattgccgaccagtgtccatccagcctcgctatccaggaaaacgccaacgccctggctcgctacgccagcatctgtcagcaggt

SEQ ID NO: 333281 - DNA, 201 bp, Homo sapiens
gcttcaatttataccaattgcaactgttgaatctcctcctaaggaaaggataacagtgagcacagcttcacttttgcttccttgattttcctttttagaakggactggtacctattgttgaaccagaggtaattcctgatggagaccatgacctggaacactgccagtatgttactgagaaggtaagttttaaatatgaag

SEQ ID NO: 333282 - DNA, 201 bp, Homo sapiens
aagaaaagcagcgattatattgtagggtgaaccaagcattctgggaataaagacagaagaatttctttctttcatgtttatttgtttgtttgtttgtttgttttgagatggagtgttactctgtcacccaggctggagtacagtggcacaatctcggctcactgcaacctccacctcctggattcaagcaattcttctgcc

SEQ ID NO: 333283 - DNA, 201 bp, Homo sapiens
caagaaaagcagcgattatattgtagggtgaaccaagcattctgggaataaagacagaagaatttctttctttcatgtttatttgtttgtttgtttgtttgttttgagatggagtgttactctgtcacccaggctggagtacagtggcacaatctcggctcactgcaacctccacctcctggattcaagcaattcttctgc

SEQ ID NO: 333284 - DNA, 201 bp, Homo sapiens
gtaggctagagttttcttcagagcttttcttttcaattatactataactacaaatggacctccttttccctcaccagtatatcctagtggcatttttcacwacttttgctatagccaactgtggtagggaaagatttggtcccacaagccagtaggagtccaactaagctatgagttcaaaggataatgccatcaactgct

SEQ ID NO: 333285 - DNA, 201 bp, Homo sapiens
ctgcagtgtaaatgtgccaaggtcaagtggctctatgactagctttgagtttcacctggtgggacctcttgtccttcaggtcctggctgctgtctacaagrccctgaatgaccatcatgtttacctggagggcaccctgctaaagcccaacatggtgactgctggacatgcctgcaccaagaagtatactccagaacaagt

SEQ ID NO: 333286 - DNA, 201 bp, Homo sapiens
ctgggaccttgaacaagtcagttagcttctctacgtcttagcttgctcattaattaatgaagataatacctgctataattacctcattgccaatggatcasatgagacctgaggtgtccctgggcttccgggaagtaatatgtagacatggagcatccaccctgtgctgagtgtattggagggagagaagattagagaaag

SEQ ID NO: 333287 - DNA, 201 bp, Homo sapiens
caggaaagccctggcttgctccttatgctgcccttggccctcccaccataggtaccatggggaaccgcctgcagaggatcaaggtggaaaacactgaagasaaccgccggcagttccgagaaatcctcttctctgtggacagttccatcaaccagagcatcgggggtgtgatccttttccacgagaccctctaccagaagg

SEQ ID NO: 333288 - DNA, 201 bp, Homo sapiens
tcactgttattctggttgagtcagcatacccagattgaagaaaatagtttagtaataggcagtaaacagaaaaatggaggtcacttaggtgatttttttcattaaaaaaagagaattagtaatacattgcattttatagtgctttgtaaagaatcttcatgtttatcatgcaatttaacaaatatattttgagcaactaca

SEQ ID NO: 333289 - DNA, 201 bp, Homo sapiens
catggtggcaggcgcctgtagtttcagctgcttggtgtctgaggtgggaagatcacttgagcccaggaggacgaggcttcagtgagtcatgattgtgccartgcactccaggctaggcaacagagcaagactctgtctcagaaaataaaaaagaaagaaagaaaaagaaaagaaatgtgagaatctctccaccctacccca

SEQ ID NO: 333290 - DNA, 201 bp, Homo sapiens
ttgatggtggctgaaaacatgatggctctgcttggagggaaatgcttgttttcctctctctaagtataaatgctcattcacacctttcctgactttttgaraggtggcaaaatgcccaagattgattgccagttacttgtgttacctgaatgaggcccttgtgagtctctgatctaggaaaaacaacttgaacactcctat

SEQ ID NO: 333291 - DNA, 201 bp, Homo sapiens
agcattaactcacaacattgggttagctaagcagaatttgaatcccagctctgtcactcttgagcaattcaaacttggtaaagttgcttaaccattaggascttcagtttccacctttgtaaaatgagtatcatattaactattggtttcttctattctatatatggagtagatagtatgtatgtcaaaacactatttatt

SEQ ID NO: 333292 - DNA, 201 bp, Homo sapiens
gaaagaaatacagtaattacgggtttgtatttattttttatctcattctgaaaaattctactgtctttaagtcatctatgtagtatttctccataatggcwtcaatttataccaattgcaactgttgaatctcctcctaaggaaaggataacagtgagcacagcttcacttttgcttccttgattttcctttttagaatgg

SEQ ID NO: 333293 - DNA, 201 bp, Homo sapiens
tgatgagaagtctataaaaattgtgtgctaccaaagatctgtcttatttggcagctgctgcctcacccacagcttttgatatctaggaggactcttctctyccaaactgtaagtaaaaaagcttcctttgtatacctggacagcaccagtgaataaggggttaataatactactaagcttatagaagggaagattggtttg

SEQ ID NO: 333294 - DNA, 201 bp, Homo sapiens
ttgactggtttcccatgagaggcagacagggtcaaggtggggtcacatttactctaaccagtctcctctctcatatttgtcttctaggctaactgccaggyggccaaaggacagtatgttcacacgggttcttctggggctgcttccacccagtcgctcttcacagcctgctatacctactagggtccaatgcccgccagc

SEQ ID NO: 333295 - DNA, 201 bp, Homo sapiens
aaagaaatacagtaattacgggtttgtatttattttttatctcattctgaaaaattctactgtctttaagtcatctatgtagtatttctccataatggctwcaatttataccaattgcaactgttgaatctcctcctaaggaaaggataacagtgagcacagcttcacttttgcttccttgattttcctttttagaatgga

SEQ ID NO: 333296 - DNA, 201 bp, Homo sapiens
cttccttgattttcctttttagaatggactggtacctattgttgaaccagaggtaattcctgatggagaccatgacctggaacactgccagtatgttactsagaaggtaagttttaaatatgaaggccccaattctagttgaaaaatcttagttttaggtaacagctgttacttaacatataacagctgttatatctgaag

SEQ ID NO: 333297 - DNA, 201 bp, Homo sapiens
tgttgttacattgcctattttaagatcctacaatcaaaggcctctaaaccagttatgcattcagatctagctatttaatgaaaacctattctgtacaaagygccactcatatattatttcattcatgcttcataatacatttctgatagaggcattcctagttcattttacagatggggaaactgtggactaaggttgaag

SEQ ID NO: 333298 - DNA, 201 bp, Homo sapiens
cacccaggttggcttttttcagcatgatgatctggaggccaggtccaaagctaaaagtctttgactccaatattacagctaatatataaacagggcaaacwtgctctgctggtggctgggacataatgggccttagaaggtcatcttctctagaaattgttgcccactagcttgtcctattaccccagtaacagcattgca

SEQ ID NO: 333299 - DNA, 201 bp, Homo sapiens
ttatgattaacagagaggtgacatttgtgctaacgtggtacagacctttaatcccactgtagaagtttaactccctgtaaacagtattagtttgaattatyattttcactgttattctggttgagtcagcatacccagattgaagaaaatagtttagtaataggcagtaaacagaaaaatggaggtcacttaggtgatttt

SEQ ID NO: 333300 - DNA, 201 bp, Homo sapiens
tccacacagaagaagggaagctgagtttatcatcaaggatggtgcttcccaagctccagtgtggatctgaatcacctgaaggtgattttggttttgttgtyatgatcttttatatttacacacaataattgtatagatctgtggggtatctgtgattttttatatatgcatataatgtataatgatcaaatcaggataatt

SEQ ID NO: 333301 - DNA, 201 bp, Homo sapiens
caggttagagccagagatactggggcagggaatggggaaatgttgaatatctaagaggtcctttggcttcattccaagtttagaggaaagagcaccattcwggactcgttctgggctgctccgcgtgtgttaaagggcactggaaatcaggctgtcctaggactgccctagatcatcccactgcacttgtcactgggacat

SEQ ID NO: 333302 - DNA, 201 bp, Homo sapiens
atggactgaggagacctagcttacatgatggagggattgtgaaagcgcaggtcatcagggacatccacacagaagaagggaagctgagtttatcatcaagratggtgcttcccaagctccagtgtggatctgaatcacctgaaggtgattttggttttgttgtcatgatcttttatatttacacacaataattgtatagat

SEQ ID NO: 333303 - DNA, 201 bp, Homo sapiens
gcccaggttagagccagagatactggggcagggaatggggaaatgttgaatatctaagaggtcctttggcttcattccaagtttagaggaaagagcaccaytcaggactcgttctgggctgctccgcgtgtgttaaagggcactggaaatcaggctgtcctaggactgccctagatcatcccactgcacttgtcactggga

SEQ ID NO: 333304 - DNA, 201 bp, Homo sapiens
aaattttaccgatagcctctgttagcttgctgaccatagaggaagctaggcaaggaatcaagagtagtcagaagtgtggtgatgaggccctaaagggaagraaggccccagggaagctaaatcatcatctcacaggcataagagaggtatcagattttcaaagtagtgctttaccttgactgtggaaagcagggtgcagca

SEQ ID NO: 333305 - DNA, 201 bp, Homo sapiens
ggaaaaacaacttgaacactcctatcgttaggttctaatcagtttttgagattcctgttcatttcaactctcaactctcttttcataacaactacttattktagtgatttatttacatatctactgccttatgtcattttctacattctcttcccacacctactggtaccgacactgaagtttctttgtcacagaaacaaa

SEQ ID NO: 333306 - DNA, 201 bp, Homo sapiens
aaatggagggtctggattaggaactccacggtctaaagacattccttgcagctttaacattctatgagcataaggagtatatgggcatgattttaaggacwggttgtttatgagccaatcagaggtgttgaataaacacctccctactaggtcaaggtagaaaggggagggcaaatattggaaaaaaaaaacatgatgaga

SEQ ID NO: 333307 - DNA, 201 bp, Homo sapiens
catcactttagctaaggcacatctgggtagcacccaggcccaggttagagccagagatactggggcagggaatggggaaatgttgaatatctaagaggtcytttggcttcattccaagtttagaggaaagagcaccattcaggactcgttctgggctgctccgcgtgtgttaaagggcactggaaatcaggctgtcctagg

SEQ ID NO: 333308 - DNA, 201 bp, Homo sapiens
catccagcctcgctatccaggaaaacgccaacgccctggctcgctacgccagcatctgtcagcaggtgctctgccttccccttgggctgaaaaagagtagrctagagttttcttcagagcttttcttttcaattatactataactacaaatggacctccttttccctcaccagtatatcctagtggcatttttcacaactt

SEQ ID NO: 333309 - DNA, 201 bp, Homo sapiens
ggtctgacaaatatggtagcaggtgcttcaatgagcccagttgaagatggggaaaccaggaaatgtgccatcagatactaagtggagtcaagggagctgayaggacctttccctggtctatccctctactatcctcaggacagggcttggtgggaacttccctagccaaatgagcctcaatattgtgtttcaaatacttca

SEQ ID NO: 333310 - DNA, 201 bp, Homo sapiens
tcagcctcccaagtagctgggactagaggcatgcgccaccatacctggctaatttctgtatattttagtaaagatggggtttcaccatgttggccaggctrgtctcaaactcctgacctcaggtgatctgcccacctcaacctcccaaagtgctgagattacagacatgagccaccacacccagccgggtaaacaatttca

SEQ ID NO: 333311 - DNA, 201 bp, Homo sapiens
ttgtatttattttttatctcattctgaaaaattctactgtctttaagtcatctatgtagtatttctccataatggcttcaatttataccaattgcaactgwtgaatctcctcctaaggaaaggataacagtgagcacagcttcacttttgcttccttgattttcctttttagaatggactggtacctattgttgaaccaga

SEQ ID NO: 333312 - DNA, 201 bp, Homo sapiens
tgtatttattttttatctcattctgaaaaattctactgtctttaagtcatctatgtagtatttctccataatggcttcaatttataccaattgcaactgtwgaatctcctcctaaggaaaggataacagtgagcacagcttcacttttgcttccttgattttcctttttagaatggactggtacctattgttgaaccagag

SEQ ID NO: 333313 - DNA, 201 bp, Homo sapiens
gatgaataaggcagggatttccttctgtgtcaccatttggagcacaagtgtttggccaatataaggaaataagaaaggacatgataggggccttggtcggytgtgtttcttaaagtacaattgccttacttttgtgtttgaagctagttctggttctgacagaaagcatggcctctgggagctgtgggatcctccacttgt

SEQ ID NO: 333314 - DNA, 201 bp, Homo sapiens; identical to SEQ ID NO: 70055

SEQ ID NO: 333315 - DNA, 201 bp, Homo sapiens
tagtgtcttacaacgaggatggacctaaggtaaaagttaagccacataaataaatgttcgtaataaggatgagatggagagaagaggtgtaacgaattttrctattgcttactacctgttactgttacctgctgaccgggtgttttcatgtgttaagcactgtacagctttctttctccccagacaaggctcttccctagc

SEQ ID NO: 333316 - DNA, 201 bp, Homo sapiens
gacacaagcaaacagaattttaatctgctgcttctaatccacagttggtgttcagtggaacaaaccctctttgaaactgaatgcctacttacaaccagtgytcattttggcggcgggggtcgggctgggggtgggttcctaaccacactgtgccctgaaagattagacctgcatgaagtgcagcctctgcttagagaggta

SEQ ID NO: 333317 - DNA, 201 bp, Homo sapiens
tgagtcctccacgggacacaagcaaacagaattttaatctgctgcttctaatccacagttggtgttcagtggaacaaaccctctttgaaactgaatgcctrcttacaaccagtgctcattttggcggcgggggtcgggctgggggtgggttcctaaccacactgtgccctgaaagattagacctgcatgaagtgcagcctc

SEQ ID NO: 333318 - DNA, 201 bp, Homo sapiens
tatgaagagtttattttcagtaaaactgaggtcagcattggacatttaatctgacatccatatggcactgagatgcgcggtgcatgaatgcactttgtaasctgtagagggcagcctgtgaggagagactggggctttggagtccacagatttagtctcaaattccaggccctgcaccttgccggggatttgtatgagtta

SEQ ID NO: 333319 - DNA, 201 bp, Homo sapiens
gccggttctaaaaatttatgacctatgaagagtttattttcagtaaaactgaggtcagcattggacatttaatctgacatccatatggcactgagatgcgmggtgcatgaatgcactttgtaagctgtagagggcagcctgtgaggagagactggggctttggagtccacagatttagtctcaaattccaggccctgcacc

SEQ ID NO: 333320 - DNA, 201 bp, Homo sapiens
agtttctagtctcccaatctgtttctttctcatctcccatctctgtctctgataacggcagttctaagtattagcagcaagcatgtttgaagcactgctaraggcttccggtgcagcgatctttgctttgggacttgtacacagatatttagtttattatggccggttctaaaaatttatgacctatgaagagtttatttt

SEQ ID NO: 333321 - DNA, 201 bp, Homo sapiens
gaagtggcctgggtttacctgtttacatttcatgactatccgagctaactggaagttttcacgtttttcaccctcttagtgaattactattaaacattcartttatacatcaaaataactatctttattcatttttgggaagaaaggctgtctcttggtgtccaggaaaaagaaggctagcatcaggctgggggctctgca

SEQ ID NO: 333322 - DNA, 201 bp, Homo sapiens
ctgagtctcacccaaggcccacagtgagtactgcctgagtaccactgctaattattcaagacccagcagctctttagtcagcagatgatggatcctgccasgactgagtccttctctccatgaagcaggttcccttctggctcagatgtgtctagaaatgtcagccaggagctagggcctggaatgggggcctcaggactc

SEQ ID NO: 333323 - DNA, 201 bp, Homo sapiens
ggggcctcaggactctatctggtgccctatcctactgtggctgagctggtatccaagttgcaagacaaagttctctttactcttctctctcctctcctgayaaggaaggaaggagtctcttccagaggtgcagcctgtgctgcctggagttgggggaagagtggtgcaagcactcccttggctgccctagcttgtgtctcg

SEQ ID NO: 333324 - DNA, 201 bp, Homo sapiens
atgggaaatagacaagtgtaatatggttttcttttaaaagtatgtcaatatatgtatagatatgtatataattggtctataattttattatatacattagrtatgtatataattggtctataatagtatataattggtctatatgtgtatataatagtatgtaattggtctatatgtatatatataatagtatataattgg

SEQ ID NO: 333325 - DNA, 201 bp, Homo sapiens
tttctcttagtttattataaataggatacatatggaaaacatacttatgtgtgtacatatatgtgaatgtgaatgtttgtgtaaatgttctttatgacaayagcagacatcatgctcaacatgcaagaacctctactcccttggtccctttggtgaaatgcagaatgcatttgactgttgagactaacttttgagattgtc

SEQ ID NO: 333326 - DNA, 201 bp, Homo sapiens
taagattggcttttgaaaaccatccagtttaagaaccagagttgcaaaggtcacaactccaacacaactgactccagtccttacggacgccattgtgttaytagctcatagaaatgcccaagtagcaaagaactgtggtttctgggtacagttccactgctaggttatacagtgactttgtgtaaaagacactcttgaagc

SEQ ID NO: 333327 - DNA, 201 bp, Homo sapiens
gttaaaagttcagattcctggaccccagcacaaaccaatagaacctgaatttctggaaatgaagacaagtcccaggaacctgcatttgatcaagctgcctrtgtcattcttttccatgctgaactttgaggactactgctttatggggaggaccaactgcacagctaacatactcccctaagtataagattggcttttgaa

SEQ ID NO: 333328 - DNA, 201 bp, Homo sapiens
tagattcgtgtagaaaatggaaggatttagacaccttatagcaatttcacatagccatggcatccaaatagttgatcatttttctcgtagttcctcattayggtattttacaaaagcattggtctgtgataggttggaacttttctctaactggcctttcacctaaagggaacgcttgttaaaagttcagattcctggacc

SEQ ID NO: 333329 - DNA, 201 bp, Homo sapiens
tgaggaggcctcaaacagcacttaaagactctattcttccctaatcctgtccccgtcctgtctgcctgcagtatctactccccacctaccccattctgaascatgtaagagctattgttatgtatgtccaaacattgacatctacctagttctcttttgcaaagtatgaagaaatttattcttcaggtgtttgtgtattgc

SEQ ID NO: 333330 - DNA, 201 bp, Homo sapiens
taaattgccaatgattagtaccgtggtcagcttgatagatgttgaatttaattgaggaggcctcaaacagcacttaaagactctattcttccctaatcctstccccgtcctgtctgcctgcagtatctactccccacctaccccattctgaaccatgtaagagctattgttatgtatgtccaaacattgacatctacctag

SEQ ID NO: 333331 - DNA, 201 bp, Homo sapiens
tttttctcagtatgacgtttaggatactttcttcaagccatcctaagaatggtcatgggccttctactgtctttaaatttaaaggtgaaatctttagtttyatttaatatctttacctttttaaagaaaggtgctctaaattgccaatgattagtaccgtggtcagcttgatagatgttgaatttaattgaggaggcctca

SEQ ID NO: 333332 - DNA, 201 bp, Homo sapiens
ggttttggagcaaataaataagtgcccattctgcttattatgctgaatcatataacatgacattttatcaaaaccagtagaaatgctttttaaatggtttrataattatcttgcgttatatgatgtttaaaagcatacagttcagcaaatgaatgcctcttgagtcacaattgcctagaaaatactaatacttattttctt

SEQ ID NO: 333333 - DNA, 201 bp, Homo sapiens
tgcagtagggcatccaggcacaccagcaggcaccagcctcacccaccccggctcccagcctgagtgttaacaggcagacaggccttgtagccagggcctcygcccaacatacacatagacgtggaactcctttttaaggtacaattgccaattctttttattgcagaagccagcaacacccccaccttgcctttttttttt

SEQ ID NO: 333334 - DNA, 201 bp, Homo sapiens
gatttccagcagtgaggcacttttgattttgcctctaaaaatagaagttccctagaggcctggccagaaagggcagagaacagggagaaagaatggaaatrgaaaaaagtagtccaaataggcagagaacatccactgggaattcagacctttgcattgccaggtaataatgttagaattgcagtggaaaggaaaagaaag

SEQ ID NO: 333335 - DNA, 201 bp, Homo sapiens
attttatcttgttattcagtgcaatgaagtcattttgactgtgcctgactgaggataaggaataatttacttggagtcctgtagcttctattttgcccacrtaatgacatatttttataggtgagtgatctcacctggggtcttcatgcacagctggatgggtttgccacctgcatgcagtagggcatccaggcacaccag

SEQ ID NO: 333336 - DNA, 201 bp, Homo sapiens
attggattgtgttacatgtactatctccttctctagagaagcaataaaggaattcatacacctattattggactgcacatgtatttttaaaactaaaaagrtgtaacatgaatcagggtaatttagatgatccataaggactcgtttctttggaacaacttctccatctcattagcttccttacactcagcccattgggag

SEQ ID NO: 333337 - DNA, 201 bp, Homo sapiens
agcgaaactccatctcaaaataataataataaataaataaataaataacaaaaggatgtatgtggggcatttgaataaatgatgtcacttctccatttacrttagacacagggacctctcgtacaagtgaggaaagaagagcctaagtgtggatgtcctcacatccatggaaatcattttaagtcaccttcataagcaact

SEQ ID NO: 333338 - DNA, 201 bp, Homo sapiens
gtgttttgttattatgctgcctgcccaagaatcatctatgaaatttgaaaaaggtacttctgccccagggggagtatacaacatcagttgtccatgaagamttataaatgcagggccttgatcttgggtttagcccaaccccattgcagatggagaaactaacacacacctttagcttaaagcccaggaagctgctgtgct

SEQ ID NO: 333339 - DNA, 201 bp, Homo sapiens
ctgcattccaggctggatgaccaaatgggtgggaccccatttcaaaaaaaaaaaaaaaagaaacaaaaaaagtaaagtgatatcttaaaatttagtagaayggaagagaataagaaatataaatgtgatttcaaaagtgaaaaaggagaacaggcagactgcctaatgaaaatcagatgtactcatattatattgtataaa

SEQ ID NO: 333340 - DNA, 201 bp, Homo sapiens
atgaaaaaattaattattaaatcttttgccagtgccaacttgcacagagcatgcgtatggtttgatgaattttcataaattgaatatacctatataaccarcacatcaagaagcaattcttaccaggaccccagaagcctcctgatgccctcttctggtcactgtcccccaatgggtactcactattctgatttatatcag

SEQ ID NO: 333341 - DNA, 201 bp, Homo sapiens
gactgaggtggaatattgcccccaaaccaccttctgggatcgaaggtctgcaagaagccatcttggctatatccccaacttgaaaatcacagaaggccatragaggatttcctaaactttctgaaggtggtattgtagtcagtaaccactggtccatgggatgcattcccctcatagtcttcaacccagaaatgtcaaatg

SEQ ID NO: 333342 - DNA, 201 bp, Homo sapiens
tatctgatgctaaaaaataatgtttttctctccacctgaaaacactgacagaaaggtagaagaagctcctgctggccgaggattttgtctcctatacataygcaaatacctgaagcattttttttctaatggtggtctatttccttatgaacatttccaaagacaaagggaactacttttttaaaaaaatctatgggttgg

SEQ ID NO: 333343 - DNA, 201 bp, Homo sapiens
catgtatacagaaagcatgtgttcatcagaacctggaagcagaaaaggttttaagctgcaacttaaaaatgggctatgaaatgtggaatatccaggcagtyattattagaatgaaatttgggctgatacgaagcatgtcatatcaagtgaaatttccaaggaaaaatttaggctaagattcaagaaaatgatccatctgct

SEQ ID NO: 333344 - DNA, 201 bp, Homo sapiens
cttgtgctttttttaaaaaaaaagtaatttcctcaaacattctttaagtgcttctgcatgcaacgcctgcctctctccctcccccagaagaaaatacaacrtctgagccacctgtttttttgccccagttctttttaattttcacctctttttaaaatgcaatttttaaaaaccaaaccctggctttgaaatggtttttct

SEQ ID NO: 333345 - DNA, 201 bp, Homo sapiens
acctcccacccctcccattgaattgataggggaacagttgcaattcaaaatacttggcatctacctagtccacaggtgaaatacatttaaaggggatgaartatgacctgggcagtcctaaggctttgcaggagttggtgatctggtccagctccagcattggtcctagccctggtgaaagcagggtcccagcagttgtga

SEQ ID NO: 333346 - DNA, 201 bp, Homo sapiens
agcaaaggaaagctattggccagtgcttctgcagcgaccagcactggagaaagacagccttatcagagctcagtttccaaggctggaaaaggaaggcttayattaaatcctttcccacatgtcttctggtgtgagattccacaaaactgataattgtaagttgtggcatacttaaaagctaattcctgtgcagcctcagga

SEQ ID NO: 333347 - DNA, 201 bp, Homo sapiens
tagttgttgatattctggttgtttcagagtgcttgatattatcaaacaattatgttgacaagtcattactctatgtatgtactcatacaaattatgtgcartaagtgactatatagacttttctttaaactatttccttaagataaattcccaggagtattagtgccagtgcaaagggtatggcattctggtgattattga

SEQ ID NO: 333348 - DNA, 201 bp, Homo sapiens
caggctgaactttcaaagctgttttgtaatctgagaagcacttttggggggaaagtaatgcttggctggatttttgtgaacttatttttattggacatgcraaaaatttggcgagaggcaaaccatatttggttgaaatcattgtcttttgcaccactgccgttctgaccataaaggggcatgctgaccctcctcgccgag

SEQ ID NO: 333349 - DNA, 201 bp, Homo sapiens
ctggtacctttgctgcaagacaaagtgccctttactcctccttttccttttttcaagcgggagtccctccctgtagccaccaccactgggaaaatgctgartgtcacctgaagccaacatggctctgagtctcacccaaggcccacagtgagtactgcctgagtaccactgctaattattcaagacccagcagctctttag

SEQ ID NO: 333350 - DNA, 201 bp, Homo sapiens
tggccactactagcccaggctcacagtgagtattgcctggcttccaccaatgtacatttaaggcccaaggactcttcagtcagcttatggtaaatgctacsagacctgggattctcctttcaaggcagggggctcccctctggcccagggcaggtcaagaagtgctgtgtgagagccaacgcctggaatctggcaccccag

SEQ ID NO: 333351 - DNA, 201 bp, Homo sapiens
gtatgtcaattgcatttttcaactctggaatttctgcctgattgtatttgattatttcaatctctttgttaaatttatctgataggattctgaatttcttytttctgttatcttgaatttcactgagtttcttcaaaacagctattttgaattttctgttcaaaggtcacatatctctgtctctgtgggattggtcactga

SEQ ID NO: 333352 - DNA, 201 bp, Homo sapiens
tgtacctgttgtgtgtttttcaatttgaggttaccatgaggttggcaaataatatcttcaattcattattttaaaccaattgcataaataaagagaaaacyaataaaaattctacatttgtgtcgtcctcccactttttaagtttttgttgtttctctttatatctttttttaatgtctgtatcttgaaaagttgttatag

SEQ ID NO: 333353 - DNA, 201 bp, Homo sapiens
tagctacccctgcttttagttgggaggtgggttccattagcatggaatgtctttttctatctccttattttcagtctatgtgtctctttattggtgaagtrtgtttcttgtaggcaatagatcattgggtcttgttttgttatccattcagccactctgtgtcttttgactggagagttcaggccatttacattcagtgtt

SEQ ID NO: 333354 - DNA, 201 bp, Homo sapiens
cccagggataaatcccacttggttgtgatgaatggttttttaatgtgtcgttgaattcaatttactagtattttattgaggattttttaaaatcaatattmatcaaagatattggcccatagttttcttttttgatgtgtctttgtctggttttggtatcaggacggcttgtagaatgaggttggaagtattccctcctcc

SEQ ID NO: 333355 - DNA, 201 bp, Homo sapiens
tataaattttaagattttttttctgtttctgtgaagaatgtcattggtattttgatagggattgtatttaatctgtggattgctttgagtagtatggacayttgaacagtattgattcttccaatccatgaacatggaatatatttccatatttttgtggcctcttcaacttctttcatggatgttttataattttcatta

SEQ ID NO: 333356 - DNA, 201 bp, Homo sapiens
attggattaggaaatctttctctctctctctctctcgatctctctctctctctctctgtgtgtgtgtgtgtgtgtgtgtgtgttttctgctgggaaaaggraagcaataaatgttaaagggaaaaggagtatagaaacaacttctgttcagtgcaccagtctgaatgtttcttggttagtaggcctggagatattgtgaca

SEQ ID NO: 333357 - DNA, 201 bp, Homo sapiens
gctgccctcatggacaggattagtgcccttataaaagagaccccagacagctcatttgcctcttccactgtgtgaagacacagcagaaagatggccatcartgaaccagtaagtgggtcctcacgagacattgaatctgctgcatattgttcttggaatttcaggcccctaaaactatgagaaataaattcttgtcattta

SEQ ID NO: 333358 - DNA, 201 bp, Homo sapiens
tgattatcccacagtacccagggcctactggttggttgggagaattgttctgtgtatggaaatgacatcagaggcatgctgcccactgcggaggacttctrtctggacggaactgttctgtgccatcctggcttctgctgccctctgtggtcttgtctagggaagaagtccaaattgaaggcatgcagtggctttacaaag

SEQ ID NO: 333359 - DNA, 201 bp, Homo sapiens
tcgacagccccagtcacttaaaccatcgtagacaaagcacatgtgaaggtgtgattaaggagcactgtcccattggtgcctggggacagatgatttgcctsgtgggcctcttatatcccccgatgtcatttatatcacaccagctaatgatgggatatggcagtgagtattaccgacgactttctttaagttgtataatta

SEQ ID NO: 333360 - DNA, 201 bp, Homo sapiens
ttccggcctcccaactgttggcgcaaatccaacctttggggcactgccagtgcacctaccagggaccttctccaagatggtaaataacatgcaacacctgrgcttcctccctccctgccaggctctgccttcacatccctgtcaagagccctggagcacatgtttcccagctcctgtatcagtcagggttctccagagact

SEQ ID NO: 333361 - DNA, 201 bp, Homo sapiens
aatataatttatgaccaaggaagaattccaataaagtgaagtgctatatatatatgatgtatatgtatatacatacacatatgtatatatgtgtgtgtgtrtatatatatatatatatatatatatatatatatgcgctgcaaatttagggttaaaactttttttaaaaggaaaactgatgtgtggccttgaacctgtttt

SEQ ID NO: 333362 - DNA, 201 bp, Homo sapiens
tacatacacatatgtatatatgtgtgtgtgtgtatatatatatatatatatatatatatatatatgcgctgcaaatttagggttaaaactttttttaaaargaaaactgatgtgtggccttgaacctgtttttacccactctccttcccccattatttttctggaactgacaaccaaaatttttatataccacttgaggaa

SEQ ID NO: 333363 - DNA, 201 bp, Homo sapiens
ttgtagcctctgaattgtgaatttggaaaaaatttaatattgcaagtggacattgatataggactcttagcccaaggaatctctgttgtttctagatgatrtatttctatcccaattataatatggaagcttcctatatggtcagttttagaagcttttctacataatataattagattctcttaggagatgttttaaaga

SEQ ID NO: 333364 - DNA, 201 bp, Homo sapiens
gtagcctctgaattgtgaatttggaaaaaatttaatattgcaagtggacattgatataggactcttagcccaaggaatctctgttgtttctagatgatatrtttctatcccaattataatatggaagcttcctatatggtcagttttagaagcttttctacataatataattagattctcttaggagatgttttaaagaac

SEQ ID NO: 333365 - DNA, 201 bp, Homo sapiens
acatggaagattaaagtcatatagattccttgtagttttgttcttatacagaaattctgcattgcaatttggaaacaatgaatgtaaatataaaaacccartccaggcctttcccgtaccccatcagttgctggtctgtacttggagtgtgctgaccagctttgagagatgtgtccatgataccaaaaactaaagttcaaa

SEQ ID NO: 333366 - DNA, 201 bp, Homo sapiens
gttgggggcattgcttgatcctgggaggcggaggttgcagtgagctgagatcacaccctgcattccaggctggatgaccaaatgggtgggaccccatttcaaaaaaaaaaaaaaaagaaacaaaaaaagtaaagtgatatcttaaaatttagtagaacggaagagaataagaaatataaatgtgatttcaaaagtgaaaaa

SEQ ID NO: 333367 - DNA, 201 bp, Homo sapiens
gggaggcggaggttgcagtgagctgagatcacaccctgcattccaggctggatgaccaaatgggtgggaccccatttcaaaaaaaaaaaaaaaagaaacawaaaaagtaaagtgatatcttaaaatttagtagaacggaagagaataagaaatataaatgtgatttcaaaagtgaaaaaggagaacaggcagactgcctaa

SEQ ID NO: 333368 - DNA, 201 bp, Homo sapiens
gactctcactctgtcatccaggctggagtgcagtggagccttctcggctcactgcaacctctgcctcctgggttcaagcaattctcctgcctcagtccccygagtggctgggactacaggcgcgtgccaccgtgcccagctaattttttgtattcttagtagagacggggtttcaccatgttagccaggatggtctcgatc

SEQ ID NO: 333369 - DNA, 201 bp, Homo sapiens
aacagattacttgtttaatatggatattaaagcagaattcctcaggctttgtgattcttggtgtcatctcagagacacacaatttttagatggtgtttttyttcccctttgctgtgctattttcctgtgtcatcctagttagttttatgttcatagtctgatgatttagccacaattagggtctcactcttctactcttct

SEQ ID NO: 333370 - DNA, 201 bp, Homo sapiens
caagtgatactgacactgttggtcctggggccacgctttgagaaccattctttcagctttttggaatcttaagaactttagaagtctagtccacaggctcygtactgatggaggtaccagcaaggtgatatgcatttggctcagtagaggacacaggaatcttgaataactactaatcatgtacttattgcaatctttaat

SEQ ID NO: 333371 - DNA, 201 bp, Homo sapiens
cccatcttcagctctgggtacaccggtcagcaggacggtcaccatcgcaaaagatcaccctggcagtgtccctggcctccgattgttctgatccacaaagkgctgcactggaggtgaaacagtgtgccccacttcctatactgatatgctcattagatacatgtatatacacatagctgcacacatggttggcttcatagt

SEQ ID NO: 333372 - DNA, 201 bp, Homo sapiens
tcatggttttatgggtcaggacaggcctggctgggcagttctttctgttctatatggcatccatgggggttatctggtgtattcagctgctttgtgggatkacttcactcccacatccatccagtccctttgcagggatggctaaaggcccagctcagctgggacagttgaccatgtgcctgcacatagtctttcttgcat

SEQ ID NO: 333373 - DNA, 201 bp, Homo sapiens
aaggtaggttaactaaggaaaaaaaaaacactcgtgtaacagactactctgaaattccaaggtgtaaaagcaagaaccgttttatttttctcatggttttrtgggtcaggacaggcctggctgggcagttctttctgttctatatggcatccatgggggttatctggtgtattcagctgctttgtgggattacttcactcc

SEQ ID NO: 333374 - DNA, 201 bp, Homo sapiens
tctggccctttgtggaagaagtatgctgatccgtgatctagtcccttttcctcattttacttaagcacaaagcattatatctgctagggctagcgccctgrtctgtctttgttcttgtcccctcatcccaatgaggaagtgtctgtagatgtcatgagtcatgatctttccccatcctctagccccagcctggcccctctg

SEQ ID NO: 333375 - DNA, 201 bp, Homo sapiens
aaaactcatatttgaaatacactgatccagtccccaggggtcaacaaactacacccatgggcgaaatctagccaccacctgttttaataaatagtgttttwttagaacacagcacgcccattcagtatttattgtccatgactgcttccgtgctacgatggtaccgttgagtagagacgactgactctatggcctgcaaag

SEQ ID NO: 333376 - DNA, 201 bp, Homo sapiens
agaaaacatctttattgatttttcatacaataacatacatggtgtaagcaaatataaatgtaccttttgatgaatgataaatttatacactcatgtatctrccaccacaatgaaaaactggaatatttccatcaccctagaaagttcctttgttaatcaatcctagttaatcttcccagccccaactcaggcccaagcagc

SEQ ID NO: 333377 - DNA, 201 bp, Homo sapiens
tttaaagcgacagtgccatttcactagtggaatatttcctgtgatcttaatatatacccattatatacccctgatgtctgtttaaagggagtttgatgagytgaacttctccctactctctccaaatccatgtcatggttacagctgagatgcttctgaaaacttcctttttagaaaacatctttattgatttttcataca

SEQ ID NO: 333378 - DNA, 201 bp, Homo sapiens
aactctgtgaggttgggatgctcttcattttacagaagatgcagccaaggtgcaaagaggtaaagaaacctgtccaagtttacatggatagtaaaagtcasgattgtaatcgttgttccaccggaagctcagcactctgtgaagctttcataaagcattatagcattcagtaattcttgtcttgactggtcatgtcaagac

SEQ ID NO: 333379 - DNA, 201 bp, Homo sapiens
taataagctcattaacacagtgaacccattagaagacatttgtcaggtattcagtccctgacagggttactttttatgactgagacactagagagaggtctttttttttttttggaaaaaataataaaaaattccttaaagtatatttatttatatttttaaaaaaggatttgagaaacatgaaacatgaaaacatgagag

SEQ ID NO: 333380 - DNA, 201 bp, Homo sapiens
cttaggaagtcctgagaacgtgtgcccgaggcaactgggtcacaggttggttttacacactttagggagacaggcattgtagataaaatcattaatcaatrcatgaaaggtgtgcattggtttagcctaaagtggtgggatattttgaaatgcgggtttataagtcataggtacattcaaagattttctgattggcagttg

SEQ ID NO: 333381 - DNA, 201 bp, Homo sapiens
ttgcaagccactctatgaatattagacttcacttaattgaaatcaggtaccacttatatagtacagacaaggccctgttcaaaatgctcttgttttttttktttgtttgtttttttgcttttttgagatggagtctcccgctgttgcccaggctggagtgtagtggcacaatcttggctcactgcaacctccacttcccag

SEQ ID NO: 333382 - DNA, 201 bp, Homo sapiens
atcttggctcactgcaacctctgccccctgggttcaagcaattctaccttagcctcccgagtagctgggattacaggcatgcaccaccacgcccagctaattttttttttttttttttttttttgtatttttagtagagacggggtttctccatggtggtcaggctggtctcgaactcccaacctcagatgatccgcccac

SEQ ID NO: 333383 - DNA, 201 bp, Homo sapiens
ttggaaatttgaaaaaatggaaaggaattgtttaattggaaatgaaaatacctcgtttcttcacgttcttaatgagaatgccttgaaaatttatagcaaarttatcctcagaacaaaccacaacaatttctggagtttcaaaatatgtagaaaaaagtgaggtgatgagtgatttatggtgagttgcttacagaacaaaag

SEQ ID NO: 333384 - DNA, 201 bp, Homo sapiens
aggtaaatgccaccaaattagaatacatatcatctgtaacatacattctaactaagaaactttaacatgagaaggaaaaaagtacatcgtaataatggttaaaaaaaaaaagtatcttaaaactgagggaaaataatatgttgttttttcctgaaataataattttaaaaagatgattggcagctgagattgaagaactca

SEQ ID NO: 333385 - DNA, 201 bp, Homo sapiens
tgtgaacaccacgttgatacccagttacaatagcacacttgtgagcattagtcatctaatgccaaagtgcttttgtgcagaatcggtgggcagggcagccrggtgggggaaatgtagaatatctaaatattcagaaatttctagttacactaaagggttgactgattaaactcagaattgtttcattgtgatagggctaca

SEQ ID NO: 333386 - DNA, 201 bp, Homo sapiens
gttcactgtataaagacgtcattttggtggcctgggaccctgccccatattccgcaaatcttaacctggtaagtgtttccctggatttgcccaccccaacrgtcagacaatggctttgactaattaatcataagagcaaggcaaggattaagctttgacagacaatgaaagtacccatcaatatcaatttaatgcatgttt

SEQ ID NO: 333387 - DNA, 201 bp, Homo sapiens
caggatgatatctaatatttaacaaatatacagtcgtgttatacaggttgagaataccttatctgaaatgcctggaaccagaagtgtttctgattttggattttttttttcagatttcagaatatttgcagatatttaaccgattgagcatctctaatccaaaaatccaaaatgcttcaatgagcctttgctttgagtgcc

SEQ ID NO: 333388 - DNA, 201 bp, Homo sapiens
aaaaaaaagtatcttaaaactgagggaaaataatatgttgttttttcctgaaataataattttaaaaagatgattggcagctgagattgaagaactcattwagaactaggtagggccacagagggaaggctgtggctggcaccctggaggctccttctgaactcacttcatccacacctgcaactctgtctccaaattaca

SEQ ID NO: 333389 - DNA, 201 bp, Homo sapiens
ttaaccggatgagtgaagagaagttacctggttaattatgaccgtggtacttgtttatttctatcaatcttataattaatagaaattaatgaagaaaactrcagagaaatgggaatttagacatgacatgaataggaggaaatgaataaaattaaaaggaaaaatcagtagaaatagaaatatatatatttataatcatag

SEQ ID NO: 333390 - DNA, 201 bp, Homo sapiens
caggtcttcttgccatcggcagcagtatgtaaggctgcgtcgaagtcagggctgactttctttctttcttcaacattacatgcagaatctctgcttaaggrctggctttctttttaagcatacaccagcaccaaaaagcagcccttgcagggctggctttctttttaagcatacaccagcaccaaaaagcagcccttgctt

SEQ ID NO: 333391 - DNA, 201 bp, Homo sapiens
ggttttttaaattgaaaaaaagctgttttaaaataaattaatagacattttaaaattccgttttaccttttagtatggtaaatatcagtagatatattccrtctgcctaaaaagtgtttggattatcaataaatttcaagagtctactgttttgggtaatctagtttttctacctcaaatattatttgaattttttgacaa

SEQ ID NO: 333392 - DNA, 201 bp, Homo sapiens
ataggtttcagattccaaattgtaaccaaccctaagaaactagccctcgtagagtcttgttaggtatcaaagaagaatattcacagttctttggaaggatkctttaaatagctctctcaattcaacagtgtgtctgagccttcatatacttcaaataaaacaacatattgcaacaagttgaattcaaaagcagatgtgaga

SEQ ID NO: 333393 - DNA, 201 bp, Homo sapiens
ttatgcgtgagtgaaagatccattttaagagaaaaatagaccacaagttttaatgtaacagagcacaaaaagttcattgataggtttcagattccaaattrtaaccaaccctaagaaactagccctcgtagagtcttgttaggtatcaaagaagaatattcacagttctttggaaggattctttaaatagctctctcaatt

SEQ ID NO: 333394 - DNA, 201 bp, Homo sapiens
gaatgtctgactaacatattatatatatatataacttatgtataactatgcctagctgatagttttcagctgatcattgtacaatattatacaattatgcrtgagtgaaagatccattttaagagaaaaatagaccacaagttttaatgtaacagagcacaaaaagttcattgataggtttcagattccaaattgtaacca

SEQ ID NO: 333395 - DNA, 201 bp, Homo sapiens
taacatcaggtttttgttattactgagcaactccacctcacaaaatattctgaagaatcattattagagttgactatttactgcaattaatcatggaaacytgagtcaaagttgcatatcaattattgataattatttttcaaaacacttaaaccataactttgcaaatatgttttgacttttagtatcaagattatttct

SEQ ID NO: 333396 - DNA, 201 bp, Homo sapiens
cataggttctggctgagttctgcccggtgttgctttctgctgtaacagggcagccccgagttccattgcaaagtctcccagtcactgcactttccctcccmacaagtgcacagattctcctccctgctgggggatggaggaggcacggtgttggcaaggtaagactgagtttccgactctcttcagtgctcctttcagtga

SEQ ID NO: 333397 - DNA, 201 bp, Homo sapiens; identical to SEQ ID NO: 70057

SEQ ID NO: 333398 - DNA, 201 bp, Homo sapiens
tctgcaggcgcaatcctcaactcttccttgggcgaggaaataggtaggtctcagcggggggaccaggtcgccctgtcttgagccagtgtgtccctgggggycggttctttctgagcgcgcctctggatctctgacggggcaagctggggtctccgcaccaggtgttcctaatattagctggagattcttcaggtgctttcc

SEQ ID NO: 333399 - DNA, 201 bp, Homo sapiens
gtagggacagaagagagaagcaggcttggaaggcagatcatcttcctggatgcccttgcaagccactctatgaatattagacttcacttaattgaaatcargtaccacttatatagtacagacaaggccctgttcaaaatgctcttgttttttttgtttgtttgtttttttgcttttttgagatggagtctcccgctgttg

SEQ ID NO: 333400 - DNA, 201 bp, Homo sapiens
gagagctacagggagtacatgggctcgtagggacagaagagagaagcaggcttggaaggcagatcatcttcctggatgcccttgcaagccactctatgaawattagacttcacttaattgaaatcaggtaccacttatatagtacagacaaggccctgttcaaaatgctcttgttttttttgtttgtttgtttttttgctt

SEQ ID NO: 333401 - DNA, 201 bp, Homo sapiens
gagaaacagcatgttgtgcaggtggtgagagctacagggagtacatgggctcgtagggacagaagagagaagcaggcttggaaggcagatcatcttcctgsatgcccttgcaagccactctatgaatattagacttcacttaattgaaatcaggtaccacttatatagtacagacaaggccctgttcaaaatgctcttgtt

SEQ ID NO: 333402 - DNA, 201 bp, Homo sapiens
tccagtgttgtgggttggagaaggacagagagatatgtaggctgacaaggcagaaatgacaacggattcctaactcccctgagggctggtagagagaagarattggtaaagactgctccagggagaggagaccaagctgaaggcccagcatcatatggaagtgagaaacagcatgttgtgcaggtggtgagagctacaggg

SEQ ID NO: 333403 - DNA, 201 bp, Homo sapiens
gaatttcttctttctgttatcttgaatttcactgagtttcttcaaaacagctattttgaattttctgttcaaaggtcacatatctctgtctctgtgggatwggtcactgatgccctatttaatttgtttgatgaggtcattttcctggatggttttgaggcttgtggatgttttctggtgtctgggcattcaagtgttagg

SEQ ID NO: 333404 - DNA, 201 bp, Homo sapiens
aggctagacacaaaaatgaataggtcacaggctcaactatccataccggcacacttcagtggtaaacagacaattccagtgttgtgggttggagaaggacrgagagatatgtaggctgacaaggcagaaatgacaacggattcctaactcccctgagggctggtagagagaagagattggtaaagactgctccagggagag

SEQ ID NO: 333405 - DNA, 201 bp, Homo sapiens
aaaatcaagaatttgaattcttctctgccactgccagtttcttaaggccaacacctagtaactggtacagcatcacatgtgcaattctattggccagagtyactgcagggctcacttgattccaggggacaaaacatagacccccgcctcttgagggaagtgagggaggcatgtccaggaatgtgcagcatcgtgaatcca

SEQ ID NO: 333406 - DNA, 201 bp, Homo sapiens
agtgctcagcttgaagttccagcaagcttagttattattccacaaacataccttaggttattttccctttccaggactttgcttaagttcctgaagttagsagcatttcttattaatgtttttgtgtttcctttggtactaagtgctgtgtgcttcccacacagcaatacatattagttgcaatgctgtacagaggagagg

SEQ ID NO: 333407 - DNA, 201 bp, Homo sapiens
gtaggcactccagaccctccacagctggaagaggatagctttccaattatgttttccccaaatggtcttgcttcttcttccagcacccccaccaaaacacycatcatagccacagacacacaaggccctctgcaaaacgcacacacaaacacaagctcagatcatttacccagccaatatttattgaatatctgcctgtgc

SEQ ID NO: 333408 - DNA, 201 bp, Homo sapiens
tggttctggcctggaaatgccttctccagaaatggaacttgactttcttccccttgtatttgctgtctgacctattcctttttttctaaatatgaatggayagcttctattctcacagtgcattatcaaggaatgcacagccaggtgtacgtttacagaacgtgtctgtgtgagagacagtctcagcgcaccctccccttc

SEQ ID NO: 333409 - DNA, 201 bp, Homo sapiens
ctgcttgctagctctgtggtcctgggcaagttacttaattgctctgggactcagttccctcatctagaaaatggatatgacagtatttcctatctaattcratgctggaaagaccaaataaaataatccagaacaagtgctaaccacagacctgtatatatagtaagctaactgcgggtattaattcttctacgctcgctt

SEQ ID NO: 333410 - DNA, 201 bp, Homo sapiens
aacccacatagttatgaatggcttgcagaatacaaacaaactctggcagcaaattccttcaggcagcttagaatattgggggcatggtgtagcgaaattcktgttggccgctaagcatctacttgtgaattggctaaatgaagatcaaaagacttaccaaagatcacgatcttatgaaaaattgaaggcagagctaggaag

SEQ ID NO: 333411 - DNA, 201 bp, Homo sapiens
tagctatgggtctgtcatatatggcttttattgtgttgaattatgttccttttattcccactattttgaaggtttttatcatgaaatgatgttgaattttwtcaaatgctttttcagcatcggttgaaatgattatatgttttttgtccttcattttgttaatgtatcacattgattgatttgcatatgttgaaccatcgt

SEQ ID NO: 333412 - DNA, 201 bp, Homo sapiens
tcataaggttacaatgaaactgtctggattcaggctggataatgtgtttccaagatgactcacttgcatagctgagcacaagagaccttactgcatgaacstctctccatagcactgcttgggcatcctcacaacatggcagctggcttccagagaacgggggatctgagaaagagcaaggaggaaggcccaatgttttta

SEQ ID NO: 333413 - DNA, 201 bp, Homo sapiens
tttgaatcctgccatgaaatttcccaagttcactttctcagctcaagttcctgcggcttcttgactcgtcaaaccaaggtcatattagattatctggtgtkggggggcactggctctcagccccaagccctctaggccagagattttgagctcctcccaacaggtcaaagctttgtttttgttgtttcacttcccaccact

SEQ ID NO: 333414 - DNA, 201 bp, Homo sapiens
gcaagcaaacccacatagttatgaatggcttgcagaatacaaacaaactctggcagcaaattccttcaggcagcttagaatattgggggcatggtgtagckaaattcttgttggccgctaagcatctacttgtgaattggctaaatgaagatcaaaagacttaccaaagatcacgatcttatgaaaaattgaaggcagagc

SEQ ID NO: 333415 - DNA, 201 bp, Homo sapiens
tgattggggggcagacaggatgatatctaatatttaacaaatatacagtcgtgttatacaggttgagaataccttatctgaaatgcctggaaccagaagtrtttctgattttggattttttttttcagatttcagaatatttgcagatatttaaccgattgagcatctctaatccaaaaatccaaaatgcttcaatgagcc

SEQ ID NO: 333416 - DNA, 201 bp, Homo sapiens
ttggttgtgatgaatggttttttaatgtgtcgttgaattcaatttactagtattttattgaggattttttaaaatcaatattaatcaaagatattggcccrtagttttcttttttgatgtgtctttgtctggttttggtatcaggacggcttgtagaatgaggttggaagtattccctcctcctttatttttcagaatggt

SEQ ID NO: 333417 - DNA, 201 bp, Homo sapiens
gcactgtggcctagccaagatggcacacaacattagccatcactatttcttcctagttttcaagtaaaataccaattctaatcttttttgattgatggggscatggcagggttcaaatacgtttccctcctgcagagtggtgtaggttctgcaccagatgggcctgcattggctctcctcagaattccccttcctcgctgg

SEQ ID NO: 333418 - DNA, 201 bp, Homo sapiens
gtttcattggtaggtgttatgttaaaaattggaatgattggggggcagacaggatgatatctaatatttaacaaatatacagtcgtgttatacaggttgaraataccttatctgaaatgcctggaaccagaagtgtttctgattttggattttttttttcagatttcagaatatttgcagatatttaaccgattgagcatc

SEQ ID NO: 333419 - DNA, 201 bp, Homo sapiens
tttgcataatcactgaagttacacaatttgtatttcatagctgttacattcctatgtatttctttctgaccagaacagaggaaacactgccaaaaactaaytctgttgtttttattttacttcttgatacatgcgtgttttaccaacacattctaccttcagcttcctgatgaataaggcagggatttccttctgtgtcac

SEQ ID NO: 333420 - DNA, 201 bp, Homo sapiens
atacatcatttggttgtttacttgaagttgttctacttttttatgtagatgcttatagctataaactttcctcttggtactacttttgctttatctcatargttttggtatgttgtgttttcactatcatttgtttcaaggaacttttaaattttttttctaaattttttcactggaccactggtcattcaggaacatacc

SEQ ID NO: 333421 - DNA, 201 bp, Homo sapiens
gttccctagaggcctggccagaaagggcagagaacagggagaaagaatggaaatggaaaaaagtagtccaaataggcagagaacatccactgggaattcaracctttgcattgccaggtaataatgttagaattgcagtggaaaggaaaagaaagtcacacccaatccagtatgagtataatcttgccagtgctcttccca

SEQ ID NO: 333422 - DNA, 201 bp, Homo sapiens
tatctcataggttttggtatgttgtgttttcactatcatttgtttcaaggaacttttaaattttttttctaaattttttcactggaccactggtcattcargaacataccattttattttcatgtgtttatatagtttccaaaattcgtctttttaattccaaaattcctcttgttaattctagttttattccatggtagt

SEQ ID NO: 333423 - DNA, 201 bp, Homo sapiens
aggaacttttaaattttttttctaaattttttcactggaccactggtcattcaggaacataccattttattttcatgtgtttatatagtttccaaaattcrtctttttaattccaaaattcctcttgttaattctagttttattccatggtagtcagagaatacacttgatacaatttcagttttttcaaattttttaaga

SEQ ID NO: 333424 - DNA, 201 bp, Homo sapiens
gtgaggtgctagatacagtgcccagcacagcacaggcatttggccagtggcagcctgggataccttcgctgctcgtgcacccaccagccccctgactcctrccacgactgctgttaatgactcaggcctaaccctacaacagcctaaccatgattttgcctggagccacccagacacctctgccaggctgagcagcacagt

SEQ ID NO: 333425 - DNA, 201 bp, Homo sapiens
tgctgaaagtggggtgttaaagtctccagcctttattattttggggtctagctctctctttagctctagtaatatttgctttatggatctgagttctccaktgttgggtccaaaatatatttacaattgctatatcttcttgctaaattgacccctttatcattatataatgacctactttgtcttttttttataggtttt

SEQ ID NO: 333426 - DNA, 201 bp, Homo sapiens
cctgtagtctctttggaaatgttagtaaattggtagcccattctgcctaggcaaaatccgcctggcagttgtccaaaaactaagctatctctgacgaaggyggggcatgggaaagtatggattgtaaagcctaactgggaacatcatttactccagcaaacaaagatacggatgtcagaggatcacttgttctgctaaatg

SEQ ID NO: 333427 - DNA, 201 bp, Homo sapiens
cttgtggatgttttctggtgtctgggcattcaagtgttaggtattattgtagtcttcacagtctgggcttgtttgtatctaacctttttgagaaggctttmtaggtttttgaaaggagttgagtatggtattatgatctaagtttttggtcacttcagctgtatctgcattaaggggcaccccaagcccagtaacactgtg

SEQ ID NO: 333428 - DNA, 201 bp, Homo sapiens
cacatggcaccaatatggtgtattataatacatataatgcaacatataaattaaattactgtatgtaatagatattaaattatttagtataatatatgctwatatcatacaatacaatacactaatatacagtgaaatccatgtgtgttatgccaccttttccacttttacagaatttcaaaacttggactgaaaaatatt

SEQ ID NO: 333429 - DNA, 201 bp, Homo sapiens
tatcaccacagccatattctactagtccaagcagtcattgagcctgtccttatttaatagggggagacacagaatctgcctctctctgggtggagggtcasagaatctgtgtccacctttaacctgccatagagccacaaaaggaatgtagttttcttagtttagcacgtcctttcccaccagcgacattgtatgacttcc

SEQ ID NO: 333430 - DNA, 201 bp, Homo sapiens
agccttggttggtatgaccagatggaatcagaacttactgtgaaaggtgtgagccataggatgaagcagatggatttgcatgtaatatctgctgcttgctmgctctgtggtcctgggcaagttacttaattgctctgggactcagttccctcatctagaaaatggatatgacagtatttcctatctaattcgatgctggaa

SEQ ID NO: 333431 - DNA, 201 bp, Homo sapiens
ctggaatttgaatctatagtatcctttcgttcatgcttgttactcaagcatttaaatacttcccaagaatgaagtcacttctccaggggcaaggtatcatrtgctatatatgccaccttatgatagacttaataaatatttgctgaattatagcagcataaattataataagctcattaacacagtgaacccattagaaga

SEQ ID NO: 333432 - DNA, 201 bp, Homo sapiens
gttcctggtaagatgtttacagaacttgagagcaggcatttagaaacttttatagcaattgtacaatgccaagacattcagaaatggaaatattaaaataycacacagtgacaatttgggggaaaaattacccttcaccacagatagtttggggagtgtaaatttagaaaatgtagccttggttggtatgaccagatggaa

SEQ ID NO: 333433 - DNA, 201 bp, Homo sapiens
gattaaaaggtggagtgagaagccagggttgttacccttgggttgtccctcaacatggaaagaggagagatgccattatcctaggcagttaggagccaagwtggaatacatgagtgcttagctcagcctgcaggcacacagcagagctgggatttttacgtatctattgtttatgggagttatagtttatttgcattttct

SEQ ID NO: 333434 - DNA, 201 bp, Homo sapiens
tgctgtgttgcccaggctggagtgcagtggcacaatctcagctcactgcaacctcagcctcctggatttaagcaattctcctgcctcagcctcccgagtarctgagattacaggcatctgccaccacacccagctaatttttgtattttttggtagagacagggtttcagcgtgttgaccaggctggtctcaaactcctga

SEQ ID NO: 333435 - DNA, 201 bp, Homo sapiens
gagaaagacagccttatcagagctcagtttccaaggctggaaaaggaaggcttacattaaatcctttcccacatgtcttctggtgtgagattccacaaaaytgataattgtaagttgtggcatacttaaaagctaattcctgtgcagcctcaggagatggtagtaattcaaagaataataatagtaactaatttgcactta

SEQ ID NO: 333436 - DNA, 201 bp, Homo sapiens
ctcagcccaagtcttctattaaaatcaacacctcatggctggcttttccagtcacttctatggataatgtatcccatcataaaaagcaagatgttaggtcmttagcaacttggcattttctttgaataaggtcttaaaattccatcctcaaaaataaaacttaagtaatgtcgatactactctaccacagcctttacaaag

SEQ ID NO: 333437 - DNA, 201 bp, Homo sapiens
tcccccctagatctcaccctgtgtgcatcctttacaataaaactatagccataaatctagtactttcctgacttctgttagtcatgttagcaaattatcgracctgaagggtgtcctagagtctggggattggtagttgaacagttaaaagtgtgagtggctttgagtaacttgtgagtaacttgcccagaaccacagagc

SEQ ID NO: 333438 - DNA, 201 bp, Homo sapiens
aagcagatggatttgcatgtaatatctgctgcttgctagctctgtggtcctgggcaagttacttaattgctctgggactcagttccctcatctagaaaatkgatatgacagtatttcctatctaattcgatgctggaaagaccaaataaaataatccagaacaagtgctaaccacagacctgtatatatagtaagctaact

SEQ ID NO: 333439 - DNA, 201 bp, Homo sapiens
atcgtgaaggctggcaagtctgaaataggtagtgcagcccagcagatgggaaactcaggcagagtttctgtgttgctgtcttgaggcagaattgtttcttktttaggaaacttcagtctttgttcttaaagcattcacctggcttgaggaagcgcacctgcattttgagagtcgtctgcttttctcaaagtctagtgattt

SEQ ID NO: 333440 - DNA, 201 bp, Homo sapiens
tgcagctccagaggctgcagtggaggcttttggattattaaaagttgagacctaatcacaaattgaggcagtgcagcaaatccactccttcctattattcytgtgcattaggagccacttaagctccacctaatgaagagtcttcattctttgcattgtaatactcctttaaagatgctcagagagcctcacaaatcctgc

SEQ ID NO: 333441 - DNA, 201 bp, Homo sapiens
tctggccccacattcctcttgctcccttgccagtgccacatggcttggggcttcatttatgaaagatactctggtccagtcattctcaaagcttttaaagygacagtgccatttcactagtggaatatttcctgtgatcttaatatatacccattatatacccctgatgtctgtttaaagggagtttgatgagctgaactt

SEQ ID NO: 333442 - DNA, 201 bp, Homo sapiens
caccctcggggcgtaccacccactactctatgagaagctcctggtgcagcgcctgaacatgggcacgcagggggatttgcatcgcaagggcaaggtggttsttcccggcttccaggcggtgcactgccctgcaccaagtccagtcattccacactcttaaaaagggtttcttgggaatcaatgtgcaataaggtactactg

SEQ ID NO: 333443 - DNA, 201 bp, Homo sapiens
cgcagggggatttgcatcgcaagggcaaggtggttcttcccggcttccaggcggtgcactgccctgcaccaagtccagtcattccacactcttaaaaaggrtttcttgggaatcaatgtgcaataaggtactactgttgtactcaaagtcacaaaagaatacttgaagatagattttagacagtgtagttttgagtcttta

SEQ ID NO: 333444 - DNA, 201 bp, Homo sapiens
ttaacttctctttgcccttgaacaaaataagaagttagctgcattaaccttaagctgcagtgtaatgttcctctgtggcagcgtttacatttcatagtttyatctgacaactcgtaataaattgtgccttttggaaaatgtcatttctctcagaagaatttgaaggagaatttaaacactcttttgtgctactttaactat

SEQ ID NO: 333445 - DNA, 201 bp, Homo sapiens
ttcttttaatttttatcactgacatttcaagagcagattcaggtttccggcatttggcgggggtgcctcctaagtgtgttagactgtaaaactgctgaagscagcaaaagttttgtgcagtcaatcaaagcagggagggtataactatgttactgttttcacttttctctttttctagttccatgcaacacaaaataaact

SEQ ID NO: 333446 - DNA, 201 bp, Homo sapiens
gcttgaattagctagggagttgcatcgttcaggatctggattcaataccactagacatgagtacattgctggtgaaaatgtcagaacttgtgctttttttwaaaaaaaagtaatttcctcaaacattctttaagtgcttctgcatgcaacgcctgcctctctccctcccccagaagaaaatacaacgtctgagccacctgt

SEQ ID NO: 333447 - DNA, 201 bp, Homo sapiens
ccttcagggtcttctaactgtcacgtgatgctataccagagtcaggttggaatttggcatcttatcgccacaaagagtttggtcagcttatgatgtctatkttaatattaatcctggtcagttgtgtccacatatcaaagggagagggaatatatggaggcctgtctgacctcccttccagtcatgactggaaattcagtt

SEQ ID NO: 333448 - DNA, 201 bp, Homo sapiens
gatggtgtttttcttcccctttgctgtgctattttcctgtgtcatcctagttagttttatgttcatagtctgatgatttagccacaattagggtctcactsttctactcttcttttaatttttatcactgacatttcaagagcagattcaggtttccggcatttggcgggggtgcctcctaagtgtgttagactgtaaaac

SEQ ID NO: 333449 - DNA, 201 bp, Homo sapiens
tctgggatattatccaggagaacactaaagagaagattcaaccaaacccaccatcttctggtttcattggtaggtgttatgttaaaaattggaatgattgrggggcagacaggatgatatctaatatttaacaaatatacagtcgtgttatacaggttgagaataccttatctgaaatgcctggaaccagaagtgtttctg

SEQ ID NO: 333450 - DNA, 201 bp, Homo sapiens
gttgaaagagttaagctttgtctcaaggcttgaagtcaatagaaataaatgcttgagttaagaggggttgtggaagccaagattcttgttatagagatgaygcctcataggtagtgtccttcagagaggatagatggtacatgtctcttttgggaacttaaaggtgttacactcacatttaatctctcctaggtccaggaa

SEQ ID NO: 333451 - DNA, 201 bp, Homo sapiens
agaggagttcaagattgcagtgagctatgattgttccagtgcatttcagcctggggacagaacgagacctcatctatttacaaaaaaagaaatctactaamtgagtttaattttatttggcatttaacttgtagcctctgaattgtgaatttggaaaaaatttaatattgcaagtggacattgatataggactcttagccc

SEQ ID NO: 333452 - DNA, 201 bp, Homo sapiens
cctctaactcctgggggcatagacagcctcatgacatcaggaagattgtctagtccttagttagcatccacttgcacatatgttgtactgtcgcagcattrgcagccagcctggtctcctgctttgtgaagcattacaacgtgtgctgccatctgctgcctgcccccactcccatgcctgcacaccttcttctttagttgt

SEQ ID NO: 333453 - DNA, 201 bp, Homo sapiens
catgctatttacgggatggggaagactaaggaaggaaagaagaataacaaatatttgtttggacattaagtttgagattctcagaacacatttaagtggcratatcacatagtttattgattatgtggatctgcagtccaggggagaaaccaagggtatagatatcaacatcagtatatagagaacacagcacaattataa

SEQ ID NO: 333454 - DNA, 201 bp, Homo sapiens
ggagggtataactatgttactgttttcacttttctctttttctagttccatgcaacacaaaataaactttcagacatacttctaagtttccatatccattktatatggttgagttttagccaaaaccatttgtgagggaaggcctttagtgatctgggatggggatgctgaagcccattgcaccttattcatgtaattaga

SEQ ID NO: 333455 - DNA, 201 bp, Homo sapiens
tgcagtcaatcaaagcagggagggtataactatgttactgttttcacttttctctttttctagttccatgcaacacaaaataaactttcagacatacttcyaagtttccatatccattgtatatggttgagttttagccaaaaccatttgtgagggaaggcctttagtgatctgggatggggatgctgaagcccattgcac

SEQ ID NO: 333456 - DNA, 201 bp, Homo sapiens
tcaaagtaataagcctacgctgttcagaaatgaattctaggtatagatttttgtcaaattcatctgacactttaaataaatttcagactgatgaattcagkgtttgtttgatagagatcataaacattttcctttctcgaaaagcaatctagggagtatgtatttgtactgtagttaatgctgtgttaagtcagtgtaata

SEQ ID NO: 333457 - DNA, 201 bp, Homo sapiens
aaaaatagaaacatattttatcaaattaattagatttaaaatagctcaatgacttgttttctccagcatttagtcattttcttggctgatttgccctgtcyctgtctagaaatgttttttctatgccctgcctcaggttggtgcctgggtcataaagtaaagcctaataaaagtaaaatcctctcagcccatgcttcttac

SEQ ID NO: 333458 - DNA, 201 bp, Homo sapiens
ttattttagtgtatacccttccaaatcttgagcacatccagattttaacgttgttgtaatgaacaaggctccctcactgtgaagcagcacagcacagtgcrtggtgttccctgattgaaaaaacaaatgaatgaatgggaggctgtgattgatgtcatcttatagactctcacctttgatttaactggtctcatatgtaga

SEQ ID NO: 333459 - DNA, 201 bp, Homo sapiens
ggaggacccggatttctcagtgttttgcaggtgtatttccttggttgcacagtgccccatagtggctactgcctacacgttctacaggtgccacttcatcrtggtctgctctggaaccagcctcagaaacattgtgcgttagacgggggggtcacctgtgctcccccaaaatattttgaaccccgttggaatgattctaca

SEQ ID NO: 333460 - DNA, 201 bp, Homo sapiens
gcttgtcacttatgtgcccttagattctcatgatgcggttttgagatttaactctgctcctacacgtggttatgagaaagatgttgggaataaaaccaccrtacgcatcattaattcgcaggtaagacagatggagtgttttcatggatgtatgtttcttaggtttaactggatgagtgaagagaaatgagtttaaccgga

SEQ ID NO: 333461 - DNA, 201 bp, Homo sapiens
gtattgaaagatttgctttaacattttttcctagattatgtgattctacagagaacaaaagtaagcttgtcacttatgtgcccttagattctcatgatgcrgttttgagatttaactctgctcctacacgtggttatgagaaagatgttgggaataaaaccaccatacgcatcattaattcgcaggtaagacagatggagt

SEQ ID NO: 333462 - DNA, 201 bp, Homo sapiens
cattaatatagtactgactgggcgttcttctataaaagtttaagttctttggcttctaagaaaatgttgggcagttacagttaacttgatgactacttctrgtattagccaaatgggtcctaagtggcagcattttgccagacattgactaaatccttacatgccacatttactgaattccaataaacatatagttcttct

SEQ ID NO: 333463 - DNA, 201 bp, Homo sapiens
tacaggcatgcaccaccacgcccagctaattttttttttttttttttttttttgtatttttagtagagacggggtttctccatggtggtcaggctggtctygaactcccaacctcagatgatccgcccacctgttcctcccaaagtgttgggattacaggcctgagccaccatgcccagccagtgtttcaactctttataa

SEQ ID NO: 333464 - DNA, 201 bp, Homo sapiens
tcggggcgtaccacccactactctatgagaagctcctggtgcagcgcctgaacatgggcacgcagggggatttgcatcgcaagggcaaggtggttcttccyggcttccaggcggtgcactgccctgcaccaagtccagtcattccacactcttaaaaagggtttcttgggaatcaatgtgcaataaggtactactgttgta

SEQ ID NO: 333465 - DNA, 201 bp, Homo sapiens
atatcccatcaccaccacccctcccccaaaaaactcatccctctcacatggagttgttcattaggttctaatttttggttttcatgtcaggaatcctcatmatgatgtccatgtgcagagaggtgcacgtgtatgaatatatcccatccgtgcggcagacggagctgtgccactaccacgagctgtactacgacgcagcct

SEQ ID NO: 333466 - DNA, 201 bp, Homo sapiens
aggcctggcgcggtggctcatgcctgtaatcccagcactttgagaggccgaggtggggggagcaggaggtcaggagattgagaccatcctggctaacacartgaaaccctgtctctactaaaaatacaaaatattagccgggcgtggtggtgggcgcctgtagtcccggctacttgggaggctgaggcaggagaatggcgt

SEQ ID NO: 333467 - DNA, 201 bp, Homo sapiens
agagatgggatttcaccatgtcggcaagtgactggaaataaaagaatttaattctccatgggcagatgtcattcaccatgtgaattccttgtatatgattktatacaggggagaaaaaatgtttgagagcagtcattactaatcaggaggcagacttttgaccactgcactcatgtttctccatgggtgcagacatttcga

SEQ ID NO: 333468 - DNA, 201 bp, Homo sapiens
aacttcagccaccagagaacattcacaccagagcacttcttgtttgtttaaggtttttttgtgggttgttttgttttgttttgagacagagtcttgctctrttgcccaggctggagtccagtggtgcaatcttggctcactgcatcctccaactcccaggctcaagtgattctcctgcctcagtctctcaagtagctaaga

SEQ ID NO: 333469 - DNA, 201 bp, Homo sapiens
gacagctttgcatggccatttcaacatatgtcaaagaaatatattttggggtaaaatattttgatttccttcagggtcttctaactgtcacgtgatgctayaccagagtcaggttggaatttggcatcttatcgccacaaagagtttggtcagcttatgatgtctattttaatattaatcctggtcagttgtgtccacata

SEQ ID NO: 333470 - DNA, 201 bp, Homo sapiens
tgtggcgaaaccctgtctctactaaaaatacaaaaattagctaggcttggtggcgtgtgactgtagtcccatttgcttaggaggctgaggcagcagaatcrcttgaacctggggaggcggaggttgcagtgagctgagatcataccattgcactccagcttgagcagcagagggagactccatctcaaaagaagaagaaga

SEQ ID NO: 333471 - DNA, 201 bp, Homo sapiens
ttacgagatgacataattaggcttgatgatacaatgcacgtagtgattgctacccctaggagaatcctggatgttactaagaaaagagtagcccgggcgtrgtggctcacacctgtaatcctagcactttgggaggctcaggtgggcagatcacgaggtcaagagatccagaccatcttggcccatgtggcgaaaccctgt

SEQ ID NO: 333472 - DNA, 201 bp, Homo sapiens; identical to SEQ ID NO: 70058

SEQ ID NO: 333473 - DNA, 201 bp, Homo sapiens
aaaccctgtatgactttggttccatatacttgtggcaggataaattaaaattactaaaatcattttatctttttatttagaaaacattttattaagaaatkttgttcacgtgttaaataaaatttcagatttagtttaaaagagcgagatacccaggattttgaaaatgcttcactgatgcgaactgtaaaataagacctc

SEQ ID NO: 333474 - DNA, 201 bp, Homo sapiens
atgactttggttccatatacttgtggcaggataaattaaaattactaaaatcattttatctttttatttagaaaacattttattaagaaatgttgttcacktgttaaataaaatttcagatttagtttaaaagagcgagatacccaggattttgaaaatgcttcactgatgcgaactgtaaaataagacctcagctagagt

SEQ ID NO: 333475 - DNA, 201 bp, Homo sapiens; identical to SEQ ID NO: 70059

SEQ ID NO: 333476 - DNA, 201 bp, Homo sapiens; identical to SEQ ID NO: 70060

SEQ ID NO: 333477 - DNA, 201 bp, Homo sapiens; identical to SEQ ID NO: 70061

SEQ ID NO: 333478 - DNA, 201 bp, Homo sapiens
ggggacagccagtctgaccagggaataagctacctttgagtaaagggcttagctgataactcttcactcccctctcacctatgctcatagcagagaaagcycctggtccttcccattactgcccctgacttcagggagcattatcagcaatccctaccctcttagttcttttgtatcatatgttttttagagacagggtct

SEQ ID NO: 333479 - DNA, 201 bp, Homo sapiens
gataaaaaatgagagttggagtcgtatttcaagtgggaccagaatttatacaatctgggctacaggccagttctcccttggctcgcttgatgaagtagaamtaggaactacaactatgaactggctctatgccacagctcacaattttccatcttcggtcacgatggagcccttgtagcccttgacagcagaactgttaca

SEQ ID NO: 333480 - DNA, 201 bp, Homo sapiens
aatcggaggctcatacagctgacgggatctccatccgattccctcgctgcacccgaatccgagatgataaggactggaaatctgccactaaccttccccarctcaaggtagcagctcttaggctgtatatgtattctccaccccactgtccaggccttggagccttgggcatctagaccattcacatgtcctctgtcttct

SEQ ID NO: 333481 - DNA, 201 bp, Homo sapiens
gtggcatgatctcagctcactgcaacctctgcctcctgggttcaagcgattctcatacctcagccttctgagtagctgggactacaggcgtgcaccaccgkgcctggctaatttttgttattttttgtagagacggggttgcgtcatgttggccaggctggtctcaaactcctgacctcaagtaatctgcccacctcagcc

SEQ ID NO: 333482 - DNA, 201 bp, Homo sapiens
ttcgtacagctatatgtctttggctttcaagatcttctttccacaaaccctccgtgcactcagccgaaaagaactgtgcctattccgaaaacatcactggygtgatgtaagacaattcagccagtggtcagaaacagatctgcttcatggacatcccctcttcctgagaagaaagcctgttctatcattccagggaagcca

SEQ ID NO: 333483 - DNA, 201 bp, Homo sapiens
actttggaaagtgtttgattagtcatcatggactatataagacgctggcctttggaaaattggaagcctatctccttgtttatatctttttttttttttttggcctcctactctttcgtacagctatatgtctttggctttcaagatcttctttccacaaaccctccgtgcactcagccgaaaagaactgtgcctattccg

SEQ ID NO: 333484 - DNA, 201 bp, Homo sapiens
tttgattgtatctactttaatgatgtcagcttgatggacaggtgagttggctagcatctttaaacccagaaactgccaggaatctgttttcatttcctggrtgaggaagatgggggcttcaggttggaaaggagggtacagggaaccagctggcacatacgtttgtgctcaggagcttgccaaaggcaatggcaagaggga

SEQ ID NO: 333485 - DNA, 201 bp, Homo sapiens
aggggagcaggattaggccttataatctctgaatgccttcttgtggaaaatggcttgcatgcctctaggtcatacccactctgggctgggaggatcacatrgctcaaacatcagctgtttaagtggcttcttataatctcattaccaagagaagggatttaagccttgttccaggttgggaacagcccaaagtagcatctt

SEQ ID NO: 333486 - DNA, 201 bp, Homo sapiens
gccttgccttcctgctggagcattgggaacaaagcagtcaggccatttgtttcatatgttcaagaggaaggctaagcagtggcctcattgtggagctttartgcaggttcacgtgttctgtgaagcactgcaaatcactcaggagctgtttctggtgaggttggtgttaaatagacaccatctgtgacccaggaagaagtc

SEQ ID NO: 333487 - DNA, 201 bp, Homo sapiens
ttcggtcacgatggagcccttgtagcccttgacagcagaactgttacacatgaggtctttgatccatggcaaaccctttcttgaagtagcagttttatcaytgtggcccttccttcctcagaattcctaataagggagggaggatcccggcctaacctcagctctcctgttctcctcagacctctgtgtgagcggcggaag

SEQ ID NO: 333488 - DNA, 201 bp, Homo sapiens
atatctggaaaccctgtttgttgtagggacccacgatcactcaccctgccagcctcactgtcacctgcactctttaaccttagcttcacatacctcttttmctgggagaactgatgtgttttataataagccagaggtcttgcaaggcctgaattattgagaaaagaattaaatcttgtttcactgggcttttacttgttg

SEQ ID NO: 333489 - DNA, 201 bp, Homo sapiens
tcagtcttgggtttggcaacatctcctgagcaattctttttttttttgagataagtctcgctctgttgcctaggctggagtgaagtggtgcaatcacagcrcactgcaacctccgctcactgcaacctccgcctcccaggttcaagcgattctccggcttcagcctcccgagtagctgggagtataggcatgtgccaccat

SEQ ID NO: 333490 - DNA, 201 bp, Homo sapiens
gaccctgatctgtcacttgacctgtctctgcctccattttttcccatataaaatggagataacagtacctttctcacagagttcttacagttgaagtgtgrcatacgttcagtgagtatagtatgagtctcttgcctactccagccccctcctcgctaaggcggcatccacataggcacagtatctcaaaagagctgaatt

SEQ ID NO: 333491 - DNA, 201 bp, Homo sapiens
ctatctggaaattcttaataattttgaacaaggggcctcgcatttgcattttgcactgtactccacaaattatgtagccagtttttctcagagcactttgscatctgtcttcctctccccttattctgctcctaggaggccagaagaacccatcctatttgactagttagaaaatttactgtcctacatatttaattaggt

SEQ ID NO: 333492 - DNA, 201 bp, Homo sapiens; identical to SEQ ID NO: 70069

SEQ ID NO: 333493 - DNA, 201 bp, Homo sapiens; identical to SEQ ID NO: 70070

SEQ ID NO: 333494 - DNA, 201 bp, Homo sapiens
tggcactatcctgttagtgggaaatggtattaaagagtaaaacccggatactatgtgaacacattgtcatggggtatctgtttcttcttttttttttttttgagacagagtctcactctgtgacccaggctggagtgcagtggcactgtcttagctcactgcaacctctgccttccaggttcaagcaattgtcctgtctca

SEQ ID NO: 333495 - DNA, 201 bp, Homo sapiens
atacccactctgggctgggaggatcacatggctcaaacatcagctgtttaagtggcttcttataatctcattaccaagagaagggatttaagccttgttcyaggttgggaacagcccaaagtagcatcttttctcctctaggaccccagcaaaatacccagctggttgaaggtcaacaagatctactatcctgacttcatc

SEQ ID NO: 333496 - DNA, 201 bp, Homo sapiens
tacaccaaagaagaaagctgttgtccaggctaagttgacaaccactggccaggtgacttctccagtgaaaggcgcctcatttgtcaccagtaccaatcccyggaaattttctggcttttcaggtaagataggttagggctactttagctgttatagtgctgcttttattttgtattctacctaggattctggctaaagagt

SEQ ID NO: 333497 - DNA, 201 bp, Homo sapiens
tcttgtggaaaatggcttgcatgcctctaggtcatacccactctgggctgggaggatcacatggctcaaacatcagctgtttaagtggcttcttataatckcattaccaagagaagggatttaagccttgttccaggttgggaacagcccaaagtagcatcttttctcctctaggaccccagcaaaatacccagctggttg

SEQ ID NO: 333498 - DNA, 201 bp, Homo sapiens
tttattccatcctctatggagacaaaaagctgctcctcctttgagtactgacctacatagatttccatttctctcttcagcctcaggccaaacaaacaacyggacagggcagcagaacaaggctgtctcctcaggatcctgccaaaggcactgtcctctccaacctggacccagccccacttgcccttattggttgcttac

SEQ ID NO: 333499 - DNA, 201 bp, Homo sapiens
ctggttggccatggcctctggactggccgccatcactgagacagaggctgtgctttggggactacaggtatttctgtctccccagaaagaagggttgcagyttgctcaggggagcaggattaggccttataatctctgaatgccttcttgtggaaaatggcttgcatgcctctaggtcatacccactctgggctgggagga

SEQ ID NO: 333500 - DNA, 201 bp, Homo sapiens
tcggttagggagaagtcagaatagagtaccctatgctagcctagcagaaggacgcttaccaccaattatttcgtcagggcctgacagctttctcctcaggsaaaatctctttcctgactggaaaggaagctggagtctgaggaactaatacttttaagcaatctatcatgtgtccaacacagttcaatgccccagagccca

SEQ ID NO: 333501 - DNA, 201 bp, Homo sapiens; identical to SEQ ID NO: 70080

SEQ ID NO: 333502 - DNA, 201 bp, Homo sapiens
cctaaaatacaccacacacaccacctctgaggccagactgggaaggcaatgaaaccctctgacattgtccctccccgcctcaggaactgtaccagttgtcyaaggagaaggcagacttcactgtagtggctggagatgaggggagctccactacagggggtagcagtgaagagaataagggtccctcagggtctgctgtgt

SEQ ID NO: 333503 - DNA, 201 bp, Homo sapiens
caggtgcaaaacatgtgtaagtagcagctccgctgacagcctgagctgtcatttgttagctttgtttgttcccaactggtgtcaggacttttgagtcccartcaggatttgaatcccccttccaccttcttactttctgtgagaccctgatctgtcacttgacctgtctctgcctccattttttcccatataaaatggaga

SEQ ID NO: 333504 - DNA, 201 bp, Homo sapiens
tatagcatgaaccactgtcaggctcttttgtcagtcctatcaacctctaacatcctcgcaccagacaggacaggtgtctgtattgaaactttattacaaarttataaagcagagctctgtaacaaaataatacacatttgggtttgctttaacctccaagtaagtctgagaaaatcttaataaaagccacttgaagtaaca

SEQ ID NO: 333505 - DNA, 201 bp, Homo sapiens
ctcaggtgcaaaacatgtgtaagtagcagctccgctgacagcctgagctgtcatttgttagctttgtttgttcccaactggtgtcaggacttttgagtccyagtcaggatttgaatcccccttccaccttcttactttctgtgagaccctgatctgtcacttgacctgtctctgcctccattttttcccatataaaatgga

SEQ ID NO: 333506 - DNA, 201 bp, Homo sapiens
gctcagcaggaggtgtggcatgagcatcctgaataggcctttcctccggagagctcaaggccatggctgccttcctgggcatgtgagctgtatagttgccygggatcccatgcttggtttaatgctgtactgtagtgctatctggaaattcttaataattttgaacaaggggcctcgcatttgcattttgcactgtactcc

SEQ ID NO: 333507 - DNA, 201 bp, Homo sapiens
ggatcacatggctcaaacatcagctgtttaagtggcttcttataatctcattaccaagagaagggatttaagccttgttccaggttgggaacagcccaaartagcatcttttctcctctaggaccccagcaaaatacccagctggttgaaggtcaacaagatctactatcctgacttcatcgtcccagacccaaaggtatc

SEQ ID NO: 333508 - DNA, 201 bp, Homo sapiens
tttccagtggacacttaactagtgtgtgaaaaggaacaacccccactcactcaccaccttctccactctcacaccaacttcagcatctctcttgtccctcygaaagctttggacttggctgacatgataacccgggtgatccaggagggattggaggggctggtgctgaaggatgtgaaggtaaagtggcctcgcttggct

SEQ ID NO: 333509 - DNA, 201 bp, Homo sapiens
ccagcaggcaggagatagaacagcccggcctagccaggagagactgcagggactcactcagctgctggccccaagtcaaaatttacattaaagggaaaagmccagtctgggtgtgggaatgcagcattgagtttgtggtcagggtggaagcaggtccagcaagcagcgagtcggggagagggcactggcttggtgactctc

SEQ ID NO: 333510 - DNA, 201 bp, Homo sapiens
ccacatccttgattggggaaggagaaggaagtagagagggaaggaattggtgggggtaggatttggggtttgggtcccaaggcctgtctcagcctgcctaycccggggttggccttgggatcggggcaaagcagggtgcaggggataaaaaatgagagttggagtcgtatttcaagtgggaccagaatttatacaatctgg

SEQ ID NO: 333511 - DNA, 201 bp, Homo sapiens
tggcacccctaggggctccagtggcacccctgggggcataaggcagatggttttcagctcagaggttttgatttcagaagagactgacaacaggaagctcyggattataggggaggccatgggtgggaccatcttggagagaattagcagtcttgacttagctgcatccatatgcttgtgcctgagaaaccagtatcagcc

SEQ ID NO: 333512 - DNA, 201 bp, Homo sapiens
ctgtgccagcaggcaggagatagaacagcccggcctagccaggagagactgcagggactcactcagctgctggccccaagtcaaaatttacattaaagggraaagcccagtctgggtgtgggaatgcagcattgagtttgtggtcagggtggaagcaggtccagcaagcagcgagtcggggagagggcactggcttggtga

SEQ ID NO: 333513 - DNA, 201 bp, Homo sapiens
ttgtctaacacgtacttgatttcttacccctttctcatgccagcttttctgggatcagctttacaattgctctgagatccttctgaccactttttttttttgaggcaggatcttactatgttgcccaggctggtctcgaactcctgggctcaagcagtcctcccgcgttggcctcgcatagtgttagggttacaggcgtga

SEQ ID NO: 333514 - DNA, 201 bp, Homo sapiens
atgcagactgcaaagccttccgctatgaaggtgggggagaagctggccacaaagtcttctccagtgaaagtaggggagaagcggaaagctgctgatgagaygctgtgccaaacaaaggtgagggtaaaaacagcaacacaccacgtgggccagtttagcccaggttgtgttcccaaccttctgtacaagaagtttgaaaga

SEQ ID NO: 333515 - DNA, 201 bp, Homo sapiens
cactctgtcatccaggctggagtgcagtggcacgaccatagctcactgcagcctcgaactcctgagttgaattgatcctcccgagtagctgggactatagrtgtgcaccaccacacccagcttcctctctgtcctgcaggcaacatgcagactgcaaagccttccgctatgaaggtgggggagaagctggccacaaagtct

SEQ ID NO: 333516 - DNA, 201 bp, Homo sapiens
ccacgctccccaccgccatccaggagtaagcatagaagtctcacagcacaaggcctgaactcggtccccaacagacctgtagaaacctttcccctctctcytcccagcctgaagtccttgaacccattgagagtagtaagcaggactcctgacccctcagtctagcaggttgtacagagtagactgcttggtctcagggga

SEQ ID NO: 333517 - DNA, 201 bp, Homo sapiens
agttcatctgtaggctaaaggtgaggcagacacaatccaccagcctctgaactccatgctgtctcctactatagcgatatgcacagggtactataggagcrtgggcagcgatatatagatatcttttggtctctgcttctttgagtttgtttgtttgtttatttattgagacaaaaaatgtggctgtgttgcccaggctgg

SEQ ID NO: 333518 - DNA, 201 bp, Homo sapiens
tgttctcatgaggactgtaagagataacattgcaaaaacggtgcctggctctataggatttttattatttaaaaattctgggccgggcgcggtggctcacrcttgtaatcccagcactttgggaggccgaggcgggcggatcacgaggtcaggagatcgagaccatcctggctaacacagtgaaaccctgtctctactaaa

SEQ ID NO: 333519 - DNA, 201 bp, Homo sapiens
tgttctcttcactaaaatacacacatgcacacacgtgtatacacacatatatagtttcttttatataaaatatagaattactatttcatagacagggattyaggaagactttgctggggcatgtggtatagataggagttgagaagatcaggatcatttattggccttacgtaaacagacagcattggactaggggctttt

SEQ ID NO: 333520 - DNA, 201 bp, Homo sapiens
tttttagagacagggtctcactctgtcatccaggctggagtgcagtggcacgaccatagctcactgcagcctcgaactcctgagttgaattgatcctcccragtagctgggactataggtgtgcaccaccacacccagcttcctctctgtcctgcaggcaacatgcagactgcaaagccttccgctatgaaggtgggggag

SEQ ID NO: 333521 - DNA, 201 bp, Homo sapiens
ctgcgctcggccagcattccacttgtatagcatttctttgtatactttaacctctatcgcagcggaaagatttgttttgtcaagactttttccccttgaartagttacctgggccagacagagattattagaacctgtcttttacttccttgtgttttgataatgaaagaattttgagaaattgtttccctgaatatgcct

SEQ ID NO: 333522 - DNA, 201 bp, Homo sapiens
gagaaagcccctggtccttcccattactgcccctgacttcagggagcattatcagcaatccctaccctcttagttcttttgtatcatatgttttttagagwcagggtctcactctgtcatccaggctggagtgcagtggcacgaccatagctcactgcagcctcgaactcctgagttgaattgatcctcccgagtagctgg

SEQ ID NO: 333523 - DNA, 201 bp, Homo sapiens
agtgaagagaataagggtccctcagggtctgctgtgtcccgcaaggcccccagcaagccctcagccagtaccaagaaagcagaagggaagctgagtaactycaacagcaaagatggtaaggatagggagggggctggtatggtgaagagggcggtgtgaggggcagagatccaagggcagggacccagtctcacattccag

SEQ ID NO: 333524 - DNA, 201 bp, Homo sapiens
aaaagggataaggagttcaactgctttctttctcttttttttaactttgctcttttagagatggggtctcactctgttgcctaggccagtgtttaatgttkcattcgtagctcactgcagctttgcactgctggactcaggtcatcctgactcagcctcccaagtagttgggattacaggcgcatgccaccatgcccagcc

SEQ ID NO: 333525 - DNA, 201 bp, Homo sapiens
ctgccgtgtgggagatcacaggggctgaattctccaaatcggaggctcatacagctgacgggatctccatccgattccctcgctgcacccgaatccgagaygataaggactggaaatctgccactaaccttccccaactcaaggtagcagctcttaggctgtatatgtattctccaccccactgtccaggccttggagcct

SEQ ID NO: 333526 - DNA, 201 bp, Homo sapiens
ggggagcaggattaggccttataatctctgaatgccttcttgtggaaaatggcttgcatgcctctaggtcatacccactctgggctgggaggatcacatgkctcaaacatcagctgtttaagtggcttcttataatctcattaccaagagaagggatttaagccttgttccaggttgggaacagcccaaagtagcatcttt

SEQ ID NO: 333527 - DNA, 201 bp, Homo sapiens
cactcgcagccctctcccctgagcctttccagccctgaccaggagatggcggtggcagcctgcagtggttggggtggctgctggggaagtgtgggcagatrtgtcctggatctggaggactgctttgtgtgtctcctatagtgcctggagcctgagggctcttaccctgagggaggggcactgggctagatctggtgtgta

SEQ ID NO: 333528 - DNA, 201 bp, Homo sapiens
ggctgatttttgtatttttagtagagatgggctttcaccatgttggtcagactggtctcaaactcctgaccttgtgatccgcccatctcggcctcccaaartgctgggattacaggcgtgagccaccacacccagccagttcccacttttctaaagaagtgcaactgccggctttcgtacctagttccatttcttgtgtac

SEQ ID NO: 333529 - DNA, 201 bp, Homo sapiens
cccatccttgcctgttcctttgtacttccaggctcattttaaagttgtatttaaaggactgccctcggaaatgcttctgtttagcggaacttgtattcagsctgacacgctttgccaggaacaaacctcatgtgaaagaaaacaaaatgaatttttttactttcttctctgtgttctcctattacatggtgaggatcccca

SEQ ID NO: 333530 - DNA, 201 bp, Homo sapiens
gtttccagtggacacttaactagtgtgtgaaaaggaacaacccccactcactcaccaccttctccactctcacaccaacttcagcatctctcttgtccctyagaaagctttggacttggctgacatgataacccgggtgatccaggagggattggaggggctggtgctgaaggatgtgaaggtaaagtggcctcgcttggc

SEQ ID NO: 333531 - DNA, 201 bp, Homo sapiens; identical to SEQ ID NO: 70075

SEQ ID NO: 333532 - DNA, 201 bp, Homo sapiens
catcctcatggagttgcctttctattctgtggtctctcttttgcttcccttcagggtacatatgagcctgggaagcggcactggctgaaagtgaagaaagwctatttgaacgagggggccatggccgacacagctgacctggtggtccttggagccttctatgggcaagggagcaaaggtcagggtggcctctgccccctg

SEQ ID NO: 333533 - DNA, 201 bp, Homo sapiens
gatttcaccatgttggtcaggctggtcccaaagtcctgacctcaagtgatccgcctgccttggtctcccaaagtgctgggattacaggcctgagccaccayacccggcctcttttgagcactttctgatgccaagaactaggtttagtactggctcaactctgggggagctgatgcctcaaaggacagatagagaagtaaa

SEQ ID NO: 333534 - DNA, 201 bp, Homo sapiens
gagaaggcagacttcactgtagtggctggagatgaggggagctccactacagggggtagcagtgaagagaataagggtccctcagggtctgctgtgtcccrcaaggcccccagcaagccctcagccagtaccaagaaagcagaagggaagctgagtaactccaacagcaaagatggtaaggatagggagggggctggtatg

SEQ ID NO: 333535 - DNA, 201 bp, Homo sapiens
actcctgagttgaattgatcctcccgagtagctgggactataggtgtgcaccaccacacccagcttcctctctgtcctgcaggcaacatgcagactgcaamgccttccgctatgaaggtgggggagaagctggccacaaagtcttctccagtgaaagtaggggagaagcggaaagctgctgatgagacgctgtgccaaaca

SEQ ID NO: 333536 - DNA, 201 bp, Homo sapiens
tggtattgggaaccagtttataactgggttggtttccatttagcactatctgctcagtgcccttatggcccaggggcttcagagcagaaatagtacttttycatccggtgcctcagggggcctccagaagtggactggtactccttattttttcacactgacttttgtcctatgtgtacctactacctcattttcccttac

SEQ ID NO: 333537 - DNA, 201 bp, Homo sapiens
agaccacttcagctacttcagccgcagtctcaagcccgtccttcctcacaaggtatgagtgccttcctttctgccaggaccgtctttcccctttctgcctstaacaacctcagggccagagtcccatagccattccagctgtggtacacaataagggtttgttttttatttgttgaatgaattaattcatttattcatttt

SEQ ID NO: 333538 - DNA, 201 bp, Homo sapiens
aagagctttctctcctcttgtgaaagtctttagacaatagaacacaaccccttccctacagatgaggatttcttctgtgaggacagattgctgtccaaagmcatggagtcaaacaaaggcagtggttttgtttccttgttcctgtaccccttggcaggttagacgcccttgaccccaatgcctatgaagccttcaaagcct

SEQ ID NO: 333539 - DNA, 201 bp, Homo sapiens
ccaaggcaggtggattacctgaggtcgggagttcgagaccagcctgacatggagaaaccccatctctactagaaatacaaaattagccgggtgtggtggcrcatgcctgtaatcccagctactggagaggctgaggcaggagaatcgcttgaacctgggaggtggaggttgcggtgagccgagatgcgccattgcactcca

SEQ ID NO: 333540 - DNA, 201 bp, Homo sapiens
atattaaagggggaaagttgttatacaacttgtgttaaatattataaaatataaaacataaatcatttgctgaaaggtaaaaatataccagaaatggtatytctttaggagatttgctgattttcttccatgatctgtagtcattttgttatactaagatgttgactcagtttatctttattcctagatagtcttttaaaa

SEQ ID NO: 333541 - DNA, 201 bp, Homo sapiens
tgaacccgggaagcggaggttgcagtgagccaagatcgcgccactgcactctagcctgggcgacagagtgagactctgtctcaaaaaaaaaaaaaaaaaaagcaataaccagtgatacctcctgagtgctttactatacgccaggcacaaaatacttttgatatactaactaattatctcaacaactctgtgagataggtg

SEQ ID NO: 333542 - DNA, 201 bp, Homo sapiens
tttcccttttgattggtttttttcctgttattgaaagcctgtgtttagggctctattgaaaggcatttcggtatatcttgttgcctgtttcttcagttttrttggagggaaaaaatttaagtcaggcttgtagtttaataaaagtaaacttctcacctgattatatcctttccataaactgagaatttgaacttgagctct

SEQ ID NO: 333543 - DNA, 201 bp, Homo sapiens
agaaataaaaattagccaggtgtggtggcacatgcctgtggtcccagttacttgggagactgaagtgggaggatcacttgagcccaggagttgaaggttgyagtaaactgagatcatagcactgcattccagccttgggtgacagagcaagaccctgtctcaaaaaacaacaaaaacaaaagttcagtttcctggaaatgc

SEQ ID NO: 333544 - DNA, 201 bp, Homo sapiens
ttagtggaaatatgaactatttatagccattatggaaaacactatggaggttcctcaaaaaaaattaaaaatagaaccaccatataatccagcaatcccaytactgagtaaagaaaatgagatgtttgcatacccatgtttattgcagtgctatttacaatagccaagataaggaatcaacctaagcgtctatcaaaatat

SEQ ID NO: 333545 - DNA, 201 bp, Homo sapiens
ttccatttctaccctcccaagaccacctccatacaccggcccctctcccagtaggtagggtcctgagttttcaggcagcgtgtctggaggaagcattaagygtagaggggtaggtgaaggagcctgtgggccaggaggagtgtgtctaggatacatacatgggtggcagagggaaagaggaaggttgggagggggaaggag

SEQ ID NO: 333546 - DNA, 201 bp, Homo sapiens
ttgggaggctgaggcgggcggatcacctgaggtcaggagtttgagactagcctggtaaacatggtgaaaccttgtctttacggaaaaaaaaaaaaaaaaaagtacacaaattagctgggcttggtggtgcacacctgtagccccagctactcaggaggctgaggcatcaagctgagaatcgcttgaacctgggaggcagag

SEQ ID NO: 333547 - DNA, 201 bp, Homo sapiens
tggacagaaaagcgagacgcccctcagtccaccctgtgccgactctgctacctcagaggcagcaggacaaaggcccgtgcatcccgccagcgtgcccagcgtgcccagcgtgcagccgtcgctgttagaggacagcccgctggtacaggcgctcagtgggctgcacctgtccgcagacaggctggaagacagcaataagct

SEQ ID NO: 333548 - DNA, 201 bp, Homo sapiens
taatgttttcagctataatagtcatattgtggttatgttaaaatattttcatgtgttaaaaatacatatggatgtacttacaggcagaataaaatgatgcraaatgttcattttaaaaaacttcaggatgggcacaaacacacagaagtgggaaatgaataaaagagtattgataaatttttgaaaattgttgaagctgag

SEQ ID NO: 333549 - DNA, 201 bp, Homo sapiens
gtggacagaaaagcgagacgcccctcagtccaccctgtgccgactctgctacctcagaggcagcaggacaaaggcccgtgcatcccgccagcgtgcccagcgtgcccagcgtgcagccgtcgctgttagaggacagcccgctggtacaggcgctcagtgggctgcacctgtccgcagacaggctggaagacagcaataagc

SEQ ID NO: 333550 - DNA, 201 bp, Homo sapiens
ggtggacagaaaagcgagacgcccctcagtccaccctgtgccgactctgctacctcagaggcagcaggacaaaggcccgtgcatcccgccagcgtgcccagcgtgcccagcgtgcagccgtcgctgttagaggacagcccgctggtacaggcgctcagtgggctgcacctgtccgcagacaggctggaagacagcaataag

SEQ ID NO: 333551 - DNA, 201 bp, Homo sapiens
caatgtattttcttttttttttttttgcttttttttgtttgtttgttttgtttgttttgagaccaagtctcgctctgtcgcccaggctagagtgcagtggygctatctcggctcactgcaacctccacccgggttcaagcgattctcctgcctcagcctcccaagtagctgggattacaggtgggcaccaccacgcccggc

SEQ ID NO: 333552 - DNA, 201 bp, Homo sapiens
agggtggacagaaaagcgagacgcccctcagtccaccctgtgccgactctgctacctcagaggcagcaggacaaaggcccgtgcatcccgccagcgtgcccagcgtgcccagcgtgcagccgtcgctgttagaggacagcccgctggtacaggcgctcagtgggctgcacctgtccgcagacaggctggaagacagcaata

SEQ ID NO: 333553 - DNA, 201 bp, Homo sapiens
atggcagcactgcttggatttccttggttctttggttctaacaaagtgtccgtgagtccttccatcatgttgtggggaattgagataatgccataagacartaactcctggtatcaaggaagggataaaagttctcttggatctcattaaagtgacctgctaaacctgattcatagcctatacaaggttttcttctaaaac

SEQ ID NO: 333554 - DNA, 201 bp, Homo sapiens
gagggtggacagaaaagcgagacgcccctcagtccaccctgtgccgactctgctacctcagaggcagcaggacaaaggcccgtgcatcccgccagcgtgcccagcgtgcccagcgtgcagccgtcgctgttagaggacagcccgctggtacaggcgctcagtgggctgcacctgtccgcagacaggctggaagacagcaat

SEQ ID NO: 333555 - DNA, 201 bp, Homo sapiens
agagggtggacagaaaagcgagacgcccctcagtccaccctgtgccgactctgctacctcagaggcagcaggacaaaggcccgtgcatcccgccagcgtgcccagcgtgcccagcgtgcagccgtcgctgttagaggacagcccgctggtacaggcgctcagtgggctgcacctgtccgcagacaggctggaagacagcaa

SEQ ID NO: 333556 - DNA, 201 bp, Homo sapiens
cagttctttttattaaaattcagaagttgaagtctttacaaacagtaaccatgagaccactaatattattagtgttttgttttgttttgttttgttttgtttctttgagatggagtcttgccctgtcaccaggctggagtgcagtggcatgatctcggctcactgcaacctccccctcccgtgttcaagcaattctcctgc

SEQ ID NO: 333557 - DNA, 201 bp, Homo sapiens
aggcaggctgttttcgaatgagcactttgctcagtcccactgcagggctttctcgcacacatttcccttctcctctctgccagttgtgtgtgttaaattaattcctttgcttgaagacacagtttagggctcatgtctcccaagatgcatgctggtgaacctcaactccagtatagtcacttgtttttttcatttttaaaa

SEQ ID NO: 333558 - DNA, 201 bp, Homo sapiens
acagttctttttattaaaattcagaagttgaagtctttacaaacagtaaccatgagaccactaatattattagtgttttgttttgttttgttttgttttgtttctttgagatggagtcttgccctgtcaccaggctggagtgcagtggcatgatctcggctcactgcaacctccccctcccgtgttcaagcaattctcctg

SEQ ID NO: 333559 - DNA, 201 bp, Homo sapiens
aaggcaggctgttttcgaatgagcactttgctcagtcccactgcagggctttctcgcacacatttcccttctcctctctgccagttgtgtgtgttaaattaattcctttgcttgaagacacagtttagggctcatgtctcccaagatgcatgctggtgaacctcaactccagtatagtcacttgtttttttcatttttaaa

SEQ ID NO: 333560 - DNA, 201 bp, Homo sapiens
tacagttctttttattaaaattcagaagttgaagtctttacaaacagtaaccatgagaccactaatattattagtgttttgttttgttttgttttgttttgtttctttgagatggagtcttgccctgtcaccaggctggagtgcagtggcatgatctcggctcactgcaacctccccctcccgtgttcaagcaattctcct

SEQ ID NO: 333561 - DNA, 201 bp, Homo sapiens
caaggcaggctgttttcgaatgagcactttgctcagtcccactgcagggctttctcgcacacatttcccttctcctctctgccagttgtgtgtgttaaattaattcctttgcttgaagacacagtttagggctcatgtctcccaagatgcatgctggtgaacctcaactccagtatagtcacttgtttttttcatttttaa

SEQ ID NO: 333562 - DNA, 201 bp, Homo sapiens
gtacagttctttttattaaaattcagaagttgaagtctttacaaacagtaaccatgagaccactaatattattagtgttttgttttgttttgttttgttttgtttctttgagatggagtcttgccctgtcaccaggctggagtgcagtggcatgatctcggctcactgcaacctccccctcccgtgttcaagcaattctcc

SEQ ID NO: 333563 - DNA, 201 bp, Homo sapiens
ccaaggcaggctgttttcgaatgagcactttgctcagtcccactgcagggctttctcgcacacatttcccttctcctctctgccagttgtgtgtgttaaattaattcctttgcttgaagacacagtttagggctcatgtctcccaagatgcatgctggtgaacctcaactccagtatagtcacttgtttttttcattttta

SEQ ID NO: 333564 - DNA, 201 bp, Homo sapiens
gaaattgcctttaaagagattctcctttctctgttcttgtcggatcttcttccttctccctcattgaagcctttgagcgatatagctttggggaaacaagrctcttccatcagtttgggagaggaccatggcctttttagcctggtcacagctggggaggccaggaccccatgaatatcatcagcaaggctgtccctgcat

SEQ ID NO: 333565 - DNA, 201 bp, Homo sapiens
tgggtgaacctggaggacattatgctaattgaaataagccagacacagaaagacaaatactgcatggtatcacatgtggatctaaaagagtcaaactcatraaaacagtagaacggtggttaccaggggctggagggctggggtaatggggagatgctgcttaaagagtacagactttcagtgatatgatgagtaagttct

SEQ ID NO: 333566 - DNA, 201 bp, Homo sapiens
aagtttcaatatcgtggcaattttaaacacctttattgatgtataagtgacacaataaactgtacacgttcatactatgtatacatttttagactttttttgaaccatatgaatatattacctatttaaaaatctaaagaaagtatttcaactttagcagctggctaaataaatagataaatagcaaagctggtctgctct

SEQ ID NO: 333567 - DNA, 201 bp, Homo sapiens
gaagtttcaatatcgtggcaattttaaacacctttattgatgtataagtgacacaataaactgtacacgttcatactatgtatacatttttagactttttttgaaccatatgaatatattacctatttaaaaatctaaagaaagtatttcaactttagcagctggctaaataaatagataaatagcaaagctggtctgctc

SEQ ID NO: 333568 - DNA, 201 bp, Homo sapiens
cagtttctctctttgtagttttaaggaagaaattgtactaaattttcttatatatatgttttttcacactgaagctaaaagttcaattgcctgcctcaaargcatggacaacaaaagcaaaaatagacaaatgggattatgtcaagctaaaaagcttctgcactgcaagggaaacagtcaacagagtgaagagacaaccta

SEQ ID NO: 333569 - DNA, 201 bp, Homo sapiens
tgagtcctagtccacagtatcttttaaaaacaataacctcacttgtctctaaattcctagggttagttttgccctcatggagcaaagaaactgagcaggcytaggttgtaggtgactggcacaaagagactgagagaaggaagcctgtggtggagtgttctgtgattttagagtttttgtagctcctgcttttgctgttga

SEQ ID NO: 333570 - DNA, 201 bp, Homo sapiens
atttttttaattgaatatatttgccaaataccagagctcagaatttctatcaagtttatcttaacccacagcttatgagataaagttgctttaatctgtgtagcattgaggcagtcaaagtctaaggagttcttgtttgcttgcagatatgatagtctccttttttcccttttgattggtttttttcctgttattgaaagc

SEQ ID NO: 333571 - DNA, 201 bp, Homo sapiens
tatttttttaattgaatatatttgccaaataccagagctcagaatttctatcaagtttatcttaacccacagcttatgagataaagttgctttaatctgtgtagcattgaggcagtcaaagtctaaggagttcttgtttgcttgcagatatgatagtctccttttttcccttttgattggtttttttcctgttattgaaag

SEQ ID NO: 333572 - DNA, 201 bp, Homo sapiens; identical to SEQ ID NO: 70113

SEQ ID NO: 333573 - DNA, 201 bp, Homo sapiens; identical to SEQ ID NO: 70114

SEQ ID NO: 333574 - DNA, 201 bp, Homo sapiens
ggggagatgctgcttaaagagtacagactttcagtgatatgatgagtaagttctagagacctattgtacagcatggtgactacggttgacaataaacgtaycatatacttcaaatttgctgaaagagtagatcttaagtgttctcaccacaacaaaaagagcatggctatgtgaggtaaggtagtcattccaagtgtatat

SEQ ID NO: 333575 - DNA, 201 bp, Homo sapiens; identical to SEQ ID NO: 70117

SEQ ID NO: 333576 - DNA, 201 bp, Homo sapiens
ggggaagagtaggtgtgagaaggttgcagagtttaggtagggatcagaataagaggcaggatttatgtgttagtgtgttttgatgctattttctgtaaatscctggactgggaatttaatttcatacagtgtttagcatatgggattaatatattgatgaagcagacttatatagctgtccagtattaaattttttcaatt

SEQ ID NO: 333577 - DNA, 201 bp, Homo sapiens
tgtgtgaaatttaccatccatgcaaaagtttaggactagtgtttggggaactgagactgtcagaaaaatgcctctttatgccactcaccttatggggctgrtggagagtccacgtaaaggataaccgtttcctcaaaggatttatgctgtttcacctccatcaagaaaagggctttttaaagttaaggtaaaattttaaaa

SEQ ID NO: 333578 - DNA, 201 bp, Homo sapiens
ttttttgagacggagtctcactctgtcacccaggctggagggcaatggcgccgtcttggctcactgcagcctccgcctcccgggttcaagcgattctcccacctcagcctcccaagcagctgggattacaggcaccctccatcatgcctagctaatttttatatttttagtagagacagggtttcaccatgttggccaggc

SEQ ID NO: 333579 - DNA, 201 bp, Homo sapiens
ttaatgaaagttgtttcttggaaaataagaaatggaaatataatgtattaaatggagctggtttgtaaaatatggtgtggttgagacagtatctcaggtgycttctaactccctgtgtgtcagcctctgtgagaaagggcacagtttggttgcagctgtactataggaggatggaattacatctgtttttatctgtgagtg

SEQ ID NO: 333580 - DNA, 201 bp, Homo sapiens
tccaaggcaggctgttttcgaatgagcactttgctcagtcccactgcagggctttctcgcacacatttcccttctcctctctgccagttgtgtgtgttaaattaattcctttgcttgaagacacagtttagggctcatgtctcccaagatgcatgctggtgaacctcaactccagtatagtcacttgtttttttcattttt

SEQ ID NO: 333581 - DNA, 201 bp, Homo sapiens
actgactttttccactgactaccaatccagataagaaggcacttatttatgatatttaatttagtagccaaattatatttagtatttaagggtttttttttgtttttggtttgtttgtttttacaaattgtacttgttttatttatcaagtcccatcttactattccaaaaaaattttcaggtagcatctggatagtagat

SEQ ID NO: 333582 - DNA, 201 bp, Homo sapiens
agcctggacaacatggtgggaccctgtgtcttaaaaacaccaacaaaaattaagatcccctcccagccatttgtattgaagtttgtaaaaaaaaaaaaaaattaaaaaaatcaagagagcaaactaacaacagttacatgaaactttagaaactttcttaactgactccagagatttcacgacatcttttccccacatctt

SEQ ID NO: 333583 - DNA, 201 bp, Homo sapiens
tcttgaactcctgacctcaaatggtccacctgcctcggcctcccaaagtgctgggattgcaggtgtgaaccactgtgcccagcctttttttttttttttttaaataactgctggcccaaccttgagaagggtggtgacgtcctttatttaatgtaatatagattggctggaggcccgaatcttggtttccatcatcatcct

SEQ ID NO: 333584 - DNA, 201 bp, Homo sapiens
gtcttgaactcctgacctcaaatggtccacctgcctcggcctcccaaagtgctgggattgcaggtgtgaaccactgtgcccagcctttttttttttttttttaaataactgctggcccaaccttgagaagggtggtgacgtcctttatttaatgtaatatagattggctggaggcccgaatcttggtttccatcatcatcc

SEQ ID NO: 333585 - DNA, 201 bp, Homo sapiens
ggtcttgaactcctgacctcaaatggtccacctgcctcggcctcccaaagtgctgggattgcaggtgtgaaccactgtgcccagcctttttttttttttttttaaataactgctggcccaaccttgagaagggtggtgacgtcctttatttaatgtaatatagattggctggaggcccgaatcttggtttccatcatcatc

SEQ ID NO: 333586 - DNA, 201 bp, Homo sapiens
tggtcttgaactcctgacctcaaatggtccacctgcctcggcctcccaaagtgctgggattgcaggtgtgaaccactgtgcccagcctttttttttttttttttaaataactgctggcccaaccttgagaagggtggtgacgtcctttatttaatgtaatatagattggctggaggcccgaatcttggtttccatcatcat

SEQ ID NO: 333587 - DNA, 201 bp, Homo sapiens
caacctccacctcccaggttcaagggattctcctgcctcagcctcctgagtagctgggattacaggcatgtgccaccacgcccgggtaattttgtatttgyagtagagacgggatttctccatggtcaggctagtacctaactcccaacctgaggtgatccgcccacctcggcctctgaaagtgctgggattacaggtgtg

SEQ ID NO: 333588 - DNA, 201 bp, Homo sapiens
atcagagcgtgttggataaagggtagacagaagggaagagtcagtgagagcactttataacataaaaaagtgaaaatttgctctccctattttttttttttaataaaaaagcactgtggccacatatatacacacatatctgttcatacttacttattgtattcaaaatccagggtactgagttattttttttcttgaatg

SEQ ID NO: 333589 - DNA, 201 bp, Homo sapiens
ctggtcttgaactcctgacctcaaatggtccacctgcctcggcctcccaaagtgctgggattgcaggtgtgaaccactgtgcccagcctttttttttttttttttaaataactgctggcccaaccttgagaagggtggtgacgtcctttatttaatgtaatatagattggctggaggcccgaatcttggtttccatcatca

SEQ ID NO: 333590 - DNA, 201 bp, Homo sapiens
gcagtgttcagccatattcgtcatcaaaaaatgctgaatgaaaccacagtgaattaccactacacactgatcagagtagctaaaattgagaaacaaacaaaaacttgaaaataccagtatcagcatgggtgtagagcaactagaaccctcatgtatggattctggaattgtaaattggaataactgtggaaaactggttgt

SEQ ID NO: 333591 - DNA, 201 bp, Homo sapiens
agcagtgttcagccatattcgtcatcaaaaaatgctgaatgaaaccacagtgaattaccactacacactgatcagagtagctaaaattgagaaacaaacaaaaacttgaaaataccagtatcagcatgggtgtagagcaactagaaccctcatgtatggattctggaattgtaaattggaataactgtggaaaactggttg

SEQ ID NO: 333592 - DNA, 201 bp, Homo sapiens
tagcagtgttcagccatattcgtcatcaaaaaatgctgaatgaaaccacagtgaattaccactacacactgatcagagtagctaaaattgagaaacaaacaaaaacttgaaaataccagtatcagcatgggtgtagagcaactagaaccctcatgtatggattctggaattgtaaattggaataactgtggaaaactggtt

SEQ ID NO: 333593 - DNA, 201 bp, Homo sapiens
taaaagcttgccaggagtatgatcagtaaggaagggaacagaatacatcttgccatgaaaggaaagaggaataagtggaaaaatgccctctgatacctcascaacaagagagaggaatgaaacttcacgcccttcttgactggggttagaaacatcattataggtattgccacaaagtcacaagatttttttattacatta

SEQ ID NO: 333594 - DNA, 201 bp, Homo sapiens
ctagcagtgttcagccatattcgtcatcaaaaaatgctgaatgaaaccacagtgaattaccactacacactgatcagagtagctaaaattgagaaacaaacaaaaacttgaaaataccagtatcagcatgggtgtagagcaactagaaccctcatgtatggattctggaattgtaaattggaataactgtggaaaactggt

SEQ ID NO: 333595 - DNA, 201 bp, Homo sapiens
ctcactgcaacctccgcctcccaggttcaagcgattctcccaccttggcctcccaagtagcggggattacaggcaccagccaccatgcccgggtaatttcygtattttttttagtagagatggggtttcaccatgttggtcaggctggtctggaactcctgacctcaggtgatccactcgtctcggcctcccaaagtgctg

SEQ ID NO: 333596 - DNA, 201 bp, Homo sapiens
ggggttagaaacatcattataggtattgccacaaagtcacaagatttttttattacattaaaaaatgtaggccaggcgtggtggctcattcctataatccyagcactttaagaggctaaggcaggaggatcacttgagctcaggtgttgagaacagccctggcaacaaagaccttgtttccacagaaaatcaaaaaattag

SEQ ID NO: 333597 - DNA, 201 bp, Homo sapiens
tagtacgcagctgtggtgccggctactttggaggctgaagtgggaggatctcttgagcctgggaggtcaaggctgcagtgagctatgatggcactgctgcrctccagcttgggcaacagagcaagacagtgtatcaaaaaaaaaaaaacatataatcttgagggatagtgattgatagggtaaattatgagcattacttat

SEQ ID NO: 333598 - DNA, 201 bp, Homo sapiens
caaaacagcaggtgggaaggcattatatctgggcgcatttgctgagagatgggtaaatgtggtgatggaagtctatcaaaatttgcctctgactgtttcartttttccattgtagtaggaagcaaggtcattcttcagctgtgagtgaagatgagtggggacatatagggagtttgaagaaaaagggaaacagaatggcat

SEQ ID NO: 333599 - DNA, 201 bp, Homo sapiens
ctgtggtgctgtgattcttcagcctaggtcttggcctgtcactttgtggtactttgctcctgatacagcttcctgatatcattaacttccagggccccagyagggggaagtgtgcggacagatgcaatgacttaaattagcacagactaggatcctgcagtgaatgaacagcgatgctgttgctgcatctttctctgctac

SEQ ID NO: 333600 - DNA, 201 bp, Homo sapiens
atctaccaagaatgaaaaggggagaattcagcttcatgactgagcacacatgtaattatttagaattgaggcagtcatggaactggccagaatgttagtakcttccaggctgtgtggaataacctcgtcccctgccacatgtacatattgttaagcccctcagcagtgagagatggcagcactgcttggatttccttggtt

SEQ ID NO: 333601 - DNA, 201 bp, Homo sapiens
ggtgaaccccctcagccccccattttttctttagagaaaaggagcctatttcagagatttcaaaagtctgaaaacagcacgtggtgcagcttactcatctrgtggtcaaggtgacgtgtgtgtcacactgtccctaaggactggccttgtgacattctagctaacatttaacaccaccaaggttaagcttcacaggatctg

SEQ ID NO: 333602 - DNA, 201 bp, Homo sapiens; identical to SEQ ID NO: 70120

SEQ ID NO: 333603 - DNA, 201 bp, Homo sapiens; identical to SEQ ID NO: 70122

SEQ ID NO: 333604 - DNA, 201 bp, Homo sapiens; identical to SEQ ID NO: 70112

SEQ ID NO: 333605 - DNA, 201 bp, Homo sapiens; identical to SEQ ID NO: 70116

SEQ ID NO: 333606 - DNA, 201 bp, Homo sapiens; identical to SEQ ID NO: 70118

SEQ ID NO: 333607 - DNA, 201 bp, Homo sapiens; identical to SEQ ID NO: 70119

SEQ ID NO: 333608 - DNA, 201 bp, Homo sapiens
tttaatttgcatatgatggggggaagctctaatagaatgctcactgcagaatctctgttctgcttcaaactttggattgctgggaagaaaaagcctcatamatgcaaatatgaaccagattaactgtcagactccattcttcagtaaaatttcctacattctagagtcggccagattgtgtgtgtgtgattttgactgggt

SEQ ID NO: 333609 - DNA, 201 bp, Homo sapiens
catcaaaacacggttaaaataactatactagatagtctgccttttagcaacttaccagtattccatttctgttagtaggaattgtgtattcagttacacaggggaaagcagcagtgccactttttcagtcatcttgatgactgggttgtatccctaataatgatgtcgatggtaaagaggctaaagctaaaattaggtttt

SEQ ID NO: 333610 - DNA, 201 bp, Homo sapiens
cacattttttacaggttactgtggattttttaatggtcttgtgaagattggaaaagaatgctgttttactatttagcattaattctgccttcacatgtgtsagactcatcctcagccactttttatgtttaaggaacaacagatccaggcagagatctctatcctgttacatgagtttattgctttccctaaatgcaaaag

SEQ ID NO: 333611 - DNA, 201 bp, Homo sapiens
ccatcaaaacacggttaaaataactatactagatagtctgccttttagcaacttaccagtattccatttctgttagtaggaattgtgtattcagttacacaggggaaagcagcagtgccactttttcagtcatcttgatgactgggttgtatccctaataatgatgtcgatggtaaagaggctaaagctaaaattaggttt

SEQ ID NO: 333612 - DNA, 201 bp, Homo sapiens
gggctatattcttaggttagactctctgttaggaacaataatcaccatagtgtcataaagtgaagctaaattccaaagattgttttgtatgggaacatacraaagaaaagatgtacagacaataaactgttaggcttaattaccaataggtaaaatagggtaagggatgacacctgttcaactcttgtccctatggcatat

SEQ ID NO: 333613 - DNA, 201 bp, Homo sapiens
gaaaaaaagtaaaccaaaaagataaaataaaaataagtaaaatagataatgtccattgaacaccttgtaaagtacctgactcataattggctgttaataartattttaaaaattgttatctgaagttcctccttttttctgtcctttgagctggactctgtaacacctcttagtattacttccttctttttagcttttgta

SEQ ID NO: 333614 - DNA, 201 bp, Homo sapiens
cctcatctctggatcacactttgaaaactgctggtgtaaactagtaccatgtgctgacatctttttagagcagtctgatacacatttttttttttttttttgagacggagtctcactctgtcacccaggctggagggcaatggcgccgtcttggctcactgcagcctccgcctcccgggttcaagcgattctcccacctca

SEQ ID NO: 333615 - DNA, 201 bp, Homo sapiens
ggcatggtggcttacgcctgtaatcccagcactttgggaggccgagatggggggatcacctgaggttgctggagtttgcgatagcctggccaacacgtctstactaaaaatataaaaattagtcgggcatggtggcgggcacctgtaatcccagctacttgggaggctgaggcaggagaatctcttgaacctgggatgtgg

SEQ ID NO: 333616 - DNA, 201 bp, Homo sapiens
tagatcccttgaaggggttccttcctcatctctggatcacactttgaaaactgctggtgtaaactagtaccatgtgctgacatctttttagagcagtctgrtacacatttttttttttttttttgagacggagtctcactctgtcacccaggctggagggcaatggcgccgtcttggctcactgcagcctccgcctcccgg

SEQ ID NO: 333617 - DNA, 201 bp, Homo sapiens
acaggttcactttattcattttagagaaaatgtctgccagataccaaagtctgaataagtgtaaattgtctgctagtcaaaaaagcaaaaatggtgtcctrtgaaaaaaaaaaattgtataaatgcttttccccaagataatcattatacttaggtatgcagcagaaatgctttatgtgtgcttcctatttcatcatacag

SEQ ID NO: 333618 - DNA, 201 bp, Homo sapiens
agcctcctctttaagtagagaaagtaatttgaggaagttttggttgctttttaaattttggtgccttgtggtacctcaaaataatttattgtccatattgycacatttaataatatttctaaactatgaaggattaacttgctttagtttggacaagtgctatattttcttgtggcttgctaaaattattttattaaacac

SEQ ID NO: 333619 - DNA, 201 bp, Homo sapiens
agacaggagaattgcttgaacctgggaggtggaggtttcagtgagctgagatcgtgccactgcactccagcatgggtaacagagcgatattccatctcggraaaaaaaaaaaaaaaaggtttactaagttctgcacatctttgaaatgttggcacatttgattatacaatattaagcaaatcacagtcattaatatcacca

SEQ ID NO: 333620 - DNA, 201 bp, Homo sapiens
gaagaagggtggggtattttcatagtcttttcatataattgtgaatatttttgttacaccaaaattcaacaattggtaaatgctttttatttatttatttwtttttttgagatagtctcgctctgtcgcccaggctggagtgcagtggtgtgatctcagctcactgcaacctctgcctcccgggttcaagtgattctcctg

SEQ ID NO: 333621 - DNA, 201 bp, Homo sapiens
agttccttcagttgaaaatagagatgacttttgtacttcattaccataaagctatgctaaaaataatacattaatgaaagttgtttcttggaaaataagaratggaaatataatgtattaaatggagctggtttgtaaaatatggtgtggttgagacagtatctcaggtgccttctaactccctgtgtgtcagcctctgtg

SEQ ID NO: 333622 - DNA, 201 bp, Homo sapiens
ggttctgcgtctgggtgagggagaaaaccctccgatacctgttggggcgcagcactggaggcggacaccccggcccgggggtcggggccgcgagcccgggrgtagggggcgggcgcgcgggcgcgggaggaggaggaggaggagggagaggtgggggaggaggccgcgggccgcgcgtcctccggcagctccggctcctcc

SEQ ID NO: 333623 - DNA, 201 bp, Homo sapiens
tgaactctgtcactgagcaggcagaacctgattgagtggtatggctttggtaggcgctttgcagaagtttattagtggattgactaggacaaattctctcytatagttccttcagttgaaaatagagatgacttttgtacttcattaccataaagctatgctaaaaataatacattaatgaaagttgtttcttggaaaata

SEQ ID NO: 333624 - DNA, 201 bp, Homo sapiens; identical to SEQ ID NO: 70125

SEQ ID NO: 333625 - DNA, 201 bp, Homo sapiens
tttacaaatagtattaactaacctatcatcctgctgaacttcgtgatttatactttccaagagaaataatatgcttctttttttcctaaagatctccaaaratgaaaattttataatcttccctaacagtacagttctttttattaaaattcagaagttgaagtctttacaaacagtaaccatgagaccactaatattatt

SEQ ID NO: 333626 - DNA, 201 bp, Homo sapiens; identical to SEQ ID NO: 70126

SEQ ID NO: 333627 - DNA, 201 bp, Homo sapiens
ccaatccccaacagaccccagcgtgtgatgtttccctcccaacagaccccagcgtgtgatgttcccctcccagtgtccatgtgttctcattgttcaactcycacttatgagtgagaacatgtgctatttggttttctgttcctgtgttactttgctgagaatgatgggtgaaactgggtttttaaaaaatgataggcagta

SEQ ID NO: 333628 - DNA, 201 bp, Homo sapiens
ggccaagttctcaagagttgacgttttaaaaattaataccttttattattttatcaaggatgttgttaagtgagactggcttttttttttaattatacttkaagttttggggtacatgtgcagcacgtgcaggtttgttacacaggtatacacatgccatggtggtttgctgcacccatcagcccgtcatctacattaggt

SEQ ID NO: 333629 - DNA, 201 bp, Homo sapiens
gcgaggccagtgtggctggagcagagtgagcatgggagagtgtcgtcagagaggtaacaggagcagatccagacaatacaagatttctgcataggacttgkaaagacgggagcttttactctgagaaaaagagttcagagggagtcattggaaggttccaagcagaggagcaacataatctgacttacattgttaggatca

SEQ ID NO: 333630 - DNA, 201 bp, Homo sapiens
agaagccaccaaggcaaagcacatgtggtatgctaaaggaagagcgaggccagtgtggctggagcagagtgagcatgggagagtgtcgtcagagaggtaayaggagcagatccagacaatacaagatttctgcataggacttggaaagacgggagcttttactctgagaaaaagagttcagagggagtcattggaaggttc

SEQ ID NO: 333631 - DNA, 201 bp, Homo sapiens
gatgggatggcggccgggcagagacgctcctcacttccagatggggcagccaggcagaggggctcctcacgtcccagacgatgggcagccaggcagagacrctcctcacttcccagatggggtggcggccgggcagaggctgcactctcagcactttgggaggccaaggcaggcggctgggaggtggaggttgtagcgagc

SEQ ID NO: 333632 - DNA, 201 bp, Homo sapiens
ctttagcttgatatttaagaccttccaggacctaataccacctttttagttcttacctctcctgttctcttcctctgctcatcctctttcaatgtctggasacactcacctagtgagtgcaccccagatatttctgtcctgtccttggtcttcattcattttctatactccatctggaatgcctctaccgccatctgagct

SEQ ID NO: 333633 - DNA, 201 bp, Homo sapiens
ttacctacacgccacaataactccggcctcctggtgttcatgtaacattcaaatgaaatggcatatgccaagcacagttcctggtttatagggacacttgycattgtcatcttagggtagactatgcagcctactagggtgagtagtagatacagtgtgttttgtcgtttgaggaaggcttgatggagttaagtaggactt

SEQ ID NO: 333634 - DNA, 201 bp, Homo sapiens
tatgtttaaaactcctgccttttcaaaattttgcctcaacactgtgttgttaatatgtctgcttttactgtgagatctgccgatttgagatttaatagctyatgcttgtaccgagcctttctggtggggtcacaatgcctttgagtgtgcagttattattaattctttttagagataagcaggctatgttacagaaagcaa

SEQ ID NO: 333635 - DNA, 201 bp, Homo sapiens
tttctttagcacctggaaggcaaggctttctaggaggaagaaaaatacccgatcatcgggtcattgggtagcaataaggcattcttttgtgagtgtgtgtrtgtttaaaactcctgccttttcaaaattttgcctcaacactgtgttgttaatatgtctgcttttactgtgagatctgccgatttgagatttaatagctta

SEQ ID NO: 333636 - DNA, 201 bp, Homo sapiens; identical to SEQ ID NO: 70123

SEQ ID NO: 333637 - DNA, 201 bp, Homo sapiens
taaataaataaataaataaataataaaaaataaaataaagaaatgcatgtttgacctctaggttcgttgttgacaaaaaccttagcgttgaaggagatttsagagatcatttagtcagccaccagcatttgataagtgaggaaatcagtattccaaaaatgttacatgaattccccaacattatccagttgagttttagaa

SEQ ID NO: 333638 - DNA, 201 bp, Homo sapiens
gaagccataccaatttgtcctttttatttgtttgttcaaatgaagcagtgcatcaagtatggaattagattaatggagtaaatattatgaatcatacactstctctaatctgacactctttcttctttttttgacctcacgttttgttttctgtctttctctctccgcgtaggctttcagtccagtgtaaagctgttggag

SEQ ID NO: 333639 - DNA, 201 bp, Homo sapiens
cagaagtttattagtggattgactaggacaaattctctcttatagttccttcagttgaaaatagagatgacttttgtacttcattaccataaagctatgcyaaaaataatacattaatgaaagttgtttcttggaaaataagaaatggaaatataatgtattaaatggagctggtttgtaaaatatggtgtggttgagaca

SEQ ID NO: 333640 - DNA, 201 bp, Homo sapiens; identical to SEQ ID NO: 70115

SEQ ID NO: 333641 - DNA, 201 bp, Homo sapiens
gtctgtatttgagtcctgcctaccctggttattagtgaagtggtttgagtaagttacttcaaacttctgtgcacttcagtttcttgatctggaaactgaasgtaatatacctaccttacagggatattgtgaggattaaaatagataatgtaaaatgaaaaaaaaagaaaaaaagtaaaccaaaaagataaaataaaaata

SEQ ID NO: 333642 - DNA, 201 bp, Homo sapiens
cagattggagaaagcacacctctaaccagcctgtgatgaataagctggggaggaaaaaaacctgttgcataatctcatttgccgtggggtttgctgtgccrtccccttgaaccaaagggaagtgagttaagatgcagggttttaaaactctctgaagtttttatttacccagcgctctggctcccacttctgttttaaaag

SEQ ID NO: 333643 - DNA, 201 bp, Homo sapiens
ttggattgagtgaggcctttgtatataatggtacaagcagaacagcaatagaactataatctgactccacagcttgtatgctcttaattagtaatgctgcmaaatagtgctcttactgcgtggaaaagtgatttttctctaaaatctcttaatttacatcaccacaaattgaaaaagcagtcagagatcttaattcaacta

SEQ ID NO: 333644 - DNA, 201 bp, Homo sapiens
gaatataaatttatatttgtggctcacacactttggaatcctagcaccttggaagggtcaggtgggcagatcatttgagctcaggagtttgagaacagccrggacaacgtggcaaaaccccgtctctacaaaaattacaaaaattagccgggctttgtggccctagcctgtagttccagctacttgggaggctgaggtggg

SEQ ID NO: 333645 - DNA, 201 bp, Homo sapiens
agggaagagcatggattattgatgaaaaagacacgggccctactggacaaagcgtgccctaatggaggaacacattggattgagtgaggcctttgtatatratggtacaagcagaacagcaatagaactataatctgactccacagcttgtatgctcttaattagtaatgctgcaaaatagtgctcttactgcgtggaaaa

SEQ ID NO: 333646 - DNA, 201 bp, Homo sapiens
attatgctaattgaaataagccagacacagaaagacaaatactgcatggtatcacatgtggatctaaaagagtcaaactcatgaaaacagtagaacggtgkttaccaggggctggagggctggggtaatggggagatgctgcttaaagagtacagactttcagtgatatgatgagtaagttctagagacctattgtacagc

SEQ ID NO: 333647 - DNA, 201 bp, Homo sapiens
gggtggggaaaggtgttaaaaagatggtgaggacaaaggctgaaactatgcactgccagcctccctgggttaaagctctttggaggagtttggttgagaargaagagggaagagcatggattattgatgaaaaagacacgggccctactggacaaagcgtgccctaatggaggaacacattggattgagtgaggcctttgt

SEQ ID NO: 333648 - DNA, 201 bp, Homo sapiens
ctcgaacccctgacctcaggcaatccgcctgcctcggcctcccaaagtgcggggattacaggcgtgagccaccgagccctgccttgtttttaaatttaatrttaaaaatatacgaggatcccgtcatccaaatctccttgattcggacttagtgaatagcgagggtttgaatagcaaggcgtatatctgaaaatttatcag

SEQ ID NO: 333649 - DNA, 201 bp, Homo sapiens
atcgcactctagcctgggcaacaagagcaaaacttcgtctcaaaaaaaaaaaaaaaaaatgaaaccatgaaactgtaaggtgcaggtatcctgagggcctrtgacacaaaggaatttgtgatttctataatggatccatgtattctgcctatcagattaccttaagaacttcagtaagtggaagagctttaactgcttctg

SEQ ID NO: 333650 - DNA, 201 bp, Homo sapiens
agatagagggtaacaggaggaacagttgtttcagtgagaggcttccaatgagaagatgcagatcttgggagagcctgaagttcaggccagttgctgacagwgctcggagccccttcatgaccagcctcagcaggctattgttggaggactggtttggatgtgacaactacaattagaccaggaattaaactaagaggggag

SEQ ID NO: 333651 - DNA, 201 bp, Homo sapiens
gtgtatgctgtatgtaccgtggcttctacgtgtgcatgcatggggcggtgtgagggtggtattcttggacaagagaacggcatggaaatgtgaaataacartgagttttatgtggctggaggtcatcattggaaacggtaagaaatgaaactggaggccaaggcaggtggatcacctgaggtcaggagttccagatcagcc

SEQ ID NO: 333652 - DNA, 201 bp, Homo sapiens
actccatttcagtagttgctttgaccctagcgtagcattttgtaagtgtgaattctactagctattaatatattttagggggaattccatggtcagataartttggggaaacttactagacttcaataaatgaaaccagtttctttgaaaatactttttagaacctttagtaagttaacatgtgctctgactctgccaggg

SEQ ID NO: 333653 - DNA, 201 bp, Homo sapiens
tgagcctgggaggcagaggttgcagtgagctgagatcatgccactccagcctaggcaacagagtgagaccctgtctttaagaaaaaaaagagaaacaccaraactacatgttaatagacaccacattaaaatttaacatcatacaatttaattgtaattaaaatagtgcctgacagttgttaggttgggtaggtgtaagaa

SEQ ID NO: 333654 - DNA, 201 bp, Homo sapiens
gtttatccatgttgcccaagctgttttgttgaatttaaatgacaaccattccaggaactgttttagagccagaattgaaaaatatatgaagacagttcttyagagaaacaccagaactggcagggcgcagtggctcatgcctgtaaacccagcactgtgggaggccaaggtgggtagatcacttgtgcctaggagtttgag

SEQ ID NO: 333655 - DNA, 201 bp, Homo sapiens
gctacttagaactcacagattagatgtgatatagttcagggatacaaaaatggagtgagtggagtacagtaactgtcatctctgcttcttctgctattacyagtactgcttagtcagggtttcatactccaaagaggatttggagggctcgggttgattctcttcttcttccctctcctcattatatgtaaaccagaggga

SEQ ID NO: 333656 - DNA, 201 bp, Homo sapiens
ctacttagaactcacagattagatgtgatatagttcagggatacaaaaatggagtgagtggagtacagtaactgtcatctctgcttcttctgctattaccrgtactgcttagtcagggtttcatactccaaagaggatttggagggctcgggttgattctcttcttcttccctctcctcattatatgtaaaccagagggat

SEQ ID NO: 333657 - DNA, 201 bp, Homo sapiens
aagttgtttcttggaaaataagaaatggaaatataatgtattaaatggagctggtttgtaaaatatggtgtggttgagacagtatctcaggtgccttctawctccctgtgtgtcagcctctgtgagaaagggcacagtttggttgcagctgtactataggaggatggaattacatctgtttttatctgtgagtgatgtctt

SEQ ID NO: 333658 - DNA, 201 bp, Homo sapiens
aaaacagggcaacccagtagtagaagccctggtttgggaatcagacaatctgaatacaggaccttacattgccgtgaactctgtcactgagcaggcagaayctgattgagtggtatggctttggtaggcgctttgcagaagtttattagtggattgactaggacaaattctctcttatagttccttcagttgaaaatagag

SEQ ID NO: 333659 - DNA, 201 bp, Homo sapiens
agctgtatgagtaagcatatttcactgtgaactcagtacaatagatcatcccaactttgctgtgtaaaatgatttatttatagcttttgattgatgtcacygttctatttaacttgaatactatatcattcttccacataggtcagtgtatttttgacttggctcaagtgcctctttgcttgctattaactggtagtgcca

SEQ ID NO: 333660 - DNA, 201 bp, Homo sapiens
tatttcagccttttattatgtctaattattctggtttataaacaatgacctaattagtaaaacttgagcctgtacatagtgctcattttgctttacattarcttatgtgaagctgggacagaataagacattgagatattttcagatattattctggtgcaataattcaatcatgtagtctagatagccattttcatgggt

SEQ ID NO: 333661 - DNA, 201 bp, Homo sapiens
tactttcagtgcccatgacatataataagggtatatcttgtgccaggcacattgccttggatttagactattaacagtctcttggctctcaggttttatasttaccattctagactgagcgcatccataggcaactaaaactgtatggtactgtaaggagactagtcagtcagtctccttaaatctattctcacctcagtc

SEQ ID NO: 333662 - DNA, 201 bp, Homo sapiens
ctaggcttcttgagttttttattggttttgtttctagggataaaccaattctttttttctcttcacaaaagaatatatttctggaagtcattctatatcagatagacatctttctttttacatgtccatatggtatactacattgatataataatatatttagccaatttatcactcattaactttgaagttgtttctttt

SEQ ID NO: 333663 - DNA, 201 bp, Homo sapiens
tcataaagcgtacagtggcctagatggctttagacttcaggattctttaccatctagccccttttactctaccaacttattttgttacttgttgacataawctgtagccaggaaagcctgcatacagtttgttatccctctgtctttgctcatgcgttttctgcatctggaatcatcttcctctcttctctctgctggttc

SEQ ID NO: 333664 - DNA, 201 bp, Homo sapiens
cagtgaccatatttacatttcaaccagttcatctgtaaactttgttattggtgtcatgtgaaattgcctttaaagagattctcctttctctgttcttgtcrgatcttcttccttctccctcattgaagcctttgagcgatatagctttggggaaacaaggctcttccatcagtttgggagaggaccatggcctttttagcc

SEQ ID NO: 333665 - DNA, 201 bp, Homo sapiens
atctagccccttttactctaccaacttattttgttacttgttgacataatctgtagccaggaaagcctgcatacagtttgttatccctctgtctttgctcmtgcgttttctgcatctggaatcatcttcctctcttctctctgctggttcatgtccctattttctttcaaaactctctttgaaatttacatttttcaggaa

SEQ ID NO: 333666 - DNA, 201 bp, Homo sapiens
actggacctcgaacagcctggctgatggctcagtttatgattattgcagaattgcatctcctctgaaagttgttctgtggggggtgacctgacagccaagstctactaccaacttgtaaatggtggtcatgaacaaaccagtgaccatatttacatttcaaccagttcatctgtaaactttgttattggtgtcatgtgaaa

SEQ ID NO: 333667 - DNA, 201 bp, Homo sapiens
gaacaaagttgtaggattcacactattgaatatacagtgtggaataaatgaatggataatggaacagaatagagccctgaatcagacccatatatgtagayactaatttatgattaaaatggcactttacagcaatgtggaaagaaagatctttcgataaatgatcctacgtcaattgcctatctgtatgaaaagaaaaag

SEQ ID NO: 333668 - DNA, 201 bp, Homo sapiens
gggttgtttaatatagggcaagctcttttggaggtgtcatttatgggataagttttgtgagatgtaggctacttgtcagccttcctgaaagagaaatgcgtatctatccactctcctcttggtctgtgctccagtagatgggggtggatggaataagagctttaaattaatgctttagatcatttgggatttttctcttta

SEQ ID NO: 333669 - DNA, 201 bp, Homo sapiens
ggcttagaaagctttgcgcttcacatggatagcctgagaagtgagctgtatagtgtgattcatggacagtttacaagttagtcagattttattcttgaatmattctccagacactagacttgtattcctttttcctcttgactcatcaagtttcccctatggataatctcatttcattatccattttgatgatgattatag

SEQ ID NO: 333670 - DNA, 201 bp, Homo sapiens
ctttaagtcctcagttgttgttttgcctcagctccttaggcctcctccctgttgctctaaacctaagacatcatgcaccctgggccttcacagaggctctstcctctgccctgggctcttctctctgctatttacctagttgttttcctgctagattcaatgtggttgtcaagccttccctagctaccaggcaaagttggt

SEQ ID NO: 333671 - DNA, 201 bp, Homo sapiens
ccttgctaacttcatccagtgccactttaagtcctcagttgttgttttgcctcagctccttaggcctcctccctgttgctctaaacctaagacatcatgcrccctgggccttcacagaggctctctcctctgccctgggctcttctctctgctatttacctagttgttttcctgctagattcaatgtggttgtcaagcctt

SEQ ID NO: 333672 - DNA, 201 bp, Homo sapiens
gaagaatttgtactttaaggtgatgggtattgtgagctattggagatatggctgcaatacctgtcatctcttagtcaccagatctttcttccaacctcttsggtctgtctggttttctggtcttctgctaccatgaagtcagttgaatgttattcctcccccaggttgctccaggagcctcttaactgatctgttcacatg

SEQ ID NO: 333673 - DNA, 201 bp, Homo sapiens
cagcatggtgactacggttgacaataaacgtatcatatacttcaaatttgctgaaagagtagatcttaagtgttctcaccacaacaaaaagagcatggctrtgtgaggtaaggtagtcattccaagtgtatatgtatatcacatcatcatgctgtacaccttaaacagataaaatttttgtttgttaatcatacttcaata

SEQ ID NO: 333674 - DNA, 201 bp, Homo sapiens
gtttctcacaggggctactgtaagttacaaggtcactggagacaattttcactacaaactgcccctgtgactttcaacagttggagattgttgtcagtctygtttggacatggtaatagaaagacaaagtggtttcttggaataatttttccatcggtttagaactttcagccaccttgagaaaagaaagcatcagatatg

SEQ ID NO: 333675 - DNA, 201 bp, Homo sapiens; identical to SEQ ID NO: 70127

SEQ ID NO: 333676 - DNA, 201 bp, Homo sapiens
cacctgggtaccctcatggacaattggcatcattctttcccagtccagttccattatgggaacaagtacttagggaaaacagggcaacccagtagtagaarccctggtttgggaatcagacaatctgaatacaggaccttacattgccgtgaactctgtcactgagcaggcagaacctgattgagtggtatggctttggta

SEQ ID NO: 333677 - DNA, 201 bp, Homo sapiens
ctgtacaccaaaaagcattaattttactttatgtaagttaaaaaataatgctttaaaaataaatgtagtggccaggcgtgttggctcatgcctgtaatccyagcactttgggaggctgaggcgggcggatcacctgaggtcaggagtttgagactagcctggtaaacatggtgaaaccttgtctttacggaaaaaaaaaaa

SEQ ID NO: 333678 - DNA, 201 bp, Homo sapiens
atgagatgttggtagtgcttacactagaacacagcatgtctatctagtgttgtctttgtgcttgaccatctgtgacatctatattgctttctggcctattkccaggtcttgattgaccattaccagtcccttcttacaaaatactaaaaacacctgggtgtgtaaatagcggaggtaatggaaggactgaggcagcttcaa

SEQ ID NO: 333679 - DNA, 201 bp, Homo sapiens
tttgtttatctattcatcagttgattaatttttttggctgtttataaatctgctgtgaacatttttatacaagtttttgtgggtccatttcctttcttaadttattttagatttggggtatatgtgcaggtttgttacatgtgcatacattttcagtgctcttgtatttacattttaatctggatgttatatctcacttta

SEQ ID NO: 333680 - DNA, 201 bp, Homo sapiens
aacctccacctcccaggttcaagggattctcctgcctcagcctcctgagtagctgggattacaggcatgtgccaccacgcccgggtaattttgtatttgtrgtagagacgggatttctccatggtcaggctagtacctaactcccaacctgaggtgatccgcccacctcggcctctgaaagtgctgggattacaggtgtga

SEQ ID NO: 333681 - DNA, 201 bp, Homo sapiens
gtaaacacacaaatcagtgccctgtcaaaacagaccactcggctctaccaatcagcaggatgtgggtggggccagataagagaataaaagcaggctgcccragccagcggtggcaacccgctcgggtccccttccacactgtggaagctttgttcttttgctctttgcaataaatcttgctactgctcactctttgggtcc

SEQ ID NO: 333682 - DNA, 201 bp, Homo sapiens; identical to SEQ ID NO: 70124

SEQ ID NO: 333683 - DNA, 201 bp, Homo sapiens
ggacagaaaagcgagacgcccctcagtccaccctgtgccgactctgctacctcagaggcagcaggacaaaggcccgtgcatcccgccagcgtgcccagcgtgcccagcgtgcagccgtcgctgttagaggacagcccgctggtacaggcgctcagtgggctgcacctgtccgcagacaggctggaagacagcaataagctc

SEQ ID NO: 333684 - DNA, 201 bp, Homo sapiens
tctttttatatctgtaactaagctctgattctctgggcaagaatgacattctctgctctgtagaactgtttgttgtaacctgtctttgggtttatgagaaytggctgaggggaagcaaagatgagaactttctaattcaacttttgcatgtttgctgacttctccctccttttgtcccttgatctgctaacccagataact

SEQ ID NO: 333685 - DNA, 201 bp, Homo sapiens
tctttttttttttttgagacagaattttgccctgtcgcccaggctagagtgcggtggtgtgaccttggcttgctgcaacctctgcttcccaggttcaagcrattctcctgcctcagcctcccaagtagctgggattctgagcacctgccaccacgcctggctaatttttgtattttagtagagaccgggtttcaccatgtt

SEQ ID NO: 333686 - DNA, 201 bp, Homo sapiens
aatctaaagaaagtatttcaactttagcagctggctaaataaatagataaatagcaaagctggtctgctctggattttgttctatggacttgagcctttgyggttcattgtaaaaatttttattccccttgacttatagaaattctgggtaagattagcttggtgatgttgcaagcaaaatattctcttgtcatctttcaa

SEQ ID NO: 333687 - DNA, 201 bp, Homo sapiens
agttctttttattaaaattcagaagttgaagtctttacaaacagtaaccatgagaccactaatattattagtgttttgttttgttttgttttgttttgtttctttgagatggagtcttgccctgtcaccaggctggagtgcagtggcatgatctcggctcactgcaacctccccctcccgtgttcaagcaattctcctgcc

SEQ ID NO: 333688 - DNA, 201 bp, Homo sapiens
tattgatgtataagtgacacaataaactgtacacgttcatactatgtatacatttttagactttttttgaaccatatgaatatattacctatttaaaaatytaaagaaagtatttcaactttagcagctggctaaataaatagataaatagcaaagctggtctgctctggattttgttctatggacttgagcctttgtggt

SEQ ID NO: 333689 - DNA, 201 bp, Homo sapiens
gaagaaaggagatgacgtagaaaaatatatcagtttcacaaactgagggttgctgtgagggacttactaaaaaactgaaagcagtgcaggcctcagctgtrggcagtgagcagtgcttattgcttcatgaactaagcgacttcagctcctttacttccctaaatctttcttatgtactcctttcttctgaaatgttaagat

SEQ ID NO: 333690 - DNA, 201 bp, Homo sapiens
gttggggaccagcctcaacaccacccgtagggtacccaaagtccggtggcaacaaaggaatgagaagagacaggttaagagtgcataaagagtgggggcckgggggccaattgcaaaatggaggctgcaaaaggcccagagttctggtcttcactctatttattgagtacaatcccttagatctaagaagcagatgtttag

SEQ ID NO: 333691 - DNA, 201 bp, Homo sapiens
gttggttacagaaaatgaaaggatccaagttatcaaaagtgggtaacaaagcaacatcaagaaactgtgtccttaaaactaagagaatatacaagacattmtaatccacatggttcttagggtgaaatctagcctctgggcagataagaaatcagggtgtgagtcacccctctttagctggaatgacaagagactcagacc

SEQ ID NO: 333692 - DNA, 201 bp, Homo sapiens
taatgttgtatttgagctttgggaagagtattaattgtaagggaagaacaaatctaagtagaaatctggcattggctttaaaagatgttcagtggactgtrgaaaaaattaaggatctcgtctctatgttctttttttctctgtagctgtgattgtaggtggaattgattcaatgtctcaatctttggcccttgcaaaaaa

SEQ ID NO: 333693 - DNA, 201 bp, Homo sapiens
gagctaatgttgtatttgagctttgggaagagtattaattgtaagggaagaacaaatctaagtagaaatctggcattggctttaaaagatgttcagtggastgtggaaaaaattaaggatctcgtctctatgttctttttttctctgtagctgtgattgtaggtggaattgattcaatgtctcaatctttggcccttgcaa

SEQ ID NO: 333694 - DNA, 201 bp, Homo sapiens
ccttggtgagcagaaagtgttcgttaagtcttgagctactgtctcatggtatagttaaagagtaggctctgagatgcacagtaaataccttttaaatcaartacaatggttgtacatgatgggtctgacagtcagttaagtaggagggaggtaggggtgtgctgttcttggctaaggtatatttttctgaattccaagggt

SEQ ID NO: 333695 - DNA, 201 bp, Homo sapiens
aaaatctaccagtgttggatagaaagactttgagaaacagattttgtaaccctgttaaattttttaatttcttaagttaaatttggtggagagctgtgggrtggggcagataactttatttgtttatttgttttgttttttttttgtcctgttctgaaatgtcactgtttctcctcaacctttcttggtagcaactcctgg

SEQ ID NO: 333696 - DNA, 201 bp, Homo sapiens
tattccctctaaattcaaggtaaaatgtttactttgatcattcctgcctctccctcttcttttcaccaaagcatctgaaaatgtgtcaactcttgattagktaagagctgtaatgcagattggcatcctgtctgtttgctttagagtgcatatcgtgcttatattatcaccgataagccagacatgccaggaattcacaac

SEQ ID NO: 333697 - DNA, 201 bp, Homo sapiens
gatcaattttgtgctgcaaggagaacaaaaaagatgaagtagatttgtctcaacaaattgccccggccatttattttctccatgttacgaaatgaatctaytttctttcaaaggttttgcagcaggactttgcatatgtagttttttttaaacttataatccatataacttgaatttatttaccctttttgttttaggatt

SEQ ID NO: 333698 - DNA, 201 bp, Homo sapiens
ttgtatgacttcgtacagatttaatataaagttatctcaattagataccccttttgaaagctgttgcttgcatacttcaagtgaaataaggatatggtcastaaaggtacaaagtttgggtaatggtatttgaaaatgtcattctccaattttactgagcttactttctgtcttaatagctgaaagggtttgttctctgcc

SEQ ID NO: 333699 - DNA, 201 bp, Homo sapiens
atagctcaaaaaacctctattaatggacctgcatcaaagtttgttactatcaagagatcaaaagttgtttgatgggcatggtggttcatgcttgtaatccsaggactttgggaggctgaggtgggaggattgcttgagaccaggagtttgagacctgcctgggtaacacattgagacaccatctatttatgtctgtttcag

SEQ ID NO: 333700 - DNA, 201 bp, Homo sapiens
ctggagtgcagtggtgcggtcttggctcactgcaacctctgccttccaggttcaagcaactctcccgcctcagcctcccaagtaatggattacaggcgcaycaccatgtccggctaattttgtatttttagtagagatggggtttcagcatgttggccaggctggtctcgaactcctgacctcaagtgatctacctgcctt

SEQ ID NO: 333701 - DNA, 201 bp, Homo sapiens
aactgtttcaaggagggattagtaaacacttcaaacttgtgcagagaagtttggaggataaggaccgtataaaggccagtggtgggaaagaactatcagckgcccagtgttacttttaaatagcaagaagcgttcatgcattttaacttttccagcttgccctacagtgtaggtgagaaggagtcaaaatagctggcagta

SEQ ID NO: 333702 - DNA, 201 bp, Homo sapiens
gctgaaagggtttgttctctgccacagatgctgactttaaggaagccctaggttaaagttaaagtatattaacgacaatcttggtagactttatgcatcartgggcgcacacttagggaaggatgcctggaacacatatgtgtgtcttgaggagttgagaattcttgctgtgagccatgtttatcagatttgtaaaacagt

SEQ ID NO: 333703 - DNA, 201 bp, Homo sapiens
tagtagagacagggtttttccttgttggtcagactggtctcgaactcccaacctcaggtgatctgcctggctcggcctcccaaactgctggggttacaggygtgagctaccatgcccagccagcatgctatgttctctaaagccttaattctctttcctcttacaggaatatcctttcttcccttctttgcttacttccag

SEQ ID NO: 333704 - DNA, 201 bp, Homo sapiens
atactaaactgcagaagctgggtattattttattccaaatttaagacgagcaaactaaggtgcagagatggtaggtaatttgcattagaccatacaaccaratggttgaatcaaggtttggcctcattctgacattcacacattcacagcacctgttcatgtgtcgcacgtggtgagatagttcatcagacttgaggtcag

SEQ ID NO: 333705 - DNA, 201 bp, Homo sapiens
ggggattacccttctcttaagtctttgccaatctgccatgtgaaaataaaaccttactttagtgttcacgttttgattactaataaggttaacatctttgyatatttggagttgggtcttgttcctttgctaatgtcaggcatcagcaagttacttgatacttgatcttaaggagaggggactagaatgagtaaccttcag

SEQ ID NO: 333706 - DNA, 201 bp, Homo sapiens
aaaacattcctcttctctgccaccatgaccaagaaggtgaaatttgctaggacttttgtttcttctttatgagaattgatacataaagtaaatagtaatamcaataaggaaaaataaattgctttagtccgttttcacactgctataaagaactatctgagactaggtaatttatacagaaaagaggtttaattgactcac

SEQ ID NO: 333707 - DNA, 201 bp, Homo sapiens
ggattcctagtagcattcctggcctttacccagtagataacagcatcacacagtcttccacctgtgataatcagaaatatttccagacattaccagtgtcscttgaggatggcagaatcacccctggatgagaactgttgtgtctcttgtctttgtatttaactgctgtagacaagatgctgtctcatttgattttcataa

SEQ ID NO: 333708 - DNA, 201 bp, Homo sapiens
attacatccatcgagtaggtcgaacagctagagctgggcgctccggaaaggctattacttttgtcacacagtaagtaaatcagctttagggccgagcaatrtagagaaaagagcagaactttcaagccactggctgagaacctgacactaccatttactacactaatcactttcatactgaaaaccaggatgaaggagttg

SEQ ID NO: 333709 - DNA, 201 bp, Homo sapiens
atatgggcatgtatttctattcctgttcactagatagaaaccaaggttcagagaggttatgtgatttgcaggtaattgtgtaactggcagatgggaaggaycagagctgtaatccagctctgcctcgagatccagtgctgttttttaaaataccatgcagcctgcgaccatgtagatatgctttgtagatttatctgtctg

SEQ ID NO: 333710 - DNA, 201 bp, Homo sapiens
ccctggtgatcagccccttctgcactcggatctattccgcaagcctacgcgcctatattcactgggccccacctgcctagcggacgggtgcaatccccggmaagcccgcagggggcgcgcagagcacgtcgtccggggagaactaaaactacatttcccagcatcccgcgcgccgcagacccacttccggagacctcacac

SEQ ID NO: 333711 - DNA, 201 bp, Homo sapiens
aaactaccaggttttccaacacaggatgatgaggttatgatgctgacagaacgcgtcgctgaagcccaaaggtttgcccgaatggtatgcatctttctttwctcaccagtgtctgtgcaaacaatgttaactgtgtgccactttattatattaaccctcatactaaactgcagaagctgggtattattttattccaaattt

SEQ ID NO: 333712 - DNA, 201 bp, Homo sapiens
ccatccccaagatagctcatatgtatctgcaaatattctagaattagaaaaaatctgaagtccgaaacactgctggtcccaagcatttcagataagggatrctcaccctgtaagtagtagtaacagtaatagtggtgatgagaagattctagaggaaaaccattggaagtgctgcctgctttctggagttctggtctgagg

SEQ ID NO: 333713 - DNA, 201 bp, Homo sapiens
ttatggtacctttgtgtgaaggataatttagaggaggtaggagatacaagggaaaggaaaggagaaaggggtaccagaatcgggaggcaaatggttgagcrgggccgtacctgttcctatttgttatgagttgtgcctcccacttggggctaattctccattaacattgtgttttctcgatgggactctccagggtggctt

SEQ ID NO: 333714 - DNA, 201 bp, Homo sapiens
ttactgagcttactttctgtcttaatagctgaaagggtttgttctctgccacagatgctgactttaaggaagccctaggttaaagttaaagtatattaacracaatcttggtagactttatgcatcaatgggcgcacacttagggaaggatgcctggaacacatatgtgtgtcttgaggagttgagaattcttgctgtgag

SEQ ID NO: 333715 - DNA, 201 bp, Homo sapiens
taagtaaaaacaagacatgtaggtttgctctattagtcagtcattcctgtgctctcctgtcctctaaggtgagataggtcgtgctgctgatacccttacaraagtacgttttaatgtcctaggactactgaaacaaagtaccaggaactgggtgactttcaataacaactttattctctcatggtcctggattttaagatg

SEQ ID NO: 333716 - DNA, 201 bp, Homo sapiens
tacatccatcgagtaggtcgaacagctagagctgggcgctccggaaaggctattacttttgtcacacagtaagtaaatcagctttagggccgagcaatgtrgagaaaagagcagaactttcaagccactggctgagaacctgacactaccatttactacactaatcactttcatactgaaaaccaggatgaaggagttgaa

SEQ ID NO: 333717 - DNA, 201 bp, Homo sapiens
tttaattttttgttgcttccatatttctgttttgacctgtgaagccccattcaaaacttagggggaaaaacctttaaaaaatttatgtctgtttgttctcrtgtttgtctattttgtgttttgtattccaaaacataggttaagttttccaacatttctttttcattacctcagagtaagcgcctaggatcccttaataag

SEQ ID NO: 333718 - DNA, 201 bp, Homo sapiens
ttgtatatttgtctgtctcaccactgggttttgagcttatctaagagagaggccatgtcttttctgtttattcaactttcctctctccccagttcatcagrtatttattaagcgtctactttgtgcccagcattgtgtcattgtagaaaacacagaaatagcgcaaagagattacttggctgttgaatttctttttctttt

SEQ ID NO: 333719 - DNA, 201 bp, Homo sapiens
acaatgttaactgtgtgccactttattatattaaccctcatactaaactgcagaagctgggtattattttattccaaatttaagacgagcaaactaaggtkcagagatggtaggtaatttgcattagaccatacaaccaaatggttgaatcaaggtttggcctcattctgacattcacacattcacagcacctgttcatgt

SEQ ID NO: 333720 - DNA, 201 bp, Homo sapiens
gctgttcttggctaaggtatatttttctgaattccaagggtgtgacagatgtgttgtgtgaagcttgtgaccagttgggatggacaaaacccaccaagatycagattgaagctattcctttggccttacaaggtaggttgtatgacttcgtacagatttaatataaagttatctcaattagataccccttttgaaagctgt

SEQ ID NO: 333721 - DNA, 201 bp, Homo sapiens
accttttaaatcaaatacaatggttgtacatgatgggtctgacagtcagttaagtaggagggaggtaggggtgtgctgttcttggctaaggtatatttttstgaattccaagggtgtgacagatgtgttgtgtgaagcttgtgaccagttgggatggacaaaacccaccaagattcagattgaagctattcctttggcctt

SEQ ID NO: 333722 - DNA, 201 bp, Homo sapiens
attttgaaaggctaggcctgagtgtctattctaataggtgtaatttcttcccacagatcatcaatttctacatgaatatgctgatggagcgaagtaaagaraagggcttgccaagtgtgcatgcatttaatacctttttcttcactaaattaaaaacggctggttatcaggcagtgaaacgttggacaaagaaagtagatg

SEQ ID NO: 333723 - DNA, 201 bp, Homo sapiens
taagttttcatcttatgtagtttaaatgccacactcaaaaatacaagcatagctataaactttttagaatcagtaattttagtgtttggaattctgctctrtatattaaaattaagacaaggacgttaagacaaaataggctatgtatgagttctttgagaacagtacgttttagaaaactcattgttcctctgaatttta

SEQ ID NO: 333724 - DNA, 201 bp, Homo sapiens
tggaactcttgtccttttcttcccaacttctacatcttctatcagttgtaccagctctactgtcttgcggtacgtgtttatggatctggctttccctactrgacagtgagctgctcagtggcagggaccctttcttaatgcacgtagtcggtgcacagtaaatgaatgtgtatgaaagaatttgaacacttagggtttacg

SEQ ID NO: 333725 - DNA, 201 bp, Homo sapiens
ttctccttccctgttcatttgtttccattttctctcattgctgatagcagtgtaagtcgttgaattctgttacgtttattgcttctattctagctcttctrtagtaacaaaggtatcaaaaatggttctgaagtaaaattctgccataatattatagttattgagctgatacctgttaagagcaatatgaataaaattatg

SEQ ID NO: 333726 - DNA, 201 bp, Homo sapiens
gtcccaaccattttggataagggatactgaacttgtaagacatgtacttacatactttaaatacatatgattcagttaaccatgctgtgagtaaactaaayccacaaataggatattctttttttcttacctcaagatgcaaatgatttgatacattttatttaaacaacttcctaagtacaggctagagtcaaagtatat

SEQ ID NO: 333727 - DNA, 201 bp, Homo sapiens
aaatatttaaaaagtttcttttgggagcatttttgttttttgtttgtgtttttctttgttgttgttgttgttgttttctgagacagggtctcactctgtcrcccaggctggagtgcagtgactctgtcatggctcactgcagccttgacctccccgggctcagagtatccttccaggtcggcctcctgagtagctgggact

SEQ ID NO: 333728 - DNA, 201 bp, Homo sapiens
gactcagaaagattacagtagtcttcccaggtctttttactcctcatgcttcagtctccttgccttaccacaatatgggaataccagttataccattgaarctgcctcaacaggaatttttttttttttttttttttttgacacagagtctccctgtgttgcccaggctgaagtgcagtggtgtgatctcagctcactgca

SEQ ID NO: 333729 - DNA, 201 bp, Homo sapiens
ttcttttttaaaatagtatttatgactacttaaattctgccctggtatattttaggaatgtgggattatttagtgtactgtttagtcaagtttgagctttrtggtgttgatagaagccaacaagatggcttttattattttatgcacatggactccaggaatgtgtcaatactccctgggatcatgttcctcacttaactt

SEQ ID NO: 333730 - DNA, 201 bp, Homo sapiens
cgcgccactgcactccatcctgggcgacacagtgagactccatttccaaaaaaaaaaaaaaaaaaaacctcacctgaattcattccttggcaaaacctacktgaactgacatgaagctgtttatattttttcttttttaaaatctctgtaaaaatgagtattttcacattttgctgtagataacatgtttgattacagagt

SEQ ID NO: 333731 - DNA, 201 bp, Homo sapiens
cctcagtttacctgcctttatctgctgatcctgactttattggtatttgtcttctctctcaccctgctgtcccctccttcaccaggatgaaaatgagcagsaaggcccaaactttaggatctaggatctggaacttctcctttattactttattggattgacttctctagatcaagctttttaaaaatctgcctctcaatc

SEQ ID NO: 333732 - DNA, 201 bp, Homo sapiens
cagcagaagaggtaaggaaaacgtgtgacaaaagctactaaaagttaggatctttccctacattgagccatttgctccctattaataattagttgtttaaraaccattctattttatccttcctgtgctttttctgtctgaattactctttttgagtgttatcatctattctaaagagattaaagaggtgttttagcagga

SEQ ID NO: 333733 - DNA, 201 bp, Homo sapiens
tttagtagagatggggttttgccatgttagccaggctggtctcaaactcctggcctcaagtaagtgatccgcccacctcagcctcccagagtgctgggatyacaggtgtgagccaccacacctggcaggtggattacttcttaaagcacttctttgtgttaaaacaggaaatgaaccagtgttaacagtgtgtgttactga

SEQ ID NO: 333734 - DNA, 201 bp, Homo sapiens
agaacctgatgcagcatccttatatatcatttattcatttattgtatctttccctcaaatgggaaacctattattttacctgttttgtttggttggttttrtattttgaaagtgaaaataatctctaggttggatttattttacttattatctgttcttatctttcttacaaactctttttttagtggattatcaaacagt

SEQ ID NO: 333735 - DNA, 201 bp, Homo sapiens
agcttccttggtttctggaactctttcctcttgaaaaatagaatagtgatgtatagcatgacactcatttatgtcattcttttttttttttttcacttcaracttacgattccagaggtaatctctgataggcacctaggggagatgtatttccatggctgtcatgtgcttcaccgtccttatctctctgcctgattcctt

SEQ ID NO: 333736 - DNA, 201 bp, Homo sapiens
ttggtttctggaactctttcctcttgaaaaatagaatagtgatgtatagcatgacactcatttatgtcattcttttttttttttttcacttcagacttacrattccagaggtaatctctgataggcacctaggggagatgtatttccatggctgtcatgtgcttcaccgtccttatctctctgcctgattcctttcacctc

SEQ ID NO: 333737 - DNA, 201 bp, Homo sapiens; identical to SEQ ID NO: 70154

SEQ ID NO: 333738 - DNA, 201 bp, Homo sapiens
ttgggaggctgagacgggcggatcacgaggtcaggagatgaagaccatcctggctaatacagtgaaaccctgtctctactaaaaatacaaaaaattagccrggcgtggtggcgggcgcctgtaagtcctagctactcgggaggctgaggcaggagaatggcgtgaacccaggaggcagagcttgcagtgagccgaaatcgc

SEQ ID NO: 333739 - DNA, 201 bp, Homo sapiens
ttaaataattatatatgtaatatgtactatattaaataattatatatgtaatatgtactatattaaatatatatgtaatatattaaataatatattatatrtaatatattaaataatatttatatatgtgatatgtaatatattaaataatattttatatatgtaatatataatacattaagtaatatataaaatatatat

SEQ ID NO: 333740 - DNA, 201 bp, Homo sapiens
ttcctggtttctataatattactaggttagctcctgtgagtgaatgacctgaaccatactattcaaatgctgctgttagtctcttggactttgtggttgakaagggtaaatttaatttgaaaatcagaatggggaggtcaaggtgaaaatctagagaggtaaaattggaaaaatggcttttgtccccccaaaagttgtctt

SEQ ID NO: 333741 - DNA, 201 bp, Homo sapiens; identical to SEQ ID NO: 70157

SEQ ID NO: 333742 - DNA, 201 bp, Homo sapiens
aaagtatattatctggtatttactcaacctgtcttttacacacttgataatttttgttttgttttgttttgttttgttttgttttgttttttgagacagagtcttgctctgcccccaggctggagtgtagtggcaccatcttggctcactgcaaccttcgccttccaggttcaagtgattatcctgcctcagtctccccag

SEQ ID NO: 333743 - DNA, 201 bp, Homo sapiens
caaagtatattatctggtatttactcaacctgtcttttacacacttgataatttttgttttgttttgttttgttttgttttgttttgttttttgagacagagtcttgctctgcccccaggctggagtgtagtggcaccatcttggctcactgcaaccttcgccttccaggttcaagtgattatcctgcctcagtctcccca

SEQ ID NO: 333744 - DNA, 201 bp, Homo sapiens
taatttttcaaagtatattatctggtatttactcaacctgtcttttacacacttgataatttttgttttgttttgttttgttttgttttgttttgttttttgagacagagtcttgctctgcccccaggctggagtgtagtggcaccatcttggctcactgcaaccttcgccttccaggttcaagtgattatcctgcctcag

SEQ ID NO: 333745 - DNA, 201 bp, Homo sapiens
tgttttcactggagctccttagagttccataacttaatgtctgaagttattttgagggagctgttttaaattgtccaattctgcagatagggagaggaggktatagaaattattctaccactcctagctgaaacttcaggaggtttttgatatgccagattgtaatccacaagttagaaaattcaaataataagtaattct

SEQ ID NO: 333746 - DNA, 201 bp, Homo sapiens
aagaagaatattacctattacgactccatgggtgggataaacaatgaagcctgcagaatactcttgtaagtagggagttgaggacagaagagtttgatatygggtataggtggtgtttttccagtaattgaactcagttgtttgataccttcaatggagtgattgataaaatcttcatattaagtaaaaatgcatattttg

SEQ ID NO: 333747 - DNA, 201 bp, Homo sapiens
atcgtttgagcccaggatttcaaggctacggtcagctgtgattgtgccactgcactgcagcctgggtgacagagcaagacactgtctcaaaaaaaaaaaamaaaaacgaaaaaacaccaacattcaagtggagggtggcagaactagtaagtcatttagcagggcaagggatagacaagaaactggcaacatttgcctttg

SEQ ID NO: 333748 - DNA, 201 bp, Homo sapiens
gaaagtcaaaccatcactgccatgtatctgcatatgaaaaatcttttcctattaaacctgttccaagtccatcttggagtggttcatgtcgtcgaagtctyttgagccccaagaaaactcagaggcgacatgttagtacagcagaagaggtaaggaaaacgtgtgacaaaagctactaaaagttaggatctttccctacat

SEQ ID NO: 333749 - DNA, 201 bp, Homo sapiens
gagatgtgatatcgctagtgccaccatcagaaagaaacgtctggaccctcctgctcaggttatgaaaatccccttaactgccacaatttgcttacctggcwcatcgcctcctggtaattcccttgaaccgtctctttcttggtgtaccctaacgtgatctctggatctatgcctcgtttctctttccttgagcttggtgat

SEQ ID NO: 333750 - DNA, 201 bp, Homo sapiens
tgcagttgttgacttgcattgcggctttggaactcttgtccttttcttcccaacttctacatcttctatcagttgtaccagctctactgtcttgcggtacstgtttatggatctggctttccctactggacagtgagctgctcagtggcagggaccctttcttaatgcacgtagtcggtgcacagtaaatgaatgtgtatg

SEQ ID NO: 333751 - DNA, 201 bp, Homo sapiens
gggaaaaactgataaaccgattttcttcatctcataaacacagagactttttttcttattctcaggttgtggactttagaaagaagaatattacctattaygactccatgggtgggataaacaatgaagcctgcagaatactcttgtaagtagggagttgaggacagaagagtttgatatcgggtataggtggtgtttttc

SEQ ID NO: 333752 - DNA, 201 bp, Homo sapiens; identical to SEQ ID NO: 70153

SEQ ID NO: 333753 - DNA, 201 bp, Homo sapiens
tttgtctgttccttttttagtgtcattatggattcagtattttgtaatccactataattgttatacttttaatgctcacattctcagaaatttggctagtsgaagccctttaagcttgcttctgtctgtttgaccttaactcatgaattttgggtaacacccttgctttctgtcattgcaggatgcccttgtactgtttct

SEQ ID NO: 333754 - DNA, 201 bp, Homo sapiens
tgtgtgagagacaaatatttctactgttacaactttaaacttaagtataataattttctagttctttactaagactcattttcattagcatcatgtttctrtcctcaaaattatagtaatagatgctaagcatagatactgattacaaaggaacaaagttacaattcattttgaaagtaaattagcttattttaattatca

SEQ ID NO: 333755 - DNA, 201 bp, Homo sapiens
cagatgaatggaagtgactgtgggatgtttgcctgcaaatatgctgactgtattaccaaagacagaccaatcaacttcacacaggtgagctgagccttccrtagggagctctaggattactttgtctccaagctgccctgtagatgtttttctctccagttgttctctttaggggcctctaccctaacctttagcatgctt

SEQ ID NO: 333756 - DNA, 201 bp, Homo sapiens
gttcaagatcagcctagctaacatggtgaaaccctgtctctacaaaaatacaaaaatcacctgggtgtggcggcgggtgcctgtaatcccagctattcggsaggctgaggcgggagaatcacttgaacctgggaggtggaggttgctgtgagccaaggtcgtgccactgcctccagtctgagtgacagagcaagattccat

SEQ ID NO: 333757 - DNA, 201 bp, Homo sapiens
ctcaaatgggaaacctattattttacctgttttgtttggttggttttatattttgaaagtgaaaataatctctaggttggatttattttacttattatctrttcttatctttcttacaaactctttttttagtggattatcaaacagttttgcgggaaagtcaaaccatcactgccatgtatctgcatatgaaaaatcttt

SEQ ID NO: 333758 - DNA, 201 bp, Homo sapiens
attagttgtttaagaaccattctattttatccttcctgtgctttttctgtctgaattactctttttgagtgttatcatctattctaaagagattaaagagrtgttttagcaggacttcattatttgtcttactattatatcttctatgcctgctggacagctgactttacttaatctttaatgttgcctgaatggtttctc

SEQ ID NO: 333759 - DNA, 201 bp, Homo sapiens
ggacttcattatttgtcttactattatatcttctatgcctgctggacagctgactttacttaatctttaatgttgcctgaatggtttctcatacatcaaastatctctctttgatctttgctagacccttcctaaaccgttgtctcctatggaaaaattgttactcttcctccgtagtttttgataaaattttatttcagt

SEQ ID NO: 333760 - DNA, 201 bp, Homo sapiens
tgagccagaagaatagctgctgactgatgcctgggggaccaagcccataattgtggagctggagccgcactgtgtcccttgcttcagtctgatctttgggragcctgcacagttctgacctcagttaagagctaagggaagagatttgggaatgtttggccctgtgtaacagcaaaaggattcattggtgagggtgtctgg

SEQ ID NO: 333761 - DNA, 201 bp, Homo sapiens
aacagctgtcccacagtgtatattccctatcttcttataccccagatgttgcatttggatccaaagattctggtactcttcatcatccccatcatcaccaytctgttccacatcagccagataacttagcagcttcaaatacacaatctgaaggtaaacatggtatcatataactacatttttagtcctaatagccaatta

SEQ ID NO: 333762 - DNA, 201 bp, Homo sapiens
agaactgctttacagtgttgtcataagtcaagcatttgggactcagaaaattattgaaatttgcactttgcatattttatatggtataaagttattacttyaaacaaaatgaaaattaggagtattatttataaagttattggtggtaatttataaaaaaacagtttactagtgtcctaaaaattattttgtgctctctat

SEQ ID NO: 333763 - DNA, 201 bp, Homo sapiens
aagatgaaacaacaattttcagacattggataacaggtagtaccaggcagtgatccctgaggaagggaaataaaaggtatgtatgctataatatccccagytttctagggtggggtgtgtgtgttgtgaaggagggactggtagagtctgtgcagaggggcttccctccagtctttggctgagtaccaatttgtgcatgta

SEQ ID NO: 333764 - DNA, 201 bp, Homo sapiens
ctacaggactctgtcccttttaaaaaatataattcagcaccttaattaattatttttatacttcaaaacactcgtcttagggttttttcaggttttaaaaygtaacattagctagcttctttaactttatcatgctatgcaattattgcttcctttactcttaagatcctaattttctttttttatttgagacggagtctt

SEQ ID NO: 333765 - DNA, 201 bp, Homo sapiens
atgagccctaggcactaaattcctgtaacatccacctccccccataatcattttaatagttaatatatatccacacatttccagatatgtactcagggtayagcaccacctctgattaagagctatctctgtaaagttatcaaaagaaccaaaaccagattgatttttctcaacctttttaatatgtgttataaatggctt

SEQ ID NO: 333766 - DNA, 201 bp, Homo sapiens
gaaatagagaattattattcttgtgttttcactggagctccttagagttccataacttaatgtctgaagttattttgagggagctgttttaaattgtccarttctgcagatagggagaggaggttatagaaattattctaccactcctagctgaaacttcaggaggtttttgatatgccagattgtaatccacaagttaga

SEQ ID NO: 333767 - DNA, 201 bp, Homo sapiens
agctggagtgcagtggcgcgatctcggctcactgcaacctccgtctcccgggttcaagcaattctcctgcctcagcctcctgagtagctgggactacaggygggcagcaccgtgccgggctaattttttgtattttcagtagagacggagtttcaccatgttagccaggatggtctcgatctactgacttcatgatccacc

SEQ ID NO: 333768 - DNA, 201 bp, Homo sapiens
tattcttgtgttttcactggagctccttagagttccataacttaatgtctgaagttattttgagggagctgttttaaattgtccaattctgcagatagggmgaggaggttatagaaattattctaccactcctagctgaaacttcaggaggtttttgatatgccagattgtaatccacaagttagaaaattcaaataataa

SEQ ID NO: 333769 - DNA, 201 bp, Homo sapiens
gtgaacccgttatatagctagttgactgatttttgacaaaggtgctaggactacagaaagggaaaggacagtctcttcactaaatggtgttgggaaaattmtatttccatatgtagaagaatgaaattaggtccttatctcataccatatgcaaaaatcaactaaaaatggaataaagactttaagactagaaactctaaa

SEQ ID NO: 333770 - DNA, 201 bp, Homo sapiens
actaaatacatatttaccttctagtgaacattctttgaattaaattgtataacaaatattttgcctgtttttttccttgaagcctgaattatttcattagwttgtctatgtgttttcctttcttgttagtatgtagtattaatacgtataatatataaatataattatattgagttctgaaatagtcttagttctgctata

SEQ ID NO: 333771 - DNA, 201 bp, Homo sapiens
cttgcattgcggctttggaactcttgtccttttcttcccaacttctacatcttctatcagttgtaccagctctactgtcttgcggtacgtgtttatggatmtggctttccctactggacagtgagctgctcagtggcagggaccctttcttaatgcacgtagtcggtgcacagtaaatgaatgtgtatgaaagaatttgaa

SEQ ID NO: 333772 - DNA, 201 bp, Homo sapiens
ccaaaggcatgttattaatatcttatgtaatttactttaaactaaataagacttttttctcctgtgttcccctttctcctgtgtccactgctcatattcayctgccttccctaaaaaaggaatatttgagggatgataagcactagatgccagctatagagacctcaacagaaaccataatcccaagaatcactccgagac

SEQ ID NO: 333773 - DNA, 201 bp, Homo sapiens
ctcccaaagtgctggaattacaggcatgagccactgtgttaggcccataattcttaattatcttaaggattctgcctgagctttggcagagctaggattcygtttacatgctagtttgagaaatacttgccttattggatgtgtttaaactgttttttttttttgttttcttatagacagttcaagaagaagaaagagaga

SEQ ID NO: 333774 - DNA, 201 bp, Homo sapiens
ttgaacctgggaggtggaggttgctgtgagccaaggtcgtgccactgcctccagtctgagtgacagagcaagattccatctcaaaaaaaaaaaaaaaaaaactcaaaattagtaagccttagatataagacagggtttttgagttcacaatattcttcttgccaatttgccaatttttcccattagatagtataaagagac

SEQ ID NO: 333775 - DNA, 201 bp, Homo sapiens
attaaggcattatctcactttttctcaaaatgtggtccatggatgacctgcattggaatcatctctcataggcctcttcattcttgtaactatgagggagkgtggtggagacaggcatttttaacaaacatctcaggtgtattttaaagtctgagaaccactgaatttaccttttcttgttgaagatttgaacattgaaga

SEQ ID NO: 333776 - DNA, 201 bp, Homo sapiens
gaagacttaaagagaattatgcactgtttgattttctttagatcttgtctgatttggattcagaccacatgtaatgattttaaagagttgatttcattgartttagaatattcagctgtgtttctctagtctgagtcttgaagaaaaaagaaaatgtattatgctaagaataagtacctcaaactttccaggtaatgataa

SEQ ID NO: 333777 - DNA, 201 bp, Homo sapiens
cctcacctagcctcttaatggagtgggaaggggcagggacttggaaattagaggctcaaaatgtaaagaaggctgatggcaagcctggggagaggcctgaraatgagggaagggctgagggctgtgaggagtcctcacacaaagaccctagcacaggtcttcggcagtgaacatgcccctggccctccgcagggtggagtc

SEQ ID NO: 333778 - DNA, 201 bp, Homo sapiens
tgaagatttgaacattgaagaagacattcactcattggtattctcactctttaaggctcctattctgcagttcatctcttctgaacaaataagtattagcygaccatgttgcagcatgagggaatactgtgggatttctttataggaatccagttttacttccctttctacctaagttctactcattttagatcacttata

SEQ ID NO: 333779 - DNA, 201 bp, Homo sapiens
gctttccaaaatcgcctccatttatgtatgatattttttaaatggacattgaaaaagttatattattattaaatatttgaggtattgggggagaagttacrgtcttcacctcctaactccaatttattttaagtatattaattacactacagtttttaaactgatctgttcctaagcctaaacctgtaggtacctgtttta

SEQ ID NO: 333780 - DNA, 201 bp, Homo sapiens
tcatatttaaattttctcagttgacccaaaagtatcttttatagttagtttagttttgcatctggaagttattggctttgtcacttataactagaacagcctttttttgttttgttttgttttgttttgttttgtttttttgttttgttgagacggagccttgctctgtcggccaggctggaatgcagtggtgtgatctcg

SEQ ID NO: 333781 - DNA, 201 bp, Homo sapiens
tattattttgtcttcattaaagattttctatatgcatcatttagcaggtggcttttttaatgcaataaagccatgctgttattttaaaaaaatgttattayagaagtagtacaaatactttgggaaagtttagaaaatatagttaagaaaaataaaaaataaaaacatcacattgccaccagcctgagatcaactctgtaa

SEQ ID NO: 333782 - DNA, 201 bp, Homo sapiens
agggatagagtgctggtgggtgtccagggcatgctgcaccatctctgcgatgtactggttgatgaggatgatgccagtgtcatcccggtttagaaattgcyggaaagtgtcttcgatctcattgatggtcgtatccttctccaccaccaggaaattggggtggcagttcttgttaagctcccctatgctgcccagcaggaa

SEQ ID NO: 333783 - DNA, 201 bp, Homo sapiens
atttatttttaattattattattattattttttgagatggagtctcgctctgtcacccaggctagagtgtaatggcgcgatcttgactcactgcaacctcygcctcctgggttcaagcaattcacctgcctcagcctcccgagtagctaggattacagctgcctgccaccatgcccggctaatttttgtacttttagtaga

SEQ ID NO: 333784 - DNA, 201 bp, Homo sapiens
actcctcatgcttcagtctccttgccttaccacaatatgggaataccagttataccattgaaactgcctcaacaggaatttttttttttttttttttttttgacacagagtctccctgtgttgcccaggctgaagtgcagtggtgtgatctcagctcactgcaacctctgcctcctaggttcaagcaattctcctgcctta

SEQ ID NO: 333785 - DNA, 201 bp, Homo sapiens
tggctcatcgcctcctggtaattcccttgaaccgtctctttcttggtgtaccctaacgtgatctctggatctatgcctcgtttctctttccttgagcttgrtgatttctgtttatcggtgcctgtgcagtatttccactatcttgttagcagtaacttgcttctttatcactttcaagtcagccttgttaaagtcatttta

SEQ ID NO: 333786 - DNA, 201 bp, Homo sapiens
tagtcctaatagccaattaactgttcattagctcattacaggcaacattgtaatatacatataaataaatgagcataccgaatctgaaaatatgaagtccraaatgttccaaaatctgaaactttttgaataccaacatgatactcaggaaatgctcagtggagcatttgggattttggatgtttggatttgggatgctca

SEQ ID NO: 333787 - DNA, 201 bp, Homo sapiens
aatccccttaactgccacaatttgcttacctggctcatcgcctcctggtaattcccttgaaccgtctctttcttggtgtaccctaacgtgatctctggatmtatgcctcgtttctctttccttgagcttggtgatttctgtttatcggtgcctgtgcagtatttccactatcttgttagcagtaacttgcttctttatcac

SEQ ID NO: 333788 - DNA, 201 bp, Homo sapiens
taagttagtgtaaggattttagactttctttgtgagggtcctgtatttaatattcagtgtacatcaacaatatgtttcataatgagagtggtctacatttsgtcacgttccttttcattttctagaactagtgtttatgattctcgagcacgagaaagattgcgccagattgaagaacagaaggcattggccttacagctt

SEQ ID NO: 333789 - DNA, 201 bp, Homo sapiens
attattttttgagatggagtctcgctctgtcacccaggctagagtgtaatggcgcgatcttgactcactgcaacctccgcctcctgggttcaagcaattcmcctgcctcagcctcccgagtagctaggattacagctgcctgccaccatgcccggctaatttttgtacttttagtagagatggggtttcgccatgttggcc

SEQ ID NO: 333790 - DNA, 201 bp, Homo sapiens
aatactcttgtaagtagggagttgaggacagaagagtttgatatcgggtataggtggtgtttttccagtaattgaactcagttgtttgataccttcaatgsagtgattgataaaatcttcatattaagtaaaaatgcatattttgtatctaagtaagtttagtttaaaaacaataccaaagtatgccctaatgggagcaat

SEQ ID NO: 333791 - DNA, 201 bp, Homo sapiens
atttaagcacgctctttgacttatgacaggtttattgggacataaccctatcataaatcaaggaacatccacagatttctttatcccacttactctgaagytttatctttcagagattgcaggagcgggaacattcagtacatgattcagtagaactacatcttcgtgtacctcttgaaaaggagattcctgttactgttg

SEQ ID NO: 333792 - DNA, 201 bp, Homo sapiens
tttattttaagtatattaattacactacagtttttaaactgatctgttcctaagcctaaacctgtaggtacctgttttattttagaaggttatttttacarcaaaagaaaactgggttgggtatcttttcctaagtaccttctttgcataagcatccctggctaatctgggtatactcaagcttcacagctgtggaggatt

SEQ ID NO: 333793 - DNA, 201 bp, Homo sapiens
aaatgagtgccagttcacatgtccataataatgatgggagctatcttaaaaagcaccattttcaaagtaccatacttcgtaggctttcaaagttactgccyttgagaagctaacatcctgatggagtattattaggtatccttaagtattgatactcattgaagaatacttaattttggccagacacagtgggtcatgcct

SEQ ID NO: 333794 - DNA, 201 bp, Homo sapiens
ggttcttatttttaatctaagaaggaaagaagcttggaaagatgtcattttttttgttgttggtcttccaggagattcctcagcagatgaatggaagtgaytgtgggatgtttgcctgcaaatatgctgactgtattaccaaagacagaccaatcaacttcacacaggtgagctgagccttccatagggagctctaggatt

SEQ ID NO: 333795 - DNA, 201 bp, Homo sapiens
ccagaagaaatattacgtgttcttcaggcggaagaagaatatcaaatggaaatgtcagtctacacaaaggaatgaagagtggaattgctctcattttttcmtacctctagaagacaggtgactaaggcagaactaaaacaacatactgtgggatttataacatacagaagtaaaatataatcacagcacaaagaaggagac

SEQ ID NO: 333796 - DNA, 201 bp, Homo sapiens
gtctaatagttacttttaaaaaagtaaaatgggccgagtgcagtggctcatgcctgtaatcccagcattttgggaggccgaggcgggtggatcacttgggktcaggagtttgagaccagcctggccaacatggtgaaaccccgtctctacaaaaaatacaaaaattagccaggcatggtggtgcatgcctgtaatctcagc

SEQ ID NO: 333797 - DNA, 201 bp, Homo sapiens
ttgagcccaggatttcaaggctacggtcagctgtgattgtgccactgcactgcagcctgggtgacagagcaagacactgtctcaaaaaaaaaaaaaaaaaacgaaaaaacaccaacattcaagtggagggtggcagaactagtaagtcatttagcagggcaagggatagacaagaaactggcaacatttgcctttgatgac

SEQ ID NO: 333798 - DNA, 201 bp, Homo sapiens; identical to SEQ ID NO: 70158

SEQ ID NO: 333799 - DNA, 201 bp, Homo sapiens; identical to SEQ ID NO: 70159

SEQ ID NO: 333800 - DNA, 201 bp, Homo sapiens; identical to SEQ ID NO: 70160

SEQ ID NO: 333801 - DNA, 201 bp, Homo sapiens
ggttgttccagactttaggaattaatatggaaacaaggatctgaatgttgtgctgaaaaagagaagggaggactagatgaagtggaaagaagtaatcgggrattactgggaaggaatagaaaccaaaatgttagaagtaaactgattaacagtaaatttataaacaatcgaatggtgataaatatagtctgaggattatat

SEQ ID NO: 333802 - DNA, 201 bp, Homo sapiens
aaaactacatgtaaccaagaatgaataatttaaaagaccagaaatacaactgagactgtttgttgaaaaccttgcaaaagaaagaagtatggggaaaggcrtatcaggtctagacaaaagcattgaaaattaagggtgtctctgtgtccctacagcaacacatgccatacttccggaagcggatggtctgggagatcctcc

SEQ ID NO: 333803 - DNA, 201 bp, Homo sapiens
tgcatctatttttacatacaaatagtaaacattaagtggcagttaaattaaggcattatctcactttttctcaaaatgtggtccatggatgacctgcattrgaatcatctctcataggcctcttcattcttgtaactatgagggagtgtggtggagacaggcatttttaacaaacatctcaggtgtattttaaagtctgag

SEQ ID NO: 333804 - DNA, 201 bp, Homo sapiens
cagcaggaagctccttttggacaggcgtgtctcggacccacagtctcccccgaatgcggagtccagcctaagccttcccctagaaggtgtctggtagatgytgagtgaggtttcaggagcagggccaaggctggggcttaggatcatctctcccttcaaagacccccatgactgggcattggccgccaggctgctctgtct

SEQ ID NO: 333805 - DNA, 201 bp, Homo sapiens
ccatcccgtggagccgggcagggccctactcagatccttcggcggggaaagaggtcccttggaggggtctctggctgggaggtttctctgagcattgcccmccatccttgctcacccatcagggtgaagagacacctgtgccctggtgagctgtggaggtcaatgccggcagcggcgcgggaagcggggcgccgcaggctg

SEQ ID NO: 333806 - DNA, 201 bp, Homo sapiens
ggaagcagggcctgaataaagtctggggctagcgggagggcatctgtcctcccggaggctcccaggactgtgcatttgtgtgtgttggatttgttcactaratggggcacttcctttggggcaggaagctttgatttcctgtggtgatggtgaggaggggttggtaaggattaggagtggggggctcagctctgggccatc

SEQ ID NO: 333807 - DNA, 201 bp, Homo sapiens; identical to SEQ ID NO: 70185

SEQ ID NO: 333808 - DNA, 201 bp, Homo sapiens; identical to SEQ ID NO: 70188

SEQ ID NO: 333809 - DNA, 201 bp, Homo sapiens
tctgcccttcctttagtgtagccagtatcaaccaagggcctactgagtgcaagatatacagcctgatgcctaataattccatatagcagggagaaatggarcccaggtatcctccttgcttcagtcctggctgttgaaaagctaacaggcaggttagggaggaagcacacacaaatacaaagcgaaaaaaaatagaatgca

SEQ ID NO: 333810 - DNA, 201 bp, Homo sapiens
ggcaccttgccctctcgcctgcagcccattctcctcctggacccctcaggctctcatgccccgctgctgactggtgagtctgctgcttcttcagggaaggrgctgggtccctgcaccctgctaagagccaagcttgggatggacccatccttcctccccatctctgtccccctgtcctgcgcattgccctgctgcaccctg

SEQ ID NO: 333811 - DNA, 201 bp, Homo sapiens
tgtctccgcaccacttcctttttcctccatcttgcctgcagggattgtaaaccctggtggtcagaagctttgggcctatagggtcagcctctcaccctggsgatccgtaggggaactccaatccccttcagttcagcttcctccctgcaggacccattccaaggagcctagctctggctcctgaggtgaccccagcccaga

SEQ ID NO: 333812 - DNA, 201 bp, Homo sapiens
caggagctcagccccagctcaccacggcatccccgaagagttgtgactcagacacacctgggtttaagtcccagctgggagctcaggtaagtcaaatcgtyttctggggcctctgtttatcagtagaaggctccagaagtatacactgttgatggctccttcccgctctgatgcaccatgcctgattaagcatacactgag

SEQ ID NO: 333813 - DNA, 201 bp, Homo sapiens; identical to SEQ ID NO: 70175

SEQ ID NO: 333814 - DNA, 201 bp, Homo sapiens; identical to SEQ ID NO: 70176

SEQ ID NO: 333815 - DNA, 201 bp, Homo sapiens; identical to SEQ ID NO: 70170

SEQ ID NO: 333816 - DNA, 201 bp, Homo sapiens; identical to SEQ ID NO: 70171

SEQ ID NO: 333817 - DNA, 201 bp, Homo sapiens
catcgccatgacgacggcaacttcttcccggggagtggggctgtggatgaggtaaccgcatgtcagggccacatcttccagcctcattgacctcctcctgrcacttactctgcctctgtcatgacgagctgtgtgatcctgggcagactgctgagcctctctgatcctaaacttccccacctggaaatggggaggctggat

SEQ ID NO: 333818 - DNA, 201 bp, Homo sapiens
acactggaggcatcgggaggggggcgttctaggtggcagtgctcctggggaagccttttgtcccactgaagacatgaagctcctgggagagcaggtggtcrgcaaggctcaggttttcatccaccttttgcagatctaggaggcaaagtcatacctgctggggagggaggaccaagactggggcctgaggcaataaggtag

SEQ ID NO: 333819 - DNA, 201 bp, Homo sapiens
accgagcttggtttctgatctcctcataacttcatgactttatgcaagacagagtggttcctgatatgtgtaaccctgaacccttccctctccttgccackaaccccatgtccacacagttactctctcaggtgggctggcctgagattgggacacctcctctccttcaggatctcatattacagccagccctgtccagca

SEQ ID NO: 333820 - DNA, 201 bp, Homo sapiens
ggacagggtgggagtggccaagcctgaaacaaggtaggcgaagcggaagcctctgttccaagttaggtccaggcagcatctcctggcctaggtagagtgtrcttgtggctagaaggctggggcccctggggtgggagtgagctgggcctgtgggtccctgagagactggtggctgatgtactgttttctataggtggatcc

SEQ ID NO: 333821 - DNA, 201 bp, Homo sapiens
gtgacgcctctgaggcctgtgtggctgctcttctgggtaacagggtgagccgtctccctcccccatccatgcttctgtcaggcaggtaagcccggctctcmggactacccaaggagcaggcagatgggatgggacagggtgggagtggccaagcctgaaacaaggtaggcgaagcggaagcctctgttccaagttaggtcc

SEQ ID NO: 333822 - DNA, 201 bp, Homo sapiens
tcaatgtgaaagcactttggaaatagtgattgatacatgtgagtcattctttattagggaggaagcaagcagggaagccacaggggtagagaacagggtcmcctctccactcccgcccctcccatttctcccctcccaacctctaggttttggatacatgacgcagcaactgatgaacctggcaggaggcgcagtggtgct

SEQ ID NO: 333823 - DNA, 201 bp, Homo sapiens
tgattccaggtgggctggcagctcctccagaggaaggggagagaggagcagcactctcagaatagagggtggccacagggcccagagtacagaaagaagaragggtgtagctcagtgaaaaagacacaggctagagtcaatgacccaagttcaggtcctaccttgctgccacttactagctgtggggcctttcccaaggcc

SEQ ID NO: 333824 - DNA, 201 bp, Homo sapiens
ggctggagttcctggagtcttctcagagcccagggctatgaagaacacccaagcaggccccagagttggatcaggggtagaggaaggcagctgggggggggcctggaagagggagaggatgagagaatgtagccaggtggcgcagaacctcagaggacctagttgtcccctactcagctctcaagtagtgagtagctgggt

SEQ ID NO: 333825 - DNA, 201 bp, Homo sapiens
gcggttgccatcctcaaacctggctggtcttgtccctttgggtcaggccccacctagacaggggtcccctccttaggactgccatgcgtggttgcatgggrgtgtcccacacacttgccgaagcgggggagttggggctgaaacccagtccctgctctgttagctaaggtgacatctcccagaaaagggggcacccttcaa

SEQ ID NO: 333826 - DNA, 201 bp, Homo sapiens
cgcttgaacccaggaggtggaggttgcagtgagccgggatcgtgccattgcactccagcctgggcaacagagcaagactctgtctcaaaaaaaaaaaaaaagaaagcaggaagcaaaggtgctcgttaaggaagggggtgctcccgggtctcctgcaccaggcggcctggctgtaccctcctgcccaccctggcctctgac

SEQ ID NO: 333827 - DNA, 201 bp, Homo sapiens
agggacttcctgaggtgccccctgcagcaggaagctccttttggacaggcgtgtctcggacccacagtctcccccgaatgcggagtccagcctaagccttsccctagaaggtgtctggtagatgctgagtgaggtttcaggagcagggccaaggctggggcttaggatcatctctcccttcaaagacccccatgactgggc

SEQ ID NO: 333828 - DNA, 201 bp, Homo sapiens
gtccttacccttcctctaaacataatgcccccgagcccctctctcaactgatacctgccctcctctctttaaattctccccaccccacctgagcccttctyacacacacacacacacacacacacacacacacacacacaccctactggcttttttcttgcacatgagccccttctctctttatattttccctgagcgcaa

SEQ ID NO: 333829 - DNA, 201 bp, Homo sapiens
agctgccatggaggcacccaggagcaggcccaaggacacatgggccctatgagctgaggaacctgccctgggcacagggttctgcaggcccaacgtggccrgtcagggctggctgtaggcttgaggcatcactttatctcatgactggggatagagcatgggagggtggcgacccagagggcctgtgaggcttggggctgg

SEQ ID NO: 333830 - DNA, 201 bp, Homo sapiens
ggattccaaaaagaagagctctccaacctggcaaagagccctgtgctagacagtattcctggtaccttgggtccatttacttctcttttttttttttttttcaggctgaccccaaattagtagtaacagccctcggagagaggcagtgatgggaaaagaggtcccacactcaagccagaactgggaggcaggatgttcatg

SEQ ID NO: 333831 - DNA, 201 bp, Homo sapiens
tggaccctagtctggtggccagttataaatagcccctgcacccacagccttggcagggtgctcctagtgtgggtgcagaggacacttgagaagaggcagcygtgcctgccatcctgaccatgccaggcccagagctgccatggaggcacccaggagcaggcccaaggacacatgggccctatgagctgaggaacctgccct

SEQ ID NO: 333832 - DNA, 201 bp, Homo sapiens
cttggccttcttctttccctcgggcgatgggagcctggtttggctgcccagggaagattgtatctgaccacaggagggagggctgagggcactgctgggtsagctgaggcctccttaggttcttgctgtagtctgagttcaagtcatttagaatgagtgacttgaggaagagggagctgggagcccttttcaccagcaggg

SEQ ID NO: 333833 - DNA, 201 bp, Homo sapiens; identical to SEQ ID NO: 70172

SEQ ID NO: 333834 - DNA, 201 bp, Homo sapiens
gtccagcctaagccttcccctagaaggtgtctggtagatgctgagtgaggtttcaggagcagggccaaggctggggcttaggatcatctctcccttcaaaracccccatgactgggcattggccgccaggctgctctgtctgctcttaagtggcaagttggggtacctcagcctggtccccagaccttgggctgcctggtg

SEQ ID NO: 333835 - DNA, 201 bp, Homo sapiens
gcaaagcctggcaggagagcttcctgtaaggacgcagagggaggaatgggatggccttggctgagtctcggtttctcctgcaagtgtgattatgggcacawtttgctctgtgcctccacttcttcatctgtaatgtgaaaataattacagtttcaactttatggagttgctatgaagattaaaggagataatgtaaataaa

SEQ ID NO: 333836 - DNA, 201 bp, Homo sapiens
ctggctgtaccctcctgcccaccctggcctctgactgcacttccctctctccccaaccctcagactcctccccaagtagtagcagcacgcccgcatcaggrtgcagctcccccaatgacagcgagcacggccccaatcccatcctgggctcggaggtaaggccttgccgagactgggctctcctggggcagttctgaggct

SEQ ID NO: 333837 - DNA, 201 bp, Homo sapiens
tctctgtgccagggtactttcctggacattttaggagagacactgatttattcattgattctatgtttgtggagtgcctgtcatgtgctaggtactattcyaggtgctaggaataataaacaaagcatgaaaccaactccctgccctatggagcttaactcagacatggtacctgcccacagagcactaatcctggtgtgg

SEQ ID NO: 333838 - DNA, 201 bp, Homo sapiens
ccattgcactccagcctgggcaacagagcaagactctgtctcaaaaaaaaaaaaaaagaaagcaggaagcaaaggtgctcgttaaggaagggggtgctccygggtctcctgcaccaggcggcctggctgtaccctcctgcccaccctggcctctgactgcacttccctctctccccaaccctcagactcctccccaagtag

SEQ ID NO: 333839 - DNA, 201 bp, Homo sapiens
ggcgggctgggctgggccaggagatcatcggtaggctaggatcttctttctagttctgccttctctttccttgaccgatagagatgactgggactgagggrttaaagggtggaaaaaagaagggtggtgggggcctgagtgacgctggtgctccctgcagtctctgagcccaacctgaagctgcgctataagcccaagaag

SEQ ID NO: 333840 - DNA, 201 bp, Homo sapiens
aaggacacatgggccctatgagctgaggaacctgccctgggcacagggttctgcaggcccaacgtggccggtcagggctggctgtaggcttgaggcatcaytttatctcatgactggggatagagcatgggagggtggcgacccagagggcctgtgaggcttggggctggaggcagaacaaagtgggcctgtttgcctgcc

SEQ ID NO: 333841 - DNA, 201 bp, Homo sapiens
tttcctggacattttaggagagacactgatttattcattgattctatgtttgtggagtgcctgtcatgtgctaggtactattccaggtgctaggaataatraacaaagcatgaaaccaactccctgccctatggagcttaactcagacatggtacctgcccacagagcactaatcctggtgtggaacagccatgtgattgg

SEQ ID NO: 333842 - DNA, 201 bp, Homo sapiens
ctggggaaggactggacttcctgctgctgctttggtttaggacatgcccatggggccaggtctggactagacgcggtctgcccttcctttagtgtagccartatcaaccaagggcctactgagtgcaagatatacagcctgatgcctaataattccatatagcagggagaaatggaacccaggtatcctccttgcttcagt

SEQ ID NO: 333843 - DNA, 201 bp, Homo sapiens
tgggtgagctgaggcctccttaggttcttgctgtagtctgagttcaagtcatttagaatgagtgacttgaggaagagggagctgggagcccttttcaccakcagggggactggaggagtcgaatggggtggggtcttctcgttttgattagcttctggtggaggtcccaggctttggcgtgctcaagcttggagtggcagg

SEQ ID NO: 333844 - DNA, 201 bp, Homo sapiens
taaataggtagagcagcattttcggaccgaactttgttacccaaagcatgggctggtttgaggggcagtcggtgggagtctccctgtgcccaggctgcccyctcccccagcagcgcctgcctgcaggaagttctcatttctcggctctgaagaggaactgtggctgcctctgagacacagacccaaaggagcaccccggca

SEQ ID NO: 333845 - DNA, 201 bp, Homo sapiens
catgccccagtgccaagtaaactgttcttaagtctgactgcagttgcctccaaagaagatagaaaaggggagtagccaggattccaaaaagaagagctctycaacctggcaaagagccctgtgctagacagtattcctggtaccttgggtccatttacttctcttttttttttttttttcaggctgaccccaaattagtag

SEQ ID NO: 333846 - DNA, 201 bp, Homo sapiens
gccatggaggcacccaggagcaggcccaaggacacatgggccctatgagctgaggaacctgccctgggcacagggttctgcaggcccaacgtggccggtcrgggctggctgtaggcttgaggcatcactttatctcatgactggggatagagcatgggagggtggcgacccagagggcctgtgaggcttggggctggaggc

SEQ ID NO: 333847 - DNA, 201 bp, Homo sapiens
cccagaccttgggctgcctggtgtgacatcacggtggtgcttccggtgtccttggcgatcccagcactccccactccgggacatagccccaaactccgctsgcgagctttgcttcctaagtcctcacccctttgtgaagggagcttcccgctccctccggctcagctctcctcgcctaacactatccctgcagtagtttct

SEQ ID NO: 333848 - DNA, 201 bp, Homo sapiens
gtcaggcaggtaagcccggctctcaggactacccaaggagcaggcagatgggatgggacagggtgggagtggccaagcctgaaacaaggtaggcgaagcgraagcctctgttccaagttaggtccaggcagcatctcctggcctaggtagagtgtgcttgtggctagaaggctggggcccctggggtgggagtgagctggg

SEQ ID NO: 333849 - DNA, 201 bp, Homo sapiens
gttgtgctggggcactgggagccttggagtcctaagaacagggtgccccaccgcaaagttggcaggaccgcccctggcaaccctgcacagtacgatgatcrccacttcttgtgacctcacaggatagtcgtgatgcccatcgcccgagagttctctccagacctagtcctggtgtctgctggatttgatgctgctgagggt

SEQ ID NO: 333850 - DNA, 201 bp, Homo sapiens; identical to SEQ ID NO: 70179

SEQ ID NO: 333851 - DNA, 201 bp, Homo sapiens
acttaagtccagtaggcaggaagctcagccgtgggactccccaccacagctgggttgattccaggtgggctggcagctcctccagaggaaggggagagagragcagcactctcagaatagagggtggccacagggcccagagtacagaaagaagagagggtgtagctcagtgaaaaagacacaggctagagtcaatgaccc

SEQ ID NO: 333852 - DNA, 201 bp, Homo sapiens
ccgagcctcctctgctgctaggctgccctggggaaggactggacttcctgctgctgctttggtttaggacatgcccatggggccaggtctggactagacgyggtctgcccttcctttagtgtagccagtatcaaccaagggcctactgagtgcaagatatacagcctgatgcctaataattccatatagcagggagaaatg

SEQ ID NO: 333853 - DNA, 201 bp, Homo sapiens
tacccactctgagggtgacttgctctggttatgcaacccgcattttgtagagggcttgacagtttccagagagctcacgcagcgtttgatcctctgtggcrgccctgggaggtttgcttgtttagttataccctgctggaggcagctaacaggaaacactgtaaagtgtttaaatggtacactttaaaatggtaaaatgta

SEQ ID NO: 333854 - DNA, 201 bp, Homo sapiens
cctgtgtggctgctcttctgggtaacagggtgagccgtctccctcccccatccatgcttctgtcaggcaggtaagcccggctctcaggactacccaaggarcaggcagatgggatgggacagggtgggagtggccaagcctgaaacaaggtaggcgaagcggaagcctctgttccaagttaggtccaggcagcatctcctg

SEQ ID NO: 333855 - DNA, 201 bp, Homo sapiens
gtccaccctctcctgtcccttctcccaagagcaccaggggggaggtgatcagttggattgtcagcctgtccccaccagttcctagacattgtaggtgaacrccagtgagaataggacaaacagagagaagaatgcaaaagtcaaagggtgctttgcaaaggcatacattaccgagagccaatgtcaaactgattgctggca

SEQ ID NO: 333856 - DNA, 201 bp, Homo sapiens; identical to SEQ ID NO: 70183

SEQ ID NO: 333857 - DNA, 201 bp, Homo sapiens; identical to SEQ ID NO: 70186

SEQ ID NO: 333858 - DNA, 201 bp, Homo sapiens
gaggggcaagtccaccctctcctgtcccttctcccaagagcaccaggggggaggtgatcagttggattgtcagcctgtccccaccagttcctagacattgyaggtgaacgccagtgagaataggacaaacagagagaagaatgcaaaagtcaaagggtgctttgcaaaggcatacattaccgagagccaatgtcaaactga

SEQ ID NO: 333859 - DNA, 201 bp, Homo sapiens
tgtttgattcatctcaaacagcagaagtggaggtggggtgggggggcgacactggctcccagctcaggccactgctgcgtggggctgtttacaacagccgyatgtgggattcccagaaagagactccaaaccggacatcctgcggctgcaaaatacccaggtgtcaagagctaaaaatagctgcctcagggccccagctgc

SEQ ID NO: 333860 - DNA, 201 bp, Homo sapiens
gtaaaaagagctcagaagtattttagacattttgaagagtacagaaaaacctaagaagaaaagaaaaatcaccaaccagtatcccaccacccagaagtaamccctctgaaattctgctgtatttcagtccaggctttgttctggccatatgtacatgtacagatgccatgaacacatgaactacgttttgtatcctgcttt

SEQ ID NO: 333861 - DNA, 201 bp, Homo sapiens
ctaaaggagcaactggtctaagtggggcaccagaggggtaaaggcgaaggggagagatgaaggcagaaactggccgacttatccccatgttacagataggscctcaaatcttgcctgctcaggatgttttgcttatgataggaaagatggtagttagacatcatggtgaacttcctatctcagggactggagatactggag

SEQ ID NO: 333862 - DNA, 201 bp, Homo sapiens
tattaatgttattgttcatattttttgaaggtcagggatagggaatgttgcagacacgaagaacagaaactgggcctagccccagttcacagaaaaaaccrggccaaatccctgttccagattcctccacccatcgcggcctggaacagccagagagctgtagccagaagtcatagggtggacccctgcttctcttgttca

SEQ ID NO: 333863 - DNA, 201 bp, Homo sapiens
tagcttctggtggaggtcccaggctttggcgtgctcaagcttggagtggcagggagcaggcctggcttgaccttctttccttcctgctccctctcctcacscctccctgcagctctttcactccgtctctctctctacagatgggacccaggtgagcccgggtgcccactactgcagccccactggcgcaggtaagagtca

SEQ ID NO: 333864 - DNA, 201 bp, Homo sapiens
cgggtgcccactactgcagccccactggcgcaggtaagagtcaaacccgggggagtccatggtagggagtggaagatgaggggtggaaaggctgtaagaasgcgagaagctgaggggttagagaagcagggtcgctggctgatctgccagagagccaggaggtggcggctccagggaggggcgaggagccggggtaagaga

SEQ ID NO: 333865 - DNA, 201 bp, Homo sapiens
ttctagggagtctgggatgaatgagaaacttatcctaacaacttttgggctctctgaattttttttagtatctgcaagtattgtacttgttcaaatatgtktaaggctgcaggctgtattctaaactccttgaaagtgagaaccaggtttcactcatatttccatcttttcaacccctagatcagtgacttcccagggaag

SEQ ID NO: 333866 - DNA, 201 bp, Homo sapiens
tttctgcatgcccatctaggtcctgcatgtgtcctttgctggctggcctgtggcgaatgggaatgctggggaggaggggtggagtgtattggttgagagcrtggattctgaagcccaattgcctgggctcaagtcccagctcaacctctgccacttgtctgtgacctcagacaagttatctaatactgctgggcctcagcg

SEQ ID NO: 333867 - DNA, 201 bp, Homo sapiens
gtttgattcatctcaaacagcagaagtggaggtggggtgggggggcgacactggctcccagctcaggccactgctgcgtggggctgtttacaacagccgcrtgtgggattcccagaaagagactccaaaccggacatcctgcggctgcaaaatacccaggtgtcaagagctaaaaatagctgcctcagggccccagctgcc

SEQ ID NO: 333868 - DNA, 201 bp, Homo sapiens
ttgggaccagagaggacagggctcaagggaggatggaggctgggacaggagaggcacacgggaaaaacctgagcccagatggccctttggctgggctctcyagagtctctcctgggcccttggaatctgctgcccaaactgggggagactctgagaccagagggccagatggggctgattcaagacacgggctctacatca

SEQ ID NO: 333869 - DNA, 201 bp, Homo sapiens
cccacctccttcccttctccgccatctccccagttggggaactactgtgccaagtcccttccctctggtctagcctgctgcctctgtggccactttacttwacttggctcaggaatcaccaaagagagggggtcaaggcctagaggggacctgggccctggaagagaggacagaaccagaaaggaaggctggggttgggac

SEQ ID NO: 333870 - DNA, 201 bp, Homo sapiens
atggtgaggaggggttggtaaggattaggagtggggggctcagctctgggccatcctcgatgttgttgtttggaaccacggaggggcagagtttctgcttmagactgcttctcccagctctggggaggcaggaaggagagccttggtgaggaggcccaggccaaggctggagaaggaggctgtgagagcagtgagctgggg

SEQ ID NO: 333871 - DNA, 201 bp, Homo sapiens
gaagttcagtttccccatcagtaaaatggggagaaaattccaagcacacttctcagagcagagcagaagaggttgactatggagaggagaatgaaggtacwgtgctattatccaccccctccagtttgcttagggataatggacctcagctttagtccttggtggcctcttggcatggaagctggaactttctcaattctg

SEQ ID NO: 333872 - DNA, 201 bp, Homo sapiens; identical to SEQ ID NO: 70180

SEQ ID NO: 333873 - DNA, 201 bp, Homo sapiens
ataataaacaaagcatgaaaccaactccctgccctatggagcttaactcagacatggtacctgcccacagagcactaatcctggtgtggaacagccatgtrattggagtccaaaagagggagggatgctaggcgctggctgggtccagggatgagggaggactccagctgagctttgagcaaagagtaggatttggaaaag

SEQ ID NO: 333874 - DNA, 201 bp, Homo sapiens; identical to SEQ ID NO: 70181

SEQ ID NO: 333875 - DNA, 201 bp, Homo sapiens
gccactggtcttgggtccaggtcgctggccttggttcccccaagcccctcttgcataatcaggggagtcaccccgggaagccaggacacagaacatggaargactgaaacctttcctggggcaggagtgttttggtattcgaaacccagactcaacccgaatgagaatccggatttcttgggaggcaatgtgaacaagggg

SEQ ID NO: 333876 - DNA, 201 bp, Homo sapiens
atgaactacgttttgtatcctgctttacttagttaacatattatgaatccttcttggcataattagtctttaaaactgagagtctcatagtatttcattawtgtatttcatttttactgagggatcccttatcagttagacatttagattatagcttatttgaatttccttatgcataaatctttcctcatgcttgggatt

SEQ ID NO: 333877 - DNA, 201 bp, Homo sapiens
attttccctgagcgcaaaaatgtcctggttcccagagcaggttcctagtgcaggtgacagagcccccagtgggctcttcacccacgcaccaagcacctggyttctatgcctaggtcagagctctgcactatagctgctggagcggacaggcggcccactgctgccacctggagatggtccccattcctaccagccccacat

SEQ ID NO: 333878 - DNA, 201 bp, Homo sapiens
ctgcagtcggtccactctgagcggcacgtgctcctctacggcaccaacccgctcagccgcctcaaactggacaacgggaagctggcaggtaatggcctagyggccctgtctccccatgccagcttacctcacccagctcccatgcactcctgtctcggctctgcccgcccagccagcctcctcctgcaccctggacgtccc

SEQ ID NO: 333879 - DNA, 201 bp, Homo sapiens
ctctgctccttgaaacaggtaggatggagcaacggtgtggtctggtgtgggcttgcagccaggtgggattggggacctgtccattccaccccgagttttayaaaccaggcttcctagagtccccaagtgtgccagggaagggtattagggagatacattgcctcctgcctgatgtgtgggaggggaccagtgaggggctcc

SEQ ID NO: 333880 - DNA, 201 bp, Homo sapiens; identical to SEQ ID NO: 70215

SEQ ID NO: 333881 - DNA, 201 bp, Homo sapiens
ttgtattgtattggctgggtggcagctggcatcctagaggaagtgtccacccaggcgcagaggccaggcccaggaaaagctgggggcagtgggggtggggrgcggtgcaggtggtgatggcctgccctttgccgcaaaatggagggagtggcatgaggtctggccaagaacaataaggccactcaggggttgggtggccct

SEQ ID NO: 333882 - DNA, 201 bp, Homo sapiens
cccagtggtagagggaagcttccagagtcgtctgaggaagcaggtgagagggactacccctgcactcaggaatatgggacctcttggctccccactccccsctagcccctagagcctaggaagggccagcctgtctgaggccaagttcacatttctgtgtggagcctgaggctgtgtgcaaagtctggggtttgcagagcc

SEQ ID NO: 333883 - DNA, 201 bp, Homo sapiens; identical to SEQ ID NO: 70216

SEQ ID NO: 333884 - DNA, 201 bp, Homo sapiens; identical to SEQ ID NO: 70217

SEQ ID NO: 333885 - DNA, 201 bp, Homo sapiens
ggaatatgggacctcttggctccccactcccccctagcccctagagcctaggaagggccagcctgtctgaggccaagttcacatttctgtgtggagcctgrggctgtgtgcaaagtctggggtttgcagagccaggaatagtggttaagggtgagcccgacggagccggagccagtcctcctctgtgcagtcctgaggaat

SEQ ID NO: 333886 - DNA, 201 bp, Homo sapiens; identical to SEQ ID NO: 70218

SEQ ID NO: 333887 - DNA, 201 bp, Homo sapiens
tcatgtggagaaaacaagtccccacctcgcaagttgggtggattctatgaaactgatgtgaagtcttgagcagtgcatagcccatacaagcactcctgatrttgggacccattagtctgtgctcagctctgggatgggagcgccctctggtggctgtggctggaaataaccagaggtccttcttccgggagtctgatgcta

SEQ ID NO: 333888 - DNA, 201 bp, Homo sapiens
tgatctttgacagtggctgtggaagagccaaaactgcttggtagtggtggtggtggatggtggcagggagaggggttgccaagcctgggcctccgaccttycccaccatgagtgagttctcagagggtctgtggccagtcaaccttcttcctcttttgggggtaaagtgtcagcagattaactaacgtgtgagcaccctac

SEQ ID NO: 333889 - DNA, 201 bp, Homo sapiens
agggagtgctgagtgccatccctgggtagagtcgcagcatgaggtggggttaatgccttagaagaggggcatacagggccccaccctacacaatgccaacraagcactgggtcaccaagaaggggggatgggcaccctggctagggtgttctctgcctgcccagctgcctcaccacctgtgggatcctgaggacaactggc

SEQ ID NO: 333890 - DNA, 201 bp, Homo sapiens; identical to SEQ ID NO: 70223

SEQ ID NO: 333891 - DNA, 201 bp, Homo sapiens
accctatgccttccttacccttagcttatcggctgtgagccaataagctcacatggctaagcaggggctctgctccttgaaacaggtaggatggagcaacrgtgtggtctggtgtgggcttgcagccaggtgggattggggacctgtccattccaccccgagttttataaaccaggcttcctagagtccccaagtgtgcca

SEQ ID NO: 333892 - DNA, 201 bp, Homo sapiens
gggcctccgaccttccccaccatgagtgagttctcagagggtctgtggccagtcaaccttcttcctcttttgggggtaaagtgtcagcagattaactaacktgtgagcaccctacttctgactcagcgttttatagctcagaatctgctgagtcacccaagggtagccccagcatgctccttctcctgtgttggaccaggc

SEQ ID NO: 333893 - DNA, 201 bp, Homo sapiens
ggacctaacttggaacagaggcttccgcttcgcctaccttgtttcaggcttggccactcccaccctgtcccatcccatctgcctgctccttgggtagtcckgagagccgggcttacctgcctgacagaagcatggatgggggagggagacggctcaccctgttacccagaagagcagccacacaggcctcagaggcgtcac

SEQ ID NO: 333894 - DNA, 201 bp, Homo sapiens
gaggaattgttctgaccttatttttctcccaagctggcttctagaatctttgagtgggaaaggatcttagagctcaacttccccaacccctctgtggcacraggagacagagggcgaggggacctgttccagacaggtgcccatcagactgctccttgagtgtgctcagtgacaacaccccttgttcccagggccctttat

SEQ ID NO: 333895 - DNA, 201 bp, Homo sapiens
acccagctactcactacttgagagctgagtaggggacaactaggtcctctgaggttctgcgccacctggctacattctctcatcctctccctcttccaggcccccccccagctgccttcctctacccctgatccaactctggggcctgcttgggtgttcttcatagccctgggctctgagaagactccaggaactccagcc

SEQ ID NO: 333896 - DNA, 201 bp, Homo sapiens
acagaggaattgttctgaccttatttttctcccaagctggcttctagaatctttgagtgggaaaggatcttagagctcaacttccccaacccctctgtggyacgaggagacagagggcgaggggacctgttccagacaggtgcccatcagactgctccttgagtgtgctcagtgacaacaccccttgttcccagggccctt

SEQ ID NO: 333897 - DNA, 201 bp, Homo sapiens
cttctgactcagcgttttatagctcagaatctgctgagtcacccaagggtagccccagcatgctccttctcctgtgttggaccaggcaaggactgattggrtgtgccagtttctggagcagagtcatggagcccctgggtctggtgggcagagtgttcacgggtggggataccctctcccatcctgatgggtaccttcgaa

SEQ ID NO: 333898 - DNA, 201 bp, Homo sapiens; identical to SEQ ID NO: 70219

SEQ ID NO: 333899 - DNA, 201 bp, Homo sapiens; identical to SEQ ID NO: 70220

SEQ ID NO: 333900 - DNA, 201 bp, Homo sapiens
ggatgggagcgccctctggtggctgtggctggaaataaccagaggtccttcttccgggagtctgatgctaactaaagcaggttggaggtggcctagggtayttgtcacaaaagcggagtggatgatacagacctgtgattggccagccctgcccttccctaatccccacggcctcctgcctgaaaaccctggaatactcta

SEQ ID NO: 333901 - DNA, 201 bp, Homo sapiens
ccaatggagttgatatttgttccactctttgggctgcaccagcaggcactgcctggcacagagggttgttttgtattgtattggctgggtggcagctggcmtcctagaggaagtgtccacccaggcgcagaggccaggcccaggaaaagctgggggcagtgggggtggggagcggtgcaggtggtgatggcctgccctttg

SEQ ID NO: 333902 - DNA, 201 bp, Homo sapiens
aaggatgagcagggagggccagcctgggatctcagctggttgtgttgagtctggcctggtacaagtggaggtgaaccctacctggccgtttgaccctatcmtgggccacagtttcctcatctattaggagtgggaggagatgtccccaaaagacatctgacttccctccagatctgaaatcttgcagtgctgcccactccc

SEQ ID NO: 333903 - DNA, 201 bp, Homo sapiens
caggcctggacccccaaaagccttgaagactttgccagagcagcctcccctcctccatgtctgtatcttctctcccaccccttccccctcagtcaggctaytcctatgtggggtgggaatcagagctatggtgggggaggccccagaaacagagaaggctccccgagtgggcagtggccgaggggtcccaggggtatgctg

SEQ ID NO: 333904 - DNA, 201 bp, Homo sapiens; identical to SEQ ID NO: 70221

SEQ ID NO: 333905 - DNA, 201 bp, Homo sapiens
caggagatgctgcctggacctaacttggaacagaggcttccgcttcgcctaccttgtttcaggcttggccactcccaccctgtcccatcccatctgcctgytccttgggtagtcctgagagccgggcttacctgcctgacagaagcatggatgggggagggagacggctcaccctgttacccagaagagcagccacacagg

SEQ ID NO: 333906 - DNA, 201 bp, Homo sapiens; identical to SEQ ID NO: 70222

SEQ ID NO: 333907 - DNA, 201 bp, Homo sapiens
ctagtatagattatgggtcttgacataagatgctcaatagatgttgagttgaagttgaaaatttaaagtactttacaaatgtgggggttatcccaagacgyagcccccaagccagcagagctcctgagacgcctgtggccaggactgaggggagggatgggaaccaggccttttggcaaacaaggcctgagtgttgctctt

SEQ ID NO: 333908 - DNA, 201 bp, Homo sapiens
ctttatttcttccctctgcgccatcacacgtgcggttcccactgcctggagtactgtccatcctggccagctctgaagccatccatggaaatgcactccgsaccacggggcttgctccctcctccacaggaccagcactcactctccaccggcagctcctaaaggagggctgctgctgagctcacagccttgacatcactt

SEQ ID NO: 333909 - DNA, 201 bp, Homo sapiens
gtcatgagtgtagctggtccatgtcagtcactgacatcttatttcacagctctgttcgtttggattaaactctgtctctatttctaggaggcagccatgcwtaaagacgagtttcatctgaaatttttcatgtgtgtgattcagtctcgccagttagtcaggactcctcagagaacaggtacccttgtctcctgatcatac

SEQ ID NO: 333910 - DNA, 201 bp, Homo sapiens
atgtgaccaaggccatggatgagaagaaatttgacgaagccctgaagctgagaggccggtgaggagatgacgggaagctcactagctacagaaatcagagscgtgaacgaagccaaagatctccatggctccaggcccaaaacatgagcttctgctgcttccttttctgattctctctgcagcaagttcctgcccaagaaa

SEQ ID NO: 333911 - DNA, 201 bp, Homo sapiens
ctggttccctgcccctgattgcctcccacaaagaaccattacaagacaagaggctgagctgtccatggtttacccaagtctctgcttgttttcttcctttkactctgcgtaaccctctctctgtccctctgttggtcccttcagctggtggttaagcgtctgggatatgacacccgggttactgtcttggggcatgtgcag

SEQ ID NO: 333912 - DNA, 201 bp, Homo sapiens
tggtgtaaagagtgggtagtgctctgaggctggaagccactgtggcaggtgaacataaatggaaggtatccgttagagacagaatctcattgaggggcccyggtgctcttacccttgccccacgaataaaatggaggctctccagaccttttatcaactatgaggactaggagaacttgttgggtatgggtgaggctattt

SEQ ID NO: 333913 - DNA, 201 bp, Homo sapiens
agctaagactaaaaggcaagaggggccattgagtgaagagcaagggggagagctgggagtgaggtgggaaggtatgggccgggagcaggcggtagggagarctgaaaggagcagaaaggaaaagaagagatacggcatcctaagctggagccgagagggggatgggcagggcagtcgtgaaggatcctagccccttggcca

SEQ ID NO: 333914 - DNA, 201 bp, Homo sapiens
cttgtcagtctacaagggtgtggctttcctctggaagaagtccaaagctctcaggctgcaaagctcagacttggtatagtgggagagcctgactgaggtgkctctagccagtctaattgccgttcctttagctagtggcatcttgattcctgctgtgtcttaactgaccattgtcttaaattctagagtggatcatgaccc

SEQ ID NO: 333915 - DNA, 201 bp, Homo sapiens
atgcaagaacttgatgagctctaagggccctgctagcctatggagaatatagttccagggtttaattaatggcaaagattaaagagtgataagaatcaggmccctgatcatgtctttctaactataacccattgtccttgcagacctgtgaccgcatcaagcagtcagcagctggcaccaagcgtcgggtgtttatcattg

SEQ ID NO: 333916 - DNA, 201 bp, Homo sapiens
tcagtaacacacactgttaacactggttcatttcctgttttaacacaaagaagtgctttaagaagtaatccacctgccaggtgtggtggctcacacctgtratcccagcactctgggaggctgaggtgggcggatcacttacttgaggccaggagtttgagaccagcctggctaacatggcaaaaccccatctctactaaa

SEQ ID NO: 333917 - DNA, 201 bp, Homo sapiens
aggaagctggctggagctatgttgggggctggactggccaaggtggctctaaacttgggactaaaaggtaagtagcactgcagaggcacctcctcccagtyacctcttaaagttgcccttggatgtgggttcattatgccatggtctgcttcaaccaccctgttgtctgggtcctccaccctcaacctcacagttgctgcc

SEQ ID NO: 333918 - DNA, 201 bp, Homo sapiens
tttccaaccaagggggatccaggggtagggttagaactcaagcagtggcaccagtcccacacaggcctcctagtgctttagccttgtgcagagctctgtgkcttatccccacagatagaggaagctggctggagctatgttgggggctggactggccaaggtggctctaaacttgggactaaaaggtaagtagcactgcag

SEQ ID NO: 333919 - DNA, 201 bp, Homo sapiens
gagaaatgttcaaaggaatatgggaaagtgaaagttgtatgcatagtattataaatcagcgtagacctactaaagctgaaatataagacccaagggggaargtctgtgtgtgtgtgaaacagagagagagagaaagagagagagaaagagaaagagggatggggagggaaaggaagaagggagagaggtggggatggatca

SEQ ID NO: 333920 - DNA, 201 bp, Homo sapiens
accttccgttctgagtggagtgacttgttgagtgacctccagaaagcaggtaagagagttttcacatcagtattgcttatttgtgtcggtacgtgcacgcrtgtacacacacacatcgcccccgccctgcttttacctcccattggagaaaaatgttacccagacacaaataggcagtctttgccctcctttttctggtat

SEQ ID NO: 333921 - DNA, 201 bp, Homo sapiens
aaacctgtggcttcccccgacagatagggacctgagatctaaatcgatctcaggctatctcgtgttttattgagaatcacagaacgttagtgcttgtagargttattggagatactttagtcttaccaggttcagagaagtgaagtgatttcccaaaggttttaagtgcacggcccatctaggactaggaaacaagtttct

SEQ ID NO: 333922 - DNA, 201 bp, Homo sapiens
gtagccagggaaatagcccacctgcaaatccccataacatcacagccacatgtcactagggattgagagtgatagaaactgaaattctatggaggcaaggmggcaaaacagaaaactcaaaatagagctgagaggtcctagctgaaggagaagctcaaattcagaagtcgcctgcccagagctgagtttgatggactctag

SEQ ID NO: 333923 - DNA, 201 bp, Homo sapiens
cctggagttgaaactgtcgctgtgctcccccctcagaccaaagatgtgaccaaggccatggatgagaagaaatttgacgaagccctgaagctgagaggccrgtgaggagatgacgggaagctcactagctacagaaatcagaggcgtgaacgaagccaaagatctccatggctccaggcccaaaacatgagcttctgctgc

SEQ ID NO: 333924 - DNA, 201 bp, Homo sapiens
ctccagggtgggagcccaaccccatttgataggaattttgccactaagatgggcgccaaggctatgaactggatgtctgggaaaatcaaagagagttaccrtaatggtaggtggggtgagagcgagtgccctctatagaggctggttccccagtatagaagctgactgcccatccctcattgcagggcggatctttgccaa

SEQ ID NO: 333925 - DNA, 201 bp, Homo sapiens
agtagtcaagaaatatcactcgggtctcaaggaaggcgggagatgaagccggtaccacagaaagccgagcttcccggtgaaaacagctctccccagagaasacccagctctggcgggaaagccccggaatcgcaaccggcctttccccaagtacggctgggcgctgggatggggcctgctgtaacggcagggagacggtct

SEQ ID NO: 333926 - DNA, 201 bp, Homo sapiens
aggaggaagaggaggagaaaggcaagcaggaggaggcggagccttcttgtcagcatctgttagtggaggttgggaagcctctcctccttccccctccctckttgcctccacctggctcctccccatgttcgtccatcacccctcccccctttcccaaggacaatctgcaagaaagcagcggcggaggagagctaagactaa

SEQ ID NO: 333927 - DNA, 201 bp, Homo sapiens
cagttatgttaggccatcacagcattggaataggggatatctcagcatgttgagccctgtctctggggagctgacttctacctcttccaaagggaggcacrgtgattggaagtgcccggtgcaaggactttcgggaacgagaaggacgactccgagctgcctacaacctggtgaagcgtgggatcaccaatctctgtgtca

SEQ ID NO: 333928 - DNA, 201 bp, Homo sapiens
gagataccacagagtaggagagttggagaaatgtttacgtgagacgcagaagtagtcaagaaatatcactcgggtctcaaggaaggcgggagatgaagccrgtaccacagaaagccgagcttcccggtgaaaacagctctccccagagaagacccagctctggcgggaaagccccggaatcgcaaccggcctttccccaag

SEQ ID NO: 333929 - DNA, 201 bp, Homo sapiens
atcaccaagctcaaggaaagagaaacgaggcatagatccagagatcacgttagggtacaccaagaaagagacggttcaagggaattaccaggaggcgatgwgccaggtaagcaaattgtggcagttaaggggattttcataacctgagcaggagggtccagacgtttctttctgatggtggcactagcgatatcacatctc

SEQ ID NO: 333930 - DNA, 201 bp, Homo sapiens
catacacattcatttactgtgcaccgactacgtgcattaagaaagggtccctgccactgagcagctcactgtccagtagggaaagccagatccataaacasgtaccgcaagacagtagagctggtacaactgatagaagatgtagaagttgggaagaaaaggacaagagttccaaagccgcaatgcaagtcaacaactgca

SEQ ID NO: 333931 - DNA, 201 bp, Homo sapiens
cttcctggtctcaggaagcctgctagaaggcctggcagcatacatgtatctcccagagagggtaattggcctagatgtgggtggtggcttgatcttggccrtagggtcacttggactgtgtcatatgtctatctcttgcagccaccagaggacatttgtgttagaagtaatgggccgccactgtgggtaagatcctcattc

SEQ ID NO: 333932 - DNA, 201 bp, Homo sapiens
ctcttagcatttgaaaataccaccctggtttcctggggcagggagagggtggaggagtgatcacaggatgctttgctctttatggaaaggtcataaacaasactatggggactgacacataagcagatcttactctagggtcacagggaaggtctggccctgaaaataaccttaccagaggactggagccagagccagaag

SEQ ID NO: 333933 - DNA, 201 bp, Homo sapiens; identical to SEQ ID NO: 70229

SEQ ID NO: 333934 - DNA, 201 bp, Homo sapiens
tatgatagtctcacgagcatccaggactcactaatgggaggaggtggcttgactctcagagaatctcttcccagggatcctgtcttaatcttgggaatttrtagagaagcctaacgggctgaacaggtataatgtgtcacacagggttatcaaggcctggtggatggtggagatcacatcaaggaagccacctgggagagc

SEQ ID NO: 333935 - DNA, 201 bp, Homo sapiens
cctttggaagtaaagcagccttgagaagagtttttattaaagaggcattaatgatggaggacctttgcgtagcgaggaaacctttctgcctatgtaacagyatggtggtgcaggatatggaaggcatatttagagtcagtataaatattgatgcgtagtccctttgcaagagtgagagctcaagttaagacaatgagttca

SEQ ID NO: 333936 - DNA, 201 bp, Homo sapiens
aactgggaaaaaaggcagcaatgaggtgtggctgtagcccaggaacagtcagggaagcagataatttagttaaaatgccttgacctaacaagggaactggrcaggtggggataactaaaaaggagtgcttaaaagagtattgtccaagttgtcacgagagttggggagttttaaggggtctagaagcctggctgtcaatac

SEQ ID NO: 333937 - DNA, 201 bp, Homo sapiens; identical to SEQ ID NO: 70230

SEQ ID NO: 333938 - DNA, 201 bp, Homo sapiens
cgccgccactcaccgaaccggaaccggctgccatgcgaaggggtttccggccgggcgcggaacgcaaaacccgggaaccgccgcgaaccggaaccgccttyacagcaccggaagagtcgctaggtggctgaagaggagggggctggggcaggaggtcaaagaacagagttaaggaccagtggggcgcctgcgcggtgtggc

SEQ ID NO: 333939 - DNA, 201 bp, Homo sapiens
tcacacaaggctgggcacctctagtgctactgctagatatcacttactcagttagaattttcctaaaaataagctttatttatttctttgtgataacaaaragtcttggttcctctactacttttactacagtgacaaattgtaactacactaataaatgccaactggtcactgtgcttttgcttctcctgttatcatctt

SEQ ID NO: 333940 - DNA, 201 bp, Homo sapiens
gccctgtctctggggagctgacttctacctcttccaaagggaggcacggtgattggaagtgcccggtgcaaggactttcgggaacgagaaggacgactccragctgcctacaacctggtgaagcgtgggatcaccaatctctgtgtcattgggggtgatggcagcctcactggggctgacaccttccgttctgagtggagt

SEQ ID NO: 333941 - DNA, 201 bp, Homo sapiens
ttcaaattctttcatacacattcatttactgtgcaccgactacgtgcattaagaaagggtccctgccactgagcagctcactgtccagtagggaaagccakatccataaacacgtaccgcaagacagtagagctggtacaactgatagaagatgtagaagttgggaagaaaaggacaagagttccaaagccgcaatgcaag

SEQ ID NO: 333942 - DNA, 201 bp, Homo sapiens
tttgtccatgaggttggttctgtactttgttcttcatcattctttctctgtcttcttctaaatctgccttctatccccttcccacattctgtgtccttacmtcccagttagttacattgctgtgtttgattttccttgactccgtagcttcatgagtcactctttcctacttgactccaatagtgatggtgggacctgagc

SEQ ID NO: 333943 - DNA, 201 bp, Homo sapiens
ctttaatcagacttcctttgcccctgcatagaaagcagcaagaaataaacccagctgatggttttttcctattgtttattgaatttgtacagattatttcytatttgccctcatctttcctgcttttttcattctccttttgctctggtgtacctaaaactcacctcagactccctttgctctgatgactcatttggacct

SEQ ID NO: 333944 - DNA, 201 bp, Homo sapiens
tggggtttgaggaccggaatctaatttttgaagatttttctaatgtcaggagctgactgggtggtaaaatgcttattaggaataaggtggccttctggccyctctgggtctagggtggtaaagcgtctaagggttgctgctaagccggccatgaactgggctgggttctttacctcgggtagtttctttaagtttgtcata

SEQ ID NO: 333945 - DNA, 201 bp, Homo sapiens
tgcgaaggggtttccggccgggcgcggaacgcaaaacccgggaaccgccgcgaaccggaaccgccttcacagcaccggaagagtcgctaggtggctgaagwggagggggctggggcaggaggtcaaagaacagagttaaggaccagtggggcgcctgcgcggtgtggcgaggcccgagaagcgaagggagcatttaagact

SEQ ID NO: 333946 - DNA, 201 bp, Homo sapiens
gaagactttgatgagaggattattctagattcagagaaaagactaaataaagtactgattcgttatctttagccaaatgtaatatctctggattccagggygccttttcttaggagcaacctctccgtgacttcttttgtccctcctttcaggtatgaatgctgctgtcagggctgtggttcgagttggtatcttcaccgg

SEQ ID NO: 333947 - DNA, 201 bp, Homo sapiens
gtgaggaactcatgtcgtcaaacaacagagatgagcacagagctactggtgcccaaacataaaaaacccctggcctgatgtctttctgcttctgccagccyaagaaattcacagggactccctccagggtgttctgctccttgttctaagtgcagttgtatatggagattctgtgctctagtccttaagaaaaatggaata

SEQ ID NO: 333948 - DNA, 201 bp, Homo sapiens
accccaggactctggggagtgaaggaactaagccgctgccatatctgagctgagtacttagggggaggaggaagaggaggagaaaggcaagcaggaggagscggagccttcttgtcagcatctgttagtggaggttgggaagcctctcctccttccccctccctctttgcctccacctggctcctccccatgttcgtccat

SEQ ID NO: 333949 - DNA, 201 bp, Homo sapiens
atcttttagagcaagtcgcgtttctttccttccctcccaccaacttccccttctccttttctccatggttatcaagaccatctgttatcattggccccctrggaagcaggttggaggagataggatgagccaaaaataagaattaagattaactattaggaaggatatccacatcccagtatttcaaaaatgggagaaagt

SEQ ID NO: 333950 - DNA, 201 bp, Homo sapiens
cagaagactttgatgagaggattattctagattcagagaaaagactaaataaagtactgattcgttatctttagccaaatgtaatatctctggattccagkgcgccttttcttaggagcaacctctccgtgacttcttttgtccctcctttcaggtatgaatgctgctgtcagggctgtggttcgagttggtatcttcacc

SEQ ID NO: 333951 - DNA, 201 bp, Homo sapiens
tctcattgtcaggtaagatcacagatgaggaggctacgaagtccagctacctgaacattgtgggcctggttgggtcaattgacaatgacttctgtggcacygatatgaccattggcactgactctgccctgcatcggatcatggaaattgtagatgccatcactaccactgcccagaggtaaggggacttgggaggtaggc

SEQ ID NO: 333952 - DNA, 201 bp, Homo sapiens
aaataggcagtctttgccctcctttttctggtattgtctacaattccttttggctagagtttctctctctctagatatctcctctttaggcatgccaggtrcctcacccagtggctcctggtttgcttctcattgtcaggtaagatcacagatgaggaggctacgaagtccagctacctgaacattgtgggcctggttggg

SEQ ID NO: 333953 - DNA, 201 bp, Homo sapiens
aatcaaagagagttaccgtaatggtaggtggggtgagagcgagtgccctctatagaggctggttccccagtatagaagctgactgcccatccctcattgcrgggcggatctttgccaatactccagattcgggctgtgttctggggatgcgtaagagggctctggtcttccaaccagtggctgagctgaaggaccagacag

SEQ ID NO: 333954 - DNA, 201 bp, Homo sapiens
gatgtctgggaaaatcaaagagagttaccgtaatggtaggtggggtgagagcgagtgccctctatagaggctggttccccagtatagaagctgactgcccrtccctcattgcagggcggatctttgccaatactccagattcgggctgtgttctggggatgcgtaagagggctctggtcttccaaccagtggctgagctga

SEQ ID NO: 333955 - DNA, 201 bp, Homo sapiens
tcgttgaggctaactcaactttttctcctccctttctcatttctattcagtcaacttctcttttccctgaccttagtttattccccaaataggttccaatyggggtgggagggatcagggaggaattaggaccttagtagtcttgggcttgattacatgacatttcagcttgtcagtctacaagggtgtggctttcctctg

SEQ ID NO: 333956 - DNA, 201 bp, Homo sapiens
taaaatgactttaacaaggctgacttgaaagtgataaagaagcaagttactgctaacaagatagtggaaatactgcacaggcaccgataaacagaaatcaycaagctcaaggaaagagaaacgaggcatagatccagagatcacgttagggtacaccaagaaagagacggttcaagggaattaccaggaggcgatgagcca

SEQ ID NO: 333957 - DNA, 201 bp, Homo sapiens
gaatgaagaaactgaggaaggagggtacggaggtctgagtttaggaatagtgaccagattaggaatgcagagccctagttgagtttgcagaaaccacagayctggcttttattgcatctgtcttctctgctggcagagtaccatgccaatactgaattctttaacatgtacttgagcattgatcctgaaaccttggtagaa

SEQ ID NO: 333958 - DNA, 201 bp, Homo sapiens
ctaggaaggaaaggagttgttgttttgtagaagggattggggtttaggagatttgccagacacgatcagcagaacacgtgtgttttcatgaagaattatgytgagataggtaatggataaggaagaaatttgggcctgactgaagtaatgggggctgtccgtgaagccttgtggcagtacagcccaggtaatttgctgagc

SEQ ID NO: 333959 - DNA, 201 bp, Homo sapiens
attggggtttaggagatttgccagacacgatcagcagaacacgtgtgttttcatgaagaattatgttgagataggtaatggataaggaagaaatttgggcytgactgaagtaatgggggctgtccgtgaagccttgtggcagtacagcccaggtaatttgctgagcctgatgggtgtcagggtcagtccaagtgaaagtga

SEQ ID NO: 333960 - DNA, 201 bp, Homo sapiens
tttctctgagaaaggtaatgtaaatgtaaaagaagtttttgaggctattctatagaagatgtcataattcaatgttcctcaaaggcagggactatatttatttttttaaacctctcggcacctaatgcaaaatctagcacacagactcccaagaaatgtttgcttaaagacggatagagggccacaggggcaggttttatt

SEQ ID NO: 333961 - DNA, 201 bp, Homo sapiens
tatctcagcatgttgagccctgtctctggggagctgacttctacctcttccaaagggaggcacggtgattggaagtgcccggtgcaaggactttcgggaaygagaaggacgactccgagctgcctacaacctggtgaagcgtgggatcaccaatctctgtgtcattgggggtgatggcagcctcactggggctgacacctt

SEQ ID NO: 333962 - DNA, 201 bp, Homo sapiens; identical to SEQ ID NO: 70227

SEQ ID NO: 333963 - DNA, 201 bp, Homo sapiens; identical to SEQ ID NO: 70228

SEQ ID NO: 333964 - DNA, 201 bp, Homo sapiens
ccaattagctgtgtcagtagattccattcattgtttgtagttcccaatcagctttaaaaaaaaaagtttttcaaatttgcatacaagtcatctaaaatcartaacaacttgatctaatttagaaaaatgaaagagtatcgttcactaaagcagatctcttttgggtagatggaccatcacaaaaggagctcttacatgctt

SEQ ID NO: 333965 - DNA, 201 bp, Homo sapiens
ccatgtagtctcgcctagctatatctggggaatcggccggatagttccattggggatcgcctcagggaactgctctaatgccttcctggaggtgtggttcrtgaagccagcagttatcagcatgcgattgggctagagaaaaaactttcccattcatctggggagagggtagaagttaggatgacatttaggtcactccag

SEQ ID NO: 333966 - DNA, 201 bp, Homo sapiens
gtgataaagaagcaagttactgctaacaagatagtggaaatactgcacaggcaccgataaacagaaatcaccaagctcaaggaaagagaaacgaggcatakatccagagatcacgttagggtacaccaagaaagagacggttcaagggaattaccaggaggcgatgagccaggtaagcaaattgtggcagttaaggggatt

SEQ ID NO: 333967 - DNA, 201 bp, Homo sapiens
tcccatctgtaaaatgttcctaaggaaggtgggagattctacatcctccttagtaatgaaacccagtatctcataatatacaacctcaaacctttttatcwtgtctttattggaagaataatgctatattcctcctaactttattaagaacaggagaatattattaaattctagctgggtagcttttgtctctatgatttc

SEQ ID NO: 333968 - DNA, 201 bp, Homo sapiens
gatactgcccaactgtttccagaatagctgtaccattccatcagcaatttatgaaccacctgttttgtttgcatccttaccagcatttgggggtcgtcacyttttttttttttttttttttttttactattctgataggtatatagtggtatttcttttttctttctttctttttttttgagatggagtctctctctgttg

SEQ ID NO: 333969 - DNA, 201 bp, Homo sapiens
cccagggacttatagatacctctcttggggtatctataaggctttctttacctagagctatttttcctgtgaatacctggatattgcagcttctgctgctrgcaccatggattgcaaggagctaaggggaaaggattggcagtacctgggtacagttagaaatctcagtgcagagagaggaaaaatactacaaaacacatt

SEQ ID NO: 333970 - DNA, 201 bp, Homo sapiens
aatgagccagaattctccaccagtatcccaaagtcatggctgcccaggagtacatatgatatgaaaacctaagtatacttacctctctcaggtaagtataytttctctcagggatagaaagccttaatttcccagggacttatagatacctctcttggggtatctataaggctttctttacctagagctatttttcctgtg

SEQ ID NO: 333971 - DNA, 201 bp, Homo sapiens
cccaaactttcaggccttaccttagatcagttatcagaagcatttggcactgttccaacttcttgaaactgtccacttttggcttctaagacattgctaartcctggttcttttgtatttcttgctgccccttattagtttttatcatggaaccccccttccccttcctgttccttcaatgttggttttcctcagggttgc

SEQ ID NO: 333972 - DNA, 201 bp, Homo sapiens
ctgagaggccggtgaggagatgacgggaagctcactagctacagaaatcagaggcgtgaacgaagccaaagatctccatggctccaggcccaaaacatgarcttctgctgcttccttttctgattctctctgcagcaagttcctgcccaagaaaattagttgtgaggtgactgggaggctcagttcatctcaggggtgtgg

SEQ ID NO: 333973 - DNA, 201 bp, Homo sapiens
tggagaacaaatgcttttattttgtgtagtcaaatggggttttatctcctagtcacttgcatttgtattgtttgtgccagaatgtgcagaggtagagatamaagtaagcaagaggaagagggcagtggtaaaagcaagaggagacccgactgtggagacaatgaagcaaagggaaggtgagacttgagtaatggatgcacc

SEQ ID NO: 333974 - DNA, 201 bp, Homo sapiens
gggttctttacctcgggtagtttctttaagtttgtcataattaacagctttgtaagctgcctttttaagcccttcaacttggcaggaaaccatgtagtctygcctagctatatctggggaatcggccggatagttccattggggatcgcctcagggaactgctctaatgccttcctggaggtgtggttcatgaagccagca

SEQ ID NO: 333975 - DNA, 201 bp, Homo sapiens
atttgataggaattttgccactaagatgggcgccaaggctatgaactggatgtctgggaaaatcaaagagagttaccgtaatggtaggtggggtgagagckagtgccctctatagaggctggttccccagtatagaagctgactgcccatccctcattgcagggcggatctttgccaatactccagattcgggctgtgttc

SEQ ID NO: 333976 - DNA, 201 bp, Homo sapiens
ggcacagttcaggcccaggattgtaaacaactctcttccatgtgtctcttccttcctggagaggtgtggtgtggaagatgatttatacccaaccttatccrttcccagttaggcttaggatttactctttcattttcaggcaaatgttgaacatctggtgcaaaagatgaaaacaactgtgaaaaggggcttggtgttaag

SEQ ID NO: 333977 - DNA, 201 bp, Homo sapiens
cagtccacactgagcttcttacaggaattaggcacagttcaggcccaggattgtaaacaactctcttccatgtgtctcttccttcctggagaggtgtggtrtggaagatgatttatacccaaccttatccattcccagttaggcttaggatttactctttcattttcaggcaaatgttgaacatctggtgcaaaagatgaa

SEQ ID NO: 333978 - DNA, 201 bp, Homo sapiens
ccagagagtccagtgaggtctctcagtagcagcagatctggaggtgcacatgctccttgtggtgtggttccctttccggcctccatcccctctgttacatycccacacatgcatgtgtgtacgtgctcaggcacgtgcttggtgtaaagagtgggtagtgctctgaggctggaagccactgtggcaggtgaacataaatgg

SEQ ID NO: 333979 - DNA, 201 bp, Homo sapiens
ggaaggtatccgttagagacagaatctcattgaggggccccggtgctcttacccttgccccacgaataaaatggaggctctccagaccttttatcaactaygaggactaggagaacttgttgggtatgggtgaggctatttgtagagtacaacttctagcaggatgcttctgactctcatctcagatacctggcccttgtc

SEQ ID NO: 333980 - DNA, 201 bp, Homo sapiens
ggcagctttgccttttggggctggatgataatttgtcatgggtggctgttctatgcactgtaggacagttgcacagcatccctggtctctacccactagawgccagtagcacctccctctcactcccaattgtaacaaaaatgtctccaaacattcccactttcccacctgcttcctcttaattcaaaggaaatctgtatg

SEQ ID NO: 333981 - DNA, 201 bp, Homo sapiens
cccattggagaaaaatgttacccagacacaaataggcagtctttgccctcctttttctggtattgtctacaattccttttggctagagtttctctctctcyagatatctcctctttaggcatgccaggtgcctcacccagtggctcctggtttgcttctcattgtcaggtaagatcacagatgaggaggctacgaagtcca

SEQ ID NO: 333982 - DNA, 201 bp, Homo sapiens
tgacctctgcgccataatccagaaggatgctgacactctcaagatttcccttcatggcagcccagctgagcggtgtatcattgttgtaatccagggcattsacagaggccccgctctctaggagagcccgcacacactcagcattgttcttaaaggctgcccagtgaagtggggtatctctgttgccatccaaagcattgg

SEQ ID NO: 333983 - DNA, 201 bp, Homo sapiens
tatttgtgtcggtacgtgcacgcgtgtacacacacacatcgcccccgccctgcttttacctcccattggagaaaaatgttacccagacacaaataggcagkctttgccctcctttttctggtattgtctacaattccttttggctagagtttctctctctctagatatctcctctttaggcatgccaggtgcctcacccag

SEQ ID NO: 333984 - DNA, 201 bp, Homo sapiens
catgggaaggaattcagtgacaagagagggaccctatttgccctttactcttagcatttgaaaataccaccctggtttcctggggcagggagagggtggargagtgatcacaggatgctttgctctttatggaaaggtcataaacaagactatggggactgacacataagcagatcttactctagggtcacagggaaggtc

SEQ ID NO: 333985 - DNA, 201 bp, Homo sapiens
tgtcatgtggtttcatgggaaggaattcagtgacaagagagggaccctatttgccctttactcttagcatttgaaaataccaccctggtttcctggggcarggagagggtggaggagtgatcacaggatgctttgctctttatggaaaggtcataaacaagactatggggactgacacataagcagatcttactctagggt

SEQ ID NO: 333986 - DNA, 201 bp, Homo sapiens
ggactctggggagtgaaggaactaagccgctgccatatctgagctgagtacttagggggaggaggaagaggaggagaaaggcaagcaggaggaggcggagmcttcttgtcagcatctgttagtggaggttgggaagcctctcctccttccccctccctctttgcctccacctggctcctccccatgttcgtccatcacccc

SEQ ID NO: 333987 - DNA, 201 bp, Homo sapiens
tcgatgatgggcaacctgcctaggtaactagtgactctcaagactacttctagtgacctgaaaatgtgggaagcattccaaaggagtgctgcttcacccayttgctccttgtgtcacagcttctccctggaagataagagctttctatcatatttttcacttcatctaggccatctatcaccagcattgcccatgccccct

SEQ ID NO: 333988 - DNA, 201 bp, Homo sapiens
ttgtaaaaaattttcatcttaggaaaccatttaataatagatttctcatgtatttttaaatgttcaattcacaggcaatttatatgaagcttcagaaacayatctatgtatttcgtcttaacttaaatacatctatattggagtcaattcactggaaacctttattgagttcccgctatttgcccaataatatactggaaa

SEQ ID NO: 333989 - DNA, 201 bp, Homo sapiens
tgaggctttctagtgtaaatacggattttaggggtcaactgaccttgtttatcacattctcactttgataaaatattgatcactgagtcgtgtattttccrggtaagattttgacctggtttgttgtgatagatgccaggcagataaggaggacttgagagttgaggggggaacaaaatttatcccatgagcttgtcatta

SEQ ID NO: 333990 - DNA, 201 bp, Homo sapiens
ggggacaggtttgtgggggactgaggggacaggtaggctccagtcatctcctccacagtcagtctggggcgagtcttttcaccaccagtggtcttggcacwccccaacctatctagactgtcgcggactccaagcagagccaagcctgtttgtctctttatcccccacaagccaggatgggccttagtcactttgcaactg

SEQ ID NO: 333991 - DNA, 201 bp, Homo sapiens
ggaatttggccggggcgggagcagggggtagacaagattcagcccataacagaccctgttgtttactgggcctgggacgcagagtctttgctagagtccastgtgaaagcattctgcagcagcacccaccaggtgacagttccaaatcttgtcttttagaatttcattttcatgggtgacttcaatgccggctgcagctac

SEQ ID NO: 333992 - DNA, 201 bp, Homo sapiens
catagaaagggggtaatgataacactctcctcataaggcaagaaataatggctgtaaagatcgtggcagatgccacattccagccaatcaatggtggctcytctcattggactcaaaggttatgatgaacagtggcccttccacatgatgccattgggcgtatggaggcagattggaaagaaaggaacatgtacagtaggg

SEQ ID NO: 333993 - DNA, 201 bp, Homo sapiens
gcagattggaaagaaaggaacatgtacagtaggggaatgtttactcttcaagatgcagtgttaaatctttgttttctagaaattcaaggagaggcataacrtacaactatgtgattagctctcggcttggaagaaacacatataaagaacaatatgcctttctctacaagtaagtatcacctatgctccctggaacatggc

SEQ ID NO: 333994 - DNA, 201 bp, Homo sapiens
atagagtgagactcttgtctcaaaaaaaaaaaaaaaatcctaagcaatggcttaggtgaacccctagcctagaggctcactctccctccagtcactgcatygcagactcctccacaggccgcagcgggtgaggaaatccaaatggattgctccctgaactctaacaacagtacttgtactggcccctgattaagtgccagc

SEQ ID NO: 333995 - DNA, 201 bp, Homo sapiens
gggtgaggaaatccaaatggattgctccctgaactctaacaacagtacttgtactggcccctgattaagtgccagcctcctgtaatccttgcaatgactayaaggtagggagtaggattatctccactttacatttcaggaaactgaggtttaaaaaggcatggagtcacccagctactgaaatggacaggccagggttgt

SEQ ID NO: 333996 - DNA, 201 bp, Homo sapiens
ctcgctatgttgcctaggctgttcttgaacccctgagctcaagccatctgcctgccttggcttcccaaagtgctgggattacaggtgtaagccactgtgcscagccagtggttaacatgcagtgttatgcaatgctcgatggagtcaagaatcaaatattttttcagtacctactatgtaccaggctctgttgagggcact

SEQ ID NO: 333997 - DNA, 201 bp, Homo sapiens
cctttcttaaataggtaaaggcaagggagaacaaaggaaaagaggaagttgcttatgccaaatagggaaggggcaaaggctgtgagctggaatgtgcctgygagctggaatgtccagcacaaatatcttggttaaggtacaaggacatagaatgtactatgtgcctgtgagcatgtctaacagctacataggatagagctt

SEQ ID NO: 333998 - DNA, 201 bp, Homo sapiens
ctggatccagggctcagacaaggtaatcagagcttgatttgtctcttcctttctatctcctggttgccctttcctctgtgtggctccattctcaggttggytccatccctgggatggcaggacagccaccagcagcctccagaccaaaataaattttctttcccacaaggcaacaaatagtgtgggactgagtctcattgg

SEQ ID NO: 333999 - DNA, 201 bp, Homo sapiens
aaggtgaggaaaagggcacagagaagtttggttatttgtccagggctgaacagccagtaagtaaaagtgtatatgctttaacgtcatcagcattcccgacrtgagatgacccccaagcccccggagatatttggcaacatctgtcgaaatttttggttgtcacaactgggggatgtgattggcatctagtgggtagaggca

SEQ ID NO: 334000 - DNA, 201 bp, Homo sapiens
aacatgatgagactccatctctatgaaaaattcaaaaaaattagctgggcatggtgatgcatgcctatggtcccagctacttgggaggctgaggtgggagkatcacttgagtccaggaagcggaggttgcagtgagccaagatcgcaccactgcactccaggctgggcaacagagtgagatcctgtctcaaaaaaaaaaaa

SEQ ID NO: 334001 - DNA, 201 bp, Homo sapiens
aggagtggagactttcccacagacttcttgtttcttcttgctgcttttgggtgactcagcctatgacacttttgctcctcctgaaatctccatatcttgcytttctcaaattccaaggtagcctttgcgcaacatatcactctccactgactcttgtcccatcagggcccatagtggatggctgtatgggggccatgtgac

SEQ ID NO: 334002 - DNA, 201 bp, Homo sapiens
gccttccctgggtcctccagtattacatggaggggttggagtgaaccttctggaggtggggtcaatgactcttggaggtaggggaaagcttcctttgaccmagttgcacacaaagacagaaaacgtgtttgcatgggcattgtttaacctgcttaaaagaatgaaaagattttagcacttttttctttttctgtaattact

SEQ ID NO: 334003 - DNA, 201 bp, Homo sapiens
agtgaaccttctggaggtggggtcaatgactcttggaggtaggggaaagcttcctttgaccaagttgcacacaaagacagaaaacgtgtttgcatgggcawtgtttaacctgcttaaaagaatgaaaagattttagcacttttttctttttctgtaattactaaagaagtacatgtttttgcaaaaaaaaaaaaaaaatca

SEQ ID NO: 334004 - DNA, 201 bp, Homo sapiens
gaagaaattattttaataagcactcagtgcaatacttaaaaacagtaagtgtccaataaaaggttttatttatctgtggtaaatgacctcaaacccctggkaattctctttcttgcaggtcatcaaacgctgtgacatcatactcgtgatggaaatcaaggacagcaacaacaggatctgccccatactgatggagaagct

SEQ ID NO: 334005 - DNA, 201 bp, Homo sapiens
acttcgtgattatccccctgcacaccaccccagagacatccgttaaggagatcgatgagttggttgaggtctacacggacgtgaaacaccgctggaaggcrgaggtgaggactgctgtgtcagacgaattcccatctagcaggggcaggctctggtccctgagtgggatgagtacctctccagggagggggaggaggaagg

SEQ ID NO: 334006 - DNA, 201 bp, Homo sapiens
aaaccatagaaagggggtaatgataacactctcctcataaggcaagaaataatggctgtaaagatcgtggcagatgccacattccagccaatcaatggtgrctcctctcattggactcaaaggttatgatgaacagtggcccttccacatgatgccattgggcgtatggaggcagattggaaagaaaggaacatgtacagt

SEQ ID NO: 334007 - DNA, 201 bp, Homo sapiens
tggctcagatcttcagctcccagattcgcaacagctccctggctgttgagaagagttgacttagccttgttctcaggaaaacgatcctgtgcttgagcctkctctggcttctgagaaagccatgggaacctacatctctgcttcatgaaagtagtaagaaaagggctgactcagctgggaggacttccttttccttcttat

SEQ ID NO: 334008 - DNA, 201 bp, Homo sapiens; identical to SEQ ID NO: 70314

SEQ ID NO: 334009 - DNA, 201 bp, Homo sapiens
attgtttaacctgcttaaaagaatgaaaagattttagcacttttttctttttctgtaattactaaagaagtacatgtttttgcaaaaaaaaaaaaaaaatmaaacaatatacaagtatatagagtaaaaagtggaagtcctcctttcatctcctccctgcatccctccctgcaccctggagtgttccatattaaggttttg

SEQ ID NO: 334010 - DNA, 201 bp, Homo sapiens
ccctttgcctctcggtcctgtgtcctcaccatgcacccttgtggtcagcctggaaaggccaacttgatagttacaggctgcttcagatctgccacccacgkggtgacaagtcctggcgcgttggcatgggtggtactgaaaaaggctatggatccagggcagtgcagcggccagtggcaagggatgaggcggggtctccaa

SEQ ID NO: 334011 - DNA, 201 bp, Homo sapiens
ttcccaagtcaaacagtgtttttgacttccagaaagcttacaagctgactgaagaggaggtaaggttgccatcttgtctttctatgccattgtcctggaargatgagttagcttgggcaacatgatgagactccatctctatgaaaaattcaaaaaaattagctgggcatggtgatgcatgcctatggtcccagctacttg

SEQ ID NO: 334012 - DNA, 201 bp, Homo sapiens
ctgggcatggtgatgcatgcctatggtcccagctacttgggaggctgaggtgggaggatcacttgagtccaggaagcggaggttgcagtgagccaagatcrcaccactgcactccaggctgggcaacagagtgagatcctgtctcaaaaaaaaaaaaaaaaaaagatgggttgatgccaccctttgaggtcaccactgaag

SEQ ID NO: 334013 - DNA, 201 bp, Homo sapiens
ccttctccagcgccattcttctcccctggcaaatgagtgggaagtgattgaaaatgatacagaagaatcagaaggcaacatggccacagtagatcaggtcwggggtagaacaggttagaaaaagatgtttactaaaaggatcctgattttatacacatgtatcccaaaggatggtgggattacatgtgacattttaaagat

SEQ ID NO: 334014 - DNA, 201 bp, Homo sapiens
tcaaggaacttaaagttggcccttagggggaatgtagaagctggcttggaacaataaccacttcaactctctgtacctcctgccgtcatcttaaaacaggrgtgataacaatggttccctccagggttgctggggggactacaggagttggcaaatggaaagctcttaatgtagtatctggctcattatacgttccagata

SEQ ID NO: 334015 - DNA, 201 bp, Homo sapiens
agacgcagatgtgttttccagggagccctttgtggtctggttccaatctccccacactggtaagacccacacaggcctttctgtctgggacctccccaacrgcccatgaatgcgcagcagccttgagcatgagcccattaaggaggcattaggctggatgtgacagtgcattgcttctaatacttcaatgtagacgatgca

SEQ ID NO: 334016 - DNA, 201 bp, Homo sapiens
acctgcttaaaagaatgaaaagattttagcacttttttctttttctgtaattactaaagaagtacatgtttttgcaaaaaaaaaaaaaaaatcaaacaatmtacaagtatatagagtaaaaagtggaagtcctcctttcatctcctccctgcatccctccctgcaccctggagtgttccatattaaggttttggtatgcct

SEQ ID NO: 334017 - DNA, 201 bp, Homo sapiens
attatccccctgcacaccaccccagagacatccgttaaggagatcgatgagttggttgaggtctacacggacgtgaaacaccgctggaaggcggaggtgakgactgctgtgtcagacgaattcccatctagcaggggcaggctctggtccctgagtgggatgagtacctctccagggagggggaggaggaagggcatgtgc

SEQ ID NO: 334018 - DNA, 201 bp, Homo sapiens
tccatattaaggttttggtatgcctggttcagtgggtgagaagattaatctggagtcagcactctgagattgaatctcagctttgccacatgctagctctstttccttgggcacaagcctcactttgctcatctctaaaataaagtagccgtaggaagggcttggcaggtatgggatgagatgaaacacagaaagccctaa

SEQ ID NO: 334019 - DNA, 201 bp, Homo sapiens
aaataaagtagccgtaggaagggcttggcaggtatgggatgagatgaaacacagaaagccctaatgcagcacctgaacctagttggattcagttaaatttrgccgttagaattttccttccagaatccaggcattttttaaaaggtccaatttcattcaatggatgtgctaattcgagaatggggtccatctcttaatctg

SEQ ID NO: 334020 - DNA, 201 bp, Homo sapiens
ctaaatcatttgaattctaataaagtaaacaaacaaaacattgatgataacctaaagtgtttataaatgttccagaactgtattcagacaaaggtttcaamgtaaagtcatgaacctgaatcaaaccctaccaagtgcacattttataagagagttacaagattttctatatagttggcccagcagctctcattaagtcca

SEQ ID NO: 334021 - DNA, 201 bp, Homo sapiens
aaggtttcaacgtaaagtcatgaacctgaatcaaaccctaccaagtgcacattttataagagagttacaagattttctatatagttggcccagcagctctyattaagtccatgaaataccgcatattccatcttaaaacacacaaaaagagtataccatggctctgagtctcttaaacatttctacactttaattctaaat

SEQ ID NO: 334022 - DNA, 201 bp, Homo sapiens
tgtcccccagcagaaggttccgtcaccccaggtgccctctagggtggaccacttccgagttcatccactgtcaggaaaaggcacatggcatgcaaccgcargaccgatgactagatgtcagagctggctcccggttgggatatgagtgactttgtggaggatggcgcctaaatgaggcatgccaatttctgcaccagggtg

SEQ ID NO: 334023 - DNA, 201 bp, Homo sapiens; identical to SEQ ID NO: 70311

SEQ ID NO: 334024 - DNA, 201 bp, Homo sapiens
tctttcccacaaggcaacaaatagtgtgggactgagtctcattggctctgactgggtcaggtgtccatccctgaaccaatcattgtgatcagggtgttgasctactctgattgactaaatctgtgtccaccccagctccaccccaaactcagtttgaggtggaggagggatgggtggtctcccaaaggaacttggggtgct

SEQ ID NO: 334025 - DNA, 201 bp, Homo sapiens
ctttcccacaaggcaacaaatagtgtgggactgagtctcattggctctgactgggtcaggtgtccatccctgaaccaatcattgtgatcagggtgttgagmtactctgattgactaaatctgtgtccaccccagctccaccccaaactcagtttgaggtggaggagggatgggtggtctcccaaaggaacttggggtgctg

SEQ ID NO: 334026 - DNA, 201 bp, Homo sapiens; identical to SEQ ID NO: 70293

SEQ ID NO: 334027 - DNA, 201 bp, Homo sapiens
agttagtgggctcttgtacctcctattgtttattgctgccaggtgtaaatttaaaaacacctagtgctaggcctggcacatagtgaatgttcagcaaatcmtgtctatattagcagaagctggtgatcactgaggttaaggatgacactctgtcctcaactgaacccatcaatcacggggaaaattgtgatcaccaaggtc

SEQ ID NO: 334028 - DNA, 201 bp, Homo sapiens
ggccactcactcagttacacatggcagttgtgtgcccgtgggtaggtcaagtcccttctccagcgccattcttctcccctggcaaatgagtgggaagtgawtgaaaatgatacagaagaatcagaaggcaacatggccacagtagatcaggtcaggggtagaacaggttagaaaaagatgtttactaaaaggatcctgatt

SEQ ID NO: 334029 - DNA, 201 bp, Homo sapiens
ttaaggtacaaggacatagaatgtactatgtgcctgtgagcatgtctaacagctacataggatagagcttaacaaagagttattagcacaaagcaaggagrcttgaaggaagttagtctttaaaggaaactattatttctaacacttatgatttattctttaataagaagggaaactttgaagaggaaacttttttacttt

SEQ ID NO: 334030 - DNA, 201 bp, Homo sapiens
tacagtaggggaatgtttactcttcaagatgcagtgttaaatctttgttttctagaaattcaaggagaggcataacgtacaactatgtgattagctctcgscttggaagaaacacatataaagaacaatatgcctttctctacaagtaagtatcacctatgctccctggaacatggccaccaataaatcgtgaattgaatc

SEQ ID NO: 334031 - DNA, 201 bp, Homo sapiens
atcgtggcagatgccacattccagccaatcaatggtggctcctctcattggactcaaaggttatgatgaacagtggcccttccacatgatgccattgggcrtatggaggcagattggaaagaaaggaacatgtacagtaggggaatgtttactcttcaagatgcagtgttaaatctttgttttctagaaattcaaggagag

SEQ ID NO: 334032 - DNA, 201 bp, Homo sapiens
atgcaaccgcaagaccgatgactagatgtcagagctggctcccggttgggatatgagtgactttgtggaggatggcgcctaaatgaggcatgccaatttcygcaccagggtgacgaacataagggctccttaaaggctagcccaatgtatctgtatttccttggggattaaaacccatgatcttcagttcctcagagaact

SEQ ID NO: 334033 - DNA, 201 bp, Homo sapiens
tgagtccaggaagcggaggttgcagtgagccaagatcgcaccactgcactccaggctgggcaacagagtgagatcctgtctcaaaaaaaaaaaaaaaaaaagatgggttgatgccaccctttgaggtcaccactgaagacacaacattgggcactagaccttgaccctcaatgcctatgattctgtgatttgaggcccctc

SEQ ID NO: 334034 - DNA, 201 bp, Homo sapiens
ttctgccagggtcccaccctgaacccctgctccaggaggatgtcctccgccctgcataccccatgctctccctccctgggggccttggctctgccccccccatgccctgccctattccagagcccgggccaagtgcccccagccctcatgtgcgccctacctctattgcaacatccaccacattatatttgtcaccaaggt

SEQ ID NO: 334035 - DNA, 201 bp, Homo sapiens
agatgaaatctcgctcttgtccccaggctggagtgcaatggtgcaatctcggctcactgcaacctccacctcccgggttcaagtgattctcctgcctcccragtagctgggattacaggcatgtgccaccacgcctggctaatttttatatttttaatagaaatggggtttcaccatgttggccaggctggtcttgaatgc

SEQ ID NO: 334036 - DNA, 201 bp, Homo sapiens
cccttcctcctcttgagttctgctgctcaaatgcaaaatgaatcaaataaagtgtgaacatagtccatcagagctggggcatggaaaagaccaggggtgtrtttcattgcttattaataaataggtcaaaagaaagattcattctttccaaaaattatgaaatcattcacttattaaacaagaatgtattgagcatctatt

SEQ ID NO: 334037 - DNA, 201 bp, Homo sapiens
ctctaccaaaaaaaaaaaaaaaaaaaaaaaacaaagctagccaggcatgatggtgcatgcctgtaatcccagttacttgggaggctgaggcaggagaatcrcttgaacctgggaggcagaggttgcagtgagccgaaattgtgccattgcactccagcctgggcaacaagaacgaaactccgtctcaaaaaaaaaaaaagg

SEQ ID NO: 334038 - DNA, 201 bp, Homo sapiens
gttttccagggagccctttgtggtctggttccaatctccccacactggtaagacccacacaggcctttctgtctgggacctccccaacggcccatgaatgygcagcagccttgagcatgagcccattaaggaggcattaggctggatgtgacagtgcattgcttctaatacttcaatgtagacgatgcagttcagtgtgat

SEQ ID NO: 334039 - DNA, 201 bp, Homo sapiens
gcctaatgaccccaagatcattaaaatctcggccactggctggaccctctgggaactggggacccagataatgcagcctgtgccttctggaggggacagcyggtttccctccagcagtgtttatgagaccttgacaggggaagtgtgtgacccccgcctctttcctgtttctcagctgtcaaagacttcgtgattatcccc

SEQ ID NO: 334040 - DNA, 201 bp, Homo sapiens
tctctacaaaaaatacaaaaattagccaggcatggtggcacacacctatactcccagctactcaggaggctgaggtgggaggatcgcttgagcccagaagrtggaggctgcagtgagccaggatcgcaccactgcactccagcctgggtaacagagtgagactttgtctcaaaaataaaaaataaaaataaaaataagaaa

SEQ ID NO: 334041 - DNA, 201 bp, Homo sapiens
taggggggccaggagccctgggtccagattccacctaccagacttgtgagcttgggaggccctgcccctccctgaaccaccagctcccctagtaaaatggygaccacatccaaataccacctgtagcactggctggtgaagagaactcagggtgcctgaggcacccagcagagcctgcagcaaggtgggtatccatgagcc

SEQ ID NO: 334042 - DNA, 201 bp, Homo sapiens
taaaatggcgaccacatccaaataccacctgtagcactggctggtgaagagaactcagggtgcctgaggcacccagcagagcctgcagcaaggtgggtatycatgagccagagccgctgctgttgctgtcactgggaaggaggattggagtgaggactggcaggctctgttcttccttggacgagcctctcagacccaggt

SEQ ID NO: 334043 - DNA, 201 bp, Homo sapiens
attggagtgaggactggcaggctctgttcttccttggacgagcctctcagacccaggtggccctgccctttgggaggtaaccaaggccttctagatggtgktgtttagccaggatagcaatgccaagcctgtgggagccatgacaagattgttcaatgggaaaccctgacatgcaaggcaatgattttccccacttcacac

SEQ ID NO: 334044 - DNA, 201 bp, Homo sapiens
acttcacacatggcccgtggagcctgggtagccactgagttcccatctccttcctcactgatgaaacccggctgtctttttgttccttggtgagtccatcrtgggggcttgaactctgcatctcccctgagcagctgtgtcctgcagagcatgtccgaagtccttgtcaaggctgcctcaccctccccatcctaccaagag

SEQ ID NO: 334045 - DNA, 201 bp, Homo sapiens
gaaagcttacaagctgactgaagaggaggtaaggttgccatcttgtctttctatgccattgtcctggaaagatgagttagcttgggcaacatgatgagacyccatctctatgaaaaattcaaaaaaattagctgggcatggtgatgcatgcctatggtcccagctacttgggaggctgaggtgggaggatcacttgagtcc

SEQ ID NO: 334046 - DNA, 201 bp, Homo sapiens
atttttagtagaggcgggtttcaccatgttggccaggctggtctcgaactcctgacctcaggtgatctgcccatcttggcctcccaaagtgctggtattayaggcgtaagccaccgtgcccggctgggactgtattttaacagttcaacatggtgggctttgtagtcacgcagacctaagttcaaatcctgactctaccac

SEQ ID NO: 334047 - DNA, 201 bp, Homo sapiens
tcaccatgttggccaggctggtctcgaactcctgacctcaggtgatctgcccatcttggcctcccaaagtgctggtattacaggcgtaagccaccgtgccyggctgggactgtattttaacagttcaacatggtgggctttgtagtcacgcagacctaagttcaaatcctgactctaccacctatcctggctgtatgactt

SEQ ID NO: 334048 - DNA, 201 bp, Homo sapiens; identical to SEQ ID NO: 70316

SEQ ID NO: 334049 - DNA, 201 bp, Homo sapiens
ccaagcactgctgtcttctcacagagtcttgaagccagagcagcgccaggatgtcacgggagctggccccactgctgcttctcctcctctccatccacagygccctggccatgaggatctgctccttcaacgtcaggtcctttggggaaagcaagcaggaagacaagaatgccatggatgtcattgtgaaggtgagcccct

SEQ ID NO: 334050 - DNA, 201 bp, Homo sapiens
ccaggtgacagttccaaatcttgtcttttagaatttcattttcatgggtgacttcaatgccggctgcagctacgtccccaagaaggcctggaagaacatcygcttgaggactgaccccaggtttgtttggctgatcggggaccaagaggacaccacggtgaagaagagcaccaactgtgcatatgacaggtaggaggccct

SEQ ID NO: 334051 - DNA, 201 bp, Homo sapiens
caccgctggaaggcggaggtgaggactgctgtgtcagacgaattcccatctagcaggggcaggctctggtccctgagtgggatgagtacctctccagggarggggaggaggaagggcatgtgcaggctaccaccacttacagcattctttaaggcctttcttcagccctaagtatcccttttgctaaatctgcctgggtac

SEQ ID NO: 334052 - DNA, 201 bp, Homo sapiens
cttgaaccagggaggcagaggttgcagtgagccgagatcgtaccactgcactccagcttgggcgatagagtgagactcttgtctcaaaaaaaaaaaaaaaatcctaagcaatggcttaggtgaacccctagcctagaggctcactctccctccagtcactgcatcgcagactcctccacaggccgcagcgggtgaggaaat

SEQ ID NO: 334053 - DNA, 201 bp, Homo sapiens
ggcaaggtcaatgggacttcatggctgtatccccagcacccaggatataaacaacagtgaattgaaatcgtggtcccaaagcttgtaaaaaaatgcctgawggctttcagaggagagaatattcctgcttatcataaatgctcaggagtggttcgtggacacggacaggtggcctgatgacatttattccaccagaaagca

SEQ ID NO: 334054 - DNA, 201 bp, Homo sapiens
gggcaaggtcaatgggacttcatggctgtatccccagcacccaggatataaacaacagtgaattgaaatcgtggtcccaaagcttgtaaaaaaatgcctgrtggctttcagaggagagaatattcctgcttatcataaatgctcaggagtggttcgtggacacggacaggtggcctgatgacatttattccaccagaaagc

SEQ ID NO: 334055 - DNA, 201 bp, Homo sapiens
gcacatagtgaatgttcagcaaatcatgtctatattagcagaagctggtgatcactgaggttaaggatgacactctgtcctcaactgaacccatcaatcayggggaaaattgtgatcaccaaggtcaaaataaaatgttcttgaagaaaactctgaagtcagcaatgccccaccaaacaatagcacaaacaaggaaatctg

SEQ ID NO: 334056 - DNA, 201 bp, Homo sapiens
gctgtcaaagacttcgtgattatccccctgcacaccaccccagagacatccgttaaggagatcgatgagttggttgaggtctacacggacgtgaaacaccrctggaaggcggaggtgaggactgctgtgtcagacgaattcccatctagcaggggcaggctctggtccctgagtgggatgagtacctctccagggaggggg

SEQ ID NO: 334057 - DNA, 201 bp, Homo sapiens
cagctactccttttcaccagcaaagcccagctcctttctctctctttccttttcttctttctttcttttctttctttctctctttctttctttctttctttttctttcttcctttttctttcttctttctgtcttttctttcttcttcctttctctttttctttgtttctttcttcctttcccttccttacttttttcctt

SEQ ID NO: 334058 - DNA, 201 bp, Homo sapiens
acagctactccttttcaccagcaaagcccagctcctttctctctctttccttttcttctttctttcttttctttctttctctctttctttctttctttctttttctttcttcctttttctttcttctttctgtcttttctttcttcttcctttctctttttctttgtttctttcttcctttcccttccttacttttttcct

SEQ ID NO: 334059 - DNA, 201 bp, Homo sapiens
tacagctactccttttcaccagcaaagcccagctcctttctctctctttccttttcttctttctttcttttctttctttctctctttctttctttctttctttttctttcttcctttttctttcttctttctgtcttttctttcttcttcctttctctttttctttgtttctttcttcctttcccttccttacttttttcc

SEQ ID NO: 334060 - DNA, 201 bp, Homo sapiens
atacagctactccttttcaccagcaaagcccagctcctttctctctctttccttttcttctttctttcttttctttctttctctctttctttctttctttctttttctttcttcctttttctttcttctttctgtcttttctttcttcttcctttctctttttctttgtttctttcttcctttcccttccttacttttttc

SEQ ID NO: 334061 - DNA, 201 bp, Homo sapiens
aaaaaaaaagaaaatgccatgcttttaagttcagcttacaaaagttctcattctttttataaatccagctagaatttccagataaaataaaagttgcccarttgaatacgaactaccccaaattcaaatctacctactgttctatatttttatttgttaaatctgccaatcctaaacccaacaaacctaaataattactta

SEQ ID NO: 334062 - DNA, 201 bp, Homo sapiens
tcaatatcctctgtgcattttgtgcaagtatttatgatttcctcaggaagcaaccctaaaaatgagaccaattagtgcaacggtatttatatttttaaagytttagctacatattcctaaatgcaatgcatacatttaagtcctagcattccctcgtgctttttaaagtcccttcagggattttcaaacagctttcatctt

SEQ ID NO: 334063 - DNA, 201 bp, Homo sapiens
aggggctctgggcttgaattacataggttcaaattctgcctccgccattttctagtagggtgattgggagtgtaatttactcaactttctctgagtctcaygctcctctttaaaatgtacataacaaaagcacctacctacctcagggagtccttcatttagttcagagaagaaattattttaataagcactcagtgcaat

SEQ ID NO: 334064 - DNA, 201 bp, Homo sapiens
ggcatgtgtaggacaattgtagggacaggcaagaatccatgtcagtctgcctaagggcttcccttatagtaagggaactgagtgggggacctgcctgagtyacccagccaggaagtggccaagcctacctttgaacttgcgtcacatctgatctcatagccagtgctctattctttgtcatctcagccttccttggagtgt

SEQ ID NO: 334065 - DNA, 201 bp, Homo sapiens
tgaaacttctcacaagatgaatgatattgctttctatgcagttttagtcattctggatgtgattaattacttttgtttaaatatttatgtttttcagtggyggtgctagagaatgaattgatgtatggggttccttttgaatttcctccggaagctcagtcaaaagattttctgattcctattggaaaagccaaaatagaa

SEQ ID NO: 334066 - DNA, 201 bp, Homo sapiens
ttatatactctaaatctgtttcatcagctataaaacagggataatataaatactgtcccgtcatagggctgttgtgagaattacacttagtgtagtgcttsgtacatgatgggcactcagctgttaactgttaacttattttgatgagggaatttaaagtgaaggaggattggctgggcgtggtggatcacctgaggtcag

SEQ ID NO: 334067 - DNA, 201 bp, Homo sapiens
ttcaagacctgtgggccactgcttagaagctgcagcagtgctatctaaagaaggagttgaatgtgaggtgagtggacatttacttgttcttaaagaattaraagggctccttttagatttaagacccagaagagttctgtaacaggttaattagatgtaaaaccttgctttgtcactcatttctgtctctgcttaaagctg

SEQ ID NO: 334068 - DNA, 201 bp, Homo sapiens; identical to SEQ ID NO: 70329

SEQ ID NO: 334069 - DNA, 201 bp, Homo sapiens; identical to SEQ ID NO: 70330

SEQ ID NO: 334070 - DNA, 201 bp, Homo sapiens; identical to SEQ ID NO: 70332

SEQ ID NO: 334071 - DNA, 201 bp, Homo sapiens; identical to SEQ ID NO: 70335

SEQ ID NO: 334072 - DNA, 201 bp, Homo sapiens; identical to SEQ ID NO: 70337

SEQ ID NO: 334073 - DNA, 201 bp, Homo sapiens; identical to SEQ ID NO: 70338

SEQ ID NO: 334074 - DNA, 201 bp, Homo sapiens
ggtgataaatatgcgtaccattagaccaatggacatggaaaccatagaagccagtgtcatgaagacaaatcatcttgtaactgtggaaggaggctggccamagtttggagtaggagctgaaatctgtgccaggatcatggaaggtatttcaaagaaactggttctagaatacagtcaagctatagtaaacatcatgtacct

SEQ ID NO: 334075 - DNA, 201 bp, Homo sapiens; identical to SEQ ID NO: 70340

SEQ ID NO: 334076 - DNA, 201 bp, Homo sapiens
tcaccaagtgtgacaggtatgggttaaagtcttacaatagaaaatcacttacctttctttacatcttttactcaaacctaaggcagctgaaattaaagaawcacacaaatacacacgctcatgctctgcaatcttggaatgctcaaatatagcaatacaaataaagactaaatacagacaaatgaccaacatgttcattgg

SEQ ID NO: 334077 - DNA, 201 bp, Homo sapiens
atcatgtacctgaatacgtacaggataaagagattgaaagctaggagtggccaaacgacttcaactttaaacttgtaagtttggcatttctcttcaggcasatatttttaaaagcaaatccagaaagcggttccccataattagcattccttacattttctcttcctggtcagccacacctctgtgccaaggtggtagtgc

SEQ ID NO: 334078 - DNA, 201 bp, Homo sapiens
gtcgagggctgtggaagaaatatggagacaagaggattattgacactcccatatcagaggtaagccttccagtgggaagcagaccctggagggcatgtctrttagtgtccattatcctcatttttatggattttcacttatgtttatattttactttatagatgggctttgctggaattgctgtaggtgcagctatggtat

SEQ ID NO: 334079 - DNA, 201 bp, Homo sapiens
gtaacaggttaattagatgtaaaaccttgctttgtcactcatttctgtctctgcttaaagctgggaacctgcctgcagttcacatacttagctttttaccwctcaggtcacttaggttctggatctttttttttgagagacagtgggagctctctgaacctcttctggttctcagtgataccccccgagagagaaaaaaac

SEQ ID NO: 334080 - DNA, 201 bp, Homo sapiens
tcatgaataggtattcataggcagattagattttcctagatacaaagattaacaggaaacaaaaaaggaaatggtattatggggataaggctctatttgtrctgcaatagctctgtaaacttgattatattacctgtttaggtgataaatatgcgtaccattagaccaatggacatggaaaccatagaagccagtgtcatg

SEQ ID NO: 334081 - DNA, 201 bp, Homo sapiens
tatacacaatgacattctctgcatagtaaccaacactgatgtgtgtacttgaatttttaaatggattatttataatcctttaaagtgcaatttattgaaargtttaagcaaatcaggataaaggatctttctaataaatgactaacattaaagagatgctatattgatatatttagataaatctttcaaaaatcataattg

SEQ ID NO: 334082 - DNA, 201 bp, Homo sapiens
ttaattaaaatttttccttttacagtttgtacattcatgaataggtattcataggcagattagattttcctagatacaaagattaacaggaaacaaaaaargaaatggtattatggggataaggctctatttgtgctgcaatagctctgtaaacttgattatattacctgtttaggtgataaatatgcgtaccattagacc

SEQ ID NO: 334083 - DNA, 201 bp, Homo sapiens
atagtctccctctgtcacccaggttggagtgcagtggcgcgatctcagctcactgcaacctccacctcctgggctcaagggattctcgcgcctcacactcmtgagtagctgtgattagatgccggtgccaccacaccgggctaatttttgtatttttagtacagacagggtctcaccatattgcccaggctggtcttgaac

SEQ ID NO: 334084 - DNA, 201 bp, Homo sapiens
gtatgttaattctcctctccttcctttttttaactagattttaccattcattatattaaaagagcaactcctacattctggatgcaaagtatttggcagtrcttggcacctagtgagcactcagtacattaacacatgcaaagaccaactatgtgtaatagaaatgttacttttagaattctttgagtttttagagagaag

SEQ ID NO: 334085 - DNA, 201 bp, Homo sapiens
atgttaattctcctctccttcctttttttaactagattttaccattcattatattaaaagagcaactcctacattctggatgcaaagtatttggcagtgcktggcacctagtgagcactcagtacattaacacatgcaaagaccaactatgtgtaatagaaatgttacttttagaattctttgagtttttagagagaagct

SEQ ID NO: 334086 - DNA, 201 bp, Homo sapiens
tgcccatccccaaagagatttaacatcaccttttaaaaacatcatttgggaaaaaaaaaaaataccaagtaggtagatgtggtggtgcttgcctgcagtcycagctactcgggatgctgaggaaggattacttgagcctaggagttagaggctgcagtgagctatgatgtgtgccactgcactccagcatgggtgacagtg

SEQ ID NO: 334087 - DNA, 201 bp, Homo sapiens
cttgagcctaggagttagaggctgcagtgagctatgatgtgtgccactgcactccagcatgggtgacagtgagaccctgtccataaaaaataaaaataaaaaaaataaaaacattatttgaatgttggaagacttggagtgatttgtttgctactgtttgttgctgtttctagtctttttaacatccacgtttttgatttt

SEQ ID NO: 334088 - DNA, 201 bp, Homo sapiens
ttgagcctaggagttagaggctgcagtgagctatgatgtgtgccactgcactccagcatgggtgacagtgagaccctgtccataaaaaataaaaataaaaaaaataaaaacattatttgaatgttggaagacttggagtgatttgtttgctactgtttgttgctgtttctagtctttttaacatccacgtttttgatttta

SEQ ID NO: 334089 - DNA, 201 bp, Homo sapiens; identical to SEQ ID NO: 70331

SEQ ID NO: 334090 - DNA, 201 bp, Homo sapiens
accactacaaatttaagtacctaaactgctctcaaggctgctggtcatggtagagataaggctaatcagcacaatgaaacttctcacaagatgaatgataytgctttctatgcagttttagtcattctggatgtgattaattacttttgtttaaatatttatgtttttcagtggtggtgctagagaatgaattgatgtatg

SEQ ID NO: 334091 - DNA, 201 bp, Homo sapiens; identical to SEQ ID NO: 70334

SEQ ID NO: 334092 - DNA, 201 bp, Homo sapiens; identical to SEQ ID NO: 70333

SEQ ID NO: 334093 - DNA, 201 bp, Homo sapiens; identical to SEQ ID NO: 70336

SEQ ID NO: 334094 - DNA, 201 bp, Homo sapiens
taggtttgtgtttcatttctaggaaggctgccacattcctcagctcactggaatgaagttgaattgaagactttatgaatgaacaagagccacagctggckgcacagtggtgtagcatcttcaatttcaacctgatctctgatctgtgaccactctgttttcaggaacacatataactgtggtttcccattcaagacctgt

SEQ ID NO: 334095 - DNA, 201 bp, Homo sapiens
aaggctgccacattcctcagctcactggaatgaagttgaattgaagactttatgaatgaacaagagccacagctggctgcacagtggtgtagcatcttcartttcaacctgatctctgatctgtgaccactctgttttcaggaacacatataactgtggtttcccattcaagacctgtgggccactgcttagaagctgcag

SEQ ID NO: 334096 - DNA, 201 bp, Homo sapiens
cagtggctggatcatggctcactgtaaccgtgaactcctgggcccaagtgatgctcccacctcacccttctgaggttctggatcttttagaaactcaccaygtgctagttatacttgggcaagttatatactctaaatctgtttcatcagctataaaacagggataatataaatactgtcccgtcatagggctgttgtgag

SEQ ID NO: 334097 - DNA, 201 bp, Homo sapiens
caatttaggctaacccagcttattcctgtgaaccaaccagtgatctctgactgctgctcaaaacaaacaagagtgatggtgtcaggtctctgagcccaagyctgcacgtattcattcagatggcctgaagcaagtgaagaatcacaaaagaactgaaaatggccggttcctgccttaactggtgacattaccttgtgaaat

SEQ ID NO: 334098 - DNA, 201 bp, Homo sapiens
attaaagaatcacacaaatacacacgctcatgctctgcaatcttggaatgctcaaatatagcaatacaaataaagactaaatacagacaaatgaccaacaygttcattggttctacacaataacaactgatgaatgaaattgttatgttttatgctaaggtggattgtgggaaaatgttcctggctttatgtcaccaggtt

SEQ ID NO: 334099 - DNA, 201 bp, Homo sapiens
tggatgaggagctggaaagagatgagaaggtatttctgcttggagaagaagttgcccagtatgatggggcatacaaggtaactaaaatatatgaaagttayacaaaattgaggtcactgttacccccagatacacttaagggatcaactcttaattgtaggttagtcgagggctgtggaagaaatatggagacaagaggat

SEQ ID NO: 334100 - DNA, 201 bp, Homo sapiens
cttacctttctttacatcttttactcaaacctaaggcagctgaaattaaagaatcacacaaatacacacgctcatgctctgcaatcttggaatgctcaaakatagcaatacaaataaagactaaatacagacaaatgaccaacatgttcattggttctacacaataacaactgatgaatgaaattgttatgttttatgcta

SEQ ID NO: 334101 - DNA, 201 bp, Homo sapiens
taactgttaacttattttgatgagggaatttaaagtgaaggaggattggctgggcgtggtggatcacctgaggtcaggagttcaagaccagtctggccaayatgttgaaaccccatctctactaaaaatacaaaaattagctaggcgtggtggtctatgcctgtaatcccagctactccagaggctgaggcaggaaaatgg

SEQ ID NO: 334102 - DNA, 201 bp, Homo sapiens
taccacgtgggtccaggccaagggaaggagtgtcattcatgccagccctatgttttcttccggtcatgtatttcctcacatttcctgtcaacactcagatrtgcttaggcaagttgtcttctaggctaaccctccttaaattctatcatacatatgaatcccctggcaacttgtaagaaggcaaattctggttcaagaggc

SEQ ID NO: 334103 - DNA, 201 bp, Homo sapiens
ttgtttgttggttggttggttttttgggtttttgtttggttttttttttgagacagagtctccctctgtcacctaggctggagtgcagtggtgtcatctcrgctcactgcaacctctgcctcccaggctcaagcgattctcttgcctcagcctcccaagtagctaggactacaggcacgtgccaccatgcctagctaattt

SEQ ID NO: 334104 - DNA, 201 bp, Homo sapiens
aaacgtaacccattcgagccccactcccagtaccaaaaataaaaaataataaataatttaaaaataaaaaggtaacacaaagaaaatgtaaattacccatmacccctggaataattaattttcttcaatgcttcttttgctcttcccacctctctcccccaccacttcatctgtgtatacttaacagttttttttaacaga

SEQ ID NO: 334105 - DNA, 201 bp, Homo sapiens
gaaaaattagctgggcgtggtggtgcatgcctgtggtcccagctgctcaggaggctgaggtggaaggatcacttgggcccaggaggtcgaggctgcagtgygccactacagtctagcctgggcaacagagcaagaccctgtctcaaattaaaaaaaaaagcaaaaaaaagcacagaaatgtaattgtaacctaaattttgc

SEQ ID NO: 334106 - DNA, 201 bp, Homo sapiens
cgcggcattgcactccagcctgggcaacaagagcgaaactctatctcaaagaaaaaaaaagagagagatgatcattaggtcaaggatatgtgcattttacrtagccacagattttgccaaattgcaatctgtagagtttgctgatgagaatgcaaattggtacattatatgagagcatctatttttccatagcctcagcag

SEQ ID NO: 334107 - DNA, 201 bp, Homo sapiens
gtcaggtctcttacagagtcattgggaatggttgttcctaaaagaaatgaaacagatggaacccattttgtaaatttgcttttcattgattcatttgtacyttatttgtgtcctgtgccatacttgacactgaggaagaacatacatgattgtccctaccctcaaggagctctggttccagaaggagaagcaggccaatga

SEQ ID NO: 334108 - DNA, 201 bp, Homo sapiens
tgatcttcccatcttgcctctctaagtgctgggattacaggcatgagccatcatacccggcccttttaggtttctgatagcatctttctccacccacattsccaaagtcagtgattctgtcttcaagcaagaattgtacatttttatgggaactcctttggtatcttcttgatcattggttgtttttgtttgtttgttggt

SEQ ID NO: 334109 - DNA, 201 bp, Homo sapiens
gacagttcctatctgtgtcaactcattcacagcccatgatgttcaaacagatctgtacagattcccttcagtctgtgattaacttgcttactccttgaagktgatgccttttagcagggtaaattgtagccagtgttaaataggtgactccttcagggatttttgtaattaccgaaagaggaaagatgtcaggtctcttac

SEQ ID NO: 334110 - DNA, 201 bp, Homo sapiens
cctgggatgtgagagtatgttttccctggtgccagcatggccagctctccttcctggcattgcctgcttcacactgtgccgcagtgtctttaaccctgggrtgcctcactttacacgataaatagataaaatgaagtgtttttctttttcagtgtattcagtcaggcgataaacatgatcaagcaccaagtctttgccagg

SEQ ID NO: 334111 - DNA, 201 bp, Homo sapiens
aagatcccagttttcaaaatcagtgacaacattaaagaaaattgtgagatgtgccttactcctaaccccagattaaacttcatttccctgatgtaatgttyatctggatccactgacatgtcccctatccaattaatctttgccactgtattcagacataagggcccccaaatgcacagcttgggtgttgagcagtggcag

SEQ ID NO: 334112 - DNA, 201 bp, Homo sapiens
gcatggtggcagatgcctgtaatcccagctactcaggaggctgagacaggagaagcacttgaacccaggaggcggaggttgcagtgagccaagattgtacmactacactccagcctggctgacagagcgagactccatctaaaaaaaaaaaaagaaagaaaaaaagacagaaatcagtaagtcaggcgaagcgaggagaga

SEQ ID NO: 334113 - DNA, 201 bp, Homo sapiens
agagccagtagcagttgggaaagaaggctgtgctctttgaagagtgagtatggattttaaccaccatagatttcccccaaaaggcagcctttaattaaacygggactgctgttgtaagccctgcttccaagccctctgcaggccaaagtgtgctgcatgatttttctgatcagtaggtctagtgggaagggatttggcacc

SEQ ID NO: 334114 - DNA, 201 bp, Homo sapiens
cagcttgcttaatttctctaggacccagctgcccatccaaactaaaacctctaaaactatactgctctgacgaatgtttctttcatttgtggccatatgakcagagtgaaggaatgcctgcattgacactggtggggcagccctgttgattcatgacttctccccctaaggctgtgtgatgggtgcagggagtggtttctt

SEQ ID NO: 334115 - DNA, 201 bp, Homo sapiens
tgccaaccaccagtgaattagcagagaggaagagaaagctgtgtgacattgagcagcttgcttaatttctctaggacccagctgcccatccaaactaaaayctctaaaactatactgctctgacgaatgtttctttcatttgtggccatatgagcagagtgaaggaatgcctgcattgacactggtggggcagccctgttg

SEQ ID NO: 334116 - DNA, 201 bp, Homo sapiens
gccactgccaaccaccagtgaattagcagagaggaagagaaagctgtgtgacattgagcagcttgcttaatttctctaggacccagctgcccatccaaacwaaaacctctaaaactatactgctctgacgaatgtttctttcatttgtggccatatgagcagagtgaaggaatgcctgcattgacactggtggggcagccc

SEQ ID NO: 334117 - DNA, 201 bp, Homo sapiens
gagccactgccaaccaccagtgaattagcagagaggaagagaaagctgtgtgacattgagcagcttgcttaatttctctaggacccagctgcccatccaamctaaaacctctaaaactatactgctctgacgaatgtttctttcatttgtggccatatgagcagagtgaaggaatgcctgcattgacactggtggggcagc

SEQ ID NO: 334118 - DNA, 201 bp, Homo sapiens
tggaacacagtcatactcattcgttacatgtcttcaatggctgctttctcatccagtggcagactgagtagctgtaatagagactctgtgtcccacagtgytaaaatcgtcaccgtctggcactttacagaaaaagtgtgctgacccttgtgcttagtggtcgagaggttatactgtgctgcattgaacttattatcaaat

SEQ ID NO: 334119 - DNA, 201 bp, Homo sapiens
gccgtggagaagattcccttgatcccgtctaccccagaagagatgagtgaaatgcttcagctctgctcctatgtccgcttcaaggtgccccagcaggtaaygtggttgcagcagcgacacaactaccctccccagaggcccgggggcgagtaccagcttcctgcacgtattccctccttcacctactcattgactacttct

SEQ ID NO: 334120 - DNA, 201 bp, Homo sapiens; identical to SEQ ID NO: 70371

SEQ ID NO: 334121 - DNA, 201 bp, Homo sapiens
acaaagccagaggaccagtgcagatggttctcaagaaataagttatcactctcaaagtctctagaaagacatattatcaaaaggttatcatgtgtggcatrcttcttaagaaaacaccgcatttcccttcctagagtgattagtaaaatatataccaaaatagttcatttaaggtgttctctggaatggtttggctttgtg

SEQ ID NO: 334122 - DNA, 201 bp, Homo sapiens
gtggccatggagaatgatggatttgtaacgctaaccagcaaacagtgccaaagccagcagctcatatgggtatttttgcctgtgagttgtggtttctgatmtctctccaggatagacactcagttttgcctgggcatgatggtgcgtacctgtcatcccagctacctggggggcactgaggtgggaggatcacttgagccc

SEQ ID NO: 334123 - DNA, 201 bp, Homo sapiens
atcctaagtggccttcaacatcatgctgagagccactgccaaccaccagtgaattagcagagaggaagagaaagctgtgtgacattgagcagcttgcttamtttctctaggacccagctgcccatccaaactaaaacctctaaaactatactgctctgacgaatgtttctttcatttgtggccatatgagcagagtgaagg

SEQ ID NO: 334124 - DNA, 201 bp, Homo sapiens
aggtgtgtcaaagtcccggaggtgtgggagagcacggcatgtctgggggttgcagatcattattggaagggatggagggcaggcaataggcaggtgatagragaagatgacccttgagagatgggcagcaccaaatcctaagtggccttcaacatcatgctgagagccactgccaaccaccagtgaattagcagagaggaa

SEQ ID NO: 334125 - DNA, 201 bp, Homo sapiens
attaggcaggcatggtggtgtgcacctgtaaccctagatacaggctgaggcacaagaattgcttgaacccgggaggtggaggttgcagtgagcggaaattrccccagcgtgggtgacagagcgagactgtatctaaaaaaaaaaaaaacctgaccaaacaaacaacaaaaaaaaaaaccttatgtatgctctcacattttt

SEQ ID NO: 334126 - DNA, 201 bp, Homo sapiens
gtttgccttgtgatatacccagaaaaggattcatacgttacatatgatgaagtctggggatgggactggattctgagagtataaagatggcaatgcagacsctgcccagagactactcaggcatctcaataggcctgagcagtggccatgcagggtggtggaggtatggcagggctgcctaactctgcctgtgaagtcagg

SEQ ID NO: 334127 - DNA, 201 bp, Homo sapiens
ggggtttctccatgttggtcaggctggtctcgaactcccgacctcaggtgatccgcccgcctctacctcccaaagtgctgggattgcagatgtgagccacygcgcccggccaaacctggataattttgaaattttgttgttgttgttggttgtcacaacttgtaggtaacatcaagtgggtagaggccagggatgctgcta

SEQ ID NO: 334128 - DNA, 201 bp, Homo sapiens
tttcaatgtgctactaagaacccttggatgtaacatactagttagttaatgaattctgtgaattctgtgaagagtaatgtgattgaaaataagtctaaacrgctgtaaaagtgaccacaatgacatgaaataaatttaataagtctagatcagcaacatgcaggtggtttctatttctgaactcctaattaggtgcaatgt

SEQ ID NO: 334129 - DNA, 201 bp, Homo sapiens; identical to SEQ ID NO: 70359

SEQ ID NO: 334130 - DNA, 201 bp, Homo sapiens; identical to SEQ ID NO: 70360

SEQ ID NO: 334131 - DNA, 201 bp, Homo sapiens
cagcgccctcctctctgccccttctccccaccatgccacccccactgcccatgtgcttggtgtctcagccgccgtgctccttggtggcccctgcactcgcyatgatctcccaccctgtgccattcccacatccgtgaatgctcctcccctgtcccctttctgctctcccgggactcaggaacgaggtcttccctcgaccct

SEQ ID NO: 334132 - DNA, 201 bp, Homo sapiens
aaaaattagctgggcatggtggcgggcacctataatcccagctactggggaggctgaggcagaagatcacttgaacctgggaggcggaggttgcagtgagytgagatcacgccacttcattccagcctgggcgaaagagtgaaactccttttcaacaaataaagagatacccccagcttgtgataattagccttcccctct

SEQ ID NO: 334133 - DNA, 201 bp, Homo sapiens
ccacttctgagggaggatgttggggaaaaagatggaggtggattggcatagtagctgggaacccagaggaaaaggagaggaaatgagttgtttgaaaaggrtcagccctggaaaagttctggctttcatgttggaaaagcattccccatatctgcagaggttagagccaagaaacacacagctctggggatccccagagga

SEQ ID NO: 334134 - DNA, 201 bp, Homo sapiens
ccagctacctggggggcactgaggtgggaggatcacttgagcccgggaggtcaaggctgcagtgagccatgatcgtgccactgcactccagcctgtgcaayagagcgagaccctgtctcaaaaaaacaaaaaaagacactcagttgggagtttccactttttcgtgctgttttcacctattgactgcatctgcgtttcttc

SEQ ID NO: 334135 - DNA, 201 bp, Homo sapiens
cagcaaacagtgccaaagccagcagctcatatgggtatttttgcctgtgagttgtggtttctgatctctctccaggatagacactcagttttgcctgggcrtgatggtgcgtacctgtcatcccagctacctggggggcactgaggtgggaggatcacttgagcccgggaggtcaaggctgcagtgagccatgatcgtgcc

SEQ ID NO: 334136 - DNA, 201 bp, Homo sapiens
tttcctaggcagaggaccctgaggccttccgcagtgtttgtgtccctgggtacttgagattagggagtggtgatgactcttaacgagcatgctgccttcargcatctgtttaacaaagcacatcttgcactgcccttaatccatttaaccctgagtggacacagcacatgtttcagagagcacagggttgcggggtaaggt

SEQ ID NO: 334137 - DNA, 201 bp, Homo sapiens
gcagtgtttgtgtccctgggtacttgagattagggagtggtgatgactcttaacgagcatgctgccttcaggcatctgtttaacaaagcacatcttgcacygcccttaatccatttaaccctgagtggacacagcacatgtttcagagagcacagggttgcggggtaaggtcacagatcaacaggatcccaaggcagaaga

SEQ ID NO: 334138 - DNA, 201 bp, Homo sapiens
aaactacctttttggcttattctcccttaactttgtattatgtatttattttttgaattggttacatatttacataacaacttaaaagttttaaaaagtgmaaaaccaagtttcctgtctattcctgacacttagctatctacttccccaccttagatcaatcactgttactggtttcttgtatccatgtgtacatgtata

SEQ ID NO: 334139 - DNA, 201 bp, Homo sapiens
aggactccctgctgctcagtaatctgaatttacagtggcccccagcagtttttaaggactttgtatgatgtggaaaagtcttctcaaagctgacagttccyatctgtgtcaactcattcacagcccatgatgttcaaacagatctgtacagattcccttcagtctgtgattaacttgcttactccttgaaggtgatgcctt

SEQ ID NO: 334140 - DNA, 201 bp, Homo sapiens
gagccatgatcgtgccactgcactccagcctgtgcaacagagcgagaccctgtctcaaaaaaacaaaaaaagacactcagttgggagtttccactttttcrtgctgttttcacctattgactgcatctgcgtttcttctgagtgtttccacagtagctgggtgttattcctgctcagtgggttgccgtggcagccttagct

SEQ ID NO: 334141 - DNA, 201 bp, Homo sapiens; identical to SEQ ID NO: 70356

SEQ ID NO: 334142 - DNA, 201 bp, Homo sapiens
aatgcttttagagttgttctagaagtgttcattagtaaagaagtgacagaaagaaaaagaagtttccaaaatatgtcattcttgtaccactgttattattmttgtcctatctggataccacctgtccttttattttgtatttcctttagagtgagccatctttttaaaaaaatccttaaatcaagtatttaaaaagtgata

SEQ ID NO: 334143 - DNA, 201 bp, Homo sapiens
aggggcggccaggcagaggcgcccctcaccacccggacggggcggctggccgggtagggggctgacccccccacctccctcccggacggggtggctggccrggcagaggggctcctcacttcccagtaggggcggccgggcagaggcgcccctcacctcccggacgaggcggctggccgggcggggggctgacccccccac

SEQ ID NO: 334144 - DNA, 201 bp, Homo sapiens
tggatcacctgaggtcaggagttcgagacaagcctggccaacgtggtgaaaccccatctctactagaaatacaaaaattagctgggcatggtggcgggcayctataatcccagctactggggaggctgaggcagaagatcacttgaacctgggaggcggaggttgcagtgagttgagatcacgccacttcattccagcctg

SEQ ID NO: 334145 - DNA, 201 bp, Homo sapiens
tggcggccgggcagagacgctcctcactttccagactgggcagccaggcagaggggctcctcacatcccagacgatgggcggccaggcagagacgctcctygcttcctagatggggtggcggccgggcagaggctgcactctgggcactttgggaggccaaggcaggcggctgggaggtggaggttgtagcgagccgagat

SEQ ID NO: 334146 - DNA, 201 bp, Homo sapiens
ccatgcccaacctgtcctccttttttatttttatttattttttatttttattttttgagatagagtcttgttgcccaggctagagtgcaatggcacaatcytggctcactgcaacctctgcctcctgggttcaagcgattctcctgcctcagcctcccgagtagctggaattacagtcacctgccaccacgcttggctaac

SEQ ID NO: 334147 - DNA, 201 bp, Homo sapiens
ctcctcactttccagactgggcagccaggcagaggggctcctcacatcccagacgatgggcggccaggcagagacgctcctcgcttcctagatggggtggyggccgggcagaggctgcactctgggcactttgggaggccaaggcaggcggctgggaggtggaggttgtagcgagccgagatcacaccactgcactccagc

SEQ ID NO: 334148 - DNA, 201 bp, Homo sapiens
ttaaaggttctcactccgttgcctaggctagagtgcagtggtgcaatcatagcttactacagcttcaaactcctgggctcaagtgatcctcccaccttggyctcccaaagtgctggatcacaggcatgagctaccatgcccaacctgtcctccttttttatttttatttattttttatttttattttttgagatagagtct

SEQ ID NO: 334149 - DNA, 201 bp, Homo sapiens
tcctagatggggtggcggccgggcagaggctgcactctgggcactttgggaggccaaggcaggcggctgggaggtggaggttgtagcgagccgagatcacrccactgcactccagcctgggcaccattgagcactgagtgaaccagacaccgtctgcaatcccggcacctccggaggccgaggctggcggatcactcgcgg

SEQ ID NO: 334150 - DNA, 201 bp, Homo sapiens; identical to SEQ ID NO: 70354

SEQ ID NO: 334151 - DNA, 201 bp, Homo sapiens
ggtacgaatgactcataagctcaggggtgctgcccagctggtgtctgtgtacacatggtatcttgtgttttttgcttttctcctgcacacatttccatgtrctgacatggcttttgtgtgattccctcacagcttgtgtgtgattccctgattaaatagcttctaatattttattattataaatagactctaagtccttga

SEQ ID NO: 334152 - DNA, 201 bp, Homo sapiens; identical to SEQ ID NO: 70355

SEQ ID NO: 334153 - DNA, 201 bp, Homo sapiens
gaaaatgatcttccagttgcaaaaaagttaggttagctggtattagattagactgctcatgtcctttgcctctgttggtggcttcaatgcatggtccaaawttttttcccagactcagaagtccgtttcattccagaaaaagagcctaacattctatgggcttgctataaatatgatcagatccttcatgtgttttgtgga

SEQ ID NO: 334154 - DNA, 201 bp, Homo sapiens
ggagtgcagtggcacaatctcggctcactgcaagctctgcctcctgggttcacaccattctcctgcctcagcctctcaagtagctgggactacaggcaccygccaccatgcccagctaattttttgtatttttagtagagacggggtttcaccatgttagccaggatggtctcgatctcctgacgtcatgatctgccggcc

SEQ ID NO: 334155 - DNA, 201 bp, Homo sapiens; identical to SEQ ID NO: 70388

SEQ ID NO: 334156 - DNA, 201 bp, Homo sapiens
gggaggatatctggttaatgcagagatggaggttggatggattgatgaatacaggatagataggtagacaaatgcatatgtggttcaggatggatggctgmattgagcagaggtggaggatggatggacacaagatgaatagatatgtgggtacaggtggatagctgaacaaagaaaatctctgatgctgagcacaatgtt

SEQ ID NO: 334157 - DNA, 201 bp, Homo sapiens
acggcctgtccctcaggaaacacccagaatctgatgctgtggcatgttccacccctgaaatccctttttagccatgaagtagcattcctttctcccagcastgatctcttcccagaatagagtggccaaatgatgttttagaaaactccatgttttgggttgtcagggatatgaaaacaccaagagaaaaataaatggcag

SEQ ID NO: 334158 - DNA, 201 bp, Homo sapiens
acagatgatttaggtctgcaggatggatagatggctgaatggttggatggatggatggatgggaggatatctggttaatgcagagatggaggttggatggrttgatgaatacaggatagataggtagacaaatgcatatgtggttcaggatggatggctgcattgagcagaggtggaggatggatggacacaagatgaata

SEQ ID NO: 334159 - DNA, 201 bp, Homo sapiens
ctagggaaatggtgtgaagaaccaagagaggagagtccatggctgaggcttcataaccccaaattatctccctctgttgtaggagctggaccctgcctggrggtgggcaggtcctcctaagacttgagggaatagatcccattcagaagttgtgaacatggctcagttaatagatacggcctgtccctcaggaaacaccca

SEQ ID NO: 334160 - DNA, 201 bp, Homo sapiens
tcatgtccaggctgaatgagttagagtctagtgatgctccagagggttggtttagtccatagcagccatggctggttcttccccactttcagtcagtgcasaggactcctgagagagtgtaattaaagggttcagacctgtttgcaggtagaggagaggagtagaggagtacagccactaatgtgaaccctgtactctacc

SEQ ID NO: 334161 - DNA, 201 bp, Homo sapiens
agcagacgctaatattgaaggttatgggactgaatgaagtcatctagggaaatggtgtgaagaaccaagagaggagagtccatggctgaggcttcataacmccaaattatctccctctgttgtaggagctggaccctgcctggaggtgggcaggtcctcctaagacttgagggaatagatcccattcagaagttgtgaaca

SEQ ID NO: 334162 - DNA, 201 bp, Homo sapiens
gtattaggaaagtagtttgacctcctagactcccaagaaccactttgaaaaatgctggactagatcctgtaggatcttataggtacggaaaggagccaggrgtttttctaagtataataggaccactgagagattgtaggagagcacaaatggaacagaggaacccatttgggaactattgtgccttggagatgatggtgg

SEQ ID NO: 334163 - DNA, 201 bp, Homo sapiens
gtaagtgaaaaggcaagtaacactgagtattaggaaagtagtttgacctcctagactcccaagaaccactttgaaaaatgctggactagatcctgtaggaycttataggtacggaaaggagccaggagtttttctaagtataataggaccactgagagattgtaggagagcacaaatggaacagaggaacccatttgggaa

SEQ ID NO: 334164 - DNA, 201 bp, Homo sapiens
acttattccagtagccaagagcaaggacatcatcccacattttataggctctgaaaaacagtgtaattttgagagaatgtaagtgaaaaggcaagtaacaytgagtattaggaaagtagtttgacctcctagactcccaagaaccactttgaaaaatgctggactagatcctgtaggatcttataggtacggaaaggagcc

SEQ ID NO: 334165 - DNA, 201 bp, Homo sapiens; identical to SEQ ID NO: 70382

SEQ ID NO: 334166 - DNA, 201 bp, Homo sapiens
ctgggactacaggcacccgccaccatgcccagctaattttttgtatttttagtagagacggggtttcaccatgttagccaggatggtctcgatctcctgaygtcatgatctgccggcctcagcctcccaaagtgttgggattacaggcgtgagccaccacacctggcaatttttgtattttttttagtagagacggggttt

SEQ ID NO: 334167 - DNA, 201 bp, Homo sapiens
gtctcaaaaaataaaataaataaataaagaatgagtgtttatcctagtaggctagctaagattggaaatcagcttcactatgtcatattctttaaaaaaawttttttttttagagatgaagtctcactgtgtttcctactcaggctgacctggaactcttgggctcaagtgattctcccacctcagcctcccaagtagcta

SEQ ID NO: 334168 - DNA, 201 bp, Homo sapiens
ttagctcactgtaactttgaactcctgggctcaagcaatcctgctacctcagcctcctaagtaactggggctacaggtgtgcaccaccaaacctgggtaattttttttttttttttttttgagacagagtcttgctctgtcgcccaggctggagtgcagtagcgcgatctcggctcaccgcaacctccgcctcccgggttc

SEQ ID NO: 334169 - DNA, 201 bp, Homo sapiens
tagctcactgtaactttgaactcctgggctcaagcaatcctgctacctcagcctcctaagtaactggggctacaggtgtgcaccaccaaacctgggtaattttttttttttttttttttgagacagagtcttgctctgtcgcccaggctggagtgcagtagcgcgatctcggctcaccgcaacctccgcctcccgggttca

SEQ ID NO: 334170 - DNA, 201 bp, Homo sapiens
ttctacaaaagctgcttatggaagactttattctgctgttaaatagaagatggaggcagatgcgaccttcgctgaaactgactggcattgtggcaggcacygacagagcacagaggggtttttttttttgatgatcatgccttcatttcggggctatcatctccagtgtcagagtctatgatatatatggctttgggcata

SEQ ID NO: 334171 - DNA, 201 bp, Homo sapiens
agctcactgtaactttgaactcctgggctcaagcaatcctgctacctcagcctcctaagtaactggggctacaggtgtgcaccaccaaacctgggtaattttttttttttttttttttgagacagagtcttgctctgtcgcccaggctggagtgcagtagcgcgatctcggctcaccgcaacctccgcctcccgggttcaa

SEQ ID NO: 334172 - DNA, 201 bp, Homo sapiens
catgttggtttgctgcacccgttaactcgtcatttacgttaggtatttctcctaatgctatccctcccccatccccctgccccacgacaggccccggtgtktaatgttccccaccctgtgtccaagtgttttcattgttcaattcccacctatgagtgagactgtgcggtgtttggttttctgtccttggaatagtttgct

SEQ ID NO: 334173 - DNA, 201 bp, Homo sapiens
cccatccccctgccccacgacaggccccggtgtttaatgttccccaccctgtgtccaagtgttttcattgttcaattcccacctatgagtgagactgtgcsgtgtttggttttctgtccttggaatagtttgctcagaatgatggtttccagcttcatccatgtccctacaaaggacatgaactcatccttttttatggct

SEQ ID NO: 334174 - DNA, 201 bp, Homo sapiens
gagggcaaagcaggaggattgcttgaggccaggggttcgagaacagcctgggtaacatagagagaccccatctctgcaaaaaatgaaaaattagctgggcrtggtggtgcatgcctgtggtcccagctgctcaggaggctgaggtggaaggatcacttgggcccaggaggtcgaggctgcagtgcgccactacagtctagc

SEQ ID NO: 334175 - DNA, 201 bp, Homo sapiens
ttagctatctacttccccaccttagatcaatcactgttactggtttcttgtatccatgtgtacatgtatatttgttcattgatttctttaaaagtctgtcttttttttttttttttttaaaggttctcactccgttgcctaggctagagtgcagtggtgcaatcatagcttactacagcttcaaactcctgggctcaagtg

SEQ ID NO: 334176 - DNA, 201 bp, Homo sapiens
ggtttcttgtatccatgtgtacatgtatatttgttcattgatttctttaaaagtctgtcttttttttttttttttttaaaggttctcactccgttgcctargctagagtgcagtggtgcaatcatagcttactacagcttcaaactcctgggctcaagtgatcctcccaccttggtctcccaaagtgctggatcacaggca

SEQ ID NO: 334177 - DNA, 201 bp, Homo sapiens
tgaatgtacaagcacttattccagtagccaagagcaaggacatcatcccacattttataggctctgaaaaacagtgtaattttgagagaatgtaagtgaaraggcaagtaacactgagtattaggaaagtagtttgacctcctagactcccaagaaccactttgaaaaatgctggactagatcctgtaggatcttataggt

SEQ ID NO: 334178 - DNA, 201 bp, Homo sapiens
ctcagaagattccaaaatgcaatgaatgtacaagcacttattccagtagccaagagcaaggacatcatcccacattttataggctctgaaaaacagtgtamttttgagagaatgtaagtgaaaaggcaagtaacactgagtattaggaaagtagtttgacctcctagactcccaagaaccactttgaaaaatgctggacta

SEQ ID NO: 334179 - DNA, 201 bp, Homo sapiens
tattagaaattaaaactcaggccgggtgcggtggttcatgcctgtaatcctagcactttgggaggccaagatgggaggattgcttgagactaggagttcawgaccagcctggtcaacgtagcgagaccccatctctatttaaatacaaataaaagaaaataaatgaaaactcagaagattccaaaatgcaatgaatgtaca

SEQ ID NO: 334180 - DNA, 201 bp, Homo sapiens
tatttgggcaggagtgtcccagttttccaggtacagtctgtcatggcttccctggctaggaaagggaaatcccccgaccccttgcacttcccaggtgaggygatgcctgccctgcttcagctcgccctctgtgggctgcacccactgtccaaccagtcccagtgagatgaaccaggtacgttaattggaaatgcagaaatc

SEQ ID NO: 334181 - DNA, 201 bp, Homo sapiens
ctgagtctggagagcagggaagggagtcctgtgctacctcatgaccagtctcctgtacattctgtctacaagtgatggcaagccaaatggcaacctgatgwtatctctggttggcaatggagggccagggcttattacagacttaagcctattgcagttgtttgtaacgaaatacaatctgagcattttctcaactctttg

SEQ ID NO: 334182 - DNA, 201 bp, Homo sapiens
attggtcttgatttgtaggaaccctttatacattaaggaaattactatgttgtctctattatgtatttacaaattttaatcttatttatggtatctctttycatgtggagatttaaaaacttttttatgcaactaatactctttgttatggcctctggatgttagacattacttagaaagccctttcctatggagatactt

SEQ ID NO: 334183 - DNA, 201 bp, Homo sapiens
gaaagattgaaaggataatatcatgtaaccttcacctggattccccagtggttagcattttaccatatttgctttatttctctctcttttcctcccaccaacacacacacacacacacacacacacacacacacacatacacacactactttttctctcctgaacctttaaaagtgagtagcagataccattatacttcac

SEQ ID NO: 334184 - DNA, 201 bp, Homo sapiens
aaagattgaaaggataatatcatgtaaccttcacctggattccccagtggttagcattttaccatatttgctttatttctctctcttttcctcccaccaacacacacacacacacacacacacacacacacacacatacacacactactttttctctcctgaacctttaaaagtgagtagcagataccattatacttcacc

SEQ ID NO: 334185 - DNA, 201 bp, Homo sapiens
aagattgaaaggataatatcatgtaaccttcacctggattccccagtggttagcattttaccatatttgctttatttctctctcttttcctcccaccaacacacacacacacacacacacacacacacacacacatacacacactactttttctctcctgaacctttaaaagtgagtagcagataccattatacttcaccc

SEQ ID NO: 334186 - DNA, 201 bp, Homo sapiens
agattgaaaggataatatcatgtaaccttcacctggattccccagtggttagcattttaccatatttgctttatttctctctcttttcctcccaccaacacacacacacacacacacacacacacacacacacatacacacactactttttctctcctgaacctttaaaagtgagtagcagataccattatacttcacccc

SEQ ID NO: 334187 - DNA, 201 bp, Homo sapiens
gattgaaaggataatatcatgtaaccttcacctggattccccagtggttagcattttaccatatttgctttatttctctctcttttcctcccaccaacacmcacacacacacacacacacacacacacacacatacacacactactttttctctcctgaacctttaaaagtgagtagcagataccattatacttcacccct

SEQ ID NO: 334188 - DNA, 201 bp, Homo sapiens
gtaaccttcacctggattccccagtggttagcattttaccatatttgctttatttctctctcttttcctcccaccaacacacacacacacacacacacacrcacacacacacatacacacactactttttctctcctgaacctttaaaagtgagtagcagataccattatacttcaccccttacaacttcagcaaacatct

SEQ ID NO: 334189 - DNA, 201 bp, Homo sapiens
gttctgtgctactcatcatgcttttccctggggagatggaagtggaaaaggaattcacaactccgtggagttgagagttgcctaaataaataaacatatcrtcatgtataatgtgctacaggggtgtggacgatggaaaaattaattttgcctggatagtcaggtaaggctgctgggaggcagtgatactggagttccaga

SEQ ID NO: 334190 - DNA, 201 bp, Homo sapiens
gattccccagtggttagcattttaccatatttgctttatttctctctcttttcctcccaccaacacacacacacacacacacacacacacacacacacatmcacacactactttttctctcctgaacctttaaaagtgagtagcagataccattatacttcaccccttacaacttcagcaaacatctcctaaaagggaaga

SEQ ID NO: 334191 - DNA, 201 bp, Homo sapiens
tctctcttataagaaaagggagttgggtgctgtggctcatgcctataatcccagcactttgggagcctgaggcaggaggattgcttgagtccaggagttcraaaccagcctggacaacataaagaaaccctgtctctacaaaaaattaaaaaattagccaggtgtggtggtgcatgcctgtagtcctggctactcaggaga

SEQ ID NO: 334192 - DNA, 201 bp, Homo sapiens
tcatcatactcaagaattgtgtcactgatacattgacgttgtctaatacccagcccttactcagattttcacatttgtcccaactatgtcctttataatgttttttttttacaaatccaggctcctctgaaaagttcctcattacttttagttgtcatgtctatttggttttttgtaaagcacttgcctgctttggtttcc

SEQ ID NO: 334193 - DNA, 201 bp, Homo sapiens
cttactaggtcaacaaggggcatgaggtttcaaagattcttgatattttatgccagattgctttcttagaaagcctgaactttataactggttatataaacgcgcacacacacacacacacacacacacacacacacacacacacatatgccaggtgcagtggctcagtggcaggatcacttgagttcgagaccagcccgg

SEQ ID NO: 334194 - DNA, 201 bp, Homo sapiens
ttactaggtcaacaaggggcatgaggtttcaaagattcttgatattttatgccagattgctttcttagaaagcctgaactttataactggttatataaacgcgcacacacacacacacacacacacacacacacacacacacacatatgccaggtgcagtggctcagtggcaggatcacttgagttcgagaccagcccggg

SEQ ID NO: 334195 - DNA, 201 bp, Homo sapiens
tgaaggttttcaaagctctgacgcacaccctaaaagccccctgcaaatagttctgaaagactatgtgggggaacctggctctgaatttgaagggagtctgkaaggcatgggttcatgggccccagtgctttcctgaaaaggggacacttgaacaggctctgaaggcagggaagagttcatcaggcagccagacgtgggagt

SEQ ID NO: 334196 - DNA, 201 bp, Homo sapiens
gatacttggtttccagttgtttttttttttaggatttcagataagggatgggagcctgctttctaggtccggctctcctgccttgggggtgggctgaggargcatttttttcttccagcatggaaggcgcagcatatagataggtccatagatccctcttgtgcctaactatgtaagtagcaggtcctgatttttatttaa

SEQ ID NO: 334197 - DNA, 201 bp, Homo sapiens
ataatatataatagataaaaatcatattttttctctcctctatctccccctctctctgttttttttttttttttttttttttgagacagtctgttgctcaractggagtgcagtggtgcaatcatggctcactgcagccttgacttcccaggttcaagcaattcttgtgcctcagccacccaagtagctgagattacaggt

SEQ ID NO: 334198 - DNA, 201 bp, Homo sapiens
ccagaggttagccatgatcacgccactgcactgcagcctgggtgacagagtgagaccctgtctcagaaaaaaagaaaagtttgctgactcattaattagcmgaatccctgttgattttatatttataaatgacctctcaatctcttgtgccagacagagaagtccatgcatgccacagggctcatcttataatggatccag

SEQ ID NO: 334199 - DNA, 201 bp, Homo sapiens
ggagtgagaccctgtctcaaaacaaacaaacaaactaatgcaatatgttactcattcttttgtcagaaaaaaattattgagttgaatattatatataaaaygtatggcttagaaatctttttacctcatggatatttctttggggaggcttctgacacagctgcatctcagaactgctgtgagatcagagttgggctttga

SEQ ID NO: 334200 - DNA, 201 bp, Homo sapiens
tgtggtcaaggtgcaattctcgattcttctctcttataagaaaagggagttgggtgctgtggctcatgcctataatcccagcactttgggagcctgaggcmggaggattgcttgagtccaggagttcaaaaccagcctggacaacataaagaaaccctgtctctacaaaaaattaaaaaattagccaggtgtggtggtgca

SEQ ID NO: 334201 - DNA, 201 bp, Homo sapiens
gcagtcattaaaaaagtttcaaaagaaaccaaccaggtgcggtttaaccagctggacgtctgtaacccaagcactttgggaggccaacgtggatggatcasttgaggccaggagtttgagactggcctggccaacatggcgaaaccctgtctctactaaaaatacaaaaattaggcaggcatggtggtgtgcacctgtaac

SEQ ID NO: 334202 - DNA, 201 bp, Homo sapiens
gctactcatctcagcctctggtaaccatccttctactatctatgcccatgagttgcattgttttgatttttagatcccataaataagtgagagcatgtgawgtttgtctttctgtgtctggcttacttcacttaacataatgatctccagttccatccatgttggtgcactattcatatttttaattactagtgaacttga

SEQ ID NO: 334203 - DNA, 201 bp, Homo sapiens
ccattaatagctcacattaccacagtaaattttttcacaactaagaaaccaacattagtatattactgttaactaaattccaggctttatttggatttcakttagtttttcaactcatgtcctttttctgttctgggatccagtccaggatgtaccacatgacatctaacctaggtttagttttaaagagaggggaaatag

SEQ ID NO: 334204 - DNA, 201 bp, Homo sapiens
gaggttggatggattgatgaatacaggatagataggtagacaaatgcatatgtggttcaggatggatggctgcattgagcagaggtggaggatggatggayacaagatgaatagatatgtgggtacaggtggatagctgaacaaagaaaatctctgatgctgagcacaatgttgttattcaacaaattgtcattgtcctca

SEQ ID NO: 334205 - DNA, 201 bp, Homo sapiens
atagataggtagacaaatgcatatgtggttcaggatggatggctgcattgagcagaggtggaggatggatggacacaagatgaatagatatgtgggtacakgtggatagctgaacaaagaaaatctctgatgctgagcacaatgttgttattcaacaaattgtcattgtcctcatgtccaggctgaatgagttagagtcta

SEQ ID NO: 334206 - DNA, 201 bp, Homo sapiens
gttattcaacaaattgtcattgtcctcatgtccaggctgaatgagttagagtctagtgatgctccagagggttggtttagtccatagcagccatggctggktcttccccactttcagtcagtgcacaggactcctgagagagtgtaattaaagggttcagacctgtttgcaggtagaggagaggagtagaggagtacagcc

SEQ ID NO: 334207 - DNA, 201 bp, Homo sapiens
taggtcaacaaggggcatgaggtttcaaagattcttgatattttatgccagattgctttcttagaaagcctgaactttataactggttatataaacgcgcrcacacacacacacacacacacacacacacacacacacacatatgccaggtgcagtggctcagtggcaggatcacttgagttcgagaccagcccgggcaat

SEQ ID NO: 334208 - DNA, 201 bp, Homo sapiens
aatccagttacactcttcaagttatttaaaaatttacaactattattgactatagtcaccgtattgtgctatcaatagtaggtcttattcattctttctattttttttgtacccattaaccatccccacttctcccctacccccagctactcatctcagcctctggtaaccatccttctactatctatgcccatgagttgc

SEQ ID NO: 334209 - DNA, 201 bp, Homo sapiens
tagatacaggctgaggcacaagaattgcttgaacccgggaggtggaggttgcagtgagcggaaattgccccagcgtgggtgacagagcgagactgtatctaaaaaaaaaaaaaacctgaccaaacaaacaacaaaaaaaaaaaccttatgtatgctctcacattttttgtatgcggataaaagtaaatgaatatatatctt

SEQ ID NO: 334210 - DNA, 201 bp, Homo sapiens
gaagattgcttgagcctggggggtcaagtcttcagtgagcaatgatcatgccactgcacttagcctgggcaacagaataagactctgtctcaaaaaaaatwaaaataaaaaaaggaagaagaagaaaagggtttccactaggacatgatgtcatcaacaatggtagaaagcaaagggaactcagaactgtggtggttcaag

SEQ ID NO: 334211 - DNA, 201 bp, Homo sapiens
tttaaatttgtttttcttctataagtctttagagttgtatttataatatataatagataaaaatcatattttttctctcctctatctccccctctctctgttttttttttttttttttttttttgagacagtctgttgctcagactggagtgcagtggtgcaatcatggctcactgcagccttgacttcccaggttcaagc

SEQ ID NO: 334212 - DNA, 201 bp, Homo sapiens
aagaataagagaatggtgaagatggagttagaaagggaggcaggggctaaatcagagatactcaattgaaaaaaaaaaaatctcaggaccccttatactctttttttttttttttttccagacagtctcactctgtcacctaggctggagtgcagtagcatgatctcggctcactgcaacctctgcctcccaggttcaagc

SEQ ID NO: 334213 - DNA, 201 bp, Homo sapiens
ggagttagaaagggaggcaggggctaaatcagagatactcaattgaaaaaaaaaaaatctcaggaccccttatactctttttttttttttttttccagacrgtctcactctgtcacctaggctggagtgcagtagcatgatctcggctcactgcaacctctgcctcccaggttcaagcgattcttctgcctcagcctcctg

SEQ ID NO: 334214 - DNA, 201 bp, Homo sapiens
gcttcatccatgtccctgtaaaggacatgaactcatcctttttatggctgcgtagtattccatggtctgtatgtgtcacattttcttaatccagtctaccrttgatagacatttgggttggttccaagtctttgctgctgtgaatagtgctgcaataaacatacgtgtacatgtgtctttatagtagcatgatttataatt

SEQ ID NO: 334215 - DNA, 201 bp, Homo sapiens
gttcatatcctttgcccactttttgatggggttgtttttttttctgataaatttgtttgagttctttgtggattctggatattagccctttgtcagatggrtagattgcaaaaattttctcccattctgtaggttgcctgttcactctgatggcagtttcttttgctgtgcagaagctctttagtttaattagatcccatt

SEQ ID NO: 334216 - DNA, 201 bp, Homo sapiens
ttgtaaagcacttgcctgctttggtttcctcctgttctttaccctcactctgggaacttcacttttcttgtcccctttacttcttcgccttttttcctttratacagagttttaatatcgtcattctctttggcccctgcaggagtcagccagcctgaaagagcaggatggatcttgatgtggttaacatgtttgtgattg

SEQ ID NO: 334217 - DNA, 201 bp, Homo sapiens
ccagctacttgggaggctgaagtgggagaatcgtttgaaagcagaaggtggaggttgcagtgagccgagatcatgccactgcattccagcctgggcaacaragcaagactccatctaaaaaataaaaataaaaataaacaaaaacaaaaattagccgagcgtggtggcacacacctgtaatcccagctactcaggaggctg

SEQ ID NO: 334218 - DNA, 201 bp, Homo sapiens
aatttttcagctggcctggtatcttagagtcatcttcctactctttcgttgaggggatcatttgaaaatattagttctctgggctgggcatggtggctcaygcctgtaatcccaacactttgggaggctgagggaggcagatcatctgaggtcaggagttcaagaccagcctagccaacatggtgaaaccctgtctctact

SEQ ID NO: 334219 - DNA, 201 bp, Homo sapiens
ggttcacctcgcagacctaggtgggtcaggttaattttcaggattgctacacaaacaggatcagcaggcagtagaggtagcttggcacccagtccccgttycccgctgccctgccatatgagcataagggtttggtgaagtcatcacatcgtgcaagctcctggagttccctctgggattgtctcagctcctcagggaaca

SEQ ID NO: 334220 - DNA, 201 bp, Homo sapiens
aatgagttagagtctagtgatgctccagagggttggtttagtccatagcagccatggctggttcttccccactttcagtcagtgcacaggactcctgagakagtgtaattaaagggttcagacctgtttgcaggtagaggagaggagtagaggagtacagccactaatgtgaaccctgtactctacctcaggagtcctgag

SEQ ID NO: 334221 - DNA, 201 bp, Homo sapiens
tttccacctccccaaaggagtccccatacctagtagccatcaatcccagtttctccctcacttcatcttctggcaaccactcatctacttcctgtcttttyagatgtgcccattacggacatttcacgtaaatggggttatacatgtgtgacctttgtgtctggtttctctcacttagcataatgttttcaaggttcgtcc

SEQ ID NO: 334222 - DNA, 201 bp, Homo sapiens
taatttgctttttaaattaagttaaaattcacataacataaaagtcaccattttaaagtgtacaattcaaggctgggcacgatggctcacacctgtaatcycagcactttgggaggctaaggcaggaggatcacttgaggccaggagttcgagaccagcctggccaacatggcgaaaccccgtctctactaaaaatacaaa

SEQ ID NO: 334223 - DNA, 201 bp, Homo sapiens
gtgggctaaggctcctggatgacccctgacatggagaaggcagagttgcgtgccccttctcatggcctcgtcaaggcatcatggactgccacacacaaaaygccgtttttattaacgacatgaaattgaaggagagaacacaattcactgatgtggctcgtaaccatggatatggtcacatacagaggtgtgattatgtaa

SEQ ID NO: 334224 - DNA, 201 bp, Homo sapiens
aagctgaaatgctgttgcccttgcagtgctggtagcaggagttctgtgctttgtgggctaaggctcctggatgacccctgacatggagaaggcagagttgygtgccccttctcatggcctcgtcaaggcatcatggactgccacacacaaaacgccgtttttattaacgacatgaaattgaaggagagaacacaattcact

SEQ ID NO: 334225 - DNA, 201 bp, Homo sapiens
aagcgattctcttgcctcagcctcccaagtagctaggactacaggcacgtgccaccatgcctagctaatttttatatttttagtagagacaggcttttgcygtattggccaagctggtctcaaactcctgacctcaagtgatcctcccacctcagcctcccaaagtgctgggattacaggtgtgagccactgcgcctggcc

SEQ ID NO: 334226 - DNA, 201 bp, Homo sapiens
catgagcatggaatgttgttccatttgttagcgtcctcttttatttcgttgagcagtggtttgtagttctccttgaagaggtccttcacatcccttgtaakttggattcctaggtattttattctctttgtagcaattgtgaatgggagttcactcatgatctggctctctgtttgttattgttgtataggaatgcttgtg

SEQ ID NO: 334227 - DNA, 201 bp, Homo sapiens
tagcgtcctcttttatttcgttgagcagtggtttgtagttctccttgaagaggtccttcacatcccttgtaagttggattcctaggtattttattctcttygtagcaattgtgaatgggagttcactcatgatctggctctctgtttgttattgttgtataggaatgcttgtgatttttgcacattgattttgtatcctga

SEQ ID NO: 334228 - DNA, 201 bp, Homo sapiens
ccttcacatcccttgtaagttggattcctaggtattttattctctttgtagcaattgtgaatgggagttcactcatgatctggctctctgtttgttattgktgtataggaatgcttgtgatttttgcacattgattttgtatcctgagactttgctgaagttgcttatcagcttaaggagattcggggctgagacgatggg

SEQ ID NO: 334229 - DNA, 201 bp, Homo sapiens
gaattgatccctttaccattatgtaatggccttctttgtctcttttgatctttgttggtttaaagtctgttttatcagagactaggattgcaaccctgctytttttttgctttccgtttgcttagtagatcttcccccatccctttattttgagcctatgtgtgtctctgcatgtgagatgggtctcctgaatatagcaca

SEQ ID NO: 334230 - DNA, 201 bp, Homo sapiens
gggcatttagcccatttacatttaaggttaatattgttatgtgtgaatttgatcctgtcattatgatgttagctggttattttgcccattattgatgcagyttcttcatagtgtcaatgatctttacaatttggcatgtttttgcagtggctcataccggttgttcctttccatgtttagtgcttccttcaggagctcttg

SEQ ID NO: 334231 - DNA, 201 bp, Homo sapiens
tgaatgttggcctgccttgctaggttggggaagttctcctggataatatcctgaagagtgttttccaacttggttccattcttcccatcatttccaggtayatcagtcaaacatagatttggtattttcacatagtcccgtatttcttggaagctttttttgtttctttttacttttttttctctaaccttgtcttctcac

SEQ ID NO: 334232 - DNA, 201 bp, Homo sapiens
aggagaagaggcgctctggtttttagaattttcagcttttctgctctggtttctccccatctttgtggttgtatctacctttggtcttttatgttggtgasctacagatgggattttggtgtagatgtcctttttgttaatgttgatgctattcctttctgtttgttagttttccttataacaatcaggtccctcagctgc

SEQ ID NO: 334233 - DNA, 201 bp, Homo sapiens
tatataaaatgggattggtaagaaggtggatgtatcatcaagccatttgggtttgaatcccacaggcctgcagtactcaactgacaatcaatttgtacaayggctcaaagaactgcagggctctgccgccgtggagaagattcccttgatcccgtctaccccagaagagatgagtgaaatgcttcagctctgctcctatgt

SEQ ID NO: 334234 - DNA, 201 bp, Homo sapiens
tcagctcgccctctgtgggctgcacccactgtccaaccagtcccagtgagatgaaccaggtacgttaattggaaatgcagaaatcacccgccttctgcgtygatcacgctggatgccgcagaccggagctgttcctattcggccatcttggaacctatcctcgttatactcttaaaaattgttgaggaacccaaagggttt

SEQ ID NO: 334235 - DNA, 201 bp, Homo sapiens
aggcatgcacaagcacgcctggctaattttgtatttttagtagagacggggtttctccatgttggtcaggctggtctcgaactcccgacctcaggtgatcygcccgcctctacctcccaaagtgctgggattgcagatgtgagccaccgcgcccggccaaacctggataattttgaaattttgttgttgttgttggttgtc

SEQ ID NO: 334236 - DNA, 201 bp, Homo sapiens
agcaggagagagtgaaccatctaatcagtacctctcccagaatcacgaaggagataagaatttgtggtttatggatggtcatgtgtttccaggatagaacrataagaacgtttatcatttgaaaaatttaaattcctatcttctaccttagagtactggactttgagtcttaaggactaaagttcctgccatgcaggcata

SEQ ID NO: 334237 - DNA, 201 bp, Homo sapiens
cgaaggagataagaatttgtggtttatggatggtcatgtgtttccaggatagaacaataagaacgtttatcatttgaaaaatttaaattcctatcttctaycttagagtactggactttgagtcttaaggactaaagttcctgccatgcaggcataacctttggacagtcatgtgggcagtagtccgccagtcattgaatg

SEQ ID NO: 334238 - DNA, 201 bp, Homo sapiens
cctgggtatcaccagcggagtctgcagaacagcaaatattgctgcctgatccttcctctggaagctttgtctcagaggggcacccggccgtatgaggtgtyaatcagcccctactgggaggtgtctcccagttaggctacacgagggtcagggacccacttgaggaggcagtctgtctgtctcagagctcaaatgctgtgc

SEQ ID NO: 334239 - DNA, 201 bp, Homo sapiens; identical to SEQ ID NO: 70361

SEQ ID NO: 334240 - DNA, 201 bp, Homo sapiens
cctggcaacttgtaagaaggcaaattctggttcaagaggctcagggaggagcagcgtctgcatttcttgtgggcttttgatgctcctggtccatggactayagtgtgagtgaccagtccctgaaatatgtggaaggatttttttgtgtgtttctcagtgtggttttgatttgagcaaggatggcagtaccaacaaaaaaga

SEQ ID NO: 334241 - DNA, 201 bp, Homo sapiens
tgcggtttttgtagagacaggctcaaactcctgggctcaagcgatccacccaccttgccctcccaaagctctgggattacagttgtgagccaccatgcccrgcctggttctttctttttattgtggtaaaatatacataactttaaaaaatggaaaataagtgttggtgaggatgtggagagattggaaccccctatgcac

SEQ ID NO: 334242 - DNA, 201 bp, Homo sapiens
catatgaatcccctggcaacttgtaagaaggcaaattctggttcaagaggctcagggaggagcagcgtctgcatttcttgtgggcttttgatgctcctggkccatggactacagtgtgagtgaccagtccctgaaatatgtggaaggatttttttgtgtgtttctcagtgtggttttgatttgagcaaggatggcagtacc

SEQ ID NO: 334243 - DNA, 201 bp, Homo sapiens
ctcacatttcctgtcaacactcagatatgcttaggcaagttgtcttctaggctaaccctccttaaattctatcatacatatgaatcccctggcaacttgtragaaggcaaattctggttcaagaggctcagggaggagcagcgtctgcatttcttgtgggcttttgatgctcctggtccatggactacagtgtgagtgacc

SEQ ID NO: 334244 - DNA, 201 bp, Homo sapiens
atggataaccatacaaaagaatgtgcagcatatcagtaacaaaagaattcttgtaaaaaaaaaaaaaaaacataagctagtaggtgaagggcactgttgtygaatgtatgcctttaacatacatagactttcacaagtcctcaggaatttcacaatgctccagagtaaattgtataactacagatatttataatacctaat

SEQ ID NO: 334245 - DNA, 201 bp, Homo sapiens
ttaatccaaaggatttgatttgaagggtatatttagtgctaagtgtgtttactctcagcgatgagtttgacactgatccattaaagaaaactggggtttcrtacaagccatgccctcttctcatatttatccatgcacgcacacttcacgtgagttttaaactgtttgcttagagctttcattcttttaaagactgtgtat

SEQ ID NO: 334246 - DNA, 201 bp, Homo sapiens; identical to SEQ ID NO: 70400

SEQ ID NO: 334247 - DNA, 201 bp, Homo sapiens
gtcctggagatcagtgatgaaaccgataccacagctagatcacattcacattctactagattataagtaaagggtcccttccttttaaattctcagagcaygacacacagataaaagtttcaaactgaaaaaaaaaaatagctcctttgctggaagattttcactgaaacataccagaaaatctctggcttttactgttct

SEQ ID NO: 334248 - DNA, 201 bp, Homo sapiens; identical to SEQ ID NO: 70401

SEQ ID NO: 334249 - DNA, 201 bp, Homo sapiens
gactacagcagacagaatgagatgacagaatgaaacgtcccttagtcagcttatttgcaattgcactttcctagccactaatgaaaatgtgcctggacctrtgactgaggagaaagatgaacgtccagttctgtctccttgtatggtaagcagaggagtccaggatgtcctgttaggcaacaagagtgggatagagaaatt

SEQ ID NO: 334250 - DNA, 201 bp, Homo sapiens
gaacactaagggtagcttgcgttccttcagaatgattacatagaatcagcggcacttccttcctctgaagtggctttgagtttcctcgaaatagcctcctytgtaacatggttaagggaacttaaggatgtacctgtaagcgtggtgaagtggaatttctgggggcagttcgcagggcattactagatggcctaaaaatct

SEQ ID NO: 334251 - DNA, 201 bp, Homo sapiens; identical to SEQ ID NO: 70403

SEQ ID NO: 334252 - DNA, 201 bp, Homo sapiens
ctgctctgacaataaaattcactctggagctccagcagttcaattgttgcgaagtactcagctattatttttcaaattcaacttgtagtaatctatacctmtgacttggaaagaactataaaatataaggtaaattaaaaaatatttttttcataaaaagttctaggtgtgtaaaaaggtgtagaaaaagatctgaaaggt

SEQ ID NO: 334253 - DNA, 201 bp, Homo sapiens
gtcgtgaagtccaggtttgaactcacatccctctgagtcacatgttcttaacattatacccacgtgggaggtaacaaatgctaaagacatgcatatatagmaaaagataagttatttatgatttttcccctgaaattgttatttctttcttagaggctggaaaaaattcaaaaggtccagttaaattgcactaaggtgaag

SEQ ID NO: 334254 - DNA, 201 bp, Homo sapiens
agtgaaggaagccagatacaaaaatccacatgttgtatgattccattcaatttatataaaacatctagactaggcaaatccatagagatagaagttgatcmgtagtagccaggggctgtggggagataggaatgggaaatgactgctaatgagtatggggttttctttcggcaggggaggtgatgacagtgttttataatt

SEQ ID NO: 334255 - DNA, 201 bp, Homo sapiens
ataatattgtgatagtggtttgtgaatatagttttacagtataattttgtcttaaagcattctattttcaagtactaatttcatgtataagatttcttacmataattattaactgtctatgctaaacatattaattttgaataacaattctacaatgacctcaaaggcatttacaagtgctcaccacagccatggtgaagg

SEQ ID NO: 334256 - DNA, 201 bp, Homo sapiens
ggtacagttacctgatggtgttgtgttgctgtgacctctccccctaggcctccatctgccggagcagccagcccctgtccggcttcagtgcccggtgcctrgaggacgagcagatgctccaggccattaggaaagccaatccaggaagtgacttcgtttatgtcgttgacacccggcctaaagtaagtgtcaccgttgcga

SEQ ID NO: 334257 - DNA, 201 bp, Homo sapiens
gtgtgaaaaagtaacagaataaaatcaaatatatgtacttgtaaaactctttccccacttttagaaattatgttaactatgatattaatctataattggtraaggggagactgactgtaaagtcttatcttttggcttctatgaacttccctgtacttggacagggaggttataataaaatgcttttcctaattggataac

SEQ ID NO: 334258 - DNA, 201 bp, Homo sapiens
tgaaacttactctgttcttttccttctaaccttaccccttcatccctcttcaagaacttttgcctttttgaaattcttacattgcatgaactctgcctctstctgctccactactccatgttccttaaggctgggtctgtatttatctatctcttttcctcacactgcccagcacagtgcttttgcacataacctaagtga

SEQ ID NO: 334259 - DNA, 201 bp, Homo sapiens
ttttcctccttcaaacagctatccttggcatcaaagagatatgaaggctcatactactggtcacttggtaggcagaggaatgaatgatgcgtttcattcaygattattattttctgaattattttttactactgttatggatataatcagaatagattctgaataacagaaaagtaaaattgtttgcgttctggtttcaaa

SEQ ID NO: 334260 - DNA, 201 bp, Homo sapiens
acctggcccagctaattgttttgcattttttgtagagacgaggaaagccatgttgcccaggctggtcttgagctcctgtgctcaagtgatctgcctgcctyggcctcccaaagtgctgggattacaggtgtgaggcgccgccccttgcctcttttttttttttttttttttttttttttattaagataggataaatagaga

SEQ ID NO: 334261 - DNA, 201 bp, Homo sapiens
agagtaaagaggttgccagtcacacactgcccttaggctcttctcctgcacacatgcgtttccatcatcaacttgttctcattgtgccccattaaacttasaacccaaagaaaatgtctcgagttgtcaagaacagacttccactagttcatatttctttgtaaggggaaatctctggccactttaaagcattggggatat

SEQ ID NO: 334262 - DNA, 201 bp, Homo sapiens
cagtggcacaatcttggctcactgcagccttgacctccccagactcaagtgatcttcccatctcagcctcccgagtcactgggaccacgcgtgtgccaccyggcccagctaattgttttgcattttttgtagagacgaggaaagccatgttgcccaggctggtcttgagctcctgtgctcaagtgatctgcctgccttggc

SEQ ID NO: 334263 - DNA, 201 bp, Homo sapiens
gagcttttacctcttaggcatcctgggtgttggggaggaagtggtgaagaggaaggtggaaaggtgtatggagttacttgcatctctccacttgttgaggktgtgccccactgggacacccttcatatctgccctgaaggtcagcaggcactgataggaaagaagcaacagggacatcttcctcctctgccaatcaacttg

SEQ ID NO: 334264 - DNA, 201 bp, Homo sapiens
agcgattctcatgccttagcctcccaagtagctggactacaggtgcccaccaccacaccctgctaatttttgtatttttagtagaggtggggttttgccaygttggccaggctggtcttgaactcgtggcctcaagtaatctacctgcctcggcctcaagtgctcggattacaggagtgaactaccatgcctgcacctcca

SEQ ID NO: 334265 - DNA, 201 bp, Homo sapiens
ctctattttttagtgaaaataatatggaaagtggagtcaagggatgtagatttcgaccccagtgtatttgctgtgttgctagcatctgagcccattactcyttaataaatcaagataattctgttggctgggtgtggtggctcatacctgtaatctcagcactgtgggaggctgaggcaggtggataacctgaggtcagga

SEQ ID NO: 334266 - DNA, 201 bp, Homo sapiens
agacaagtgctgggctggtaatcaagggagggctgtatatgtttcaacttcagatctcagggtacaagaaagaccaaccccacagggttcaaatggagactttttctgcaccctcactgaccccaccagcaattgcataggagaaaataagagtggtataggaaatacctaaggcagattatctgaggcttattttcttct

SEQ ID NO: 334267 - DNA, 201 bp, Homo sapiens
atgccaaggtattcctcaggccccctgaacttataatcaacgagaatgctaactagccctaagccctataataacaactggaaagtttggcctgttcagtaaaaaaaaagactgcaagagaatgttatctatggaaggcttggaggaatcaattgcatcctgagacttcacgcagtggaatgtgtgtattttaggattaag

SEQ ID NO: 334268 - DNA, 201 bp, Homo sapiens
tcaagagcaatttggcagtagagtcatccctcagtatccaaggagaattgtttccagcacccccaccccagcccccatagattctcaaatccacacacgcrgaagtcccttacataataacatggtgtatttgcatatagcctatgcacatcctcccatatatttaaaatcatctctagattacttgcaatacttaataca

SEQ ID NO: 334269 - DNA, 201 bp, Homo sapiens
gcatgatagagctgaagacttaggaactctatgacccagcccatttcacttatagaaatccaggtacagggagactttccacaaggagactgtagaaaggtttttttttttttttactgtactgtttgtaaatattgaaaaggagggaacaactgtcaacagtagggggatggataaataatttaagatatagagtggaat

SEQ ID NO: 334270 - DNA, 201 bp, Homo sapiens
catgatagagctgaagacttaggaactctatgacccagcccatttcacttatagaaatccaggtacagggagactttccacaaggagactgtagaaaggtttttttttttttttactgtactgtttgtaaatattgaaaaggagggaacaactgtcaacagtagggggatggataaataatttaagatatagagtggaata

SEQ ID NO: 334271 - DNA, 201 bp, Homo sapiens
agtgcagcattccctgtgaccagagaaggtagaaaagccttacttgaaatggttccatagaatcaagtttagtaaacgtgggtatttattttgacttaaggcttgcttccagaaaatacctaatacaacaaaggaatcattaacaaactacctataaaacatgatcatatgtaaaatgagagagtaccttaattttgcttt

SEQ ID NO: 334272 - DNA, 201 bp, Homo sapiens
tgatgtgaataaggcagatcaagtctcttccctcacagagcttatattctgctgggggagacagagaattttttttttttttttttttttttttgagaggkagtctcgctctgtcacccaggctggagtgcagtggcacgatctcagcttgctgcaacctctgcctcccaggttcaagcgattcttctgtctcagcctccc

SEQ ID NO: 334273 - DNA, 201 bp, Homo sapiens
aaaggcagttggttgaggctttttcatccaagtgtgttaaaagaaaggcagagtaaggcagaaaagcagttgaactttttggagggtgcactaaaattggmacagaagttctgggaagatgtacattaggttgcacgcagcagataatgtgaggagaattctgtgctaacagtttctgtgtcactgattaatggaagtact

SEQ ID NO: 334274 - DNA, 201 bp, Homo sapiens
agtccattccgccataggaaaatgtcgctgcagctttcacataagctgttttagaatgcaatgtcttttgtgttgttcagttttttttaaagaaataaatwccttggatttatacctaaagagaaccatatcttccctgatgccatggtatgttccctgttttgaggtaatcatttattcaagaaatctttatttagtgcc

SEQ ID NO: 334275 - DNA, 201 bp, Homo sapiens
agaagttctgggaagatgtacattaggttgcacgcagcagataatgtgaggagaattctgtgctaacagtttctgtgtcactgattaatggaagtactagkcgataaatgtgctctgagcggattaatgggatttaggaatagcccagcgaactgggaaagggctgagcagctggtgatgagtgaatcacagggaccagga

SEQ ID NO: 334276 - DNA, 201 bp, Homo sapiens
aaatgttcagaataggcaaatctatagagacagagggtaaattgatttttttagggccggagtggttgggggaataactgggatgtgactggtagtgggtrcaggatttctttttgcggtgatgaaaatgttttaaaatagtgcgttaatgtttgcacagtggcagtgtatacagtgttgtgaatgtgctaaaaaccattg

SEQ ID NO: 334277 - DNA, 201 bp, Homo sapiens
tatcagggaagtgcaaatcaaaaccacaatgagatcgcatattaggatgactataatcaaaaaaagagattataataagtgttatcaaggatgtggagaarttggaacccttgtatattggtggtaggaatattaaatggcacagctgctttggaaaatagtccagaagctcttcaaaagccttactatatgacttaccaa

SEQ ID NO: 334278 - DNA, 201 bp, Homo sapiens
cacgttttcataagccgaggtggactatcagtgagccaagggctctttgttctggagacacacgtagagtgtctctcatgggtacagttacctgatggtgytgtgttgctgtgacctctccccctaggcctccatctgccggagcagccagcccctgtccggcttcagtgcccggtgcctggaggacgagcagatgctcca

SEQ ID NO: 334279 - DNA, 201 bp, Homo sapiens
actcctttaaagattaggaaatctattactattattgataatttaggactagagttaaaaaaacaaatatttatccaaatacatatcaaaaaggcataacwttcacttctgattttaaaaaatcaaaactcttagtaaactaggattaggtcactttcacgatgcgataataaatatcagcatgaaactcaatggtaaaag

SEQ ID NO: 334280 - DNA, 201 bp, Homo sapiens
tattttgtattttttctttcagcaggaaaatgaagcaatatcagtgaaaaggaaagtagattatttaaatggttttgaatatcataacttagaccctatckaaacatctctacacattcctaatattttgcacagacaggttctttgtattgcttgcccattagtggtttgacttgaattttaataaacaaggcttgattt

SEQ ID NO: 334281 - DNA, 201 bp, Homo sapiens
tgtatgaattacgtagtcgtgatttcaagttggccatatagcaggaacacaagactcctttaaagattaggaaatctattactattattgataatttaggrctagagttaaaaaaacaaatatttatccaaatacatatcaaaaaggcataacattcacttctgattttaaaaaatcaaaactcttagtaaactaggatta

SEQ ID NO: 334282 - DNA, 201 bp, Homo sapiens
tcttgtcaccgtgaaagtttcccgtttagaattagaattggtttttggtatttgtgatgtttctagatgggctagtttaaaaaaaaaaaaaggttggaaarcattaaaaaataatttctattttattaatgtcaccattaatcgtatcctatgcatttgagaacggttatttattttgtattttttctttcagcaggaaaa

SEQ ID NO: 334283 - DNA, 201 bp, Homo sapiens
aaatgtccgcttggtagatcgagtgtctcctaaaaaagcagctctaggtactttgtatttgacggctacccatgtcatattcgtggaaaattcacctgacscaagaaaagaaacatgggtatgctttctttatttttagctttccttgttttgcgttgtttgaagcaaaaagtgtttgccctccattcatttttcctcagg

SEQ ID NO: 334284 - DNA, 201 bp, Homo sapiens
atgactgtgtatgaattacgtagtcgtgatttcaagttggccatatagcaggaacacaagactcctttaaagattaggaaatctattactattattgatamtttaggactagagttaaaaaaacaaatatttatccaaatacatatcaaaaaggcataacattcacttctgattttaaaaaatcaaaactcttagtaaact

SEQ ID NO: 334285 - DNA, 201 bp, Homo sapiens
aggctgaaatttgcatttggttattattaagactgtggtatcatagataccttagaagacttgaggatgtgaattttcagactgtgataaggtggtatcaygacgctttgccatcctttccaggttttggagtggaatgtataaccgctttgaaaaggggatgcagccccgacagtcagttacagattacctaatggcagt

SEQ ID NO: 334286 - DNA, 201 bp, Homo sapiens
aaaaaaaaatcccccttgttctaagtagacttgagtcagcacaggtatgtgcctgctgtccttcggtttcaaacctagcagcaacctgggctcttgtcacygtgaaagtttcccgtttagaattagaattggtttttggtatttgtgatgtttctagatgggctagtttaaaaaaaaaaaaaggttggaaagcattaaaaa

SEQ ID NO: 334287 - DNA, 201 bp, Homo sapiens
tactattttaattttagaaaaatgtattctgtgctaattcatatatacaggcagacttttcataaacttattctccccaaaaggcatttactgacccaagraaaaaaacatcaacatgaaattattaccttaagtagtggcttttttgaggctgaaatttgcatttggttattattaagactgtggtatcatagatacctt

SEQ ID NO: 334288 - DNA, 201 bp, Homo sapiens
aatattaaaatgggatttagtaaaaattggaaacagtgaacggatctgtaaccacataagaagttgaaaccattactaaagatttctgtgtaaagaagtastatacttgtttcaactaataaatactttgtatgttgaaagcttcctgattaattgatgtaatcataaccatggttaattcacttgataacagcagcatga

SEQ ID NO: 334289 - DNA, 201 bp, Homo sapiens
caacttcagagctagtgagaaatgtccccaccttctccaacaaggagcacccaagccctttggagagatccaaacccatgttcagttgtcctgggttgggmttcaaagacaattaagctatggttggactaagagttggggtgccccttcatggatggaaccctgcaatacaagcacgctgaacaggctgtgacatgacag

SEQ ID NO: 334290 - DNA, 201 bp, Homo sapiens
aaagcagaaacaacctgaagctctagctcttcttccaaggtacagaacagagatgtgtctcgaagcagcgctgcgtgatcgggttaccccagggaagtccygagtgagcacacacctgcccgcccactctcccaccccatgaactgaaatctattttgcaggtggaataatgatcaaatttgtgttttataacaatgttta

SEQ ID NO: 334291 - DNA, 201 bp, Homo sapiens
agattgtgtgagtgtgtatccacatgcctgcacctacagccggggggtagagcagggtctcagtcagattctagaagcttccaaaaatatctggagcaatkccagcttcatcagagtgagcacatagccctctctgttgctactttgaaggaaaatattaatttggtggtgaaagttctgtgaattggataaaaattattt

SEQ ID NO: 334292 - DNA, 201 bp, Homo sapiens
ttttaaggaaggcttccaaaaactgccacgtgacacctccctttcatcagaattgcacagggcaggtgtggaagtacagtgttatgggtggccattaaaayagctaaaacttagagttccatttctgcggaggataggaaaacaaattcggatgagcaagaatggtctttggcacccacttttaaaaggtagcaaaaaacc

SEQ ID NO: 334293 - DNA, 201 bp, Homo sapiens
atgttcctgaatgtagtgggccacttacagttcttgccttactccatctcagcagcatttgacatagacactccctctctcttaaaatattatctctgctmtcctcttgacagcagaatctcctgattgtcctcctgcctgtccatttctttgtttctgtgcttttctgattcctcttcttcatgtagacctttaaacatt

SEQ ID NO: 334294 - DNA, 201 bp, Homo sapiens
atgggagataaaagaaaaatacatgtggaatctgtcgtcacatggaaataaatcacgtgataagctttaaccgctttaggaatgggaatattcttggcaasttgggaaaccactatttttttttttcaagttgtctttttcctcatcccttcccaacaaaacagcgcaaaaaatgaagagccttaaagttgtctggacatt

SEQ ID NO: 334295 - DNA, 201 bp, Homo sapiens
ttttaaaatcaatacaaatttgaggaagacgagtctgatgtgctcttgaaaagcaaagcaatgggagataaaagaaaaatacatgtggaatctgtcgtcayatggaaataaatcacgtgataagctttaaccgctttaggaatgggaatattcttggcaagttgggaaaccactatttttttttttcaagttgtctttttc

SEQ ID NO: 334296 - DNA, 201 bp, Homo sapiens; identical to SEQ ID NO: 70410

SEQ ID NO: 334297 - DNA, 201 bp, Homo sapiens
gtgcagcattccctgtgaccagagaaggtagaaaagccttacttgaaatggttccatagaatcaagtttagtaaacgtgggtatttattttgacttaaggcttgcttccagaaaatacctaatacaacaaaggaatcattaacaaactacctataaaacatgatcatatgtaaaatgagagagtaccttaattttgctttt

SEQ ID NO: 334298 - DNA, 201 bp, Homo sapiens
gtgccccattaaacttacaacccaaagaaaatgtctcgagttgtcaagaacagacttccactagttcatatttctttgtaaggggaaatctctggccactktaaagcattggggatattgatgagactatccatattacttgactgaacactttttaaaatccaggctgggtgtggtagctcacacctgtaatcccagcat

SEQ ID NO: 334299 - DNA, 201 bp, Homo sapiens
tgcagcattccctgtgaccagagaaggtagaaaagccttacttgaaatggttccatagaatcaagtttagtaaacgtgggtatttattttgacttaaggcttgcttccagaaaatacctaatacaacaaaggaatcattaacaaactacctataaaacatgatcatatgtaaaatgagagagtaccttaattttgctttta

SEQ ID NO: 334300 - DNA, 201 bp, Homo sapiens
gtgatacccttgcttcagatccctgctggactgaagtcaggagggctggattgcttcatttgcatttggagagtaaagaggttgccagtcacacactgccyttaggctcttctcctgcacacatgcgtttccatcatcaacttgttctcattgtgccccattaaacttacaacccaaagaaaatgtctcgagttgtcaaga

SEQ ID NO: 334301 - DNA, 201 bp, Homo sapiens
gcagcattccctgtgaccagagaaggtagaaaagccttacttgaaatggttccatagaatcaagtttagtaaacgtgggtatttattttgacttaaggcttgcttccagaaaatacctaatacaacaaaggaatcattaacaaactacctataaaacatgatcatatgtaaaatgagagagtaccttaattttgcttttat

SEQ ID NO: 334302 - DNA, 201 bp, Homo sapiens
cataatttcagtgtcaacccatcctaaggtctcctagttcaacagtgatctgcttaatgtctgttataaattattcttgctgtaatttatggataatttcrttgcctcttcccagtggaaacaggtatcagcccacacgcagaaaactgtcagtagtcataggatgtttttcttcttctacctttaaagctatttgtaaat

SEQ ID NO: 334303 - DNA, 201 bp, Homo sapiens
agtgccaggtactattctagattttacagatgtgatgtgaataaggcagatcaagtctcttccctcacagagcttatattctgctgggggagacagagaattttttttttttttttttttttttttgagagggagtctcgctctgtcacccaggctggagtgcagtggcacgatctcagcttgctgcaacctctgcctccc

SEQ ID NO: 334304 - DNA, 201 bp, Homo sapiens
gtgccaggtactattctagattttacagatgtgatgtgaataaggcagatcaagtctcttccctcacagagcttatattctgctgggggagacagagaattttttttttttttttttttttttttgagagggagtctcgctctgtcacccaggctggagtgcagtggcacgatctcagcttgctgcaacctctgcctccca

SEQ ID NO: 334305 - DNA, 201 bp, Homo sapiens
tgccaggtactattctagattttacagatgtgatgtgaataaggcagatcaagtctcttccctcacagagcttatattctgctgggggagacagagaattttttttttttttttttttttttttgagagggagtctcgctctgtcacccaggctggagtgcagtggcacgatctcagcttgctgcaacctctgcctcccag

SEQ ID NO: 334306 - DNA, 201 bp, Homo sapiens
gccaggtactattctagattttacagatgtgatgtgaataaggcagatcaagtctcttccctcacagagcttatattctgctgggggagacagagaattttttttttttttttttttttttttgagagggagtctcgctctgtcacccaggctggagtgcagtggcacgatctcagcttgctgcaacctctgcctcccagg

SEQ ID NO: 334307 - DNA, 201 bp, Homo sapiens
tttaatctcaggtgatagagatttacacaacaatttagatacatggatgtttatcagttttttggtttttttttttttgagacagagtcttgctccattgkatatatgtactatgttttctttatacatttgtctgttgatggccacttagtttgcttccaaatctcgactactgtgaataatgctgccataagcatggga

SEQ ID NO: 334308 - DNA, 201 bp, Homo sapiens
tttgcaatagcaaatagatattcttttcttactggagattttctggtgtcatttttacttttgttttttcctttcctcaaccttacatccattacttgackcttaccttttatttataacttcataggtctgtaatttataacttttttgccttttcctttttggaaatggctggggccagtagcaactccagaatttcag

SEQ ID NO: 334309 - DNA, 201 bp, Homo sapiens
tgctttccttagatgtgcagatggtttgctcccacacttttttagatctttgctcaaatgttattttatcaagaaagccaatttatcatcacatataaaakaacaatcctaactcacctcaaccaacatactttacctctttatatttttctccatagcattttttctgtaacatacatacacacctacacacatacacat

SEQ ID NO: 334310 - DNA, 201 bp, Homo sapiens
aactttgcctttgccatgtgcatctctatatgggtggataatgcctgttcatgcatttgcaggttactcgaggatggggacttctgcaagtgcctctgaattcctcaacattattggttgtgtggtctcttatttttcgtttgcttctctccaagatatttgtattctttcttgtgtaggtattaattgaaaaggactgga

SEQ ID NO: 334311 - DNA, 201 bp, Homo sapiens
cacaatcccacttttgagtgcttactggaaagattgaaatcggtaagttaaagaaacgtctgctctcacattttcgttgcagcactattcacagtagccamgttgtggaatcaacttaagtatccatcattggatgaagagataaagaaaacatggtatatacaaataatggaatgctattcagccttaaaaaggaagaca

SEQ ID NO: 334312 - DNA, 201 bp, Homo sapiens
gtgtatttgcatatagcctatgcacatcctcccatatatttaaaatcatctctagattacttgcaatacttaatacaatgtaggtgctgtgtaaatagtcrttacactggattggttttctattaccattattttttgttgtattgttatttttatttttttcaaatatttgtgctctgtggttggttgactccaaggatg

SEQ ID NO: 334313 - DNA, 201 bp, Homo sapiens
atggaaaacagatggaggttccacaacaaacaaaaaatagaattatcgtatgattccacaatcccacttttgagtgcttactggaaagattgaaatcggtragttaaagaaacgtctgctctcacattttcgttgcagcactattcacagtagccacgttgtggaatcaacttaagtatccatcattggatgaagagataa

SEQ ID NO: 334314 - DNA, 201 bp, Homo sapiens
attgtttgcttagaaatttaggatcacccagttcaattttgtagtttgcttctttaaacgtaccatatttcagtgttcaaaacatacttttagaagattaygtggggcttttttttttaatcctatggaaatgtccttatatttaccacttccccattttagggctattataataatgtcctgatgaacatctcattatta

SEQ ID NO: 334315 - DNA, 201 bp, Homo sapiens
ccccaccccagcccccatagattctcaaatccacacacgcagaagtcccttacataataacatggtgtatttgcatatagcctatgcacatcctcccatayatttaaaatcatctctagattacttgcaatacttaatacaatgtaggtgctgtgtaaatagtcgttacactggattggttttctattaccattatttttt

SEQ ID NO: 334316 - DNA, 201 bp, Homo sapiens
aaacattgtttgcttagaaatttaggatcacccagttcaattttgtagtttgcttctttaaacgtaccatatttcagtgttcaaaacatacttttagaagrttacgtggggcttttttttttaatcctatggaaatgtccttatatttaccacttccccattttagggctattataataatgtcctgatgaacatctcatt

SEQ ID NO: 334317 - DNA, 201 bp, Homo sapiens
gtagagacaggggtttcactatgttggccagactggtcttgaactcctgacctcaggtgatccacttgccttggcctcccaaagtgctgggattgcaggtktgagccactgtgcccagcctcattactttatttttaagaatttgctttattaatccaggcctcttgtgcattgtacagttgtatacaatactacttgaca

SEQ ID NO: 334318 - DNA, 201 bp, Homo sapiens
attactttttgtttgtttgtttgtttttgaggccgagtcttgctctgtggcccaggctggagtgcactggtgtgatcttggctcactgaaacttgactccrtctcctgggttcaggtgattctcctgcctcagcctcccgagtagctggggctacaagcacgtgccgctacacctaggtaatttttagatttttagtagag

SEQ ID NO: 334319 - DNA, 201 bp, Homo sapiens
atatgtttcaacttcagatctcagggtacaagaaagaccaaccccacagggttcaaatggagactttttctgcaccctcactgaccccaccagcaattgcwtaggagaaaataagagtggtataggaaatacctaaggcagattatctgaggcttattttcttctaagtaaattccacatttgcagaggtcctaaaattat

SEQ ID NO: 334320 - DNA, 201 bp, Homo sapiens
acagaggggcctggatgatgcttttatgtctcaaattgatcatgctacttccctgctaaatttcctaggtggcttccctttgtacccaggatataaagtgrgaatcctcagaactgctcgtaaggccctttgtagactgagcccttcctacttctccagcctcgttttgtgacaatcatcttcttatccacaaccctctga

SEQ ID NO: 334321 - DNA, 201 bp, Homo sapiens
atacacatttggcttttgtttttaaatgggtaatctttggtttctcgtcaggaaccatttctcctgcccttatgcctgtggtctgacactactgttttctraagaacatgcaaactgaccaagttctggagggcagctgtctgtttcataagggaacatggtgcttgcacgtaacttttccagctacgtgcagtgcagtag

SEQ ID NO: 334322 - DNA, 201 bp, Homo sapiens
tcctgatttatttatttttgctcttttctaatccctttctcacagaggggcctggatgatgcttttatgtctcaaattgatcatgctacttccctgctaartttcctaggtggcttccctttgtacccaggatataaagtgggaatcctcagaactgctcgtaaggccctttgtagactgagcccttcctacttctccagc

SEQ ID NO: 334323 - DNA, 201 bp, Homo sapiens
ccactctgaaaacttgctggaagcttaggcataatttgggttcaagtgctgcttaattaaatgaaaagacttcagggctcctggaagtagcttgaagtgtktgtaggatttagtttggtactagattgaggcaaatgtgtccaggatcctggtaagtgatttctactttatatgctttggtctttctggaaggcatttttc

SEQ ID NO: 334324 - DNA, 201 bp, Homo sapiens
aacagagcatatgctaagcagagtgcttcccttccagaatggttcctctagaggggaaaaaaaagttccaaggacaggctggtttgcagttgggttaaagsggggacaccaagtattacctgtactcatcccagtgaacttctaggtttctacttcactgtctgggtttccttaccactctgaaaacttgctggaagctta

SEQ ID NO: 334325 - DNA, 201 bp, Homo sapiens
tgggtggagatggacacagggcctgcagataaagtatttccccttgatgtgggtttctgtgtccccacccaaatctcatcttaaatcgtagctcccataakcccaacatgtcatgggagggacccggtgggaggtaattggatcatgggagctggtctttcccatggtgttctcatgatagtgaataagtctcacaagatc

SEQ ID NO: 334326 - DNA, 201 bp, Homo sapiens
atttagaacctttcatgtgccaggctctgtgttaagtgctggaagcatccaggaactcacaatctctaaggggaggcagttgtaaatatgtcagtgtatgrtagagacatgtgcaaggtgcagtgggtagagagggagactgaagagaggatcagctctgccctcaaggtcaagggaagccttcttagaagagccgtctta

SEQ ID NO: 334327 - DNA, 201 bp, Homo sapiens
ttccagagtgataaaggtgggtggagatggacacagggcctgcagataaagtatttccccttgatgtgggtttctgtgtccccacccaaatctcatcttaratcgtagctcccataagcccaacatgtcatgggagggacccggtgggaggtaattggatcatgggagctggtctttcccatggtgttctcatgatagtga

SEQ ID NO: 334328 - DNA, 201 bp, Homo sapiens
taacgtggctcttgctgctctggggtggagttcgcgtggtcagactatctgcttctgcccgctcaaaccccactttggcaaagagtggtatctactttctsagtgcctgggagttgacacctcaagctgctctttcatgggttatgatcctcatgcttccaggacccctcctgctaagaccaccagtgcccccatgttcct

SEQ ID NO: 334329 - DNA, 201 bp, Homo sapiens
attctgctaacaaagacagtggaggtcagcaagggaggcatcatcacagaagactttataagaggcttggatttcagttgtgggttttcaacccctacaamcccatcttccagagtgataaaggtgggtggagatggacacagggcctgcagataaagtatttccccttgatgtgggtttctgtgtccccacccaaatctc

SEQ ID NO: 334330 - DNA, 201 bp, Homo sapiens
tccttcaaatgtcttgacgtgccagttgcttctgaaaagctaacgtggctcttgctgctctggggtggagttcgcgtggtcagactatctgcttctgcccrctcaaaccccactttggcaaagagtggtatctactttctgagtgcctgggagttgacacctcaagctgctctttcatgggttatgatcctcatgcttcca

SEQ ID NO: 334331 - DNA, 201 bp, Homo sapiens
tgtagttttctattctgctaacaaagacagtggaggtcagcaagggaggcatcatcacagaagactttataagaggcttggatttcagttgtgggttttcmacccctacaaccccatcttccagagtgataaaggtgggtggagatggacacagggcctgcagataaagtatttccccttgatgtgggtttctgtgtcccc

SEQ ID NO: 334332 - DNA, 201 bp, Homo sapiens
aagtgcagatgccccggttggtagcactaacaggcatctttccttcaaatgtcttgacgtgccagttgcttctgaaaagctaacgtggctcttgctgctcyggggtggagttcgcgtggtcagactatctgcttctgcccgctcaaaccccactttggcaaagagtggtatctactttctgagtgcctgggagttgacacc

SEQ ID NO: 334333 - DNA, 201 bp, Homo sapiens
gttggtctggtgcaatgactacatgtctcttgaacctcaaacaaacaggtgtggtccacgtcatagtcttctagctggctgacttcatggaggttcagacrccagattggcaagggggagggagtgccgtgttttatggcagtcttcccagctaaagctctctgagtccaagttggttgagccttctgttcttggcagatt

SEQ ID NO: 334334 - DNA, 201 bp, Homo sapiens
ccttggcctagaaaagatgatgaaacccttttttcccctcagtctaaccccaacagaggaagaacaggaattcaaaaaagcctttaaactggggcatagtmttttccattgaatctataagattcttgaagatagacaaagatgctaccttgttcacccttttgcttttttttgcggaacctgacacagtgccacacatag

SEQ ID NO: 334335 - DNA, 201 bp, Homo sapiens
gtctactttgatgaaagcaggacaaatatccatgcttctagcttggtaagaggttgtatcttcccgtgttaactgacaccctaaatctgcttttctcaaakgcattctagcttcttagagttccccgagcaagtactcatcagaatgccttataacttaagctgtgacccatggagctttttcccctagacccagtgctct

SEQ ID NO: 334336 - DNA, 201 bp, Homo sapiens
agtcctctttgttctttttcaaaatcgttttttgctatttggggtccctggagaatccatgtaaattttaggatgaatttttctacttctgcacaaaatgsccttgagattttgatagggattgccttgtggttgctttgtgtaggatggacatcttcacaatattaagtcttccagtgcatgaacacaggtatcttacca

SEQ ID NO: 334337 - DNA, 201 bp, Homo sapiens
ctgccatttgcatgtgacttactaaattattccattttagaagtccagagattcactttagtctgcaagttgtgaactgcccgtggaacagtttctctttsatcttctatagtcctaaggcatttgtatcggagtgcagtttgtcccagatgtctctggagtggtgatgaaggcttcagaaccagacatatccaactccag

SEQ ID NO: 334338 - DNA, 201 bp, Homo sapiens
ttatgttcttttctaggagtttaatacttttgggtcttatgtttaggtctttagtccattttgagttaatttttttatatagtacaagatatgacccatckttattttattttacttttgcatgtgggtatctagttttcccagtaccatctgttgaagagactaatcttaccccattgagtagtcttggcacccatgcta

SEQ ID NO: 334339 - DNA, 201 bp, Homo sapiens
tgtcctccttactacgattacatgacctgcctctcagaatgctcctggggccagctttaagccagctctcccttctcagctcccttcccaattgccttgtygccaccttacaaaaaaaaacataccctttaccacaccctccgtcttgctatcatgcatcatctcagggtgtgtgagggaatatgtagtttcatattttat

SEQ ID NO: 334340 - DNA, 201 bp, Homo sapiens
attgctggatcatgtaggaattctatttttaaattcctgaagagcctccatgctgttgtccatagtggttacataattttatatccccatccacagtgcastagggtttcaatttatctgagtgctcaccagtactagttttattatgttttcattctttcattttgtaatagtggccatcctaacaattgtgagttagca

SEQ ID NO: 334341 - DNA, 201 bp, Homo sapiens
attgtgctgtcttccaattgggtccatgcacccctgaattcacaggaagactttttgaattgcaccctgggtacattactttatggaaattggcttctagwtcatcagcttctgtatgtcctccttactacgattacatgacctgcctctcagaatgctcctggggccagctttaagccagctctcccttctcagctccct

SEQ ID NO: 334342 - DNA, 201 bp, Homo sapiens
tgaagttttcactaatctggtataagttccttaaaatgaattcacctcttaaccatgatttggtagacagtgcttcagtgaatcatgaatccgtgctacasaagatgctgacaaaggagtcctaatggaatatctttactgctgggtctccattattgagtaatatcagcaacaccctcggacaagagcgaagaggcaggc

SEQ ID NO: 334343 - DNA, 201 bp, Homo sapiens
gtttcagggccgcgtgcataggcagaagtgagcctgatgcttggagggcctgtctggtattgctgggcactgtcacaaggcatcagatctccagaagggcygagcttgctcagttttaactcggggctggcacttggcctttgcatcagattgtgctgtcttccaattgggtccatgcacccctgaattcacaggaagact

SEQ ID NO: 334344 - DNA, 201 bp, Homo sapiens
gctactgaatgagttttggggcaaatataaaatatatttggtagtttgtaagccaattttatatatcatttgctcataagtatttcaagtttgaggtaacrtgaatatgtaacagaagactttttagaaaaaatattttgggaagaaattttctatattgtgtatgccaaaagtccttggtaggaaaaactgttttcactt

SEQ ID NO: 334345 - DNA, 201 bp, Homo sapiens
gagggtgctggaatttgccatgctttccactgggccgtgtttcagggccgcgtgcataggcagaagtgagcctgatgcttggagggcctgtctggtattgytgggcactgtcacaaggcatcagatctccagaagggccgagcttgctcagttttaactcggggctggcacttggcctttgcatcagattgtgctgtcttc

SEQ ID NO: 334346 - DNA, 201 bp, Homo sapiens
ttttttaaagaaataaattccttggatttatacctaaagagaaccatatcttccctgatgccatggtatgttccctgttttgaggtaatcatttattcaakaaatctttatttagtgccaggtactattctagattttacagatgtgatgtgaataaggcagatcaagtctcttccctcacagagcttatattctgctggg

SEQ ID NO: 334347 - DNA, 201 bp, Homo sapiens
aaacagttgccttcaactgggggatggggtggtctttcagaaccatctgaagatattttataaaagacaccgtccactgcctttaagggcatgagaataakggtgtgtgtgtagttggtgagggaggtgtactttgaattctagtagtaaaatgtagctctctcgatattctggttagtcaccaacaaagttcacatattt

SEQ ID NO: 334348 - DNA, 201 bp, Homo sapiens
gtgtctttaactttaaacttagctcttttagcttttaaaaagtactattgtgcactgtgcttttaaaagcagatatttttttctggtggtgagttctcagygtaggttctctgcctgggttagccctcctgtccttggtgggtggaggaggagaatggtcagcgaatgctgttttctaggatgtgatgacctgcttaataa

SEQ ID NO: 334349 - DNA, 201 bp, Homo sapiens
aaaatgggtatccctctgccatgggcttccctgtcttaagctgcactgcactgactgggtagccagctttgtagagctccgtagtctgtgcgctgaagatwtgattttgcgaaagaatacaatgcttagctgatagtgtgtcagcactgtgatcaaatggtaaaatatttccagagtattctcttccattaggcttaatcc

SEQ ID NO: 334350 - DNA, 201 bp, Homo sapiens
aggggttagacatgaaacagttgccttcaactgggggatggggtggtctttcagaaccatctgaagatattttataaaagacaccgtccactgcctttaarggcatgagaataagggtgtgtgtgtagttggtgagggaggtgtactttgaattctagtagtaaaatgtagctctctcgatattctggttagtcaccaaca

SEQ ID NO: 334351 - DNA, 201 bp, Homo sapiens
ggaactaaaacctgcttctgggggacgggcaggaactgcacctggtctgttggataagaattgtttcacttgggaaccttacctgcaggagcagagcgtgrcagggaacttgcagtgaggccatttgaggccctctcggttttaccagatgtcgaagcaacacataatattaattttaggccttacgcacatgggttatgt

SEQ ID NO: 334352 - DNA, 201 bp, Homo sapiens
aaggggttagacatgaaacagttgccttcaactgggggatggggtggtctttcagaaccatctgaagatattttataaaagacaccgtccactgcctttargggcatgagaataagggtgtgtgtgtagttggtgagggaggtgtactttgaattctagtagtaaaatgtagctctctcgatattctggttagtcaccaac

SEQ ID NO: 334353 - DNA, 201 bp, Homo sapiens
tgaggttgcgctgaggagcagagtgacagccaggggctgtgagaggcaggctgtgtagtatcaggagcgtggggtcacccttggttcccacaggaggatgygattagcttgcgtgcatcattccatgactggcagggaactaaaacctgcttctgggggacgggcaggaactgcacctggtctgttggataagaattgttt

SEQ ID NO: 334354 - DNA, 201 bp, Homo sapiens
ttttcctctcttgtttgacaacttatcttatttcttctcacaaatcctttgaggtcggtgggtcaggaagtgtcatttgatggaaaagaaacaattgtcgrtggtggaaataacagcagacgtagaatacaaaacttagattctagaaccaattctgctattttctttggccttgggcaggctaattattactattatctg

SEQ ID NO: 334355 - DNA, 201 bp, Homo sapiens
agacatgaaacagttgccttcaactgggggatggggtggtctttcagaaccatctgaagatattttataaaagacaccgtccactgcctttaagggcatgrgaataagggtgtgtgtgtagttggtgagggaggtgtactttgaattctagtagtaaaatgtagctctctcgatattctggttagtcaccaacaaagttca

SEQ ID NO: 334356 - DNA, 201 bp, Homo sapiens
tattttgaaataattctgaagccataaaagactaaaattccctttatgcaaatataaatcagtctcccataatgcaattatttttttcttcctcattttayttttattttttaattttattattattatactttgttttagggtacatgtgcacaacgtgcaggtttgttacatatatatacatgtgccatgttggtgtgc

SEQ ID NO: 334357 - DNA, 201 bp, Homo sapiens
tctggagggagatggggaaatgtggaaggggttagacatgaaacagttgccttcaactgggggatggggtggtctttcagaaccatctgaagatattttayaaaagacaccgtccactgcctttaagggcatgagaataagggtgtgtgtgtagttggtgagggaggtgtactttgaattctagtagtaaaatgtagctct

SEQ ID NO: 334358 - DNA, 201 bp, Homo sapiens
cgtatttgtgatatgtactcagaacactagctctgaagctttttaatgctttacgttaaataaaagaagctcctgaggtgaaagttggtggtttataataytatagaggtgtttatacacctgccttagttgtgtaaatatagataccactgggatcctaggttttcttcattttcactcaaagggaaagcctctaccctg

SEQ ID NO: 334359 - DNA, 201 bp, Homo sapiens
attttgaaataattctgaagccataaaagactaaaattccctttatgcaaatataaatcagtctcccataatgcaattatttttttcttcctcattttatttttattttttaattttattattattatactttgttttagggtacatgtgcacaacgtgcaggtttgttacatatatatacatgtgccatgttggtgtgct

SEQ ID NO: 334360 - DNA, 201 bp, Homo sapiens
cctgactttttaatgatcgccattctaactggtgtgagatggtgtatcattgtggttttgatttgcatttctctgatggccagtgatgatgagcatttttkcatgtgtcttttggctgcataaatgtcttcttttgagaagtgtcttttcatatcctttgcccactttttgatggggttgtttttttcttgtaaatttgtt

SEQ ID NO: 334361 - DNA, 201 bp, Homo sapiens
ttttgtaggttgcctgttcactctgatggtagtttcttctgctgtgcagaagctctttagtttaattagatcccatctgtcaattttgtcttttgctgccrttgcttttggtgttttagacatgaagtccttgcccatgcctatgtcctgaatggtattgcctaggttttcttctagggtttttatagttttaggtctaac

SEQ ID NO: 334362 - DNA, 201 bp, Homo sapiens
aataatgcaaatgccttaagtcaaatgtggaatcacaagtttcaacagtgatcatgacgtgttaaggttggagcaaaaataattgtggtttttgccgttawacaacaaaaaggcaaaaaccgcaattacttttgcaccaacgtaataggttgcctttttgtctccactgaattaagtcctactggaagtacttcccttgtg

SEQ ID NO: 334363 - DNA, 201 bp, Homo sapiens
acttttgcaccaacgtaataggttgcctttttgtctccactgaattaagtcctactggaagtacttcccttgtggaaattacattaagattgtatgtattrgccgaggcgggtggatcaccctaggtcaggagttcaagacaagcctggccaacatggggagacccagtctctactgaaaatacaaaaattagctgggcat

SEQ ID NO: 334364 - DNA, 201 bp, Homo sapiens
gagttcaagacaagcctggccaacatggggagacccagtctctactgaaaatacaaaaattagctgggcatggtggtgagcgcctgtaatcctagctactygggaggctgagacaggagaatcacttgaaccagggaggaggaggttgcggtgagccgagatcgtgccattgcactccagcctgggcaacaagagcaaaac

SEQ ID NO: 334365 - DNA, 201 bp, Homo sapiens; identical to SEQ ID NO: 70405

SEQ ID NO: 334366 - DNA, 201 bp, Homo sapiens
aatagttcctgagtacctttttgtaaaagcagattaaaatgatctcatgtcattggaagaagaaatcttttagtttgctggagaatgtcagttccgacagyaaatttaaattgtattgattttgcactagggaattaagttgtcgcttcacaatcatgaaattgtaaacttagaagacaatgctacaaaccacagaatagg

SEQ ID NO: 334367 - DNA, 201 bp, Homo sapiens
ttgactgagcgttttcagccttggcctagaaaagatgatgaaacccttttttcccctcagtctaaccccaacagaggaagaacaggaattcaaaaaagccwttaaactggggcatagtattttccattgaatctataagattcttgaagatagacaaagatgctaccttgttcacccttttgcttttttttgcggaacctg

SEQ ID NO: 334368 - DNA, 201 bp, Homo sapiens
agggaaatgtttctgctcttctagatgtcatctgacagtgcaatctactctgtcagaattgcagggtacgggacttggggcagagaatgcagattgattcmaaaaaaaaatcccccttgttctaagtagacttgagtcagcacaggtatgtgcctgctgtccttcggtttcaaacctagcagcaacctgggctcttgtcac

SEQ ID NO: 334369 - DNA, 201 bp, Homo sapiens
agatgtatgcttttttcccctctctcacacatgcagttagttacacatgggatcatttgtccaggaactctgaactccaacttgaaacatctttttttagsaaccattatacagacagtgacacctgtcataaataaaaatgacttgagaatttctatatggtagatgtttctataattactgcattgctggttagaagtg

SEQ ID NO: 334370 - DNA, 201 bp, Homo sapiens
tatgggtatgagccactatgcccagccaataacaattattttttaataactagtgagatgtatgcttttttcccctctctcacacatgcagttagttacasatgggatcatttgtccaggaactctgaactccaacttgaaacatctttttttaggaaccattatacagacagtgacacctgtcataaataaaaatgactt

SEQ ID NO: 334371 - DNA, 201 bp, Homo sapiens
catgtctgactataacctcaaactcctggcctcaaaccatctgcccacttcagcctcctaagtagctgggcctacaggtgcctgccactatgcctagataytattttattttgtgtagagatggggatctcatcttgttgcccaggctggtctcgaactgtcggcctcaagtgatcttcctgcctcagcctcctaaagttc

SEQ ID NO: 334372 - DNA, 201 bp, Homo sapiens
cataattcatcaggatatcttgaatttatggattatttgggctagaatggacacttccatgacactgaatcttcctcttaattacacttaaatttaacaamcataaagttaattattataaagtatctgactcatgtaatcagactaatttgttctcatactaaagctaacttttgcagtgaatttttagccttgaaagaa

SEQ ID NO: 334373 - DNA, 201 bp, Homo sapiens
attatttatttatttattttttagagttagggtctcactctgtcatccaggctggaaggcagtggcacgatcatgtctgactataacctcaaactcctggsctcaaaccatctgcccacttcagcctcctaagtagctgggcctacaggtgcctgccactatgcctagatactattttattttgtgtagagatggggatct

SEQ ID NO: 334374 - DNA, 201 bp, Homo sapiens
taaatcccacaattatatttttaccagttatgattattatggctttataatcttgatacttaaaagtcagttctttgacataattcatcaggatatcttgmatttatggattatttgggctagaatggacacttccatgacactgaatcttcctcttaattacacttaaatttaacaaccataaagttaattattataaag

SEQ ID NO: 334375 - DNA, 201 bp, Homo sapiens
tggattatgctcaattcttctctaatctctgatgtttgaataaaatagtcctgggaaaagactttcaatggttttttagctgtagaaagattaaatactcsttttggaaaaacagttgacgttctttatttctctgtcaaaaggctgaatttaaaaactcctgaagcttcatggttaccaccttttgtttcagtaacttta

SEQ ID NO: 334376 - DNA, 201 bp, Homo sapiens
tgtagccaataatttgttataatttatagctcttgcagatatcttgtctcaggagattctgatacactgttccaagtttcttcagaagttttgagttgtcratctttcttaccatgttttgtcttttagcatactgtttttttttttaattttttaatcctggtctgtttgctaaactttgtcccaatttgacgctgtata

SEQ ID NO: 334377 - DNA, 201 bp, Homo sapiens
cttacacggtaggagcaggagcaagacagagacagggtaggtgccgtacccttttaaacaaccacatctcctgagaatgaactcaccatcgtgaggacagyactatattagtgtgttctcatgctgctaattaagacatacccgcgattgggtaatttataaagggaagaggcttaatggactcacagttctacatggctg

SEQ ID NO: 334378 - DNA, 201 bp, Homo sapiens
ttggaatgggggccagctaaataatttttgctctatccgtatgattaagttagtttataaccattaaaggaaatgtggaaggttcctatgtactgataaarattgctaaaatatattgttaggttagaaaaagcaagacacaatatggtgaatatagtataataccttttggcttaacaaaggagggagaataataacacg

SEQ ID NO: 334379 - DNA, 201 bp, Homo sapiens
ttaattagtttcttggaaactgtgactttccaagaacctaattcttggaatgggggccagctaaataatttttgctctatccgtatgattaagttagtttrtaaccattaaaggaaatgtggaaggttcctatgtactgataaagattgctaaaatatattgttaggttagaaaaagcaagacacaatatggtgaatatag

SEQ ID NO: 334380 - DNA, 201 bp, Homo sapiens
agtatattgtgtttctacttaggagtagagtttatgagctagagagtatatagatttgagctttactaaattctggaaaattcttttctaaagtgtttgcrtggacatattggcctgcttgcaagatatgagttctcattacggcacagactccccgacggttggtattgatgtgatattcgctggtattcttctttgttg

SEQ ID NO: 334381 - DNA, 201 bp, Homo sapiens
gtgccactggactccagcctgggtgacagagagttaggctctgtctcaaaaataaaataagatatagacatgcctatgttgatagtagtgttttatttatmatagtagaatattggaagccgaatgaatgtctaacagtagtagactgattaattttacttcaccttcttgatagaaaagtttgcatccatgaaaaatact

SEQ ID NO: 334382 - DNA, 201 bp, Homo sapiens
ttaatattcacttttccttaccacgtgttaaacctaggatagtacaggttaccatgatacactgtgaatttgtctttagacacaaaaattcacattcatawatactaatagcacattattctatgaacttgctgcttgattttctttaggccattggtaaatagtattctggaacacatggtgatgagcttgtgtagccta

SEQ ID NO: 334383 - DNA, 201 bp, Homo sapiens
catgggcattagaaatgccagtttgcctaaaatgtagtgctttaataagtgtggaaggtgaaacagatcacaagcagttcacagtgtaatgttaaaggcawtgctaacattagggcatattataggctgtaactttggaagcaggactttgactctggagggagatggggaaatgtggaaggggttagacatgaaacagtt

SEQ ID NO: 334384 - DNA, 201 bp, Homo sapiens
ttcactcaacatggtaacatttgtatttgtgatccatttcgtttaagaaacatgtatatagttactacatgccaggtactgttctaaaaacttgataaatrttagcaaatattagttctgtgtatagtagtattattatttctactttacaaatggagaaagtatgacagagagattaagtaattgtctaaggcatagaga

SEQ ID NO: 334385 - DNA, 201 bp, Homo sapiens
tgctttgggaatgaaaggaggaacctgtttagccggtaaggtggggctaggttgtggaaggcccggttagcagcagtggggagatactgtagctctgaacrgagagtgacatgatcagggtgtatctagagtgactactgtttgagtgccatcctggggactagactgtgtggcaggatgtgctgggctttggtcacccat

SEQ ID NO: 334386 - DNA, 201 bp, Homo sapiens
gttttgcatgtttttatactgtctgtacttggtctgcatatgctgtatatagttttctgaagtttgacttttcactcaacatggtaacatttgtatttgtsatccatttcgtttaagaaacatgtatatagttactacatgccaggtactgttctaaaaacttgataaatattagcaaatattagttctgtgtatagtagt

SEQ ID NO: 334387 - DNA, 201 bp, Homo sapiens
ggaagctgatgtgggaggatcacttgggcctgggaggttgaggctgcagtaagccatgatcgtgccactggactccagcctgggtgacagagagttaggcyctgtctcaaaaataaaataagatatagacatgcctatgttgatagtagtgttttatttataatagtagaatattggaagccgaatgaatgtctaacagta

SEQ ID NO: 334388 - DNA, 201 bp, Homo sapiens
aacaaaacagtctagatatattcatttatcctttcccccttactttacaaagttgtatcaagattactggggtgaatttttctaccagtagctcccctggktctgtctaaacttcttggattgtgagtctatttgaaactgggtcttagtcttcaaatctgtacctccgtacttcacgtaacctggctgaaactggctctg

SEQ ID NO: 334389 - DNA, 201 bp, Homo sapiens
tgttgtcatatttattggaaccttccaggtattcaagagccctcgggctttaagcgaacgtcggtggtggcctgcagaaaccccatgttttgcagactcayggaggtactgccttgatggttttatataagatcctgaagaattatttggattatcagagagatagtctttttctcttcctttattttctcccaaacaaat

SEQ ID NO: 334390 - DNA, 201 bp, Homo sapiens
atgatagagctgaagacttaggaactctatgacccagcccatttcacttatagaaatccaggtacagggagactttccacaaggagactgtagaaaggtttttttttttttttactgtactgtttgtaaatattgaaaaggagggaacaactgtcaacagtagggggatggataaataatttaagatatagagtggaatat

SEQ ID NO: 334391 - DNA, 201 bp, Homo sapiens
atctccccttctgaagccagccctatcactgacctttgtagacgtatgatccaataaaagcccttttggctcaagccatatgaggttgagatttctgtctsttgctcctgtaagagtcctaggagatagaggtggaatcagatcatctgtgggcagtattaccagttaggaactttttgttttgtttttgagacaaggtct

SEQ ID NO: 334392 - DNA, 201 bp, Homo sapiens
agcagcattattcctggtagtcaaaaggtagatgcaactgaaatgtctatcaactgatgaattggtaaatgaaatatgatatgtccctataatggtatatyatggggcaacaaaaagtaaagcactggtacattctatgaatagatgaacttggattgaaacgtagattgagaacatgattgctaagtgaaagaaaccact

SEQ ID NO: 334393 - DNA, 201 bp, Homo sapiens
tggcaggatgtgctgggctttggtcacccatcatccactctcccaggctccctctgaggagccatgcctgctctatgctcagtttgtatgtttttttggtktgtggcgtactgccaatccagctacccaaatcatgtcatttcatgaccacactgaatggtttaggggtaagcgtgtgaccaagtgagatgcagtgatact

SEQ ID NO: 334394 - DNA, 201 bp, Homo sapiens
tgagggaaaaaaaaggtgttttatgttcttttgcttaaagttgcaattgcctacaacctgagggcattgttgagcaaggacttactgtagtagtatgtggyattgttttgcatgtttttatactgtctgtacttggtctgcatatgctgtatatagttttctgaagtttgacttttcactcaacatggtaacatttgtatt

SEQ ID NO: 334395 - DNA, 201 bp, Homo sapiens
tcaaattttttaaaaagggcttttagattatttagacttttttttgccatatgaataattcttgatatagtatccttatgtgtataatttcccccaacttwaaattattttataagaaaaatctttcctgaatctaccaaaaggcataaagggcctaattgttttaaaaattacagacaggtaggatactgatgtttttgt

SEQ ID NO: 334396 - DNA, 201 bp, Homo sapiens
tggctctgtccagagtttgaagtatgatgatatgggctctccaggctaaatagatattggtagaggaagaaacagatgctggtacatcagaatacctgggwtatctgggatatcggaatacctgggatatcttcacatgcatagatgctggtacatcagaatacctgggaagaatgatcagtgatatctatcatatgagac

SEQ ID NO: 334397 - DNA, 201 bp, Homo sapiens
atttaaacatatataacaaaaatggaatcattacatgtgccttatattctgcttttcttcacatacatattgtgacatttttctgtcaataattatatttktaaaacactgcatagtattacctaagtatggctgtatcaaataatatctacctgctctctaatttttagacatttagatcgtcattactcatcactattt

SEQ ID NO: 334398 - DNA, 201 bp, Homo sapiens
gagaatttttaaaatttccttaaacgtcagtcaaatctgctgttttaacaaatgtataggtagatggaactcaacaacctgcccatttataaacactcagscttatccaaaatcatcaagaattttttttaccttgacctaaactagatacaataatccttatctgaataggaagtttgggtgatttatttttctcctttt

SEQ ID NO: 334399 - DNA, 201 bp, Homo sapiens
gaacttgaaacccagagaggccgggtggcaggccttgtggacaggcagttggtgggagagctggcctggatctcattctcccatcaggtctttttatagtrtagtgagtgattagtgggcaagtcagggagactctgaaggcagtttggcaccggctcctctatgtactcactgagtccttgcttggtacacaaggtcacc

SEQ ID NO: 334400 - DNA, 201 bp, Homo sapiens
aaagagagcaaggctgggtgctgatcgatcttagtgaagaatacacgcggatgggcctccctaatcattactggcagctcagcgatgtgaatagagactayagagtgagtgcgtgaaacccaaacactgaagccgcatgaaattagggtttcagccagcttagcatccctttatttttatctccttcaggttttatagctc

SEQ ID NO: 334401 - DNA, 201 bp, Homo sapiens
cttgggtgtcaggctggaggtgagtatgttgcacttggtgagtggcagtgtccttttcttactgttcttggtgacctcagagtgcactgtgacaggcaatyatgcagctttgcttattgggcctcagaagaggcctccacatcattgggtctgcaaggcattctgctttatactcatttcccagagtgggaatgatggaca

SEQ ID NO: 334402 - DNA, 201 bp, Homo sapiens
agcaggccttctgcagccagatgtctcatttaaacctggactctccggtaactggctgtgtgactctgagggagggagtgtgcctcccgtttgcgtcagakttctcgtcggtaaaatgaggaccatcaatgttgcctactaactggattaatgcacttaattgcgacagaatctggaacaaaacaaggtctgagtatcagt

SEQ ID NO: 334403 - DNA, 201 bp, Homo sapiens
tgtgtgtgagcacgcctggatgtgcgtattttgttatttgtccaaatagtccgtactctaagttttgaagtttagaaacatgacatggagaaagactgaamtagaatataatttatctcactgacatacagcagttgcttcttactctcaagaaaaatgaagaaatctggtgcttaaaatatgacccttatctttcctctt

SEQ ID NO: 334404 - DNA, 201 bp, Homo sapiens
acgtttgaacctgctatacagatcaccccttccagacccttcatctcacggttgcagaacttgaaacccagagaggccgggtggcaggccttgtggacagscagttggtgggagagctggcctggatctcattctcccatcaggtctttttatagtgtagtgagtgattagtgggcaagtcagggagactctgaaggcagt

SEQ ID NO: 334405 - DNA, 201 bp, Homo sapiens
acaacctggacctagaatcaaaacgtttgaacctgctatacagatcaccccttccagacccttcatctcacggttgcagaacttgaaacccagagaggccrggtggcaggccttgtggacaggcagttggtgggagagctggcctggatctcattctcccatcaggtctttttatagtgtagtgagtgattagtgggcaag

SEQ ID NO: 334406 - DNA, 201 bp, Homo sapiens
caaaagaatgtggtaaaactagtgctctaaatatttatcgtattatttaaattggcttagacagacataatgtatttggtttagagatagttttttttttwaccaggtttcttcctcttagggactaatccaaaatacgtttttaaaaaataaagatacaggaagggcatggaggctcatgcctataatcccagcactttg

SEQ ID NO: 334407 - DNA, 201 bp, Homo sapiens
attttttacaaattaagatattcaatactcaaaagaatgtggtaaaactagtgctctaaatatttatcgtattatttaaattggcttagacagacataatrtatttggtttagagatagtttttttttttaccaggtttcttcctcttagggactaatccaaaatacgtttttaaaaaataaagatacaggaagggcatgg

SEQ ID NO: 334408 - DNA, 201 bp, Homo sapiens
aaagagtaaacagtaagttgaaataaacatgtagataaacatgtaaatttgctctggtaattagagaaatgtaagttaaaacctcaaagtaccatttgccwcccaattttttacaaattaagatattcaatactcaaaagaatgtggtaaaactagtgctctaaatatttatcgtattatttaaattggcttagacagaca

SEQ ID NO: 334409 - DNA, 201 bp, Homo sapiens
aaatatttatccaaatacatatcaaaaaggcataacattcacttctgattttaaaaaatcaaaactcttagtaaactaggattaggtcactttcacgatgygataataaatatcagcatgaaactcaatggtaaaagataataagtgttccattaaaaatgggtgcacataaagagatgctcaatattgttagctatcagg

SEQ ID NO: 334410 - DNA, 201 bp, Homo sapiens
cttgcaaatattttctttcattctgtaaggtgtctttctcattgttatctttgaaatacaggtttttaatactaatgaagtacaatttatctattttcctktggttgctcatactttaggtgccatatctaagaaattacctaatccaaggtcacagagatttacactgtttaggtctttgatctatgttgagttaatttt

SEQ ID NO: 334411 - DNA, 201 bp, Homo sapiens
gtgataatgtaaactggtactgctgctgtggaaaaccctttggtagtttctcaaaaagttaaatgtagaattatcatatgactcagcatttccactcctgrgtatataccccaaagaattaaaaacagggacacaaacagatactggtatgcccatgttcatagctgcattattcacaatagccaaatggtgggaacaatc

SEQ ID NO: 334412 - DNA, 201 bp, Homo sapiens
cttattaaaataatttgtatatctaataggtacctcaatttcactatgtcccaaactgagctgattccctctcgtctcacacccaattttctcctcttgtrctctttccaatcttggcatttcacccttccagtgctggagccaataactttggagttacccttcactcctctttttctctccttccatatctatgccaat

SEQ ID NO: 334413 - DNA, 201 bp, Homo sapiens
gcgtttttgcaggatgaacttccattcaaaatgtaggcccctgacaggtcaaagctaggtcagagtggccatagctcaggtggttccagggatcccacacrtttaagaggggtgggggcaattgctttatggccagcaagaattgattcctaaattttggaatagttcctgagtacctttttgtaaaagcagattaaaatg

SEQ ID NO: 334414 - DNA, 201 bp, Homo sapiens
tatttacatattataaaattcatcatttaaaagtatacatttaagtagtttttgatgtattcacaacattatgtaaccatcactactctctatgtaatttytgaacattttcaccaccccaaaaagaaacctggtatttactagcagtcatccctcctttctctctccctacaccctggacaatctctagagatttgccta

SEQ ID NO: 334415 - DNA, 201 bp, Homo sapiens
gtttttttcaagcacagggagtctctctccatagcctccacagctgcaaatgtgctgggctcccctgaagccagcacgcctcagtctcacccaaggcccastgtgtactacctgggtatcactgctcattattcagggcccgagctcttttgtcagcagatgatgaatgccgctaggactgggttcttctcttccattcgg

SEQ ID NO: 334416 - DNA, 201 bp, Homo sapiens
gaggtggatcttgggtgtcaggctggaggtgagtatgttgcacttggtgagtggcagtgtccttttcttactgttcttggtgacctcagagtgcactgtgrcaggcaattatgcagctttgcttattgggcctcagaagaggcctccacatcattgggtctgcaaggcattctgctttatactcatttcccagagtgggaa

SEQ ID NO: 334417 - DNA, 201 bp, Homo sapiens
tcttcccacagttctagtgtgagtgtttgcctagcattgttcattgtgctgcagggaatattaggaataaaataacttgggttcccatgagaatatgattktggtaatggttagagtgtacagtaaagatagcgtgtaatgaagtagtgtaggataagtagaaaccaagtagtgatcagagaggtcacagcaattcagagg

SEQ ID NO: 334418 - DNA, 201 bp, Homo sapiens
cctgctggccctcctcactcaactgcttatcctgctttaatttcctctctaggaatcttctggcacacatacgtggtgatacagttccaccatatcttatrccaaattgtaatccccaatgttagcggttgggcctggtgggagatggttgcatgatgggggtggatttcatatgaatggtttagcaccatcgccttggtg

SEQ ID NO: 334419 - DNA, 201 bp, Homo sapiens
tgggcacctcatctcctacttgtttcccctcacagatgctgatccagaagtcctcacgtcctcgtagacccttgaccacatctacctgttcctgcccaggstcttgtcatttgttgttccctctgcctggaatgctctccccagatacccccatggctggctttctcactcattctggttctctactgaaatatctaatta

SEQ ID NO: 334420 - DNA, 201 bp, Homo sapiens
ttctttaataaaaacattgatctcgtcaaacacatggattttaggaaaggtgtcaagtttcgctcaggaagcctctgcagtggcctatgaggcaaagcctyagtgacatcgccctagattcctgaaagagagtctttttggaatgaaagtatggagaagaaagtgggaaacacactttggctttttagtggaggaaagtaa

SEQ ID NO: 334421 - DNA, 201 bp, Homo sapiens
catccattagcttttatttctgatgttctccctcccctcgcaacccctctgacaggccccagtgtgtgttgttccccatgatgtgtccacgtgttctcatsgttcagcttccacttacaagtgaaaacatgcaatgtttggttttctgttcctgcatttgtttgctgaggatgacagcttctagctcctgtttgtttttta

SEQ ID NO: 334422 - DNA, 201 bp, Homo sapiens
aacgctcaacctcaataatcattagggagatgcaaattaaaaccacagtgaggtatcgcctcacaactgttagaatgacctttaccaaaaagatggaagayaacaaagctttggcaagggtggggaggaaagagaatgcttatgcactgttggtgggaatgtaaattagtacaagccattatggaaaacagatggaggttc

SEQ ID NO: 334423 - DNA, 201 bp, Homo sapiens
tccagtatctccatatcctcaccaacacttgttgttatctcttgattatagctatcctaatgggtgtgaagcggtatcttgtggtagtttgagttgtatgyacctggtagctaattatgttgagcatctttttatgtgcttattagctattcatatgtcttctttggagaaatatctgttaagattctttgttcatttttt

SEQ ID NO: 334424 - DNA, 201 bp, Homo sapiens
ctgttttaagagtgggtagaaaatcaggtgagggatatgaccttcctagagtgggcaaatattttctctctgttcagattctgtaaatattaaagatttgyctaaaatataagaagcttctgcataacaaaggaaattgaagaaaagacttggaagccatatacctgataaaggattaatacccaaaatatgtcaggaact

SEQ ID NO: 334425 - DNA, 201 bp, Homo sapiens
tgtgactttcctgcagcagcatccaaagttaacaaaaagacatggaaaaatcccatctcaatggtagtattctaatctctcaacatctgcataccttattstgctccactgagcttttctaaaaataatttaagtgatacagcttcctctacttctgtagggagaataatccatatcaaatatttttgcctcaaagtatta

SEQ ID NO: 334426 - DNA, 201 bp, Homo sapiens
ctttctctctccctacaccctggacaatctctagagatttgcctatccaggacattttatataaatggaatcatacaatttatggtccgttgtgactggcktctttcagttaagcgtaacttaagattttcaaggttcatccgtgttgtagcatatatcagtacttcattactttttattgctgaataatattccattgca

SEQ ID NO: 334427 - DNA, 201 bp, Homo sapiens
tgtgatgggaaaagccagaggagcttttaacatgcctgttttaagagtgggtagaaaatcaggtgagggatatgaccttcctagagtgggcaaatattttmtctctgttcagattctgtaaatattaaagatttgcctaaaatataagaagcttctgcataacaaaggaaattgaagaaaagacttggaagccatatacct

SEQ ID NO: 334428 - DNA, 201 bp, Homo sapiens
tgatgaaaggaaggcttcattgtcactggtcttgcacaaagagcccttggagagaggggacagtgcacggggacagaacactaagggtagcttgcgttccytcagaatgattacatagaatcagcggcacttccttcctctgaagtggctttgagtttcctcgaaatagcctcctctgtaacatggttaagggaacttaag

SEQ ID NO: 334429 - DNA, 201 bp, Homo sapiens
aagtatatcttttatgtgtattttgtgacatttaaaaaaaatacatttcctggcacataaccactgctcagtaaatacttactgactgaatgaatttgtcraatgaactaatacttaatttggcaaatgtatatcaactattagcatgacagtgggtggcattgtgggtctgatgtcagacactcagttaaaattcttact

SEQ ID NO: 334430 - DNA, 201 bp, Homo sapiens
acaatgaacaccggtgctagaataagatcagccaaaacatggatctctgtgtttgggttgagctcatgctttcaactgaaacactgatttggtcttcctakaaacagccaaactgttactcatccttaatttcgtgtagtattttagaaattatcattttgctttctgggtagaaaaacattaaagctggactcctgtttc

SEQ ID NO: 334431 - DNA, 201 bp, Homo sapiens
cttgcaggcaggatgatctgtggaggcttctatttggtcatctctctttccatccccatagtttgtctggaattttttttttttataaaccgtatgttggkatgatcagccatatctcctgatggatattattatattatttaacattgaatattttattctgtatcatgtacataaatatacttatttctggtagtttaa

SEQ ID NO: 334432 - DNA, 201 bp, Homo sapiens
tcatttttaaaatacttttgattttaatattacattatttattgcttctcccagttagtctgtaatgagaggcaattactccatatatttatcctaaataytctgtttttataacctttaacttgatacctagggaacaagctaggttattttccttccttccctaatgttttgttgtaccctcatctctcccttatttgg

SEQ ID NO: 334433 - DNA, 201 bp, Homo sapiens
tggcattaattctcttaggagcatgaactctattgtgaaccgtacatgcgagggatctaggttgtgtgctcctgatgatctgaggtggaagagtttcatcytgaaactatcccccaaccccacacccccatccacagaaaaattgtcttccacaaagctggtccctggtaccgaaaaggttgtggaccgctgctacagagg

SEQ ID NO: 334434 - DNA, 201 bp, Homo sapiens
ctcgatattctggttagtcaccaacaaagttcacatattttcagtttatttatggacacccagctaactgtaaggttctgtagagcaggggtccccaaccsctgggccgcagacaggtaccagtctatggcgggttaggaagcgggcggcacagcacagcaggaggtgagtggcgggcgtgcaagcgtgagctctacctcc

SEQ ID NO: 334435 - DNA, 201 bp, Homo sapiens
tgcctcccagaatgctggaattacaggcatgagccactgtgcctggctggtttttctttcttatgctttttaaaagagtatctctgtggtatgtggtgaawaggcttcacttgaattagtcaagatacagcataaacgtaaggttcatgtcacgtaaggatactttcaaatctcctattaattttatttatgacgcttgtt

SEQ ID NO: 334436 - DNA, 201 bp, Homo sapiens
gtgaaactggagacaggcaaaggctagccgactgccatctcttgtgcaggttgcttcatctgcaaaggggcggttcctcttggcatagtcagtgtctgggyaccctgctggctacttcctggaggtctagtgcacctgaagcctccaactatacaagtacatttcatatttcccctgcccctagcattgtgctgggcacac

SEQ ID NO: 334437 - DNA, 201 bp, Homo sapiens
gataattaggctaattaaataaaaatatgcaaagttcttataatagtgcctatcatataaacactcaaaaacagtagtaagccatcaaaaatgttgaataktttaattattagtagcattgtaaatgagcgctatcccttccggtttacaactgaagagtttttaatctgtgctctgacatcagtaagaaatgctgccaag

SEQ ID NO: 334438 - DNA, 201 bp, Homo sapiens
ctctcctctcctcaagcagaaggaaggagtcacttccagaggcactgcctggggttgtgagaggggtggcacaagcattcccttagccaccccagcttgtrtctccctaggccacacgctaccccagtccgctgactctaaagccagcccagcattaggacttgactaggagttgcagtcctgtgtcccggattgcctttc

SEQ ID NO: 334439 - DNA, 201 bp, Homo sapiens
ccaagggaccacgtgatactctatcccgctatggctgagctagtacctgaggtgcaagacaaagtgcccttaacttttccctctgtttttttcaagcacarggagtctctctccatagcctccacagctgcaaatgtgctgggctcccctgaagccagcacgcctcagtctcacccaaggcccactgtgtactacctgggt

SEQ ID NO: 334440 - DNA, 201 bp, Homo sapiens
taacttgaatttctttgagtttcctcaacactgcaattttgaattgtctgtctgaagggtcacatacctctgtttctccaggattgtttcctggtgccttrgttcatttggtaaagtcatgttttcctggatggtcttgatgcttgtggatgtttgttggtacctgggcattgaagagttaggtatttattgtagtctttg

SEQ ID NO: 334441 - DNA, 201 bp, Homo sapiens
gagattctgatgcattcttcaatatagcaattgcatttttcaactccagaatttctgcttgatgctttttaattatttgaatctatttgttaaaatcatcyggtagaattttgagttccttccctgtgttaacttgaatttctttgagtttcctcaacactgcaattttgaattgtctgtctgaagggtcacatacctctg

SEQ ID NO: 334442 - DNA, 201 bp, Homo sapiens; identical to SEQ ID NO: 70408

SEQ ID NO: 334443 - DNA, 201 bp, Homo sapiens
tattaagagattctgatgcattcttcaatatagcaattgcatttttcaactccagaatttctgcttgatgctttttaattatttgaatctatttgttaaawtcatccggtagaattttgagttccttccctgtgttaacttgaatttctttgagtttcctcaacactgcaattttgaattgtctgtctgaagggtcacata

SEQ ID NO: 334444 - DNA, 201 bp, Homo sapiens
gctctgattgcttgagcaaacagacgtgcaaaaggaaaactaataaaaactctacactttcacttcatatccccttctttttaacttttttgttgcatctmttgatgtcttattgtactatgccttgaaaagttgtagttaccattttttattggttcatttaatcttttattggttatttaatctttctacttaagagta

SEQ ID NO: 334445 - DNA, 201 bp, Homo sapiens
ataaatgaagttataactgattccttttggtaacagttgggcagaactaactaatgttaacttgttctagaagagacagagaatgcttgttcattgtcttwgtgaggatcagccttcccttcctcctgccatttgcatgtgacttactaaattattccattttagaagtccagagattcactttagtctgcaagttgtgaa

SEQ ID NO: 334446 - DNA, 201 bp, Homo sapiens
taggtattttatattatttgtagctattataaataggattgctttcttgatttctttttcacattgttcactgttggcatacatgaacgctactgtttttygtattttgatttcgtatcttgcaacttgacagaattctttgtcattttgaatcgttttttggtggagtctttaggtttttccaaatataagatcatatca

SEQ ID NO: 334447 - DNA, 201 bp, Homo sapiens
tccaagatatttgtattctttcttgtgtaggtattaattgaaaaggactggatttcctttggtcataagtttaatcaccggtaagtaatatttaagactgytttgaatgtttagaataaaagcactgtttctgaaaatttcaattgaatatttaggggaaaatcgtcttgttttttgagtttgtgtctcttattcagaaag

SEQ ID NO: 334448 - DNA, 201 bp, Homo sapiens
caaagaaaatgtctcgagttgtcaagaacagacttccactagttcatatttctttgtaaggggaaatctctggccactttaaagcattggggatattgatsagactatccatattacttgactgaacactttttaaaatccaggctgggtgtggtagctcacacctgtaatcccagcattttgggaggttaaggagggagg

SEQ ID NO: 334449 - DNA, 201 bp, Homo sapiens
aatgcttgttttcacagatgtacatatattttctcatccttatttaaagcttatttttattgctttttttcccattctgaacaggacaagctgtgaagtaygcttgaaattaaacctcttgaccagacacccaagattccgtgactttgtccgtgtgatggttcagttttatattctcatactgcactcagagggagtcca

SEQ ID NO: 334450 - DNA, 201 bp, Homo sapiens
attgtatatgataattaggctaattaaataaaaatatgcaaagttcttataatagtgcctatcatataaacactcaaaaacagtagtaagccatcaaaaawgttgaatattttaattattagtagcattgtaaatgagcgctatcccttccggtttacaactgaagagtttttaatctgtgctctgacatcagtaagaaat

SEQ ID NO: 334451 - DNA, 201 bp, Homo sapiens
aggatgtacctgtaagcgtggtgaagtggaatttctgggggcagttcgcagggcattactagatggcctaaaaatctctttgtattttctggtgacaggtytgtgactcttatcctactgaactgtacgttcccaaatcggccacggcacacatcatagtggggagttccaaattccggagtagacggcgatttcctgtcc

SEQ ID NO: 334452 - DNA, 201 bp, Homo sapiens
gtcagagccacagaggtaacctgctggcttaaccagtgtgcttatgttttaggaaaactgtctcctggtgtcattctgtctttcaagcaaatcctggcagytcagattttctcagccagggtgcaaaatggcagtttgtctctttttgatgaaaggaaggcttcattgtcactggtcttgcacaaagagcccttggagaga

SEQ ID NO: 334453 - DNA, 201 bp, Homo sapiens
gttttaggaaaactgtctcctggtgtcattctgtctttcaagcaaatcctggcagctcagattttctcagccagggtgcaaaatggcagtttgtctctttytgatgaaaggaaggcttcattgtcactggtcttgcacaaagagcccttggagagaggggacagtgcacggggacagaacactaagggtagcttgcgttcc

SEQ ID NO: 334454 - DNA, 201 bp, Homo sapiens; identical to SEQ ID NO: 70409

SEQ ID NO: 334455 - DNA, 201 bp, Homo sapiens
tatggagtgctggctaattcaaccttgaggaaatggaagatggactcagccctttgtagatattgcaaatttaagcttttcatttaaaagtatttcttttrtcacattacctgcaaatttatgctgtgaaattctaccagatgtgagctaatgaaaagctgtaaaggttggtccttctccagctttctgtagtctcagttt

SEQ ID NO: 334456 - DNA, 201 bp, Homo sapiens
ctgccaaggtgccttggaggcagtctaaagggaagagccccggacacacccagctccagtggtttctctgaaatagttctctctgcttggagaggagaggytgtggctgtcggttccgatgtcccttttgctcgacacattcttccgtacctcatgtctttatggagtgctggctaattcaaccttgaggaaatggaagat

SEQ ID NO: 334457 - DNA, 201 bp, Homo sapiens
ggctgtcggttccgatgtcccttttgctcgacacattcttccgtacctcatgtctttatggagtgctggctaattcaaccttgaggaaatggaagatggaytcagccctttgtagatattgcaaatttaagcttttcatttaaaagtatttcttttatcacattacctgcaaatttatgctgtgaaattctaccagatgtg

SEQ ID NO: 334458 - DNA, 201 bp, Homo sapiens
acaacagtactcacctcttagggtgattttgaggtctaagcgtcttaataaatgtgaatctagaatggtgcctagcacagtagctatagtgttatttcagrattttcttttatcagtactatcggtactattgttgtattgctcttgttataaataattgcaaaaaataaattcaatctcaacagtaaacaaataaacata

SEQ ID NO: 334459 - DNA, 201 bp, Homo sapiens
tctcttcattttattcagtaattcctgctcaaggtttaactgggcatctgagggatcttgtgggcaaattagaatgatgcaaccattcctatttgataacrtgtttattggcaatctaatactagaagatataataatgtatagagccttattttgacagctgtttctgctgatattcttctgccaacctaccggttatgt

SEQ ID NO: 334460 - DNA, 201 bp, Homo sapiens
gtttcctcatctgtgaaatggggataacaacagtactcacctcttagggtgattttgaggtctaagcgtcttaataaatgtgaatctagaatggtgcctakcacagtagctatagtgttatttcaggattttcttttatcagtactatcggtactattgttgtattgctcttgttataaataattgcaaaaaataaattca

SEQ ID NO: 334461 - DNA, 201 bp, Homo sapiens
gtgtttggatttaataaacttcttcagataccactgtgacttaacctagtttgcacttggagaccccaacttctcatatgcaaaattataataatgaaagygatcaaaaagcccaatagatctctagatttaaataaggcggctggtggaaatgtctctggagacttggttgcattccctctcttcattttattcagtaat

SEQ ID NO: 334462 - DNA, 201 bp, Homo sapiens
ggataatctgtctagggcatgtataggtgcacaaaagcactgagactacttactgttctgcacacaattgaaaaccacatgttagcaattactgattcaakgaaaaattccatttagatcatatctttagtttattaagaaaatctaactacaaaataccaaaaatgtagtctgtttaatatgcgtgttttaatttatcga

SEQ ID NO: 334463 - DNA, 201 bp, Homo sapiens
ggaggataggaaaacaaattcggatgagcaagaatggtctttggcacccacttttaaaaggtagcaaaaaaccacctttaaaaaaggtggtttaaaaaaayaaaatgttctttggttctagcaaggtgagagagaaactttagtttttaagctagataatatacttctggattcaaagccgagtgaggctataaacacagg

SEQ ID NO: 334464 - DNA, 201 bp, Homo sapiens
ggaaaaacagttgacgttctttatttctctgtcaaaaggctgaatttaaaaactcctgaagcttcatggttaccaccttttgtttcagtaactttatgtarataggaaaaaagtgctttctttttaaattggaaaaaccaaatgccctttttctgtaattataagagatcatggcaattctacattgtttggagaatttgc

SEQ ID NO: 334465 - DNA, 201 bp, Homo sapiens
cccctttccatttttgccactcccccaccagtttatttttgccagagatactgttaaatataatttggagcttggacttctttcgtgggtctcctcacacmgaaagcatctaaactggaaaggaaacagtcaaattatccttgtttgcagatgatatgatcttatatttggaaaaacctaaagactccaccaaaaaaagat

SEQ ID NO: 334466 - DNA, 201 bp, Homo sapiens
tttagctgtagaaagattaaatactcgttttggaaaaacagttgacgttctttatttctctgtcaaaaggctgaatttaaaaactcctgaagcttcatggwtaccaccttttgtttcagtaactttatgtaaataggaaaaaagtgctttctttttaaattggaaaaaccaaatgccctttttctgtaattataagagatc

SEQ ID NO: 334467 - DNA, 201 bp, Homo sapiens
aatagtaaatcctcaccttatccaggttatcccacctccgttcctaccaccctattctgaaatactgtcaactcttgcctggtcccctttccatttttgcsactcccccaccagtttatttttgccagagatactgttaaatataatttggagcttggacttctttcgtgggtctcctcacaccgaaagcatctaaactgg

SEQ ID NO: 334468 - DNA, 201 bp, Homo sapiens
cttgagaataggattctttgcatgcctcccagatatatccctgtgtgtgcatcccaccagcattttttcttcattataccagaggtatctaagggatttcrtgaaaggtagagtctctgttacttctggttatgtgtcatatattttcttggattatgctcaattcttctctaatctctgatgtttgaataaaatagtcct

SEQ ID NO: 334469 - DNA, 201 bp, Homo sapiens
acacccaattttctcctcttgtactctttccaatctcggcgatccaccgttccagtgctggagccaataactttggagttatccttcaatcctctttttayctcctcccatatctattccaatagtaaatcctcaccttatccaggttatcccacctccgttcctaccaccctattctgaaatactgtcaactcttgcctg

SEQ ID NO: 334470 - DNA, 201 bp, Homo sapiens
tttttgagacagagtcttgctccattgtatatatgtactatgttttctttatacatttgtctgttgatggccacttagtttgcttccaaatctcgactacwgtgaataatgctgccataagcatgggagtgcggatatctcttggccatactgatttcctttcaggtaatgtgattcctccagttttgttctttttgcaca

SEQ ID NO: 334471 - DNA, 201 bp, Homo sapiens
agatacatggatgtttatcagttttttggtttttttttttttgagacagagtcttgctccattgtatatatgtactatgttttctttatacatttgtctgktgatggccacttagtttgcttccaaatctcgactactgtgaataatgctgccataagcatgggagtgcggatatctcttggccatactgatttcctttca

SEQ ID NO: 334472 - DNA, 201 bp, Homo sapiens
ctggcccactgtgggtttatagcaatatttactgtgtgggtagtagagttttaagaggaaaagaattgtatgcatgtataatgtacagttgcttttctgtyacaatggaagtcattcactcgctgtagactgtgtaatatccatgacagcctctgtgttctgctttagtctctggagtgcagtttaaggagacagatgcac

SEQ ID NO: 334473 - DNA, 201 bp, Homo sapiens
attttgtagtttgcttctttaaacgtaccatatttcagtgttcaaaacatacttttagaagattacgtggggcttttttttttaatcctatggaaatgtcmttatatttaccacttccccattttagggctattataataatgtcctgatgaacatctcattattatctgcatgtgatttcttccctagaatagaacccta

SEQ ID NO: 334474 - DNA, 201 bp, Homo sapiens
tgtgacccacactgacaaattcatgctgttgaatataagctcagcaggagtccctgaagctatgtagttcagtacaaggttgcagtgattcaaataagcgyattatgtttccgtacatcattctgaatgctttgattgggtatccatgaaatgttttggttgtttcatcattgtttcatcaatgtaattgatgactgttct

SEQ ID NO: 334475 - DNA, 201 bp, Homo sapiens
cgtgggtctcctcacacccagagggaaattctataccttatctgccccttctccctctcaaatctcatttcccacaactaccccactccctgttcttggayctcactgcttgaccactactccctggatacccaggcacactcctttttcaacacctttgcacgagatgtttcctgtgcctggaacttgctttccttagat

SEQ ID NO: 334476 - DNA, 201 bp, Homo sapiens
cccccaccagtttatttttgccagagatactgttaaatataatttggagcttggacttctttcgtgggtctcctcacacccagagggaaattctatacctyatctgccccttctccctctcaaatctcatttcccacaactaccccactccctgttcttggacctcactgcttgaccactactccctggatacccaggcac

SEQ ID NO: 334477 - DNA, 201 bp, Homo sapiens
cttgtgctctttccaatcttggcatttcacccttccagtgctggagccaataactttggagttacccttcactcctctttttctctccttccatatctatkccaatagtaaatcctcagcactctacttttaaaatatatccaggttatcgcacctccattcctaccaccctgttctgaaatactatcaactctttcctgg

SEQ ID NO: 334478 - DNA, 201 bp, Homo sapiens
tgtggagaatgttttgtggcaaagtcaggtggccctagagatgatacccgatctgttcttccacgcaaaggttttgaggcctgatggattgaaatcttcaktcggtgtggaaaggatggttggaggcagagcacttggagttgtcgtgggaggcaccatcgtggtgggtatgacggtcacatgttggatgcctgctctagt

SEQ ID NO: 334479 - DNA, 201 bp, Homo sapiens
cagggactgaatgaaagggggccaagcagatccattctaaaagactggaatctttttagcaggcctcaaaatagaaccacttaaaaaaatgttccctgacrtgatgggcattgactgtggagaatgttttgtggcaaagtcaggtggccctagagatgatacccgatctgttcttccacgcaaaggttttgaggcctgatg

SEQ ID NO: 334480 - DNA, 201 bp, Homo sapiens
ttatcttcattttacggatgaggaaattgaggcacagagcctgagaaacctgtttcagctcaaaatagtaagtggtagaaccaccatttttacctacttamtgtgagtgcagatgcctcactcttaaccaccaggcttttctgcctctcgaggtagtgggttggaatggaaggtgccctggcctcagtgtgtgaagtccta

SEQ ID NO: 334481 - DNA, 201 bp, Homo sapiens
tttaagctgtatttactcaagtaaacctcattgaagttgttgttgccactcttatcttcattttacggatgaggaaattgaggcacagagcctgagaaacytgtttcagctcaaaatagtaagtggtagaaccaccatttttacctacttactgtgagtgcagatgcctcactcttaaccaccaggcttttctgcctctcg

SEQ ID NO: 334482 - DNA, 201 bp, Homo sapiens
ttacaaagcagtattttaacctagcactttttatcatattacagtgatcgttgttgagtagtgattctgatgtaagacaagctcacagcttgtgaccacamggatcattatatgaactgcaaggatcattataaccacctcacatcgtaatgaagatacgtttatggaaggcttactatgtattggacacggttcagattt

SEQ ID NO: 334483 - DNA, 201 bp, Homo sapiens
catgaggaacagtctgcagaaaatgctggaaggtaaaccatttccttatgcacagcattaaaatgcagttaagtattttgatgccaaaagggaataagatrgtcttgattttaaaatgtttttacataggtgtgataatttgggaagaatatcatgttacagtggctttttaaacacttaagaacgtttctcttatttgta

SEQ ID NO: 334484 - DNA, 201 bp, Homo sapiens
gggacctgtaggaactattaccaaattttggaatgtgactttcctgcagcagcatccaaagttaacaaaaagacatggaaaaatcccatctcaatggtagyattctaatctctcaacatctgcataccttattctgctccactgagcttttctaaaaataatttaagtgatacagcttcctctacttctgtagggagaata

SEQ ID NO: 334485 - DNA, 201 bp, Homo sapiens
ctgggaaatcatactgttggtgttcccctccttatttcttttttccctctctgtatcttcaaaattacttttgacagctctgggacctgtaggaactattrccaaattttggaatgtgactttcctgcagcagcatccaaagttaacaaaaagacatggaaaaatcccatctcaatggtagtattctaatctctcaacatc

SEQ ID NO: 334486 - DNA, 201 bp, Homo sapiens
actggtcttgcacaaagagcccttggagagaggggacagtgcacggggacagaacactaagggtagcttgcgttccttcagaatgattacatagaatcagyggcacttccttcctctgaagtggctttgagtttcctcgaaatagcctcctctgtaacatggttaagggaacttaaggatgtacctgtaagcgtggtgaag

SEQ ID NO: 334487 - DNA, 201 bp, Homo sapiens
ataaacagaatatgatatgtacatgcaatggaatattattcagccttgaaaaggaatgaagttctgatacatgctacaatatgggtgaaccttgaagacaytgaagacaagtgaaataagccagacaaaaaaaggacagataatgtatgattccacttacatgaggtatatagaattcttagaaatgaaaagtaaaataaa

SEQ ID NO: 334488 - DNA, 201 bp, Homo sapiens
acacgcctgacgaggccagagaacctcccagcagctcctctgacgcagccagggccagcggagggggtgctgaggcatgaagagaagggccgagggcgagrcagcgcttgcctccgtgacgcctggccttttgtccttgctccttctccagagactttgctgtggttctgccccgtgatttcaccaggtcagcgaggtttt

SEQ ID NO: 334489 - DNA, 201 bp, Homo sapiens
caggcacttctcaggtctgctcacaggtttcattaaaaagaaaaaggattaggagctgacctgaatcgttcctggcctttgagcaaggctagccccacatragaacttccagagctgcctgttcagatgaaagcctcagaattacttgttgacattttttgggagacaccagcctgggcaacgtagtgagacccccatctc

SEQ ID NO: 334490 - DNA, 201 bp, Homo sapiens
ttacagaggttggatggatcggattcatttattcatttattttattctacaagcatttagaacctttcatgtgccaggctctgtgttaagtgctggaagcrtccaggaactcacaatctctaaggggaggcagttgtaaatatgtcagtgtatgatagagacatgtgcaaggtgcagtgggtagagagggagactgaagag

SEQ ID NO: 334491 - DNA, 201 bp, Homo sapiens
agttatttatgatttttcccctgaaattgttatttctttcttagaggctggaaaaaattcaaaaggtccagttaaattgcactaaggtgaagagtaagcamagtgagcccagcaagcactcagggttttctacctcagacaacagcatagccaacactccccaggattacagtgggaatatgaaatcatttccatcccgga

SEQ ID NO: 334492 - DNA, 201 bp, Homo sapiens
tgtactcatcccagtgaacttctaggtttctacttcactgtctgggtttccttaccactctgaaaacttgctggaagcttaggcataatttgggttcaagtgctgcttaattaaatgaaaagacttcagggctcctggaagtagcttgaagtgtttgtaggatttagtttggtactagattgaggcaaatgtgtccaggat

SEQ ID NO: 334493 - DNA, 201 bp, Homo sapiens
atttgggttcaagtgctgcttaattaaatgaaaagacttcagggctcctggaagtagcttgaagtgtttgtaggatttagtttggtactagattgaggcawatgtgtccaggatcctggtaagtgatttctactttatatgctttggtctttctggaaggcatttttcccacatgtgtaaatttgagttatgaaatagaat

SEQ ID NO: 334494 - DNA, 201 bp, Homo sapiens
ctggttttgatttgtgtttttctaatgactaatgatattgagcatgttttcgtgtgcttatcaaccattttcctgtcttttttggagaaatgcttattcarttcctttgtttctttcttgagttatttttattaaattattgggttgcaaaattatgtaatctggatacaaatccttagtcagttatatgacttgtaaatg

SEQ ID NO: 334495 - DNA, 201 bp, Homo sapiens
gcataatttcagatatttgcataaatccagaaatatttgcataaatccagaaaaaatgctgtgtatatattaacatttttctttacatatataaaacagtktaatttaaaagaaaatcatgtccattttctctgtttgtgtgtgtgtgtgtgtgtgtgtgtgtgtgtgtgtatagttttggggaatgagaacctgtttttt

SEQ ID NO: 334496 - DNA, 201 bp, Homo sapiens
ttggggaatgagaacctgttttttaatatgtcaaaatatttttctcattttattaaaccttctgaaaagtgattttttttataaccacatagtccacattrtgatgatgaccatacattatttagtgtctggaggcaattctccatggccttttgcagttttgcacttttgttctatactatcttttcaaggatgatttta

SEQ ID NO: 334497 - DNA, 201 bp, Homo sapiens
gtgctaagtgtgtttactctcagcgatgagtttgacactgatccattaaagaaaactggggtttcatacaagccatgccctcttctcatatttatccatgyacgcacacttcacgtgagttttaaactgtttgcttagagctttcattcttttaaagactgtgtatgttgatttttgttccagagtgtgttaggcctcctt

SEQ ID NO: 334498 - DNA, 201 bp, Homo sapiens
ataaccacatagtccacattgtgatgatgaccatacattatttagtgtctggaggcaattctccatggccttttgcagttttgcacttttgttctatactrtcttttcaaggatgattttatagtgaacagccttgaaagagaggaatagcttcttccttagtagcagagggcatatttatttgctgtctggggtaataaa

SEQ ID NO: 334499 - DNA, 201 bp, Homo sapiens
cttgaagtgcacgagattttatgaacctgaagttctgttcaatataaaggcccctgtggagggtccatctttccctttgtatcagctgttaccacatgtastgttaggttggtgcaaaagtaatttcagtttttgccattacttttaatggatgtaatcacattctttcacccctgtggtgagggagggattcctgctcta

SEQ ID NO: 334500 - DNA, 201 bp, Homo sapiens
tgttctatactatcttttcaaggatgattttatagtgaacagccttgaaagagaggaatagcttcttccttagtagcagagggcatatttatttgctgtcyggggtaataaagataatgtcatcctcacaaaggattacttgcatcctgtttatgtgatgggcatttcttaaactctgagtctctaaagttcctcatctag

SEQ ID NO: 334501 - DNA, 201 bp, Homo sapiens
cttgaccactactccctggatacccaggcacactcctttttcaacacctttgcacgagatgtttcctgtgcctggaacttgctttccttagatgtgcagayggtttgctcccacacttttttagatctttgctcaaatgttattttatcaagaaagccaatttatcatcacatataaaataacaatcctaactcacctcaa

SEQ ID NO: 334502 - DNA, 201 bp, Homo sapiens
gagaaaataaattaagggacagatgagcaaaccactgacttcaaaatgggtatccctctgccatgggcttccctgtcttaagctgcactgcactgactggrtagccagctttgtagagctccgtagtctgtgcgctgaagatttgattttgcgaaagaatacaatgcttagctgatagtgtgtcagcactgtgatcaaatg

SEQ ID NO: 334503 - DNA, 201 bp, Homo sapiens
catatcaggtcttcagagctgtgcttctagctcagggcaggcatttggaaggaagattttggaatcttgcctgaacatattcataatatgtttttcttagsttgggtgttttgctgggaattttggtgttatttccttcaacactgttgtcatctatgactcagaatttaactacttgtgcttttttgtgtgtggctttta

SEQ ID NO: 334504 - DNA, 201 bp, Homo sapiens
acattggcacatcggtatcactcaaagtccactgtacggttccctcttgctgttggacattctgtgggttttgacacgtttaataaatgtaaccactgtcrtagttttctgccctaaacattcttgtgccccacctatttatttccctcacaaccctaacccctggcagccgctgatttttttactgtctccgtagttttg

SEQ ID NO: 334505 - DNA, 201 bp, Homo sapiens
gttgtgatcagtgcacctacattggcacatcggtatcactcaaagtccactgtacggttccctcttgctgttggacattctgtgggttttgacacgtttartaaatgtaaccactgtcgtagttttctgccctaaacattcttgtgccccacctatttatttccctcacaaccctaacccctggcagccgctgattttttt

SEQ ID NO: 334506 - DNA, 201 bp, Homo sapiens
aagcaagcaaattctaaaaagtctggaaaacaacattcagagaagaaaacaaaaactgccattaatattcttagagaaatattataagattggcaaaactkaaagcatcagcattaccaagtattagttgggatatgggaaaaggaactttcccaacctactggtgagagcataaaccactgcagcccttttcaagagcaa

SEQ ID NO: 334507 - DNA, 201 bp, Homo sapiens
gatacactttctggaaagtcaacctttctggaaacgttgaccgcagggactctgggatcaggagtaccaggcaaagctggaagaggggatggggaattccrggccaaaaacaggggttaagtgaaagtgtaagtatggaagaatgagacccatggttactgccccagctgtcctcttaggacactggcatccaacgtgatg

SEQ ID NO: 334508 - DNA, 201 bp, Homo sapiens
tcctctgcctgctagccattatcatgaacgctgttcactggtgtgctgtaaacttgtcttcagcccagctttttctgtggactccacagaactgtggaagygctgctcctaagcagcatttggtgtacgtctgctgggtgtctgtgagattcccagcccgagcatgataattccttatcttgggggcttccgtgcataagg

SEQ ID NO: 334509 - DNA, 201 bp, Homo sapiens
gcagcatttggtgtacgtctgctgggtgtctgtgagattcccagcccgagcatgataattccttatcttgggggcttccgtgcataaggaaggtgtgttcrgatcccaaacatgtgtgagactaggcccagggtttcagcatctcaggagagatttttgttttcctcatgcagggtccaggcagagactggcttcccatca

SEQ ID NO: 334510 - DNA, 201 bp, Homo sapiens
cacttaacgcctggccatagtaggtgtctatacagtgttgactttgcttcatttattaacttctctgcacccaaagacactgatattatcaaacagcaaawgaaccttgtgttaggaaacagggtatttttgcagtcctacttttcacctatctgttgtgtgtttcttaaacatgaattggaactgaagtgactaccttta

SEQ ID NO: 334511 - DNA, 201 bp, Homo sapiens
attagccgacatgatgcggtaggaccccactgcagtggccaacagcgattcctcctggaaccacaggaagagcgagtccagacccatcgggaacactatcygttatgtttgtgggagccgtccatcctcctgctgcagttccagtaacctaaagcctgttccagatgactgttctatcatatcggggtcttggggtgctca

SEQ ID NO: 334512 - DNA, 201 bp, Homo sapiens
aacctggctgtgaattagccgacatgatgcggtaggaccccactgcagtggccaacagcgattcctcctggaaccacaggaagagcgagtccagacccatygggaacactatccgttatgtttgtgggagccgtccatcctcctgctgcagttccagtaacctaaagcctgttccagatgactgttctatcatatcggggt

SEQ ID NO: 334513 - DNA, 201 bp, Homo sapiens
gtttcctgtgcctggaacttgctttccttagatgtgcagatggtttgctcccacacttttttagatctttgctcaaatgttattttatcaagaaagccaayttatcatcacatataaaataacaatcctaactcacctcaaccaacatactttacctctttatatttttctccatagcattttttctgtaacatacataca

SEQ ID NO: 334514 - DNA, 201 bp, Homo sapiens
gttatttcaggattttcttttatcagtactatcggtactattgttgtattgctcttgttataaataattgcaaaaaataaattcaatctcaacagtaaacaaataaacataaattgatgagaaaccatacttcatctataattctcaagaattttttaaagggtattcctctgccataatagcagatacaatcctagagaa

SEQ ID NO: 334515 - DNA, 201 bp, Homo sapiens
ttatttcaggattttcttttatcagtactatcggtactattgttgtattgctcttgttataaataattgcaaaaaataaattcaatctcaacagtaaacaaataaacataaattgatgagaaaccatacttcatctataattctcaagaattttttaaagggtattcctctgccataatagcagatacaatcctagagaaa

SEQ ID NO: 334516 - DNA, 201 bp, Homo sapiens
tatttcaggattttcttttatcagtactatcggtactattgttgtattgctcttgttataaataattgcaaaaaataaattcaatctcaacagtaaacaaataaacataaattgatgagaaaccatacttcatctataattctcaagaattttttaaagggtattcctctgccataatagcagatacaatcctagagaaaa

SEQ ID NO: 334517 - DNA, 201 bp, Homo sapiens
atttcaggattttcttttatcagtactatcggtactattgttgtattgctcttgttataaataattgcaaaaaataaattcaatctcaacagtaaacaaataaacataaattgatgagaaaccatacttcatctataattctcaagaattttttaaagggtattcctctgccataatagcagatacaatcctagagaaaag

SEQ ID NO: 334518 - DNA, 201 bp, Homo sapiens
cgggaggtggaggttacagtgagccgagatcacaccactgcactccagcctgggcgacagagcaagactgtctcaaaaaaaaaaaaaaaaaagataattcwatccactctagatgggaggttgtgaaggttcattaagatgaaagcaccaagccccattatttacatatggcagatgtaacagaaatgggcacacacatac

SEQ ID NO: 334519 - DNA, 201 bp, Homo sapiens
tgtctgaagggtcacatacctctgtttctccaggattgtttcctggtgccttagttcatttggtaaagtcatgttttcctggatggtcttgatgcttgtgsatgtttgttggtacctgggcattgaagagttaggtatttattgtagtctttgcagtgtgggcttgtttgttgtcatatttattggaaccttccaggtatt

SEQ ID NO: 334520 - DNA, 201 bp, Homo sapiens
ctggaatcagggaccccaagggaccacgtgatactctatcccgctatggctgagctagtacctgaggtgcaagacaaagtgcccttaacttttccctctgtttttttcaagcacagggagtctctctccatagcctccacagctgcaaatgtgctgggctcccctgaagccagcacgcctcagtctcacccaaggcccact

SEQ ID NO: 334521 - DNA, 201 bp, Homo sapiens
cagcttctagctcctgtttgttttttaaattgggttatctgtctttttaatgttgagctgtaaatgttctttatggatttggggtactaaataattcgatwtgtgacttgcaaatattttctttcattctgtaaggtgtctttctcattgttatctttgaaatacaggtttttaatactaatgaagtacaatttatctatt

SEQ ID NO: 334522 - DNA, 201 bp, Homo sapiens
gctgggtgtggtggctcatacctgtaatctcagcactgtgggaggctgaggcaggtggataacctgaggtcaggagtttgagacctgctgtccgacatggkgaaaccccatctctactgaaaatacaaaaattagctgggcgtggtggtgtatgcctgtagtcccagctactcaggaggctgaggcaggagaattgcttga

SEQ ID NO: 334523 - DNA, 201 bp, Homo sapiens
ctggaacctggccttggcctgggtggacagagtgtacccctttgtcctctggcactggtacttgccaggggttggtgggagggagagcatgagacttgggyctctgtgcctgggctttctcctccctttggttagtaagttctatttggcacaacttgcccttggaaaaatatttccccatagttcccaaagagctatata

SEQ ID NO: 334524 - DNA, 201 bp, Homo sapiens
agcgaggctcagtaactagcccaggttaccatgttgagcatgggcagagctggagtttgagtgcagctgtgtctgcctctgaagcccttaaacattgctaygtgctattgcccatgcgtatatcatgattattactcagacgtatggttcagttcacataatactaaaatctaagttaaacaaggaggccctcctatttcc

SEQ ID NO: 334525 - DNA, 201 bp, Homo sapiens
accaccacaccctgctaatttttgtatttttagtagaggtggggttttgccacgttggccaggctggtcttgaactcgtggcctcaagtaatctacctgcytcggcctcaagtgctcggattacaggagtgaactaccatgcctgcacctccattgctttttgataataatttattttttccaaggttgatacaactagac

SEQ ID NO: 334526 - DNA, 201 bp, Homo sapiens
aagattggttcctgctgaattatgaaaaaaaaccaacctgaggttgagaggcattaattaagagccagactggagccagactggagcctcgtctcaccacrtatccatcagctgggagatgctggacaagcacttagcctctgtttgcattggtttccacaatcaagaatgagaataataagtgccttcctcagaatgatt

SEQ ID NO: 334527 - DNA, 201 bp, Homo sapiens
ctttctggtggccacattaaaagtaaaaagaaaatctcatatgttatgtaaatatatatatttatattattaattttcataatgtattttatttaaccccrtctatcccaaatgttatttcaacattatcagtataaaaagctagtaatgaagtgtttttgcattttttgtgtgtagcatgcctttaaaatttgattcata

SEQ ID NO: 334528 - DNA, 201 bp, Homo sapiens
tctcagaatgctcctggggccagctttaagccagctctcccttctcagctcccttcccaattgccttgttgccaccttacaaaaaaaaacataccctttaycacaccctccgtcttgctatcatgcatcatctcagggtgtgtgagggaatatgtagtttcatattttattttagaggtacatgtgcaaaaatgtttgaag

SEQ ID NO: 334529 - DNA, 201 bp, Homo sapiens
agctggcaagcccagtgtctttatttttaaacttgcagtcatttccatgccttgtgggaagagaaggtggtgaaaaggatcttttgttcctgggctaagcrtcagagcttagatgccaaggtattcctcaggccccctgaacttataatcaacgagaatgctaactagccctaagccctataataacaactggaaagtttg

SEQ ID NO: 334530 - DNA, 201 bp, Homo sapiens
tactcttttttggatgctgatacacatctgctgttcctgtcagtttggtaccatccactatttaatcagcttgctttctattacctcattcattatcttayccaagagcagaagtgacttcttaagccacttgcccccatctctcaggatcttgatcctaatagcagattcagtagttctctcagtttgatgtcatctagc

SEQ ID NO: 334531 - DNA, 201 bp, Homo sapiens
agaaaataagagtggtataggaaatacctaaggcagattatctgaggcttattttcttctaagtaaattccacatttgcagaggtcctaaaattatatctkttgtctttgcttttttatttttttactgtagtttatatatgtttgtgacatgtagttgtccttttatataaaacaaatatcactagacctgggcatgaaa

SEQ ID NO: 334532 - DNA, 201 bp, Homo sapiens
catttggttggatcctaagtttcttatgatttgtccatattctttgtaggtagctaagagctaaagttactaaatggaaatgacgccagggagctgtcaamatctggtaatttttactttgcactgttactctttaaaggcagttggttgaggctttttcatccaagtgtgttaaaagaaaggcagagtaaggcagaaaag

SEQ ID NO: 334533 - DNA, 201 bp, Homo sapiens
agggtacaagaaagaccaaccccacagggttcaaatggagactttttctgcaccctcactgaccccaccagcaattgcataggagaaaataagagtggtayaggaaatacctaaggcagattatctgaggcttattttcttctaagtaaattccacatttgcagaggtcctaaaattatatctgttgtctttgctttttta

SEQ ID NO: 334534 - DNA, 201 bp, Homo sapiens
tctcagggtacaagaaagaccaaccccacagggttcaaatggagactttttctgcaccctcactgaccccaccagcaattgcataggagaaaataagagtrgtataggaaatacctaaggcagattatctgaggcttattttcttctaagtaaattccacatttgcagaggtcctaaaattatatctgttgtctttgcttt

SEQ ID NO: 334535 - DNA, 201 bp, Homo sapiens
gaccaagtccccctcctgccaagatcagcttgtacggtcatttcccaaccatgtcagcgtaggcactgtcattcttcaggcattaaatgtagctgtggaartggtagacttgaggactaaggcagtgaccaggctgacctttaacctgataccaagatgaacacagactgagtttttctacatttgattgattcagggtta

SEQ ID NO: 334536 - DNA, 201 bp, Homo sapiens
atttacctcttctcttctccctcctctgcacccatcctcccagtacacagatagggcctacaataaagaggagagggagggtgggccggagcaaacccctmaccagtccacacagcctgtaaggcggcggggaagagctaattttgcgtcacatacgggactggaattctaagttaggccggatggagattttctatctga

SEQ ID NO: 334537 - DNA, 201 bp, Homo sapiens
ttttggtgtgtggcgtactgccaatccagctacccaaatcatgtcatttcatgaccacactgaatggtttaggggtaagcgtgtgaccaagtgagatgcartgatacttggcttgggctccaagaagggcagctggcgcttttcttcatggccatggatgtggcaggagatgggacagggtcaactggagccatcatgagc

SEQ ID NO: 334538 - DNA, 201 bp, Homo sapiens
attaattgatgtaatcataaccatggttaattcacttgataacagcagcatgaataggctagggcatggaggttctctcttaaaagtatagatgcaaaagaaaaaaaacaaatcaaaataacaattatggcgggaaaaatacaaggaattaaaatatcaatatataatgactgtgtatgaattacgtagtcgtgatttcaa

SEQ ID NO: 334539 - DNA, 201 bp, Homo sapiens
ctattattgataatttaggactagagttaaaaaaacaaatatttatccaaatacatatcaaaaaggcataacattcacttctgattttaaaaaatcaaaaytcttagtaaactaggattaggtcactttcacgatgcgataataaatatcagcatgaaactcaatggtaaaagataataagtgttccattaaaaatgggtg

SEQ ID NO: 334540 - DNA, 201 bp, Homo sapiens
aaagtaaaccagtgatatgaagaccattcacaaaaaatacaccatgatggataaccatacaaaagaatgtgcagcatatcagtaacaaaagaattcttgtaaaaaaaaaaaaaaaacataagctagtaggtgaagggcactgttgtcgaatgtatgcctttaacatacatagactttcacaagtcctcaggaatttcacaa

SEQ ID NO: 334541 - DNA, 201 bp, Homo sapiens
cctccagggttcaagtgattttcctgcctcagcctcccgagtagctgggattgcaggcacctgctaccaccccaggctagtttttatgcttttattttattttatttatttatttatttattttgagatggagtctcactctgtcgccaggctacggtacggtggcgcaatctcagcgcactgcaacctccgcctcctggg

SEQ ID NO: 334542 - DNA, 201 bp, Homo sapiens
ctccagggttcaagtgattttcctgcctcagcctcccgagtagctgggattgcaggcacctgctaccaccccaggctagtttttatgcttttattttattttatttatttatttatttattttgagatggagtctcactctgtcgccaggctacggtacggtggcgcaatctcagcgcactgcaacctccgcctcctgggt

SEQ ID NO: 334543 - DNA, 201 bp, Homo sapiens
tccagggttcaagtgattttcctgcctcagcctcccgagtagctgggattgcaggcacctgctaccaccccaggctagtttttatgcttttattttattttatttatttatttatttattttgagatggagtctcactctgtcgccaggctacggtacggtggcgcaatctcagcgcactgcaacctccgcctcctgggtt

SEQ ID NO: 334544 - DNA, 201 bp, Homo sapiens
ccagggttcaagtgattttcctgcctcagcctcccgagtagctgggattgcaggcacctgctaccaccccaggctagtttttatgcttttattttattttatttatttatttatttattttgagatggagtctcactctgtcgccaggctacggtacggtggcgcaatctcagcgcactgcaacctccgcctcctgggttc

SEQ ID NO: 334545 - DNA, 201 bp, Homo sapiens
gcaataaaaatattaatttaaaaaataaaaagataaaataaatcccttcttttgcagcctgcccgaccaccaacagcttagaaaacaacaatcccatgttratacagaactcgaacattccatgtggaattaaggagcatggtggcacctcccagcggagccatctctaacttgtgttgactgcagaagtttattttacta

SEQ ID NO: 334546 - DNA, 201 bp, Homo sapiens
ttgtgtggaaaatgttatcagacagttctagcgcagttttctccctcttgatgcttttaaggtttggtctccattgcttttttgtttcttggggttttggtttttttttttttttttttttttgaggcactttttctccgtcgcccaggctggaagtgcagtggtgcaatctcagctcactgcaacctctgcctcctggtg

SEQ ID NO: 334547 - DNA, 201 bp, Homo sapiens
ttctctttccaggaagaattccctctgagcaggtggcagaccctgaccccttaaagattaaaggaaacaggacccctgtgaaagccatctgtgtcatttgmtttctggtcttcggacatagcttgccttctgcttgccaagtccctcttgatccccatcttcacttccccttgctcctggccttgccgtcgcttgccattc

SEQ ID NO: 334548 - DNA, 201 bp, Homo sapiens
gctcgtacaggccataataaagtcctctttgaatggcttcacctggtggatgttcagtggagggacattatcatcattttgccagttctctgaagactgtyttatggatcttggcttcatgactccaaaatgggaagaggacagagccaacaggcagaactcagacaagtgctgggctggtaatcaagggagggctgtata

SEQ ID NO: 334549 - DNA, 201 bp, Homo sapiens
tttccctatgtgtgtttactgcatcacagagaacaataaaataaaaagaaatctatgatttcttgattgaatttcattggtggattgataagactcctcartagggctttataggtctaaacctccactttggattgccgtatttgtgatatgtactcagaacactagctctgaagctttttaatgctttacgttaaataa

SEQ ID NO: 334550 - DNA, 201 bp, Homo sapiens
agctgtatttacaacctggacctagaatcaaaacgtttgaacctgctatacagatcaccccttccagacccttcatctcacggttgcagaacttgaaaccyagagaggccgggtggcaggccttgtggacaggcagttggtgggagagctggcctggatctcattctcccatcaggtctttttatagtgtagtgagtgatt

SEQ ID NO: 334551 - DNA, 201 bp, Homo sapiens
tgcagacgtgggccagccatggagcacatccgcacgcccaaggttggtgacaccagggcgggcggaggagggacgggaggagatgggggaggaggaggagrgatgctgagcgcgcgggaggccgactgctttgaggggcaccggcggagcctggaccgcgggcgagggaggagcaggcattgcctgagcatcccggggtgc

SEQ ID NO: 334552 - DNA, 201 bp, Homo sapiens
tctcaacaccccatcttttcccagtgtcgacttctcttgtgccatttgcttggagttccctgttagattttagcatcccttaaaccctaccttcagtttgrttcctgttcatcctggctccgtttgtatattgacttttaattattctctattttttagtgaaaataatatggaaagtggagtcaagggatgtagatttcg

SEQ ID NO: 334553 - DNA, 201 bp, Homo sapiens
cgcagaggcgcgcaggtgcgtgaggcggcgcccgcccgggaccctgcagacgtgggccagccatggagcacatccgcacgcccaaggttggtgacaccagsgcgggcggaggagggacgggaggagatgggggaggaggaggagggatgctgagcgcgcgggaggccgactgctttgaggggcaccggcggagcctggacc

SEQ ID NO: 334554 - DNA, 201 bp, Homo sapiens
aggctctaggtggggtttggcagttcgatatttgcttgccagtgacaatacagtctcaaagttcataggagtgttggtcctggaagctttctcagctggcrtgaggtgtgtggaatgaccccccacccctgcggcctctgctgcaagtgctgctcattttaccacttgagttactggcagccaccatctcagtcttccggg

SEQ ID NO: 334555 - DNA, 201 bp, Homo sapiens
ttggctgttcacagcatggcagcctgtttcttcaaggccagtgggagtgcctctctccagttacagagtctggtgtattacacttttaaattgtcttttaraaacatcctttccagtatcacgttacaaagcagtattttaacctagcactttttatcatattacagtgatcgttgttgagtagtgattctgatgtaagac

SEQ ID NO: 334556 - DNA, 201 bp, Homo sapiens
gagggccccacatgttggctgttcacagcatggcagcctgtttcttcaaggccagtgggagtgcctctctccagttacagagtctggtgtattacactttkaaattgtcttttaaaaacatcctttccagtatcacgttacaaagcagtattttaacctagcactttttatcatattacagtgatcgttgttgagtagtga

SEQ ID NO: 334557 - DNA, 201 bp, Homo sapiens
tagggcaggagtctggatgtttctcaagcataaattggaactcagggaccctcttagcatctttcaaggctgcagtcaaagtggcagctgggctgcgttcycatcaggaagtttgaacagggaagaacctacttccaagcacttatggttgttggcagaattcagctgagggccccacatgttggctgttcacagcatggc

SEQ ID NO: 334558 - DNA, 201 bp, Homo sapiens
tctgtagggcaggagtctggatgtttctcaagcataaattggaactcagggaccctcttagcatctttcaaggctgcagtcaaagtggcagctgggctgcsttctcatcaggaagtttgaacagggaagaacctacttccaagcacttatggttgttggcagaattcagctgagggccccacatgttggctgttcacagca

SEQ ID NO: 334559 - DNA, 201 bp, Homo sapiens
gaagaaatgtttgggaattcatttaagtcaaggtctctgaaggagatattttcaaagctgtcgtaatttaatattaaaatcaaaagtactttaaaaatagaaaaaaaaaaaaaaaaccccaaaccttagcatcagcagaatgcgaagggtggggaagggaagagaaaagtttccagctgttagcagagggacacagaggtg

SEQ ID NO: 334560 - DNA, 201 bp, Homo sapiens
agtctcgctctgtcatccaggctggagtgcagtggcgcgatctcggctcactgcaagctccacctctcaggttcatgccattcttctgcctcaacctccckagtagctgggactacaggcacccgccaccacgcccggttaattttttgtatttttagtagagacagggtttcaccgtgttcaccaggatggtctcgacct

SEQ ID NO: 334561 - DNA, 201 bp, Homo sapiens
tttcaccgtgttcaccaggatggtctcgacctcctgacctcatgatccgcccgcctcggcctcccaaagtgctgggattacaggcgtgagccaccgcgccyggcctcaactacagttattttaagttgcctgaattcagcataatgtttgatgcaatttagctttcagtagttactttggttattaaaaaaaatgctcaca

SEQ ID NO: 334562 - DNA, 201 bp, Homo sapiens
tttgaggctgcactgacctgtgattgtgccactgcactgcagcttgggcaacagagtgagaccctgtctcgaaagaaaaagaaaaaattgggagacaaagycaatgaagtcttcaagcatgtattgaatgtcaattccaaaaaaaaattatactcttcagggcacgtattagtgctagggtgtggcgctttaagaacatat

SEQ ID NO: 334563 - DNA, 201 bp, Homo sapiens
gtgagccaccgcgcccggcctcaactacagttattttaagttgcctgaattcagcataatgtttgatgcaatttagctttcagtagttactttggttattwaaaaaaatgctcacatctctgtgtcctgatgactgttggtaagttttcccttccctttcccacccttcccattctgctgatgctgattcatgtttgtttt

SEQ ID NO: 334564 - DNA, 201 bp, Homo sapiens
tcactttttgaccgggcgcggtggctcacgcctgtgatcccagcactttgggaagccgaggcgggcagatcacaaggtcaggagatcgagaccatcttggytaacacagtgaaaacccgtctctactaaaaaaaaatgcaaaaaattagccgggcgtggtggcgggctcctgtagtcccagctactccggaggctgaggca

SEQ ID NO: 334565 - DNA, 201 bp, Homo sapiens
tgggaagccgaggcgggcagatcacaaggtcaggagatcgagaccatcttggctaacacagtgaaaacccgtctctactaaaaaaaaatgcaaaaaattasccgggcgtggtggcgggctcctgtagtcccagctactccggaggctgaggcaggagaatggcgtgaacccgggaggcggagcttgcagtgagccgagatc

SEQ ID NO: 334566 - DNA, 201 bp, Homo sapiens
ggaggctgaggcaggagaatggcgtgaacccgggaggcggagcttgcagtgagccgagatcgcgccactgcactccagcctgggcgacagagcgagactcygtctgaaaaaaaaaaaaaaaaaaaaaaaaatcatagcaacactttttaccccagaaatatatgaaactgtaattcatcaatatattattaaaaagtctgt

SEQ ID NO: 334567 - DNA, 201 bp, Homo sapiens
ggaggcggagcttgcagtgagccgagatcgcgccactgcactccagcctgggcgacagagcgagactctgtctgaaaaaaaaaaaaaaaaaaaaaaaaatmatagcaacactttttaccccagaaatatatgaaactgtaattcatcaatatattattaaaaagtctgtaagcaaaaaaaaaaaggattgtcaagccctag

SEQ ID NO: 334568 - DNA, 201 bp, Homo sapiens
gaaaaaaaaaaaaaaaaaaaaaaaaatcatagcaacactttttaccccagaaatatatgaaactgtaattcatcaatatattattaaaaagtctgtaagcaaaaaaaaaaaggattgtcaagccctaggtttttttttttttaagcttgcctcccagctaattgctaaacattctgctaaatatttggtaaaagtagagaa

SEQ ID NO: 334569 - DNA, 201 bp, Homo sapiens
tagcaacactttttaccccagaaatatatgaaactgtaattcatcaatatattattaaaaagtctgtaagcaaaaaaaaaaaggattgtcaagccctaggtttttttttttttaagcttgcctcccagctaattgctaaacattctgctaaatatttggtaaaagtagagaacgaaaagaacagaaaattatgacatggga

SEQ ID NO: 334570 - DNA, 201 bp, Homo sapiens
gcttgtgtgatgtgtcagggtcaggaatgcacactgggcgtgtcagagccacagaggtaacctgctggcttaaccagtgtgcttatgttttaggaaaactrtctcctggtgtcattctgtctttcaagcaaatcctggcagctcagattttctcagccagggtgcaaaatggcagtttgtctctttttgatgaaaggaagg

SEQ ID NO: 334571 - DNA, 201 bp, Homo sapiens
ggggtggtctttcagaaccatctgaagatattttataaaagacaccgtccactgcctttaagggcatgagaataagggtgtgtgtgtagttggtgagggargtgtactttgaattctagtagtaaaatgtagctctctcgatattctggttagtcaccaacaaagttcacatattttcagtttatttatggacacccagct

SEQ ID NO: 334572 - DNA, 201 bp, Homo sapiens
ggatcctaagtttcttatgatttgtccatattctttgtaggtagctaagagctaaagttactaaatggaaatgacgccagggagctgtcaaaatctggtartttttactttgcactgttactctttaaaggcagttggttgaggctttttcatccaagtgtgttaaaagaaaggcagagtaaggcagaaaagcagttgaac

SEQ ID NO: 334573 - DNA, 201 bp, Homo sapiens
gaagttgtgctacacagaagtagttaataaaggaaataagatatgtgctgataattactttgccaaatgctttttgattcaggacaagaagttcaattatraacttttcaaggcatttggttggatcctaagtttcttatgatttgtccatattctttgtaggtagctaagagctaaagttactaaatggaaatgacgcca

SEQ ID NO: 334574 - DNA, 201 bp, Homo sapiens
tttcaaggccagcctattattatcagcagaggtggagcttttacctcttaggcatcctgggtgttggggaggaagtggtgaagaggaaggtggaaaggtgyatggagttacttgcatctctccacttgttgagggtgtgccccactgggacacccttcatatctgccctgaaggtcagcaggcactgataggaaagaagca

SEQ ID NO: 334575 - DNA, 201 bp, Homo sapiens
tgaagggcacaaagtttccaaaagacaggaggaaaagtctggaaatctattgcacagcaaggtgaccatactcaatagtaatgtatatttcaaaataattmtgagagtaaatttcaagggtctcactgtaaaaaaaaaaaaaaaaaaaaaaactataggtaagtgatggccatgctcattagcttgatttaatcattccgt

SEQ ID NO: 334576 - DNA, 201 bp, Homo sapiens
tctggagggcagctgtctgtttcataagggaacatggtgcttgcacgtaacttttccagctacgtgcagtgcagtaggctaggatatctttctggatgccygtacgtggtcttgaccaatgtttgactatctgtttttaccgagtaaattataaaccattgcggaggctgagctgatgatgaagtgttgcaatcagaccca

SEQ ID NO: 334577 - DNA, 201 bp, Homo sapiens
atcatgacatccctgaattgtagatttccctttgctgtatttcgtgcacagtggtacatttttagcagaaggtggcaggcacttcttagtggaggggaaasttaaagattaaaatgctgctattgaagactgagcatagaccctcctgtaacaccagagatgcacttcagtatgatttcctttaaagttaatctcctcttt

SEQ ID NO: 334578 - DNA, 201 bp, Homo sapiens
ggcatgattatttgagcagcttcaacttttggagattatcatgcagagtttggctgttcctgctacaaactatgttttttatgtgttgaaaaattggactmcttggtactgttattggaaaggcagtctgactttagtctgaagactgttcatcatttatcaggacccttaagttatttaaattttttatttagtcatttc

SEQ ID NO: 334579 - DNA, 201 bp, Homo sapiens
ttattctttcagcaacccaatcatgacatccctgaattgtagatttccctttgctgtatttcgtgcacagtggtacatttttagcagaaggtggcaggcasttcttagtggaggggaaacttaaagattaaaatgctgctattgaagactgagcatagaccctcctgtaacaccagagatgcacttcagtatgatttcctt

SEQ ID NO: 334580 - DNA, 201 bp, Homo sapiens
gcagaatgacaggattaggccaatactttctatgggtcttccagctgtgacagtttgatgcccctctgtagcagaaatcccttcctacatctgaaaacatctcagccccagagccatttccatcttctgtacataattggcagtcagtctctcaggtcacagtgacaatacctgacattgtctcaggtcacagtgatcata

SEQ ID NO: 334581 - DNA, 201 bp, Homo sapiens
cttccaaagtactgggattacaggcatgagccaccgtgtgtggccttattattctttcagcaacccaatcatgacatccctgaattgtagatttccctttkctgtatttcgtgcacagtggtacatttttagcagaaggtggcaggcacttcttagtggaggggaaacttaaagattaaaatgctgctattgaagactgag

SEQ ID NO: 334582 - DNA, 201 bp, Homo sapiens
tcggaggagctgaccctcatttctaaacagcagccaccacaatacacatgcatgtaacctcccgccacctccacacacactttgacatatatggcgaacaygacaagacacgtacccacagacttatatactcgtgtggacaggaaattaaagagatggattatgtaatagagaagagttattcatgtggccaaccagcca

SEQ ID NO: 334583 - DNA, 201 bp, Homo sapiens
taatgaaaccattagatatttgaacatcactaaataataataattattattattaatattatttttgagatggagtcttactctgttgcccaggctggagkgcagtgatgcgatctcagctcactgcagcctctgcctcctgggttcaagtgattctcctgcctcagcctcctgagtagctgggactacagtcacgcgcca

SEQ ID NO: 334584 - DNA, 201 bp, Homo sapiens
acagtggctttttaaacacttaagaacgtttctcttatttgtaagcatcactgtgatgtggttttgtcgcttggtggttagcagtcagggactctacaatkgtactgaacatctaaggtcaaagtgcacagggatgtttttgtttcttcctcataatgttagtttgatccccattcaaggccatttaggaataaggcaatc

SEQ ID NO: 334585 - DNA, 201 bp, Homo sapiens
gaagatacaagtgcttcctgtcacagctgtcaaggagagattcaataatgtcagtaggccagattcagcattgtcatcctccagtgctccatttgcaatastctctatttgcagggtcctgtaatgcagccatttggtcattttattacgttgcctctacttttctgataattttaaaaagaaagaaaatctagaggagct

SEQ ID NO: 334586 - DNA, 201 bp, Homo sapiens
aaattcatgctgttgaatataagctcagcaggagtccctgaagctatgtagttcagtacaaggttgcagtgattcaaataagcgtattatgtttccgtacmtcattctgaatgctttgattgggtatccatgaaatgttttggttgtttcatcattgtttcatcaatgtaattgatgactgttctgttttgctgaccactg

SEQ ID NO: 334587 - DNA, 201 bp, Homo sapiens
ctacccatgtcatattcgtggaaaattcacctgacgcaagaaaagaaacatgggtatgctttctttatttttagctttccttgttttgcgttgtttgaagyaaaaagtgtttgccctccattcatttttcctcagggtgagatgggtgggcttttgtgcctggatgttggggaactgtttctggaatgtgtgtttggactt

SEQ ID NO: 334588 - DNA, 201 bp, Homo sapiens
ttttacaatggtgcaaaagcaatagacattcagaaagtgtacttctcttgtgatgctgggcagcagcagcggcagcagctcccagtttgccatgcactttwcacttacggcattttcaacttccaatgggctcatcatgatataaccccatcgtaagcctcagagcatctgtctgtctgctgtgtgatctgtgccctcctt

SEQ ID NO: 334589 - DNA, 201 bp, Homo sapiens
tggtgaataggcttcacttgaattagtcaagatacagcataaacgtaaggttcatgtcacgtaaggatactttcaaatctcctattaattttatttatgaygcttgttataaaggataaaccaacatctttgaaaaataattatacaaagcagtgatattttattagttttggaagaacaatgtctataggtaattttaca

SEQ ID NO: 334590 - DNA, 201 bp, Homo sapiens
gagtgcctgttccatgccggtttgaaggatacggatgtggccatcaatgagacactcagggcccctcgtggagcctgcgttctccgtccctcctctctgtsagcgctgaggttttccgtgcccatccctctctgctcgctccttattcctgtgcatcttctctgttgtggacactaaatcagtctccagtttttcagttag

SEQ ID NO: 334591 - DNA, 201 bp, Homo sapiens
cagtaggttcttggaaactgcgactttgagtgaaacgatgtacaggatattctcaaataacatcattttgctcgacatcattttgtgatagctatgagggaaaaaaaaggtgttttatgttcttttgcttaaagttgcaattgcctacaacctgagggcattgttgagcaaggacttactgtagtagtatgtggtattgtt

SEQ ID NO: 334592 - DNA, 201 bp, Homo sapiens
tgtgatattcgctggtattcttctttgttgatcccacagtgccacttctgagaatttattctgtggatttaatagcatacacacacactgatacccaaggttattattttattttattttattgagacagggcctcactctgttgcccaagctagagtacagtggggcgatctcagctcactgtaacctctgcctcctggg

SEQ ID NO: 334593 - DNA, 201 bp, Homo sapiens
gtgatattcgctggtattcttctttgttgatcccacagtgccacttctgagaatttattctgtggatttaatagcatacacacacactgatacccaaggttattattttattttattttattgagacagggcctcactctgttgcccaagctagagtacagtggggcgatctcagctcactgtaacctctgcctcctgggt

SEQ ID NO: 334594 - DNA, 201 bp, Homo sapiens
tgatattcgctggtattcttctttgttgatcccacagtgccacttctgagaatttattctgtggatttaatagcatacacacacactgatacccaaggttattattttattttattttattgagacagggcctcactctgttgcccaagctagagtacagtggggcgatctcagctcactgtaacctctgcctcctgggtt

SEQ ID NO: 334595 - DNA, 201 bp, Homo sapiens
caaacctagcagcaacctgggctcttgtcaccgtgaaagtttcccgtttagaattagaattggtttttggtatttgtgatgtttctagatgggctagtttaaaaaaaaaaaaaggttggaaagcattaaaaaataatttctattttattaatgtcaccattaatcgtatcctatgcatttgagaacggttatttattttgt

SEQ ID NO: 334596 - DNA, 201 bp, Homo sapiens
cttgttgacattttttgggagacaccagcctgggcaacgtagtgagacccccatctctacaaaaaacagaaaaaaatgagctggatgtggtggcatgggcytgtagtcccagctatttgggaggctgaggtgggaggattgcttaagcccaggagtttgaggctgcactgacctgtgattgtgccactgcactgcagcttg

SEQ ID NO: 334597 - DNA, 201 bp, Homo sapiens
ctgactttagtctgaagactgttcatcatttatcaggacccttaagttatttaaattttttatttagtcatttcataagatgacctggagaacataaatattcttctttgcagaaaattgctcctaccagtgctgatagcatacacatttggcttttgtttttaaatgggtaatctttggtttctcgtcaggaaccatttc

SEQ ID NO: 334598 - DNA, 201 bp, Homo sapiens
tgactttagtctgaagactgttcatcatttatcaggacccttaagttatttaaattttttatttagtcatttcataagatgacctggagaacataaatattcttctttgcagaaaattgctcctaccagtgctgatagcatacacatttggcttttgtttttaaatgggtaatctttggtttctcgtcaggaaccatttct

SEQ ID NO: 334599 - DNA, 201 bp, Homo sapiens
gactttagtctgaagactgttcatcatttatcaggacccttaagttatttaaattttttatttagtcatttcataagatgacctggagaacataaatattcttctttgcagaaaattgctcctaccagtgctgatagcatacacatttggcttttgtttttaaatgggtaatctttggtttctcgtcaggaaccatttctc

SEQ ID NO: 334600 - DNA, 201 bp, Homo sapiens
tataatatgaaaaaactcaaaggtcagcaacatcaaaagactcatgcagaataaacagaaaccccatctctttcttcctactcactcccgacacagacttsatggcttttctccctgtatagatttcgtttctcaaggttttttttcttaattatttcaatctaattatcttctcagaatttatagcagaatattctatca

SEQ ID NO: 334601 - DNA, 201 bp, Homo sapiens
aaaacccagagagggtattcttaataggatctacacatcttttgtggtacctttaaactcatattttcgtaactggtgaatgttcatcttttaatatacasaatcctactctgagatccgattaacttaaggggaagtttttggtttttattattgggggaattctcaaaaaattgtattttggagtaagtgtgagtttac

SEQ ID NO: 334602 - DNA, 201 bp, Homo sapiens
ttttctcccgtatgtatgtttatacttgctactagtttgtatggaagcaaagagccttaaggccatttctacaagctagaaacacataggaaaatgtgctkttttctttttcatagaatgtaattgatacatagtgtaaactcagaacattaacacatacactttctgctttaaattagaaatgtaatataattataatga

SEQ ID NO: 334603 - DNA, 201 bp, Homo sapiens
gaatgtaaggatcttgagatggtatgttttccacatttctctgatacttttttctcccgtatgtatgtttatacttgctactagtttgtatggaagcaaasagccttaaggccatttctacaagctagaaacacataggaaaatgtgcttttttctttttcatagaatgtaattgatacatagtgtaaactcagaacatta

SEQ ID NO: 334604 - DNA, 201 bp, Homo sapiens
cacatacgggactggaattctaagttaggccggatggagattttctatctgaatgtaagtaaacctgatgctattaaatctgcccaagaggtccttagcgkgtagaaaggaggattttgactagcacagttgtagagaatagttgcaaggaataaaatcaactcacatgtttgtgtctgcaccacaagtgaagtttcttcc

SEQ ID NO: 334605 - DNA, 201 bp, Homo sapiens
gctgggactacaggcacccaccaacacacccggctaatttctgtatttttagtagatacagggtttcaccatgttggccaggatggtctcgatctctttayctcgtgatccacctgcctcggcctcccaaagtgctgggattacaggcgtgagccaccgctcccggccaatttttgtatttttagtagagacgtgggattt

SEQ ID NO: 334606 - DNA, 201 bp, Homo sapiens
ttacctcttctcttctccctcctctgcacccatcctcccagtacacagatagggcctacaataaagaggagagggagggtgggccggagcaaacccctcascagtccacacagcctgtaaggcggcggggaagagctaattttgcgtcacatacgggactggaattctaagttaggccggatggagattttctatctgaat

SEQ ID NO: 334607 - DNA, 201 bp, Homo sapiens
ctcagtggcacgatctcggatcactgcaacctccatctcccgggttcaagtgattctcctgcctcagcctcccgagtagctgggtttacaggtgcccgccwccacgcccggctaatttttttgtatttttagtagagacggggtttcaccaggctggtctcgaactcctgacctcaggtgatccgcccttctcggcctccc

SEQ ID NO: 334608 - DNA, 201 bp, Homo sapiens
aaaaaaaattatactcttcagggcacgtattagtgctagggtgtggcgctttaagaacatatgaaggtgttgtcgcagtcttcgctgaattttcaaatgarggctaactcactgcagccttgttcatgactttgtcattaatttgttctgggactttgctgagcttgtaaaaatggcaggcactttttttttttttttttt

SEQ ID NO: 334609 - DNA, 201 bp, Homo sapiens
cttggctcactgcaacctctgcctccagggttcaagtgattttcctgcctcagcctcccgagtagctgggattgcaggcacctgctaccaccccaggctartttttatgcttttattttattttatttatttatttatttattttgagatggagtctcactctgtcgccaggctacggtacggtggcgcaatctcagcgca

SEQ ID NO: 334610 - DNA, 201 bp, Homo sapiens
tgttgatttttgttccagagtgtgttaggcctccttggtagccaggagactgagtttgctctagaaggtgtggaccctggcaagcaggcacttctcaggtytgctcacaggtttcattaaaaagaaaaaggattaggagctgacctgaatcgttcctggcctttgagcaaggctagccccacatgagaacttccagagctg

SEQ ID NO: 334611 - DNA, 201 bp, Homo sapiens
tcttggtgttttgaggaatgttcacgaggtctgctactcccctggctctcccttggagtagatgggaagtctgagactcccaaactagatcaggaccacasctcctattatttattcatttttgagaaggagttttgctcttgttgcccagactggggtgcagtggtgcgatctcggctcactgcaacctctgccttccag

SEQ ID NO: 334612 - DNA, 201 bp, Homo sapiens
tgacactgatccattaaagaaaactggggtttcatacaagccatgccctcttctcatatttatccatgcacgcacacttcacgtgagttttaaactgtttrcttagagctttcattcttttaaagactgtgtatgttgatttttgttccagagtgtgttaggcctccttggtagccaggagactgagtttgctctagaagg

SEQ ID NO: 334613 - DNA, 201 bp, Homo sapiens
atagactttcacaagtcctcaggaatttcacaatgctccagagtaaattgtataactacagatatttataatacctaattctttattgacctcagtagatstctgaaaactgggaggaagtgagatgggaccctctagagctactcctagagggctggcttggctctaagggcttagaggagactgaggcaatgggaggtc

SEQ ID NO: 334614 - DNA, 201 bp, Homo sapiens
tatccttgttaattttctgtctcgttgatctaatattgacagtggggtgttaaagtctcccactattattgtgtgggagtctaagtctctttgaggtctcyaagaacttgctttatgaatctgggtgctcctgtattgggtgcatatatatttaggatagttagctcttcttcctacattgatccctttaccattatgtaa

SEQ ID NO: 334615 - DNA, 201 bp, Homo sapiens
cattctataaaaagctcagttactgatttgctgggtcatggtcaaaattcttacctatttatttcatatcaactttaaaaaataaattacttgcattctayatattactaattgggaagtaatatgcctcaaatcagttttatactggattattccctatgctttaaaccactgctctcaataaaacacttcctgattaat

SEQ ID NO: 334616 - DNA, 201 bp, Homo sapiens
aatttccgtcccactgcgaagccccaggtacaaagcctttgcgtcatcactacgcgccaaccccttgacaaacccccagccccagttacccagcccccaayccgccgccaggctccttcctccgccagccgcactccagctggcgccatcgcgcaccctctcaggttcatcgtccccgccccctttctacttccctaaccc

SEQ ID NO: 334617 - DNA, 201 bp, Homo sapiens; identical to SEQ ID NO: 70412

SEQ ID NO: 334618 - DNA, 201 bp, Homo sapiens; identical to SEQ ID NO: 70413

SEQ ID NO: 334619 - DNA, 201 bp, Homo sapiens
tgattcttctctcttttcttcttttttagtctggctagtggtctattttgttaatcttttcaaaacagctgctggattcattgatttttttttttttttttgaagggtttttcgtgtctctgtctctttaagttctgctctgatcttggttatttcttgtcttctgctagcttttgaatttgtttgctcttgcttctctaa

SEQ ID NO: 334620 - DNA, 201 bp, Homo sapiens
ttttgcacattgattttgtatcctgagaccttgctgaagttgcttatcagcttaaggagcttttgggctgagacagtggggtttcctaaatatacaatcgkgtcatctgcaaacagagaaaaattgacttcctcttttcctatttgaatacctttatttctttttcttgcctcattgcactggccagaacttccagtactg

SEQ ID NO: 334621 - DNA, 201 bp, Homo sapiens
tttttgcacattgattttgtatcctgagaccttgctgaagttgcttatcagcttaaggagcttttgggctgagacagtggggtttcctaaatatacaatcrggtcatctgcaaacagagaaaaattgacttcctcttttcctatttgaatacctttatttctttttcttgcctcattgcactggccagaacttccagtact

SEQ ID NO: 334622 - DNA, 201 bp, Homo sapiens
tggctgtttgtctattattggtgtataggaatgcttgtgatttttgcacattgattttgtatcctgagaccttgctgaagttgcttatcagcttaaggagsttttgggctgagacagtggggtttcctaaatatacaatcgggtcatctgcaaacagagaaaaattgacttcctcttttcctatttgaatacctttatttc

SEQ ID NO: 334623 - DNA, 201 bp, Homo sapiens
tctgttctgttccattggtctgtatgtctgttttggtaccagtaccgtgctgttttggttactgtagtcttgtagtatagtttgaagtcaggtagcatgaygcctgccgccagctttgttcttttcgctgaggattgtcttggatatatgggctctttcttggttccatataaaatttaaagtattttttctaattctgtg

SEQ ID NO: 334624 - DNA, 201 bp, Homo sapiens
ttcatgctccactataggtaaattgtatttcaagtttgagtctcaaggtgattgcatcagtgttctttaaatagacatgttgttaacggtgcctgttcatmagccttaagcataattctgtcattatagttactgtgctatgtaacatagaatgctttgtattatataataagcataatataaacatataactagtagaaa

SEQ ID NO: 334625 - DNA, 201 bp, Homo sapiens
tttactgtaaattggtttgctgcagccttttacattgcaaatgtctatggtctctaatggttttcaaaaattagaactgcttctttatattttatgcattytgcaagtatatttacttaacagtttcacactattttaaataaagatgacaacattgttaagtccctaacccccttttttttttttttttttgccgggggt

SEQ ID NO: 334626 - DNA, 201 bp, Homo sapiens
gaacaaataactaagtattttattgttttaagttcttttataaaaacacttgaagttttattgagatgtttcgcatttacaaattatactcgaataattcyggagacacttaagtaggtcatatgcttccagttttcaaagaatggcacaatcctggaaaatgccactcacctattcttgttagtccacccttttaaataa

SEQ ID NO: 334627 - DNA, 201 bp, Homo sapiens
tctgtctgtatggtatctgatgtaaagatggaaaaggtgtgatattttttctcatcagtcataaggggcacagctgaccctcctgtaacaaaagacaggtkaacaagcgaaaagcataacagatttatttaatcaaagttttacactgcatgggagccttcagaaatgaagccccagagaccgaaggaaaactgtctgtat

SEQ ID NO: 334628 - DNA, 201 bp, Homo sapiens
ttttgatcacagctataagactttgtccccctatctcatgggattctgagtaagcttaaattccatgctcttgtttctatagaattcattctcagctcatraggactcacacacaaacttggtaacacaagagatattgtaatgaagggatgtgtatgtctgtgtttcaacccgtcgcatgttatatatttttatgaaaag

SEQ ID NO: 334629 - DNA, 201 bp, Homo sapiens
gatattacataaatttatagtcatcttgtctttgctcttgagttttttatgtttcaatttgttgaatttggtgcacagtttgcgtgatttttttttattcraacctttatgacgttctcgtttctgtatttgagcttccctgttgacttgtttgtgaatacttactgtttgccatagtctgcttctggtgatgaagaataa

SEQ ID NO: 334630 - DNA, 201 bp, Homo sapiens
ctactttctttctttgtggatctacttttttagctttcacatatgcaatgtttgtctttttgtgtttggtttatgtcacttaacgtaatgacttccagttmcactcatgttgctgtaaatgacaggatttcatccttttttatggtgggataatattctgttgtgtattatgccacattttctttatccattcatttgttg

SEQ ID NO: 334631 - DNA, 201 bp, Homo sapiens
tggcactgtctcggctcaccacaacctccgcctcccggattcaagcaattttcctgcctcagccttccaagtagctgggattacaggcactcaccaccacrcccggctaattttgtatctttagtagagacagggtttctccatgttggtcaggctggtctcaaactcctgacctcagatgatcggcctgccttggcctca

SEQ ID NO: 334632 - DNA, 201 bp, Homo sapiens
actgccattaggtaatctgtaactgactgtcggggctgcatccccttttcaaagcggttatacattccactccaaaacctggaaaggatggcaaagcgtcrtgataccaccttatcacagtctgaaaattcacatcctcaagtcttctaaggtatctatgataccacagtcttaataataaccaaatgcaaatttcagcct

SEQ ID NO: 334633 - DNA, 201 bp, Homo sapiens
tggcctcactgtgtaggtttttagcttgatgtaatcccatttatctgtttctgctttagatgcctgtgcttttgaggtcttacacaaaattgtttgcctasaacaatgtactgaagcatttcctcaatgttttcttctagtagttccatagtttcaggtcttagatttaagtcattaatccattcttatttgatttttgtg

SEQ ID NO: 334634 - DNA, 201 bp, Homo sapiens
atgtctctagtgaccagtgatgatgagctttttttcatgttggttggctgcataaatgtcttcttatgaaactgttcatatccttagcccactttttgatrgggttgtatttttcttgtaaatttaagttccttgtagattctggatattagccctttgtcagatggatagattccagaaattttccccattctgtaggtg

SEQ ID NO: 334635 - DNA, 201 bp, Homo sapiens
ctggtatgtcagaggaacagtcctggtcagaagggggctcttctgagcagaaattgctaataaactttgtgctgatctggaaaaaaaaaaattttttttttgacagcatagtatcaaattactttagcatactcatgagtgaaaaacattagcacattactgaactggagttttgagtgctgtgagaggaacctgaaaagc

SEQ ID NO: 334636 - DNA, 201 bp, Homo sapiens
tatttcctgtctggtatgtcagaggaacagtcctggtcagaagggggctcttctgagcagaaattgctaataaactttgtgctgatctggaaaaaaaaaawttttttttttgacagcatagtatcaaattactttagcatactcatgagtgaaaaacattagcacattactgaactggagttttgagtgctgtgagaggaa

SEQ ID NO: 334637 - DNA, 201 bp, Homo sapiens
ctcagtcttctacaaaaaaaataggtgaattttatgtaaattttttcatctgagtctcaacaatatgcacggcaaatgagataactgtcatagatgacackcacagaaaagtgtttaaccaaagtgtttaagtcagctgtgaaaatggaaactagaaattatgcctcctgggctcaagtaatatgttctctcttctcagta

SEQ ID NO: 334638 - DNA, 201 bp, Homo sapiens
ctatttcctgtctggtatgtcagaggaacagtcctggtcagaagggggctcttctgagcagaaattgctaataaactttgtgctgatctggaaaaaaaaawattttttttttgacagcatagtatcaaattactttagcatactcatgagtgaaaaacattagcacattactgaactggagttttgagtgctgtgagagga

SEQ ID NO: 334639 - DNA, 201 bp, Homo sapiens
tctgcggattccgttgttctgattgcctaaatgtttagccttaaaacttcttgtagagtcagctcttgtatagttctcccccacagctgctaagcttaacsttttgatcacagctataagactttgtccccctatctcatgggattctgagtaagcttaaattccatgctcttgtttctatagaattcattctcagctcat

SEQ ID NO: 334640 - DNA, 201 bp, Homo sapiens
ctgattttctttttcagagctgtagtgcaagtgcccttcaggcaagattgaaagtagctgcacatgaagctgaggaagaatctgataatattgcagaagayttcttggagggaaagatggaaatagatgattttctcagtagcttcatggaaaagagaacagtatgtaatactcgtcagttgaggacaagtattggataaa

SEQ ID NO: 334641 - DNA, 201 bp, Homo sapiens
aatctttgtatcataccaataacaacctcatagttaatattctgtttcctgtaaaattaggaactttgggtaaagtcaatgaaataaaacataaaatagayataaaccaacaacagcaaaaaagatggtaaaggagaatataaatttataatgaatttcagataatacggtcatttgtcagaataaagaaataatagctaa

SEQ ID NO: 334642 - DNA, 201 bp, Homo sapiens
atagtggatctcttaagttccttttaataatgaaccatttctccccaacttttctcttttatacacacacacacacacacacacacacacacacacacacagacatatacatatgtgtatttacatatgttcgtatacatgtacacaaatatgggaataaatacatgtccatgtacatacatccatgcgtgtatattagac

SEQ ID NO: 334643 - DNA, 201 bp, Homo sapiens
gatagtggatctcttaagttccttttaataatgaaccatttctccccaacttttctcttttatacacacacacacacacacacacacacacacacacacacagacatatacatatgtgtatttacatatgttcgtatacatgtacacaaatatgggaataaatacatgtccatgtacatacatccatgcgtgtatattaga

SEQ ID NO: 334644 - DNA, 201 bp, Homo sapiens
aaagaatttccagtgtgttttttcctatgaacagtacaaaaacttgttacatgaggaatatcaatatcttgttacatgctgtccatctccctcatgtttcrttttatgtctcttctccaaatgtaagctcaataggtgaatatctttttttggccatgaaagtatcttttcttctgctctactgagtaacctttctctacc

SEQ ID NO: 334645 - DNA, 201 bp, Homo sapiens
tttatggctatatattttcttcataaaaattggtcacatcggagaagcagtgccacaggaaaaatgaaatgcatgtgaaagtttgtattctgattttacamgatgagatagaaatcagaattaaagaggaatacttaggagttactaggctaatcagtgtacgaatttgtcataggtagagatttaaaggttaatatctta

SEQ ID NO: 334646 - DNA, 201 bp, Homo sapiens
acacgcacagaaaagtgtttaaccaaagtgtttaagtcagctgtgaaaatggaaactagaaattatgcctcctgggctcaagtaatatgttctctcttctmagtatcacttaccacagtattcagtttatcaccaaaactcctgactttatggacaggagtagaactaattctgtttcttatacttcctgaggaagctgac

SEQ ID NO: 334647 - DNA, 201 bp, Homo sapiens
tatcttcaacattcaaaacataaaataatgccaacaagttaaaagcttcctgtcatactgttggaagtaaagtagtaggcatatctttgtaaaagtgactsgtattttcaaaaatttattttctagatttgccactgtagaagagccaaggaagagaaacttcagcaggcgatagcaatgcacagccaatttcatgctcca

SEQ ID NO: 334648 - DNA, 201 bp, Homo sapiens
atccattctatcattgatgagcatttgggttggttccaagtctttgctattgtgaatagtgctgcaataaacatacgtgtgcatgcgcctttataggagartggtttataatactttgggtatatacccagtagtgggatctgggtcaaatggtatttctagttctagatccttgaggaatcaccacactggtcttccata

SEQ ID NO: 334649 - DNA, 201 bp, Homo sapiens
catagctgctgactgtaatctctcaatctctctcatagtctatttccagtatcccttgctgcccaggcttcgccactgatctttccctttgcccacctgaytgccgcgtcagcagaattgttaaaatacaattgtgaagagtaatctccaggtttcacaaagaatggaaaatagaactgttgcaacatcaaaggaaaggga

SEQ ID NO: 334650 - DNA, 201 bp, Homo sapiens
tgtaatcccatttatctgtttctgctttagatgcctgtgcttttgaggtcttacacaaaattgtttgcctagaacaatgtactgaagcatttcctcaatgytttcttctagtagttccatagtttcaggtcttagatttaagtcattaatccattcttatttgatttttgtgtatggtaagagatagggtctagtttcatt

SEQ ID NO: 334651 - DNA, 201 bp, Homo sapiens
gtttcaggtcttagatttaagtcattaatccattcttatttgatttttgtgtatggtaagagatagggtctagtttcattcttcagcatatagttacccarttttcccagcaccgtttattgaaaacatcatcctttctccgttgtatgttcttggtgcttttgttaagatgagttggctgtaaattatatttgggttcct

SEQ ID NO: 334652 - DNA, 201 bp, Homo sapiens
tgagtgcagtgttctgtaaatgtcaattaggcctattaggtccaaagtgaagtttaactttggtgtttctttattgattttctgtctggatgatctttgcmttactgatagtagagtgaaagtcccctatagttaacgtattgcaatctgtctttctctttaggttcattaatgtttgctgtatgtactttggagctctgg

SEQ ID NO: 334653 - DNA, 201 bp, Homo sapiens
gccatggagagcctctaatgtatttcagttcagcaaacatatttctcagttccaacatttctgtttaattgtttattattacttaaatctctttgttaaayttctctgataaatttctgaattttttgttttatcttggagatcactgagtttccttaaatctactatttaaattcttgttcagagagcttacatattatt

SEQ ID NO: 334654 - DNA, 201 bp, Homo sapiens
atttaaattcttgttcagagagcttacatattattatctcattagggtcagtcatttgttctttgtttcatccgcttagggaagtcaggctccctgtttgytcttgtttcctgcggatgtgcgtctatgtctttactttgacgaattagttatttattctggtcttctctctctggcttgttttggttttattgaatgtat

SEQ ID NO: 334655 - DNA, 201 bp, Homo sapiens
attgctacccagaataaaatcaggcttctctacttagaaaaaaggggatatttgtttttggaaagcagccagcatcctctgtcataagattgtaggatgcrtctcatctagacttttaagttcaagctgttaagacccagacttccccagctgccgatattgcttaatagtggcagttaaaacccagatggattgctcatc

SEQ ID NO: 334656 - DNA, 201 bp, Homo sapiens
tgctacccagaataaaatcaggcttctctacttagaaaaaaggggatatttgtttttggaaagcagccagcatcctctgtcataagattgtaggatgcgtytcatctagacttttaagttcaagctgttaagacccagacttccccagctgccgatattgcttaatagtggcagttaaaacccagatggattgctcatctg

SEQ ID NO: 334657 - DNA, 201 bp, Homo sapiens
tgaatttgctcataatttgataattttagctattagattattagctatcttcaacattcaaaacataaaataatgccaacaagttaaaagcttcctgtcayactgttggaagtaaagtagtaggcatatctttgtaaaagtgactggtattttcaaaaatttattttctagatttgccactgtagaagagccaaggaagag

SEQ ID NO: 334658 - DNA, 201 bp, Homo sapiens
agctgattagaaaacttaattttttctaggggtcatatattcacctggctcaaaattcaaaaagtataaaggagtatagagtgaaaatctccgtgtcactyttttcccttgcagcttaattttttttcctcattagcatctaaagttatttgtttgggtttgtgtatatataattcctgagctgttttattcatctacaag

SEQ ID NO: 334659 - DNA, 201 bp, Homo sapiens
tagtagcattacattaatatttaaaacataactgtaagtcccttatcctttacactagagtgcctgatccatataaactcactgtattattcatatattgkatttagatgattctcagtctgcatctaggtctgaattactctaatgctttttagagtaatataatgatctggttctctctaaaatttgctaaggggaaaa

SEQ ID NO: 334660 - DNA, 201 bp, Homo sapiens
aataaccccataaggtaggagttctcatttaataagattatcttttttgctttaaattttttttaaataattgttatgaaaacatcaaaaatgcaaaaaargtgaagaaactagtataatgagccaccacgtatccatcatgtggcaacaacagctataaacccttttgctcaccatgcttcatgcctcttctatccagct

SEQ ID NO: 334661 - DNA, 201 bp, Homo sapiens
aatatcatacagctcaagtgctcagttaattttctcattagaaatattagtccgttactgctttaaaaaaaagttatgataaggcagtcatttctccattrctagttaaatcagctacatctgcccctccccccaacctgaactccttccaaaccatttctgctgtttgctcacctaagccgaaaacctgtgccgtcttcc

SEQ ID NO: 334662 - DNA, 201 bp, Homo sapiens
ctaatttcagagtttataatcatttagaagatacagacctaagtggacttggtttttccaaaacctttcatttattgtgttaatgagtgttgtgaacaaaytacagttagtagtgtgaacaaaattacaagaggacttttcaagggtcctcaaggataaaaagtcatatatattcaaacagtggctactcggttgctcatc

SEQ ID NO: 334663 - DNA, 201 bp, Homo sapiens
gttaattttgtatcctgcaactttactgaattggtttatcatttctaacaggttttttgtttgtctgtttttttggtggggtctttaggtttttccagtcrtaacattgtgtcatccgcgaacaaggctaatttaacttctcttttccattttagatgctgtttatttctatctcttgcctaattgctctggccaagactt

SEQ ID NO: 334664 - DNA, 201 bp, Homo sapiens
acagttagtagtgtgaacaaaattacaagaggacttttcaagggtcctcaaggataaaaagtcatatatattcaaacagtggctactcggttgctcatctrccctaccgtctcatgtgactgaggcatgtaactattcagactgttgataaattattgcttttctatatttaatgcctttcacttgagagaaacatattca

SEQ ID NO: 334665 - DNA, 201 bp, Homo sapiens
aaagttttctcccgttttttgggttgtctctttactttgttgattgttccttcgctgtgtaggttttatttatttatttatttatttatttatttatttattggaaatggagtttcacttttgttgctcaggctggagtgcaatggcactgtctcggctcaccacaacctccgcctcccggattcaagcaattttcctgcc

SEQ ID NO: 334666 - DNA, 201 bp, Homo sapiens
atatatattcaaacagtggctactcggttgctcatctaccctaccgtctcatgtgactgaggcatgtaactattcagactgttgataaattattgcttttstatatttaatgcctttcacttgagagaaacatattcatatataccaatgaaatctacagccatgtacttagacaagaaagagaactaccagttctctacc

SEQ ID NO: 334667 - DNA, 201 bp, Homo sapiens
aaaagttttctcccgttttttgggttgtctctttactttgttgattgttccttcgctgtgtaggttttatttatttatttatttatttatttatttatttattggaaatggagtttcacttttgttgctcaggctggagtgcaatggcactgtctcggctcaccacaacctccgcctcccggattcaagcaattttcctgc

SEQ ID NO: 334668 - DNA, 201 bp, Homo sapiens
aatatctgtacacacatatacataaacacacataaacatatctataactcttactgtgacagccacacatctgtaagctaaatagtcacagaggttaaaayggagttgttgtgactgcttatgtgccgtgtcttactggtcctacagtaactgacattatacactagcagagactgtttatcttgtagagtcttgggagat

SEQ ID NO: 334669 - DNA, 201 bp, Homo sapiens
caaaagttttctcccgttttttgggttgtctctttactttgttgattgttccttcgctgtgtaggttttatttatttatttatttatttatttatttatttattggaaatggagtttcacttttgttgctcaggctggagtgcaatggcactgtctcggctcaccacaacctccgcctcccggattcaagcaattttcctg

SEQ ID NO: 334670 - DNA, 201 bp, Homo sapiens; identical to SEQ ID NO: 70416

SEQ ID NO: 334671 - DNA, 201 bp, Homo sapiens
gtattcagaaacctttccttatactgcactggccaccagagcttaattttcccagcagttacagcaatgggagatagaacagtctcaatcttttgccaacmatcaggttcctagaaaccaggtaggtgtatcccataacaagggaggagcataccacagcccctcatttgattaattcatttgatctatctatgttattaa

SEQ ID NO: 334672 - DNA, 201 bp, Homo sapiens
tataaatctcagtgctaggttaacttctaataagcagacgaacatgttacataaattataatgtctgtcttgtaaaaaagttgaggggactaaaagtttaygactctgatatggaagttgtcatattaaaaaactacattttaaaacatcaaatatttatactatttgcttttcaaataaaagcatagtgctgtttggcat

SEQ ID NO: 334673 - DNA, 201 bp, Homo sapiens
taaacatacgtgtgcatgcgcctttataggagagtggtttataatactttgggtatatacccagtagtgggatctgggtcaaatggtatttctagttctasatccttgaggaatcaccacactggtcttccataatggttgaactaatttacactcccaccaacagtgtaaaggtgttcctatttctccacatcctctcca

SEQ ID NO: 334674 - DNA, 201 bp, Homo sapiens
atgcgcctttataggagagtggtttataatactttgggtatatacccagtagtgggatctgggtcaaatggtatttctagttctagatccttgaggaatcrccacactggtcttccataatggttgaactaatttacactcccaccaacagtgtaaaggtgttcctatttctccacatcctctccagcatctgttgtttcc

SEQ ID NO: 334675 - DNA, 201 bp, Homo sapiens
gaactgcttctttatattttatgcattctgcaagtatatttacttaacagtttcacactattttaaataaagatgacaacattgttaagtccctaaccccyttttttttttttttttttgccgggggtacggctctcctgttgcccaggctggagcgcagtggcgcgatctcggttcactgcaacctccgtctcccggatt

SEQ ID NO: 334676 - DNA, 201 bp, Homo sapiens
aatagagggtgcttgacacatatatatgcttaaattgaaggacagctcagattcatttttaggagaagaaagtaaactaatgtgctcttaaagaataaaawtttattctatggtttctgtctctgatcatcaccttccattctataaaaagctcagttactgatttgctgggtcatggtcaaaattcttacctatttattt

SEQ ID NO: 334677 - DNA, 201 bp, Homo sapiens
gatagtcttttgggtattcagaaacctttccttatactgcactggccaccagagcttaattttcccagcagttacagcaatgggagatagaacagtctcartcttttgccaacaatcaggttcctagaaaccaggtaggtgtatcccataacaagggaggagcataccacagcccctcatttgattaattcatttgatcta

SEQ ID NO: 334678 - DNA, 201 bp, Homo sapiens
ggagaagaggctttctggttttttgaattttcagcctttttgcactggtttttcctcatcttcatggatttatctacctttgttctttgttgttggtgaccttcggatggaatttttgcatggtcgtcatttttgttgatgttgatgctattgctttctgttagttgtctttctaacaagcccctcttctgcaggtctgct

SEQ ID NO: 334679 - DNA, 201 bp, Homo sapiens
ggacagcaccaagaggatggcattaaagtattcatgagaaatacacccccatgatccagtcacctcccagcaggccccacctccaacattggggattgcawttcagtatgagatttaaaggggaaaacatccaaactatatcagatgaataacagattaccctaaaaacttttggttgaaataatgacatttatgttttta

SEQ ID NO: 334680 - DNA, 201 bp, Homo sapiens
tttaaattttttttaaataattgttatgaaaacatcaaaaatgcaaaaaaggtgaagaaactagtataatgagccaccacgtatccatcatgtggcaacarcagctataaacccttttgctcaccatgcttcatgcctcttctatccagctttcttggagggctgtaggtatgagtcaccattattctaaagcaaatccca

SEQ ID NO: 334681 - DNA, 201 bp, Homo sapiens; identical to SEQ ID NO: 70414

SEQ ID NO: 334682 - DNA, 201 bp, Homo sapiens
ctaacacaattaatggtaattctttaatattaccttatttctccagtgtcttaataattaatatttttgtgggcagtttgtttgaatcaggattcaaaacragttccacctattgcatttggatagtggatctcttaagttccttttaataatgaaccatttctccccaacttttctcttttatacacacacacacacaca

SEQ ID NO: 334683 - DNA, 201 bp, Homo sapiens
gaagaacttgacttaatcaactacatatttagttatactgaagtatacttcatacaggaccaagaaaaatgcttaaatttttccccttatattatcacctktcacaataatgagttgctgcactatctgtctccaaaagttgctctgatgggtgagaaactcaagttgccttctgtatcgtttttggcaaagtgaagatgc

SEQ ID NO: 334684 - DNA, 201 bp, Homo sapiens
aaatgttacagtaactactctggcctcttttcagctctgtttccctcttatcaatacatacaatgaaatgactaggaagaaattcttctcatgctaccttstctgtgaacttgtacttgtctgaatttactatagtactagtgtgttcaacattatgcttggaagaaataaatagcttaaattttacatatcagtaagtct

SEQ ID NO: 334685 - DNA, 201 bp, Homo sapiens
agtttctgactttgcctcaactaaaacaaattattaccgacaaagatgacttagtaaaaagtattgaggaactagcaagtatgttttccctctcctgagcrcacatttcctgaaaaaaatctcatctttacctagaagtaaactagagatttatcttacaggaaaaaatctccttttggagcccagcttggaagccaaaag

SEQ ID NO: 334686 - DNA, 201 bp, Homo sapiens
gaatctttgaaaaggaaccagaggacataatctttgtatcataccaataacaacctcatagttaatattctgtttcctgtaaaattaggaactttgggtaragtcaatgaaataaaacataaaatagacataaaccaacaacagcaaaaaagatggtaaaggagaatataaatttataatgaatttcagataatacggtca

SEQ ID NO: 334687 - DNA, 201 bp, Homo sapiens
taaaccaacaacagcaaaaaagatggtaaaggagaatataaatttataatgaatttcagataatacggtcatttgtcagaataaagaaataatagctaacrttgagcaattaatatgtcttgcaccgcatgaagctatttacgtatattgggccattattacaccaaatcctatgaaataggtattgttactttttcccat

SEQ ID NO: 334688 - DNA, 201 bp, Homo sapiens
tactttttcccattttacattttacagatagggaaactgaggcacagggagattaaataaatttcttgaggtcatacaagtagaaacattagttaggagtstaacctaagcagtcctccttcacagaaaatctgtgagactcaactgaagtactgttagatatatactggaccttagtaaatgttgaagaagctttcatag

SEQ ID NO: 334689 - DNA, 201 bp, Homo sapiens
tccgggatggaaatgatttcatattcccactgtaatcctggggagtgttggctatgctgttgtctgaggtagaaaaccctgagtgcttgctgggctcactktgcttactcttcaccttagtgcaatttaactggaccttttgaattttttccagcctctaagaaagaaataacaatttcaggggaaaaatcataaataact

SEQ ID NO: 334690 - DNA, 201 bp, Homo sapiens
gtcatttttgttgatgttgatgctattgctttctgttagttgtctttctaacaagcccctcttctgcaggtctgctggagtttgctgggggtctactccasatcctgtttgcctgggtatcaccagcggaggctgcagaacagcaaagattgctgcctgctccttcctctggaagctttgtcccagaggggcacctgcaaa

SEQ ID NO: 334691 - DNA, 201 bp, Homo sapiens
tccctttaccattatgtaatgcccttctttgtcttttttggtttttcttggtttaaactctgttttatcagagaccaggattgcaacccctgcttttttttactttccattggcttggtaaatcttcctccatccctttattttaagcctgtgtgtgtctttgcacatgaaatgggtttcctgaatacagcatactgatgg

SEQ ID NO: 334692 - DNA, 201 bp, Homo sapiens
ttcccccaggtgctctgttgcagggagatgggagttttatctataagcccctgactggggcctctgcctttctttcagagatgccctgcccagagaggagraatctagagaggcagtctggctacagtggctttgtggagctgaggtgggctttgcccagtccaaacttcccggaggctttgtttacactgtgaggggaaa

SEQ ID NO: 334693 - DNA, 201 bp, Homo sapiens
aattagtttgtcagaaaagaaactgtcacctgtgtcctaaaaaagaaaaaaaaacgtaagttttaagggagatataagagtcttgaaaaattctgaaatayagggaatgtagactgacagaatatatcacagaggtaaggctttggagtcagatgtacctggatatatatatatatatactccgactcctgcatttgacag

SEQ ID NO: 334694 - DNA, 201 bp, Homo sapiens
attttgtaataagatgtagcttagatcatagtcacttttatacttaaaatactgtgttgttggcatctggagtctcatttgtgaacaatataaacatactstttttagcacattaaatttcagatttcttggattctcattggatgtttctgatggtgtactattaaatcattatacccccagggagagtatattgaggta

SEQ ID NO: 334695 - DNA, 201 bp, Homo sapiens
gagcaaatgtaaactccaagttttgctaataattgataaggccgtaagttctgtttacaagggccaaccaagagggccacagtgtccctgaaaaaatggaracattccaaagccggtttcctgagagattcatcttaaagtacataggactggctacttctcaagatagagcattcaggcttttctgttgaccgaattgtt

SEQ ID NO: 334696 - DNA, 201 bp, Homo sapiens
attgataaggccgtaagttctgtttacaagggccaaccaagagggccacagtgtccctgaaaaaatggaaacattccaaagccggtttcctgagagattcrtcttaaagtacataggactggctacttctcaagatagagcattcaggcttttctgttgaccgaattgttgtttaactaggaccaattaattttgcagttt

SEQ ID NO: 334697 - DNA, 201 bp, Homo sapiens
cagtgcaaggctgcatgcattattttgtgtttatagagaagacacaggatttttacttcttacgaagagaaatctgaaatgcttcaaaatatgttgaacarcaaaatactatcaaatctaaattgaaagagttccgggtaattgaatagttttttaaaggtctctatttataagtataatgatttaatatgtggtgtatta

SEQ ID NO: 334698 - DNA, 201 bp, Homo sapiens
atgagcctgcatgatgtgataatatggacatgataggagcagagtagctgaagggatgagaggagacatccaatttttggttcttgatgcgatgggagttktctaataaatttatcatctcacaccaaaagagtgtggagaagcactgaatgttagtttaggagcgttacagtgaaaggctcaggggaaaggcttagggga

SEQ ID NO: 334699 - DNA, 201 bp, Homo sapiens
tgaacagcaaaatactatcaaatctaaattgaaagagttccgggtaattgaatagttttttaaaggtctctatttataagtataatgatttaatatgtggygtattaagaaaggatggagaataaaatatataccatatgcaagtaaatctgaagccttgtgggtgcctactatgtctaaagtgctttgtaccttttggga

SEQ ID NO: 334700 - DNA, 201 bp, Homo sapiens
ctccctcagaaggatccaagaattttttcttgtctcttagcttctggtagttgccagtaatgttggacttcccttgcattaactccaaaaggccagtgggktactattgtttaatatccccaaggacgttaatatagattttaagataacctatatagcactcagaaatcccttgaaccttctaaatgtatagcatattat

SEQ ID NO: 334701 - DNA, 201 bp, Homo sapiens
cacctgcttcggcctcccaaagtgctggaattacaggcatgagccaccgggcctggccgatctgtatctattttacatttagcaccattattttttctttkttgccatttatttcttttatgaggtaattttatagttttagagttagtctatggttagattactaattctaccatccaccaacttgtgagcttgatgtat

SEQ ID NO: 334702 - DNA, 201 bp, Homo sapiens
aagaagaaggttcttctactgttaataacaaagaggtcatgagggagataaccctgatggggtctgagtcttgcagaaatactaccttagtattcactgcsttttaaaaatatatatatcatttacttactaatgagtctgtctgtagatcgctttggtctgcatttactcttctaatttcaccactttcttactgaaaaa

SEQ ID NO: 334703 - DNA, 201 bp, Homo sapiens
accctgatggggtctgagtcttgcagaaatactaccttagtattcactgccttttaaaaatatatatatcatttacttactaatgagtctgtctgtagatygctttggtctgcatttactcttctaatttcaccactttcttactgaaaaatagcaagccagatgcaacatgccttcttgtgccatttcagtaataattat

SEQ ID NO: 334704 - DNA, 201 bp, Homo sapiens
atgttggccaggctggtctcgaactcctgacctcaggtgatccacctgcttcggcctcccaaagtgctggaattacaggcatgagccaccgggcctggccratctgtatctattttacatttagcaccattattttttctttgttgccatttatttcttttatgaggtaattttatagttttagagttagtctatggttag

SEQ ID NO: 334705 - DNA, 201 bp, Homo sapiens
cctgggttcaagcgattctcctgcctcagcctcctgagtagatgggattacaggcacccatcaccatacctggctattttttttgtattcttagtagagayggggtttcaccatgttggccaggctggtctcgaactcctgacctcaggtgatccacctgcttcggcctcccaaagtgctggaattacaggcatgagccac

SEQ ID NO: 334706 - DNA, 201 bp, Homo sapiens
atattttacttagatttgttatagaaataaaaattaataagacatcttaaggctatgaaccccactttccaccacatatcaacttcattataatttctgtrttgccttctattttcatacaggttttatttataaactgcttagtcccacttgacatatttatcttgctgctgctttgtgatcaatctgggttatagattt

SEQ ID NO: 334707 - DNA, 201 bp, Homo sapiens
agagctaggcattttccctggattcttatattttacttagatttgttatagaaataaaaattaataagacatcttaaggctatgaaccccactttccaccrcatatcaacttcattataatttctgtattgccttctattttcatacaggttttatttataaactgcttagtcccacttgacatatttatcttgctgctgc

SEQ ID NO: 334708 - DNA, 201 bp, Homo sapiens
acccgggaggcggaggttgcagtgagctgagatcatgccactgcactccagcctgggcgacagagcgagactcagtcttaaaaaaaaaaaaaaaaaaaaawataatgttaaaaataaaaatcaaattaaaagaaacaaatgctcgtaactattttaaaaagtgttaatcttcttaatacactattaaatgacaagcattca

SEQ ID NO: 334709 - DNA, 201 bp, Homo sapiens
gagcatgggcttttgaggctttgtaaagctggtttcctccccactccctccattgttccctctcttgttccttccctctcttgttccttccctctcttgttccttccctctctcgttccttccctctctcgttccctcgttccctccctctctcccaccctccctcactccctcccttcctttcttccttcgttccttcgt

SEQ ID NO: 334710 - DNA, 201 bp, Homo sapiens
atttttcacattttgccaaagcaatctatatacagcagcatgatgtgtgtgtgttaagtagagctaggcattttccctggattcttatattttacttagayttgttatagaaataaaaattaataagacatcttaaggctatgaaccccactttccaccacatatcaacttcattataatttctgtattgccttctatttt

SEQ ID NO: 334711 - DNA, 201 bp, Homo sapiens
agagcatgggcttttgaggctttgtaaagctggtttcctccccactccctccattgttccctctcttgttccttccctctcttgttccttccctctcttgttccttccctctctcgttccttccctctctcgttccctcgttccctccctctctcccaccctccctcactccctcccttcctttcttccttcgttccttcg

SEQ ID NO: 334712 - DNA, 201 bp, Homo sapiens
tagagcatgggcttttgaggctttgtaaagctggtttcctccccactccctccattgttccctctcttgttccttccctctcttgttccttccctctcttgttccttccctctctcgttccttccctctctcgttccctcgttccctccctctctcccaccctccctcactccctcccttcctttcttccttcgttccttc

SEQ ID NO: 334713 - DNA, 201 bp, Homo sapiens
tcctttcttcatgtctgctcttattttatactgtctgcaagctaggacttgcctagcaaggttgcgctcccacctgtgagccagaacgtgggctcttggcmgactctaggagcctttctgtttcttcttcttatccttccatgcatccttttctttttttgactaagttctacccttcctcctccccctgccttggagtta

SEQ ID NO: 334714 - DNA, 201 bp, Homo sapiens
tggtgaataggaaagttatctgacttcattgtgacacgtctacctacctctaattgtactttatcagggatgactacatttgcagaagagatatgtttaawggaaggtacctgaattcctttcttcatgtctgctcttattttatactgtctgcaagctaggacttgcctagcaaggttgcgctcccacctgtgagccaga

SEQ ID NO: 334715 - DNA, 201 bp, Homo sapiens
aagtgaatgcaaaatttctggacaaaatagaaacaggtacatgggctaatataggaatatacacaatactgttaactgtcccaagatttttcattgattaygtcttccatggtgagatttcaggcataaaattggtttgggttagtacaaagtctggcccaacatatgcttacttgtagttcttcctaataagtcaaacaa

SEQ ID NO: 334716 - DNA, 201 bp, Homo sapiens
tttacaaaataatatttttgtaatgataatccttgtagttattttatttttatgtatattataaaacatagaaggtaatttatacaatgagatataaagtrattttgactaaaagaccaatgctgattttgttgaaataccaacaaagtgctttcttagaaatgcctttcatcttgaaaactacaattatgttggtcagta

SEQ ID NO: 334717 - DNA, 201 bp, Homo sapiens
cttgcctttttcttacttatagaaaacttccagcatcagacaaaataattcatgacataaaaataataagtcgttaatttaaaaacttatttaagacaagmcaataaagattaaagtttttaaagagctagaaactagggagaatagttgtcacatttatagtatataaagaacacttacaaatataaaggcaaaataatt

SEQ ID NO: 334718 - DNA, 201 bp, Homo sapiens
gcaacctggtgagacctcgtgtctacaaaaaaattacaaaattagctgggcctagtggcatgcatctgcagcccagctacttgggaagttgaggtgggagratcggttgagtctgggaagtcaaggctgtggtggaccatgatcatgccacttcactccagcctgggtcacagagtgagagttattttttttaagagcatt

SEQ ID NO: 334719 - DNA, 201 bp, Homo sapiens
ccagcctgggtcacagagtgagagttattttttttaagagcattaaaaagacagaaatcactctgtatcatagtttgctggactccaacttcatctagccrcatgaacactgcatcactttacagcaggcatagcaagtggacaatagccttgaagacttccagagcagtgattgctgctgtcctttgtcctctcgtcttc

SEQ ID NO: 334720 - DNA, 201 bp, Homo sapiens
tagcatcccagaggaataaactgttttattataataacatgtgtgttggatcagagatagtattatacagaaaccttgccacacaaagtcataaaaacttraatttgagttataggtccatttatttctctgagcgtggcaactattttacccctctcggtcctagttccttgctggtgaaatagggattatatcaaagga

SEQ ID NO: 334721 - DNA, 201 bp, Homo sapiens
tagtgaatcagtttagaacaaatcagtgagctcctttttaaggaaataaaactggcagacagatgtaaaatataaatggtagggttaaaacagaaagccaktttggtcaactgtagtctaattcttggcctaatgataaaaattttgaagcagcaaaaatcccctttctcacatttccttttttaattccctaagattatt

SEQ ID NO: 334722 - DNA, 201 bp, Homo sapiens
taacaacaaccctctgaaacactaaaggtaagtaaatatgaaaaaagaagtaatatatttttattgaaattttattgagatagttgtagattgacacgcasttataagaaataataagagagaacttgtatatccttcaccttgtttcccccaaggataacattttgcagatctgttacaaccaggatgttaacataatct

SEQ ID NO: 334723 - DNA, 201 bp, Homo sapiens
aaaatggaaacattccaaagccggtttcctgagagattcatcttaaagtacataggactggctacttctcaagatagagcattcaggcttttctgttgacygaattgttgtttaactaggaccaattaattttgcagttttacttgtgccagcttttactttgcttgccaataactaattgcattgttttcttatttttgt

SEQ ID NO: 334724 - DNA, 201 bp, Homo sapiens
cagaattccagtgttttgctgaaaccatatttttttgtttttaagccagtggggtccacagtgtatgttggaacccattcttgggcaataattttgcctayttaatcatcaattttcttagaaaccagagctacccgtgcattatgtgaaaagcctgttgaactgctctacatagtaggatggtaactataaggatgtggc

SEQ ID NO: 334725 - DNA, 201 bp, Homo sapiens
acaggagatgtgttagaaataacatcaaatgaagtgttcgactttttcttttttgtataattttggttataataatataatgtataaattgtgttattatrttataataatattcaatctgctcacctcaaaaatgtgggaacaactgagagtgaaaacacataaacccacttagaaacttgtgtgcatatattcagggca

SEQ ID NO: 334726 - DNA, 201 bp, Homo sapiens
atagagcatgggcttttgaggctttgtaaagctggtttcctccccactccctccattgttccctctcttgttccttccctctcttgttccttccctctcttgttccttccctctctcgttccttccctctctcgttccctcgttccctccctctctcccaccctccctcactccctcccttcctttcttccttcgttcctt

SEQ ID NO: 334727 - DNA, 201 bp, Homo sapiens
aataaggagagatcgaatgatgctatcttgatcttcgtatcttgaacttgtttgtttgttcatttgtttcgccagttactttttgaatgggaccaaagacrgtcataagctaaaatcttggctttactttgtacctggttaagtgcattctatttattcttttttctttattgaaaatgggcatattaaaaatattctctc

SEQ ID NO: 334728 - DNA, 201 bp, Homo sapiens
gatgatggtcccataagattgtaatactctattgtaccttttctaagtttaaatatatttaaatacacaagcacatattactgtgttagaattgcctgcartgttttcagtacagtaacatggtgtacaggtttgtagcctaggagcgataggctatatatcatacagcctaggtgtgtagtgggctatatcacttaggtt

SEQ ID NO: 334729 - DNA, 201 bp, Homo sapiens
ctttgtcatatctagatatgatatggaaatgaagaagattcagtagtgccagagaataaaattccaataaggagagatcgaatgatgctatcttgatcttsgtatcttgaacttgtttgtttgttcatttgtttcgccagttactttttgaatgggaccaaagacggtcataagctaaaatcttggctttactttgtacct

SEQ ID NO: 334730 - DNA, 201 bp, Homo sapiens
atcattcctttcaagagttttctttgtcatatctagatatgatatggaaatgaagaagattcagtagtgccagagaataaaattccaataaggagagatcraatgatgctatcttgatcttcgtatcttgaacttgtttgtttgttcatttgtttcgccagttactttttgaatgggaccaaagacggtcataagctaaaa

SEQ ID NO: 334731 - DNA, 201 bp, Homo sapiens
attataaagccaataatagaatgcatacatgatgatggtcccataagattgtaatactctattgtaccttttctaagtttaaatatatttaaatacacaarcacatattactgtgttagaattgcctgcaatgttttcagtacagtaacatggtgtacaggtttgtagcctaggagcgataggctatatatcatacagcct

SEQ ID NO: 334732 - DNA, 201 bp, Homo sapiens
acaatagccttgaagacttccagagcagtgattgctgctgtcctttgtcctctcgtcttctcttagaagtagcttttaccttgcagattgctgagaaaaaycttaattaatttgaataagtttgattggaaaattatttcagataatgtgtctaaacataactgaaactaataagtatcatagaataggaaaccttttcaa

SEQ ID NO: 334733 - DNA, 201 bp, Homo sapiens
ggtggttcacgcctgtaatcccagcactttgggaggccaaggtgggcagatcacttgaggtcaggagtttgaggtcagcctgatcaatatggggaaaccayctctactaaaaatacaaaattatgtttttgtaaaatacaaaaatacaacatggggaaacgatctgtactaaaaatacaaaaattagccgggcgtggtggc

SEQ ID NO: 334734 - DNA, 201 bp, Homo sapiens
tcaattagcatagtctactacagtagactaaattgcttgcacaagtaactaaatgcacaagtaactaaatgcttgtttctatttgtttgatttttttttttgcagcttctttccacttttgacttaataaagtatgactttcagaaagatgaacccatgagaaatgagcagggttggtgtattcatgtgaaaaaaggtaag

SEQ ID NO: 334735 - DNA, 201 bp, Homo sapiens
ttatactctacctttgttactggcgggtctttgttcttagagcttccaagatagtggcaggtgctacctagatggtggcgggcagctcccaagatggtggmaagccttgtgttctctgatctggggttcttggcctcacggattccaaggaatggaaccttgggccatgcggtgagtgttatagctctattagaagccatg

SEQ ID NO: 334736 - DNA, 201 bp, Homo sapiens
tagtatagagaccatgttttgagtctgctctgcaacctactaagctgtgttaccttaaaaaagttacttaattgtttaccatttcagtttctaaaatatarcactttacctgtctcccaaaaccgctgagagtgccttttagttagccttgagtacatggcaaccattatttttgttagtgacaataacaagagtaacatt

SEQ ID NO: 334737 - DNA, 201 bp, Homo sapiens
tcacacgtagaagattgaacaactctgaattgtttatacatggaataaaacctgacaatgtaaaaataattataacactaacaaaaatgggagtgggggggaggaaaggaagaaatggttattctcctacctgtcatattggcaaatccatagataacaacagaatttaaaatttaccatctaaacttaaattttaaaata

SEQ ID NO: 334738 - DNA, 201 bp, Homo sapiens
ccaggctggtctcgaactcctgacctcaggtgatccacctgcttcggcctcccaaagtgctggaattacaggcatgagccaccgggcctggccgatctgtrtctattttacatttagcaccattattttttctttgttgccatttatttcttttatgaggtaattttatagttttagagttagtctatggttagattacta

SEQ ID NO: 334739 - DNA, 201 bp, Homo sapiens
ttgacagtctcagaaacattggactatatagtatagagaccatgttttgagtctgctctgcaacctactaagctgtgttaccttaaaaaagttacttaatwgtttaccatttcagtttctaaaatataacactttacctgtctcccaaaaccgctgagagtgccttttagttagccttgagtacatggcaaccattatttt

SEQ ID NO: 334740 - DNA, 201 bp, Homo sapiens
aaagaaaaaggatcaaggagaaacataaataaacaaaatgaactaaaaagtaagcacgctcagctcaaagaaaaaaatagaggaaaaaatgtaaatattacacaaatgagcatcacataaaataaaaggaatgtaaacgttgttagggagaaagatgagtggaattaaggagtcccacaaacacaataaaaagagcaagca

SEQ ID NO: 334741 - DNA, 201 bp, Homo sapiens
gggtttcaccatgttggccaggctcttctttaactcctgacctcaggtgatccacttgcttcagcctcctaaggtgctgggattacaggcatgagccaccrcgcctggccaagattcattttattaagaaagactggcagtgataatgattctttatcccctgcatgactcttctttatcccctacatgactcttttattt

SEQ ID NO: 334742 - DNA, 201 bp, Homo sapiens
gctaagtcctgaaaatttagcagtgaacaaaacaaatttcctcagttcaagagtttacaacctagttcttgaactattccttgaggctgcatcaacatctrtttgtgaattggcaaagagagctttatgattggagggagtcactgtaaagacacacagagcacctgaggcaggtgaggtcagtggaaaaggtactcaaag

SEQ ID NO: 334743 - DNA, 201 bp, Homo sapiens
tcttttctttttttttttgttaagatggagtctcactctgtcccctaagctggagtgcagtggcgtgatcttggctcactgcaacctccgcctcccaggcycaagcgattcacctgcctcagtctcctgagtagctgggattacaggtgcctgccaccacacccagctaatttttgtatttttagtagagacagggtttca

SEQ ID NO: 334744 - DNA, 201 bp, Homo sapiens
atcccaaccatatcaccaccctcaaaaccagttaccaaatgaacagtggagagtggacaactttttgcaaaaatatgcgaagtaaattaaaagttagcaartgttcatgtgtatcatagtttttattatgccattcattcactcattcatccagataataaatacttgttgaatatctcctttgtgctaagtcctgaaaat

SEQ ID NO: 334745 - DNA, 201 bp, Homo sapiens
aagaactgagaattgaaaacagaatacctgattgctttttaattaatttaatttttaggggtgggcatggtggttcacgcctgtaatcccagcactttgggaggccaaggtgggcagatcacttgaggtcaggagtttgaggtcagcctgatcaatatggggaaaccacctctactaaaaatacaaaattatgtttttgta

SEQ ID NO: 334746 - DNA, 201 bp, Homo sapiens
tgctttgtttgaacaaaggatgcctcagtggtttttaattagaaaaagtaaattcgattatttacttttgtttataattttatagactagaaacaaacatwttaatgtgctctgttaagattactggcaaggtgggacagttttccagctgtatttccctttaaaaatgtctcttttgtgtcttgtactcatttatttgtc

SEQ ID NO: 334747 - DNA, 201 bp, Homo sapiens
tccagtttttcatgtttctaacttgtcactcctcctatcatccttggtgatttttcacattttgccaaagcaatctatatacagcagcatgatgtgtgtgygttaagtagagctaggcattttccctggattcttatattttacttagatttgttatagaaataaaaattaataagacatcttaaggctatgaaccccact

SEQ ID NO: 334748 - DNA, 201 bp, Homo sapiens
ttgaatttttttccctagtgcctgtttttgtcttttcttataggtgccacttgtgtgttaaagaagaaattttcagcaagccagttttggagtgactgcargaagtatgatgtgactgtgtttcagtatattggagaactttgtcgctacctttgcaaacaatctaaggtaggcgtaatcattatcagaaaaaaatatgtc

SEQ ID NO: 334749 - DNA, 201 bp, Homo sapiens
agagaagacacaggatttttacttcttacgaagagaaatctgaaatgcttcaaaatatgttgaacagcaaaatactatcaaatctaaattgaaagagttcmgggtaattgaatagttttttaaaggtctctatttataagtataatgatttaatatgtggtgtattaagaaaggatggagaataaaatatataccatatgc

SEQ ID NO: 334750 - DNA, 201 bp, Homo sapiens
tcaaacttgctgagttttgattggttgatgtagctgagttctgcttgatcaattcaagccacagcttattggttggttcaggaaaaatgaacaagaagagwcagctatgaaagccttagcagtaggccagtgcagtagctcatgccgataatcccagcactttgggagtttaaggtgggaggatcacttgagctcaggagt

SEQ ID NO: 334751 - DNA, 201 bp, Homo sapiens
actttctagactcatggcatctttaatgtctcatagcactcttgggtcaaaacaaatacctaaacatttgtttattcactagttaaggaaaaacagattgrtaagtatttaggtctaacaaatgagtagccacctgaaaaataatccatataaataagtaaatgctttcatttcgttttcaaataaccacaatcagtcact

SEQ ID NO: 334752 - DNA, 201 bp, Homo sapiens
agagatagtattatacagaaaccttgccacacaaagtcataaaaacttaaatttgagttataggtccatttatttctctgagcgtggcaactattttaccyctctcggtcctagttccttgctggtgaaatagggattatatcaaaggatttctatgcagaataagcaaagtggcatttgcaaagggctcatggtaaatgc

SEQ ID NO: 334753 - DNA, 201 bp, Homo sapiens
gttcaagttgatgtgactactttattggtatcatcacatcaatttgatgaatggtcctgaaagctagagggaaatatctattgaaatccaagaccttgggwtgtctgtattaaaagctctgggccactaagcaagttctcttaaattttaaaaggaattttaagtagttaacgatgaaatgagcattttctacatgtttga

SEQ ID NO: 334754 - DNA, 201 bp, Homo sapiens
ttcactagttaaggaaaaacagattgataagtatttaggtctaacaaatgagtagccacctgaaaaataatccatataaataagtaaatgctttcatttcrttttcaaataaccacaatcagtcactaaggagatgtaagttgggccacagttcttcagaccttggaattagattggactggacagggagagcctgatttc

SEQ ID NO: 334755 - DNA, 201 bp, Homo sapiens
atgatagatttgtgtgtacctgtagtagaaattgctgtcttttgtggcttttatctccttagcatcttatggcattctctatacataatgttatattggcrttgaattgaagagataacctatgtattttagacataattataatcagtttattatgttcataattcttatatattgaatgagtttatatttaagtaaagt

SEQ ID NO: 334756 - DNA, 201 bp, Homo sapiens; identical to SEQ ID NO: 70422

SEQ ID NO: 334757 - DNA, 201 bp, Homo sapiens
tctttgtagcaattgtgaatgggagatcactcatgatttggctctctgtttgtctgtttttggtgtaaaggaatgcttgtgatttttgcacattgattttstgtcctgagactgctgaagttgcttatcagcttaaggagattttgggctgagatgctggggttctctaaatatacaatcatgtcatctgcaaacagggac

SEQ ID NO: 334758 - DNA, 201 bp, Homo sapiens
gtgggtggatcacctgaggtcaggagctcgagaccagcctggccaacatggtaaaaaccccgtctctactaaaaatacaaaaattagttaggtgtggtggygggcatctgtaatcccagctacttgggaggctgaggtaggagaatcacttgaacctgggtggcggaggttgtagtgagccgagtttgggccactgcactc

SEQ ID NO: 334759 - DNA, 201 bp, Homo sapiens
tatcccgagtttccaggtaccgtctgtcacagcttcccttggctgggaaagggaattccctgaccccttgtgtttcccaggtgaggcgatgccctgtcctrctttgctcacactctgtgggttgcacccactgtccagcaagtccaaatgagatgaatccggtacctcagttggaaatgcagaaatcacctgtcttctgcg

SEQ ID NO: 334760 - DNA, 201 bp, Homo sapiens
ttgagacagggacagttttactgctattggttccttcagtgagtgcaagaacacacagagaacttggtcacttctaaattttatcagctctgacaaaatgrtgaataggaaagttatctgacttcattgtgacacgtctacctacctctaattgtactttatcagggatgactacatttgcagaagagatatgtttaaagg

SEQ ID NO: 334761 - DNA, 201 bp, Homo sapiens; identical to SEQ ID NO: 70419

SEQ ID NO: 334762 - DNA, 201 bp, Homo sapiens
ttggaaaagtgcagtattagagtgagagtatcccgagtttccaggtaccgtctgtcacagcttcccttggctgggaaagggaattccctgaccccttgtgyttcccaggtgaggcgatgccctgtcctactttgctcacactctgtgggttgcacccactgtccagcaagtccaaatgagatgaatccggtacctcagttg

SEQ ID NO: 334763 - DNA, 201 bp, Homo sapiens
agtggtggactcccctcccctagccttgctgccacctcgcagttcaatctcggactgctgtgctagcagtgagcaaggcttcgtgggtgtgggacccaccragccaggcacgggatatagtttcctggtgtgctgtttgctaagaccattggaaaagtgcagtattagagtgagagtatcccgagtttccaggtaccgtct

SEQ ID NO: 334764 - DNA, 201 bp, Homo sapiens
agcagtggtggactcccctcccctagccttgctgccacctcgcagttcaatctcggactgctgtgctagcagtgagcaaggcttcgtgggtgtgggacccrccaagccaggcacgggatatagtttcctggtgtgctgtttgctaagaccattggaaaagtgcagtattagagtgagagtatcccgagtttccaggtaccg

SEQ ID NO: 334765 - DNA, 201 bp, Homo sapiens
cttcctattaaaatcaattattttcttttgtaacagaagtaattgttgatctagctgagtctaggaatgaaaaagaaaaaaaaaacaaaaagccaaacagyctattctactaaatacaagtagaaatttagaaatgtcctgaaaagtaaaacagatatcatgtatggatatcatagtatgtaggtaagataataaaagttc

SEQ ID NO: 334766 - DNA, 201 bp, Homo sapiens
gtttgcctgggtatcaccagcagaggctgcagaacagcaaatgttgctgcctgatccttcctctggaagcttcgtctcagaggggcacctgcttgtatgcrgtgtcagttggcccctactgggagatgtctcccagttaggctactcgtgggtcagggacccacttgaggaggcagtctgtcggttctcagatttcaaact

SEQ ID NO: 334767 - DNA, 201 bp, Homo sapiens
catggtgaaatgctaggacgtacctgtctttgtcctaattatagaattgctctcttcctcttcagtcaggacctcagagcaaaatgatggtcccagtgacrgtggcaatccaaaaccacatcttacttttatcttgcgaagacatttggtgctatgtgcctagaattgggttccattaaggagacatcaaagagatggcaa

SEQ ID NO: 334768 - DNA, 201 bp, Homo sapiens
gcaggaatggcttctattattttaaaaccaaatacatctttagatttggaaaaagtttatgaacaagttgtaacatttctaccagcttatgcttgtccackatttttaagaattcaggtaattttagtggcggagtttactatcaaatataagacagtaaacaaggaagtagtttaattgcaaaataatattgtatccttt

SEQ ID NO: 334769 - DNA, 201 bp, Homo sapiens
cgtttgcctgggtatcaccagcagaggctgcagaacagcaaatgttgctgcctgatccttcctctggaagcttcgtctcagaggggcacctgcttgtatgyagtgtcagttggcccctactgggagatgtctcccagttaggctactcgtgggtcagggacccacttgaggaggcagtctgtcggttctcagatttcaaac

SEQ ID NO: 334770 - DNA, 201 bp, Homo sapiens
tgaacatcatagagtgtacctacacgaacctagatgacatagtttactacacacctaggcgctgtggtatgggttattgctcctaggctacaaacttgtacaggatattactgtactgaatatcgtaggcaattggaacacaatggtggtaagtatttttaagtgaaaacagaaatggtacagtaaaaacatagtggtatg

SEQ ID NO: 334771 - DNA, 201 bp, Homo sapiens
agtttgctggaggtccactccagaccccgtttgcctgggtatcaccagcagaggctgcagaacagcaaatgttgctgcctgatccttcctctggaagcttsgtctcagaggggcacctgcttgtatgcagtgtcagttggcccctactgggagatgtctcccagttaggctactcgtgggtcagggacccacttgaggagg

SEQ ID NO: 334772 - DNA, 201 bp, Homo sapiens
tttattagttttccttctaacagtcaggaccctcagctgcaggtctgttgtagtttgctggaggtccactccagaccccgtttgcctgggtatcaccagcrgaggctgcagaacagcaaatgttgctgcctgatccttcctctggaagcttcgtctcagaggggcacctgcttgtatgcagtgtcagttggcccctactgg

SEQ ID NO: 334773 - DNA, 201 bp, Homo sapiens; identical to SEQ ID NO: 70428

SEQ ID NO: 334774 - DNA, 201 bp, Homo sapiens
cactttttttggttggtaggctattaattattgcctcaatttcagagcctgttattggtctattcagagattcaacttcttcctggtttagtcttgtgacrgtgtatgtgtccaggaatttatccattttttctagattttctagtttatttgcgtagaggtgtttatagtattctctgatggtagtttgcatttccgtgg

SEQ ID NO: 334775 - DNA, 201 bp, Homo sapiens
ttcttgggcaataattttgcctatttaatcatcaattttcttagaaaccagagctacccgtgcattatgtgaaaagcctgttgaactgctctacatagtargatggtaactataaggatgtggcaagatctctaatttcactttgaattctaatgttgctttgcagtatgggaagctaaagttaaccatttgtagctgaat

SEQ ID NO: 334776 - DNA, 201 bp, Homo sapiens
gctgggatgatggtgtctgctaaaaaaaaaaagtgtaatgaaatgttctttagttttttgatctttagtaaaatttcatcttcgtataaaattttattaaycattccactaacttgttacttctccactccacctccccactccctttagaatccttagtttgaagacataattctttaaatgatctgtctcagggagggg

SEQ ID NO: 334777 - DNA, 201 bp, Homo sapiens
tatagagcaatgccttcaaagtcctgcgtaaaaatgactacttacctagaattctttacaagcagccattcaagtgtataggtggaaaaaaaagacatttycaggcacataaggactgacaaaaacttacctcccaaatgctctttatcagatagctactgaaaccaaatgtgtgctaccactgtaattaatttctagaat

SEQ ID NO: 334778 - DNA, 201 bp, Homo sapiens
acagtaaacaaggaagtagtttaattgcaaaataatattgtatcctttagataacatgtgagttatgtgagaggcgtggcgtgtagagttgatgcagatcratgccatgtttgaagcctaattataaagggggcatggtgaaatgctaggacgtacctgtctttgtcctaattatagaattgctctcttcctcttcagtca

SEQ ID NO: 334779 - DNA, 201 bp, Homo sapiens
ttaagaattcaggtaattttagtggcggagtttactatcaaatataagacagtaaacaaggaagtagtttaattgcaaaataatattgtatcctttagatracatgtgagttatgtgagaggcgtggcgtgtagagttgatgcagatcgatgccatgtttgaagcctaattataaagggggcatggtgaaatgctaggacg

SEQ ID NO: 334780 - DNA, 201 bp, Homo sapiens; identical to SEQ ID NO: 70430

SEQ ID NO: 334781 - DNA, 201 bp, Homo sapiens
aattctttagctgagtatagaatgctaggttgacaattattttcttgtactagctttaaaatattatattgtcttccaggcttacggtcattgttgaaatrtcagccataaatattcatgttgcccctttggaaatgatgtttctatttctttctggctgcttttaaaattctccctctctttttaatttttatatatttt

SEQ ID NO: 334782 - DNA, 201 bp, Homo sapiens
acgtgtttttaataaatcgtattttttaaaggcgtccctgctaacgtgctgaatcagtgagtcactgtcctcccaaatgtgaacaagattctgatttctcycagtataaattagttttgcttgtttcccaaaaacagaatctaaatgaaattatatatatgcattcttttgaccttgcttctttgactcagtcagcactat

SEQ ID NO: 334783 - DNA, 201 bp, Homo sapiens
ttgtcctgcactttttttggttggtaggctattaattattgcctcaatttcagagcctgttattggtctattcagagattcaacttcttcctggtttagtmttgtgacggtgtatgtgtccaggaatttatccattttttctagattttctagtttatttgcgtagaggtgtttatagtattctctgatggtagtttgcat

SEQ ID NO: 334784 - DNA, 201 bp, Homo sapiens
agtctaggaatgaaaaagaaaaaaaaaacaaaaagccaaacagcctattctactaaatacaagtagaaatttagaaatgtcctgaaaagtaaaacagataycatgtatggatatcatagtatgtaggtaagataataaaagttcacatgagctatgtattttatctatcggcatacataacactttctataaaacttaaag

SEQ ID NO: 334785 - DNA, 201 bp, Homo sapiens
ctatccctggccccgctaactttccatccatcatgccaggtgggggcaggttattgttccatcatctttctctccttgatgccctccactggcttccagtyttcttccagggttcaccaatagagtttcacaacataaacagctgtttttttttaaaggctcacctgaccaatattttgcccacctaccactatgcccaat

SEQ ID NO: 334786 - DNA, 201 bp, Homo sapiens
tctgctggatttggtttgccagtattttattgaggatttttgcatcagtgttcatcaaggatattggtctaaaattctctttttttgttgtgtctctgccrgactttggtatcaggatgatgttggcctcatgaattagggaggattccctctttttctattgattggaatagtttcagaaggaatggtaccaattcctgt

SEQ ID NO: 334787 - DNA, 201 bp, Homo sapiens
tggtggtaagtatttttaagtgaaaacagaaatggtacagtaaaaacatagtggtatgatcttatgggactactgttgtatatgcagtccctcattgaccraaatatcattatcattactatgtgttagcagtaagttaatgacagagttaggatttgagcccatgtttacctgatatcatgatgtgtatttctcacattc

SEQ ID NO: 334788 - DNA, 201 bp, Homo sapiens
tggttgatgtagctgagttctgcttgatcaattcaagccacagcttattggttggttcaggaaaaatgaacaagaagagtcagctatgaaagccttagcartaggccagtgcagtagctcatgccgataatcccagcactttgggagtttaaggtgggaggatcacttgagctcaggagttcaagaccagcctgggcaata

SEQ ID NO: 334789 - DNA, 201 bp, Homo sapiens
taaagtagttttttccaattctgtgaagaaagtcattggtagcttgatggggatggcattgaatctataagttaccttgggcagtatggccattttcatgwtattgattcttcctatccatgggcatggaatgttcttccatttgtttgtgtcctctttttatttcgttgagcagtggtttgtagttctccttgaagaggt

SEQ ID NO: 334790 - DNA, 201 bp, Homo sapiens
ctctcttacagtgtgggtttctctctgtctctgtgaatttgtctaagttttaaaatcaaagttctgtgaaaaggaatttgaaagaaagcaactttattccsgtgaactgtttgcaaactgtaagatacagcctttgctgtgaaacttaggtacattccagagaacaaagggaaggttgagtgtttatagcaacagttcctg

SEQ ID NO: 334791 - DNA, 201 bp, Homo sapiens
gcaatgcaggctcttttttggttccgtatgaactttaaagtagttttttccaattctgtgaagaaagtcattggtagcttgatggggatggcattgaatctataagttaccttgggcagtatggccattttcatgatattgattcttcctatccatgggcatggaatgttcttccatttgtttgtgtcctctttttatttc

SEQ ID NO: 334792 - DNA, 201 bp, Homo sapiens
attaaatagggaatcgtttccccatttcttgtttttgtcaggtttgtcaaagatcagatggctgtagatgtgtggtattatttctgagggctctgttctgytccgttggtctatatctctgttttggtactagtaccatgctgttttggttgctgtagccctgtagtatagtttgaagtcaggtatcgtgatgcctccagc

SEQ ID NO: 334793 - DNA, 201 bp, Homo sapiens
ctggagaagtcacccattctttctggcataccttcaaatataaatgagatatatgttttccaaagatggaaaaattctattttgattaacagattttgtartaagatgtagcttagatcatagtcacttttatacttaaaatactgtgttgttggcatctggagtctcatttgtgaacaatataaacatactgtttttagc

SEQ ID NO: 334794 - DNA, 201 bp, Homo sapiens
gggggtaaatcatatgttcagggaaggatacagactagtttatgctcctgttgtcttattattactgaaatagatttaatgtctccatgtgtgccaattakcatgtacagaattatcttttaaagtttatttggtacttaaaaatgactctatttcaaactttttttcaggttatgaaggaagagcaggaatggcttctat

SEQ ID NO: 334795 - DNA, 201 bp, Homo sapiens
  misc_feature (1)...(201): n = A,T,C or G
gagcaatgccttcaaagtcctgcgtaaaaatgactacttacctagaattctttacaagcagccattcaagtgtataggtggaaaaaaaagacattttcagncacataaggactgacaaaaacttacctcccaaatgctctttatcagatagctactgaaaccaaatgtgtgctaccactgtaattaatttctagaatctta

SEQ ID NO: 334796 - DNA, 201 bp, Homo sapiens
aggtgtaaggaaggtatccagtttcagctttctacatatggctagccagttttcccagcaccatttattaaatagggaatcgtttccccatttcttgtttwtgtcaggtttgtcaaagatcagatggctgtagatgtgtggtattatttctgagggctctgttctgctccgttggtctatatctctgttttggtactagta

SEQ ID NO: 334797 - DNA, 201 bp, Homo sapiens
aaagtacataggactggctacttctcaagatagagcattcaggcttttctgttgaccgaattgttgtttaactaggaccaattaattttgcagttttactygtgccagcttttactttgcttgccaataactaattgcattgttttcttatttttgtttttaacaccaacagtcagttttttgtatttaaaaaagccactt

SEQ ID NO: 334798 - DNA, 201 bp, Homo sapiens; identical to SEQ ID NO: 70423

SEQ ID NO: 334799 - DNA, 201 bp, Homo sapiens
cagctgacactaggctggaggcatttaaataagactttttcattttgagcttggagttcaccaaggagaaacctccagtcgagtttctgacccacctcccygtggcagaagccatccttactcattttttgtctggaatgcttcaaataactatagattccacagattcatagccaagacaaagagttccagataaatgtt

SEQ ID NO: 334800 - DNA, 201 bp, Homo sapiens
ggttgcttaatgaaatagaagtgaaatatgaaaaatgatacttatttggtgtaatctaaatggtttatgcagagtcttcttcaatggggaaggaaggtgcrgaaagaggaagatccattgcaaggaccataatgaaaatatttaagtattttagattaatagatacataccaataccttgtataaagtttttaaactcaca

SEQ ID NO: 334801 - DNA, 201 bp, Homo sapiens
tatgtcctgaatggtattgcctagattttcttctatggttctaatggttttaggtctaacatttaagtctttaatccatcttgaattaaattttgtataargtgtaaggaaggtatccagtttcagctttctacatatggctagccagttttcccagcaccatttattaaatagggaatcgtttccccatttcttgttttt

SEQ ID NO: 334802 - DNA, 201 bp, Homo sapiens
tacttatttctaaaatttaccaacttaatgctgcatttagtatcttcatgcaattgagctaatgtaggttttcagaagtgaatgtaaatagccaaagtatrtggatacttttgcgatttatagaaaatatttctaaattgctgttcaacatggttgaagtgatttagaagctcatgcacattgtaggagtatgcctgttgc

SEQ ID NO: 334803 - DNA, 201 bp, Homo sapiens
tcctcctccccctgccttggagttaggacatcttaggctacacgtattttcactgaactgtaaagaaaagcctggggtttagtggctaattagtaaagaarctaggaagatgggttgcttaatgaaatagaagtgaaatatgaaaaatgatacttatttggtgtaatctaaatggtttatgcagagtcttcttcaatgggg

SEQ ID NO: 334804 - DNA, 201 bp, Homo sapiens
cttttggtgttttagacatgaagtccttgcccatgcctatgtcctgaatggtattgcctagattttcttctatggttctaatggttttaggtctaacattkaagtctttaatccatcttgaattaaattttgtataaggtgtaaggaaggtatccagtttcagctttctacatatggctagccagttttcccagcaccatt

SEQ ID NO: 334805 - DNA, 201 bp, Homo sapiens
ttgtcaattttggcttttgttgccattgcttttggtgttttagacatgaagtccttgcccatgcctatgtcctgaatggtattgcctagattttcttctakggttctaatggttttaggtctaacatttaagtctttaatccatcttgaattaaattttgtataaggtgtaaggaaggtatccagtttcagctttctacat

SEQ ID NO: 334806 - DNA, 201 bp, Homo sapiens
tcttcaaagaaaaaatgatgtttatcaaataatctgcaaatgcttacctgaatgcaaactgaggaggaaagaaggaaataaatacagctttacccaaaggraaacttaataatttttttttaagcagagaagcattgtactacctaataccctttgttgaactcacacaaaatgagtacaagctgttcttggcattaaaaa

SEQ ID NO: 334807 - DNA, 201 bp, Homo sapiens
tctttaagttctttgtagattctagatattagccatttgtcagatgggtagattgtaaaaattttctcccattctataggttgcctgttcactctgatggyagtttcttttgctgtgcagaagctctttagtttaattagatcccatttgtcaattttggcttttgttgccattgcttttggtgttttagacatgaagtcc

SEQ ID NO: 334808 - DNA, 201 bp, Homo sapiens
ctttacccaaaggaaaacttaataatttttttttaagcagagaagcattgtactacctaataccctttgttgaactcacacaaaatgagtacaagctgttyttggcattaaaaattaggaaaaggagaaagtcattctgttatgacatcttttcccttcaaggagatcttacatttttgctctccaatattcctttcaatg

SEQ ID NO: 334809 - DNA, 201 bp, Homo sapiens
aggaaaacttaataatttttttttaagcagagaagcattgtactacctaataccctttgttgaactcacacaaaatgagtacaagctgttcttggcattamaaattaggaaaaggagaaagtcattctgttatgacatcttttcccttcaaggagatcttacatttttgctctccaatattcctttcaatgacattccctt

SEQ ID NO: 334810 - DNA, 201 bp, Homo sapiens
tcttgtagggcttgaatctttgtaatcttggaggagaaacttggattttattcccatcagagtagttgaaaaaagatgaaggaaaaactggaaaaaattakaccactttgggatctatcttgaaggaaagctaacaagacttgttagatcaaggataggaagtgaaggaatgggtagaatcaaggataagtcccaggtttt

SEQ ID NO: 334811 - DNA, 201 bp, Homo sapiens
tttatgctcctgttgtcttattattactgaaatagatttaatgtctccatgtgtgccaattagcatgtacagaattatcttttaaagtttatttggtactyaaaaatgactctatttcaaactttttttcaggttatgaaggaagagcaggaatggcttctattattttaaaaccaaatacatctttagatttggaaaaag

SEQ ID NO: 334812 - DNA, 201 bp, Homo sapiens
ctgacccctgtaaagatccacaggtggcatgataagcattaaatgatttttggaatcaattatggaaatacgagtttctagtttcttaacttaaaaaatawgcccttcatattttacattaaagcttaggatatgtatttctgctggaatatagttgcctttaaataaatgttttctttcttaatatttgttttagtgatg

SEQ ID NO: 334813 - DNA, 201 bp, Homo sapiens
aagtcttttcaaactatcttttgtgccttaaaatctttgttaaactgatggctgtcatctctgaaaccacggcccacccaaactcaggcttgagttaaagscaacattgaaaagattttcaggggcagctggaacctgtgctgtcttgaccttgtaggccactcattttaaatactaccaaatcctttcttaaaagaagtg

SEQ ID NO: 334814 - DNA, 201 bp, Homo sapiens
ttggttgtgctggccagatataatatagatacattcatggtgtgtgtaacaatagttttaatcagatggctgcaaaaatgtcgttctttcttgcaggagarcctggacttctcatttctcgagtgaatgcaaaaaatcccttctttggctatgctgggccttataagcacacaaaagacaaattgctttgtgatgttttta

SEQ ID NO: 334815 - DNA, 201 bp, Homo sapiens
tccccactccctccattgttccctctcttgttccttccctctcttgttccttccctctcttgttccttccctctctcgttccttccctctctcgttccctsgttccctccctctctcccaccctccctcactccctcccttcctttcttccttcgttccttcgttccttccttccataaatgtgttgtgaacacttcttat

SEQ ID NO: 334816 - DNA, 201 bp, Homo sapiens
attctacagaacgttggtgtttctggaggggacaaagtccaacaagggaatttggataaatcaaagtttctatcgttgcaggcagggagttgggactctgrtgcattcaggtcactgcagaaatgaccttgctaatgggaccctgcactttttggaacgtttcattaatgagcgctagtagttgtagctcaggtgacagtt

SEQ ID NO: 334817 - DNA, 201 bp, Homo sapiens
cacaaataatatcaggaatggaaaagggaacattgctgctgatactttagacattaagacagtaaaagaggatatgttgaataagttcatatcaataaacytgaaattattagatgaattggataaatttctagaaatgtacaacttactagtattgactcaagaattattttatcacactaaatgaaataaattcatact

SEQ ID NO: 334818 - DNA, 201 bp, Homo sapiens
ggatacttgtgtgctcatgaccaacataatctttccctagtctcagacctgcaaggaaagctaaattctacagaacgttggtgtttctggaggggacaaartccaacaagggaatttggataaatcaaagtttctatcgttgcaggcagggagttgggactctggtgcattcaggtcactgcagaaatgaccttgctaatg

SEQ ID NO: 334819 - DNA, 201 bp, Homo sapiens
cacataatatacaaacagtggagatcatttgctacttgtatttgtctaaaatgctgtaatttttagaatagaatatttagaatatgatcaatatccaccayaaatgaagatgagatattaaaagacattaaaatcttcagtggacatacattgttgtcaaaattaggttctgcagtcatttaagaacttttttgttagtac

SEQ ID NO: 334820 - DNA, 201 bp, Homo sapiens
acagtgtccctgaaaaaatggaaacattccaaagccggtttcctgagagattcatcttaaagtacataggactggctacttctcaagatagagcattcagrcttttctgttgaccgaattgttgtttaactaggaccaattaattttgcagttttacttgtgccagcttttactttgcttgccaataactaattgcattgt

SEQ ID NO: 334821 - DNA, 201 bp, Homo sapiens
tctctcttaatcttcttccctccactattgcataagttccattatgtattattatatccttagtgcctagaatggtgcctgacacatagtagatcctcaayaaaatttgttaatatttaaacaaaagagagtagcaaatagaacaagtccagttgctgggatacttgtgtgctcatgaccaacataatctttccctagtct

SEQ ID NO: 334822 - DNA, 201 bp, Homo sapiens
tatgtcactaaagcaccatcatacaatctgattgggtctagttctatattttcttaatactaatgttgtctttaatattgattggtgaggaatatgttggwactctagacatcagtgatcctctaggggagtcttgctgcagagtttgtcttatataagcaattccacctaacacagtcaacagttagccatatctaggga

SEQ ID NO: 334823 - DNA, 201 bp, Homo sapiens
aaaatgagtacaagctgttcttggcattaaaaattaggaaaaggagaaagtcattctgttatgacatcttttcccttcaaggagatcttacatttttgctstccaatattcctttcaatgacattcccttgaaatgaaggggcagtttctgctgcccagccagtacatcagtggattcaggtagagccagagaatgaacac

SEQ ID NO: 334824 - DNA, 201 bp, Homo sapiens
tctctacaaaagtaaaaaattaggtaggcgtggtgacacatgtctgtagtcccagttacttgggaggctgaggcaggaggattgcttgagcccaggggttsaagaccagcctatgcaacatagtgagacctcatctctacaaaagtaaaaaattagctaggtgtggtggtgcatgcctgtagtctcagctacttgggaagg

SEQ ID NO: 334825 - DNA, 201 bp, Homo sapiens
tatagtgtttcccattccatgtatttcatttctgtagtataggcaattagagatagactctggccttccctgtccttaaatgatttctagggggtaaatcrtatgttcagggaaggatacagactagtttatgctcctgttgtcttattattactgaaatagatttaatgtctccatgtgtgccaattagcatgtacagaa

SEQ ID NO: 334826 - DNA, 201 bp, Homo sapiens
ctaaaaatacaaaaattagccgggcgtggtggcgagcacctgtaatcccagctactcgggaggctgaggcaggagaattgcttaaccccgtgaggtggagkttgtgtgagccgagattgtgccactgcactccagcctgggtgacagagcaagactctgtctcaaaaaaaaaattaatttaatttttaattttaattttta

SEQ ID NO: 334827 - DNA, 201 bp, Homo sapiens
taggtgtggtggtgcatgcctgtagtctcagctacttgggaaggtgaggtgggaggattgcttgagcatgagaggttgaggctgcagtgagctgagattgycccactgtactccagcctgggtgacacagtgagaccctgtctcaaaaaaaaaaaaaaaaaaaaagaacctcaaactcaaagttaagcagatgtgtgtgag

SEQ ID NO: 334828 - DNA, 201 bp, Homo sapiens
acactctgtgggttgcacccactgtccagcaagtccaaatgagatgaatccggtacctcagttggaaatgcagaaatcacctgtcttctgcgtcgctcacrctaggagctatagactggtgctgttcctattcagctatcttggaacaataaaaacacaaaggtttacttctgagcactcattttaatcttgttttcatta

SEQ ID NO: 334829 - DNA, 201 bp, Homo sapiens
tttttttcttgtaaatttctttaagttctttgtagattctagatattagccatttgtcagatgggtagattgtaaaaattttctcccattctataggttgmctgttcactctgatggcagtttcttttgctgtgcagaagctctttagtttaattagatcccatttgtcaattttggcttttgttgccattgcttttggtg

SEQ ID NO: 334830 - DNA, 201 bp, Homo sapiens
taaatagaaatataatttttaaaaagtaaatcgattctgattgatagaaggcacaaataatatcaggaatggaaaagggaacattgctgctgatactttasacattaagacagtaaaagaggatatgttgaataagttcatatcaataaacttgaaattattagatgaattggataaatttctagaaatgtacaacttact

SEQ ID NO: 334831 - DNA, 201 bp, Homo sapiens
ttgtttgatttttttcttgtaaatttctttaagttctttgtagattctagatattagccatttgtcagatgggtagattgtaaaaattttctcccattctrtaggttgcctgttcactctgatggcagtttcttttgctgtgcagaagctctttagtttaattagatcccatttgtcaattttggcttttgttgccattgc

SEQ ID NO: 334832 - DNA, 201 bp, Homo sapiens
gtttcttcttcttatccttccatgcatccttttctttttttgactaagttctacccttcctcctccccctgccttggagttaggacatcttaggctacacrtattttcactgaactgtaaagaaaagcctggggtttagtggctaattagtaaagaagctaggaagatgggttgcttaatgaaatagaagtgaaatatgaa

SEQ ID NO: 334833 - DNA, 201 bp, Homo sapiens
ttggttttctgtccttgtgatagtttgctcagaatgatggtttccagcttcatccatgtccctacaaaggacatgaactcatccttttttatggctgcatrgtattccatggtgcatatgtgcctcattttcttaatcaagtctatcattgatggacatttgggttggctccaagtctttgctattgagaaaagtgccgca

SEQ ID NO: 334834 - DNA, 201 bp, Homo sapiens
atcagggatgactacatttgcagaagagatatgtttaaaggaaggtacctgaattcctttcttcatgtctgctcttattttatactgtctgcaagctaggrcttgcctagcaaggttgcgctcccacctgtgagccagaacgtgggctcttggcagactctaggagcctttctgtttcttcttcttatccttccatgcatc

SEQ ID NO: 334835 - DNA, 201 bp, Homo sapiens
tgaaatattctttttaactctctgaatctgtattgcactgatttggaggaaatattatagctttggagaatttgaaagaactgagaattgaaaacagaatrcctgattgctttttaattaatttaatttttaggggtgggcatggtggttcacgcctgtaatcccagcactttgggaggccaaggtgggcagatcacttga

SEQ ID NO: 334836 - DNA, 201 bp, Homo sapiens
tggtcacttctaaattttatcagctctgacaaaatggtgaataggaaagttatctgacttcattgtgacacgtctacctacctctaattgtactttatcarggatgactacatttgcagaagagatatgtttaaaggaaggtacctgaattcctttcttcatgtctgctcttattttatactgtctgcaagctaggacttg

SEQ ID NO: 334837 - DNA, 201 bp, Homo sapiens
tttttctttaaattttttaaagaaatgaaatattctttttaactctctgaatctgtattgcactgatttggaggaaatattatagctttggagaatttgaragaactgagaattgaaaacagaatacctgattgctttttaattaatttaatttttaggggtgggcatggtggttcacgcctgtaatcccagcactttggg

SEQ ID NO: 334838 - DNA, 201 bp, Homo sapiens
  misc_feature (1)...(201): n = A,T,C or G
atatactttgtataatattaagcttaaaaatggcagaacactaaattgtataaatacagtgagctgctaatttttaagaaaagagtaaaaggatatgtttncttgcacagccatatctggctgtgatgacagtgttggatcaggggagatggaggagggaagggagatcagggaagggggttcaaagtgaagttgactcaa

SEQ ID NO: 334839 - DNA, 201 bp, Homo sapiens
  misc_feature (1)...(201): n = A,T,C or G
tgagaccttataaaacaattttctaagttcaattttgaagaaaattacaggacccaggaaaatatactttgtataatattaagcttaaaaatggcagaacnctaaattgtataaatacagtgagctgctaatttttaagaaaagagtaaaaggatatgtttgcttgcacagccatatctggctgtgatgacagtgttggat

SEQ ID NO: 334840 - DNA, 201 bp, Homo sapiens
  misc_feature (1)...(201): n = A,T,C or G
gtgttaaaaattttgatattctctaaaagttcatgaataagggcaaagttaattaaaatatgataattaaatgagaccttataaaacaattttctaagttnaattttgaagaaaattacaggacccaggaaaatatactttgtataatattaagcttaaaaatggcagaacactaaattgtataaatacagtgagctgcta

SEQ ID NO: 334841 - DNA, 201 bp, Homo sapiens
cccagcttttcccggctcgaattcagcctccaactcaagctcgcgggaaagactacctgagaggagaaaagcttctgtccctggaccttcttctgagggtrgtgaggtttgtttagggtcgcagaagcagggaggactgactcagccctcacagagaagaggtctggaaagtcctggggaactcgcagggcacgggccgct

SEQ ID NO: 334842 - DNA, 201 bp, Homo sapiens; identical to SEQ ID NO: 70420

SEQ ID NO: 334843 - DNA, 201 bp, Homo sapiens; identical to SEQ ID NO: 70421

SEQ ID NO: 334844 - DNA, 201 bp, Homo sapiens
gtcgcggttgggaggcgagggcgcagcgctggggttgtagattccaagacccctgagggtggctgtgttggtttctcgcaggagtcggaggctccctgctytccagccgcccagtgacccaagcttaatcttcagcaccacttggggcgaccttttcggtgcaaacctacgattctgtttctcaggattcctccccatccc

SEQ ID NO: 334845 - DNA, 201 bp, Homo sapiens
gaaaaccaaaacctgaaacatgttactggtaactttcaagaaatatctcaataatctgtaaaataacaacagtaatttatatcacgtattttatgtaaatkatgtcatttatgtttaactcttttgtaagtgtcatgtttagattcttagttaccatttaaaacaagattttagagaattgttttaaagtattttgtgtat

SEQ ID NO: 334846 - DNA, 201 bp, Homo sapiens
cttttctcagtgtttttctttaaattttttaaagaaatgaaatattctttttaactctctgaatctgtattgcactgatttggaggaaatattatagcttyggagaatttgaaagaactgagaattgaaaacagaatacctgattgctttttaattaatttaatttttaggggtgggcatggtggttcacgcctgtaatcc

SEQ ID NO: 334847 - DNA, 201 bp, Homo sapiens
taaaaataaaaagaaattaaacacaatatattttcttatcaaattgtcattttaaattaaatgaaatgtcatatttctaagaattcttcattgaagaggtmtccatctccctctcctcaataagatataaatttttagccaacaatttggtaacatatccataaaaatatttacaactattggcttcttccagggatctgt

SEQ ID NO: 334848 - DNA, 201 bp, Homo sapiens
tccatattggccaggctggtctcatactcctgacctcaggtcatccgcctgccttggcctcccaaagtgctgaggtgtgagccaccatgcccagcctcaaytgaatttttaaaaatcaaaacagtacttttacacagttataaaaatgaaatagtactcttaggataagaaatatctctgcattatcagtacttgatctct

SEQ ID NO: 334849 - DNA, 201 bp, Homo sapiens
aactatccctctttatctccagaaatgttgctttacttaaggtctactttgtctgatattagtatagttatactagcttcctcttgggtgatgattgtatrgcttacctttttccatccaactactttcaattttgggcttatgtaatatttaagatgtatttttcataaacaggatatagttgagttttatatttttatg

SEQ ID NO: 334850 - DNA, 201 bp, Homo sapiens
aatttaccaacttaatgctgcatttagtatcttcatgcaattgagctaatgtaggttttcagaagtgaatgtaaatagccaaagtatatggatacttttgygatttatagaaaatatttctaaattgctgttcaacatggttgaagtgatttagaagctcatgcacattgtaggagtatgcctgttgcacagtgtctgtca

SEQ ID NO: 334851 - DNA, 201 bp, Homo sapiens
ttgactatttctttacctcctgcttttagcctaattggtattttagtgagctctctttatgacctgattggccgggtgtgagctgagttacaagccccatrtttaaaggtaggtgcagtcaccttccccagctaggcttaggaattcttagtcggcctaggaaatccagctagtcctgtctctcaccttctttcagaacat

SEQ ID NO: 334852 - DNA, 201 bp, Homo sapiens
cggctcaaatgcctgggtttatatctggatctttgtccctccccctgtgctctcaggtgatagatgattgactatttctttacctcctgcttttagcctarttggtattttagtgagctctctttatgacctgattggccgggtgtgagctgagttacaagccccatgtttaaaggtaggtgcagtcaccttccccagcta

SEQ ID NO: 334853 - DNA, 201 bp, Homo sapiens
tcatttgctacttgtatttgtctaaaatgctgtaatttttagaatagaatatttagaatatgatcaatatccaccataaatgaagatgagatattaaaagmcattaaaatcttcagtggacatacattgttgtcaaaattaggttctgcagtcatttaagaacttttttgttagtactatcttgctaattcaaccttacta

SEQ ID NO: 334854 - DNA, 201 bp, Homo sapiens
catgatattgattcttcctatccatgggcatggaatgttcttccatttgtttgtgtcctctttttatttcgttgagcagtggtttgtagttctccttgaaraggtccttcacatcccttgtaagttggattcctaggtattttattctctttgtagcaattgtgaatgggagatcactcatgatttggctctctgtttgtc

SEQ ID NO: 334855 - DNA, 201 bp, Homo sapiens
gagcaaatttacactgcaaaagtaagagccctgaagaaattgctgaggccatctttgcgaacagtctgccatagacactcaataaattagttggtagagcktgtgactcagtagattccattcataaacatgcaagattatgtgtcagtttctagacctcacataatatacaaacagtggagatcatttgctacttgtatt

SEQ ID NO: 334856 - DNA, 201 bp, Homo sapiens
tattggctgggcttctctctccttgtagtcactcaccctcaaacaaactaccccagattcctcaaatgtagtagaaatgttccaagggagtgagtatggamgctgcataaatcttaaggcctagtcttgaaagacacataggttattttaccttcattccattgatcaaagtaagtcatgggccagcctagattcaagatt

SEQ ID NO: 334857 - DNA, 201 bp, Homo sapiens
atttattttaaaaaaactacacaattttatggcatattcagtgttttcctgaggtgaaaagaacagttttctgaggatttggccatgtggtcggagctggstattggctgggcttctctctccttgtagtcactcaccctcaaacaaactaccccagattcctcaaatgtagtagaaatgttccaagggagtgagtatgga

SEQ ID NO: 334858 - DNA, 201 bp, Homo sapiens
ctctccccacaccactcctttcctgcttcagtaaaagaaaatctgttcttctgccccagtttatgcctatttttctgccccagttctccgacatcctgttygcatttagtgttacttcttactggctctgcaatagccatttgacttggtgtctatattgtttcagtgtataatattggagtgtctgtgaagaaagcaaac

SEQ ID NO: 334859 - DNA, 201 bp, Homo sapiens
tcatggtgtgtgtaacaatagttttaatcagatggctgcaaaaatgtcgttctttcttgcaggagaacctggacttctcatttctcgagtgaatgcaaaamatcccttctttggctatgctgggccttataagcacacaaaagacaaattgctttgtgatgtttttaagaagggagatgtttaccttaatactggagactt

SEQ ID NO: 334860 - DNA, 201 bp, Homo sapiens
gcaaatagaacaagtccagttgctgggatacttgtgtgctcatgaccaacataatctttccctagtctcagacctgcaaggaaagctaaattctacagaamgttggtgtttctggaggggacaaagtccaacaagggaatttggataaatcaaagtttctatcgttgcaggcagggagttgggactctggtgcattcaggt

SEQ ID NO: 334861 - DNA, 201 bp, Homo sapiens
tttcttcctagagcttataattccattacatattttatatataacctctttctttatctctcttaatcttcttccctccactattgcataagttccattaygtattattatatccttagtgcctagaatggtgcctgacacatagtagatcctcaataaaatttgttaatatttaaacaaaagagagtagcaaatagaaca

SEQ ID NO: 334862 - DNA, 201 bp, Homo sapiens
cagaagaaactcaaaaggaagagccccacagaaaacaccacctgaatgtttgaagagaaggagggtatgctgggccatccattgactagatcttgtagggyttgaatctttgtaatcttggaggagaaacttggattttattcccatcagagtagttgaaaaaagatgaaggaaaaactggaaaaaattagaccactttgg

SEQ ID NO: 334863 - DNA, 201 bp, Homo sapiens
tatttttctcttcaaggagaccttgcctcaggtaagggaggtagtcttaatctaaagaaccccaataatacacttagaatgccacaacctcacatattttmtcttctagttttcattgtactttttggtaatgtgatatctggactaggttaatttagggaattaatgccctccagtaagattaaggtcaccttcagttga

SEQ ID NO: 334864 - DNA, 201 bp, Homo sapiens
tttcattttgagcttggagttcaccaaggagaaacctccagtcgagtttctgacccacctccctgtggcagaagccatccttactcattttttgtctggartgcttcaaataactatagattccacagattcatagccaagacaaagagttccagataaatgttttacattttttaaatatttttctcttcaaggagacct

SEQ ID NO: 334865 - DNA, 201 bp, Homo sapiens
agtgctcaataggtataattgtgatgataatgatggtgatgatgatgatatgatggtgttggtgatatgatgatatgatggtgatgatatgatgatgatgrtgatgatgatgctatcagactgctggggcagagaagatttgctttggccagtgacctatgtgcccttgaaagccagaatgcccaggagtgggagaaatgg

SEQ ID NO: 334866 - DNA, 201 bp, Homo sapiens
tatcattactatgtgttagcagtaagttaatgacagagttaggatttgagcccatgtttacctgatatcatgatgtgtatttctcacattcagacttgccmcttctgtaaggaggcatatcctttctttacattatttttgctcctgacagtattcaagcatcattccctttcagtaaatacatgttcaacagatattata

SEQ ID NO: 334867 - DNA, 201 bp, Homo sapiens; identical to SEQ ID NO: 70429

SEQ ID NO: 334868 - DNA, 201 bp, Homo sapiens
tcatcagttaccctggatctcactgaacttagttgtaaaatggtgatgataccatctgattcacagtataattctgaggattaaatgacacatcttttgtraagtggctagctgagtgcctggtatgtactaagtagatcttattgtatttaaatgattgctattatgattatagagtaatcctggggcttttaataaggg

SEQ ID NO: 334869 - DNA, 201 bp, Homo sapiens
ttcatgttatcaaagtaatgatttttttcttcctgaaaaatgctttcttccttacctgacatttacccaaaaaaaaagcctttagtgatctgcaatttagratgagctgttcccagatatggaaaaacacaaactgtattattcttgaccagtgttactttcattaggatttggacacagttctgcaatagacttatacac

SEQ ID NO: 334870 - DNA, 201 bp, Homo sapiens
catgtatgaggaaagcttttggttgataatctctctcctcaggtgtgtttccttagtggcctcacctgttctctgaaagtagcactatcctatagcattgyttttgacatttccagagcaccctactcaagccatatttagaactgcttttgaagagatctttaagaatcccataatgcgaactttggtgcttttttgtca

SEQ ID NO: 334871 - DNA, 201 bp, Homo sapiens
aataagaaaccactaatcgacatatgaaagaccctgcatctaactactgctgtatatctattttattcaagcacttttgaaacgtttacaaaagttactgkgccagttaggtaattccaacaaatttcaaaggattgaatatatataaattatgctctctgaaaacagtttaattgttggtagaaataatttttttaaaag

SEQ ID NO: 334872 - DNA, 201 bp, Homo sapiens
gtaaaattcactgaatgaaaaatcatggccaacttgaagataaaccataacttagaaatgaaagaatcaccttcagttaaaatgcctgatggtgaacattrgatcaattcacacgtagaagattgaacaactctgaattgtttatacatggaataaaacctgacaatgtaaaaataattataacactaacaaaaatgggag

SEQ ID NO: 334873 - DNA, 201 bp, Homo sapiens
tttctgtataataaactgccatacctcaaagaacacctggaagcaacaaagtatttgcttttctaatccatggtgatttttttcagtatctggaagtaatyggcagacatgtgtttttcatgccacagcagctcactttttcagtctagttgcccattcaaagctggtgtaaatcacagtaatgctctaaaccaaaagaag

SEQ ID NO: 334874 - DNA, 201 bp, Homo sapiens
gaataacaatatatttgctttgctgcctctttcattggctctaatcctaaaataggataatattaatttctacatcataggatgttttgatgattacattraatagaactcttaaacacttagcacagtgtccagcatatagttggtgcccaatcaatattaattgctctcatttatattttaattcaaataatgagttgt

SEQ ID NO: 334875 - DNA, 201 bp, Homo sapiens
gaggattacttgaggccaagtgtttgagaccagcctaggcaacacagtgagacctcatatgtacaaaaaaattaaaaaaaatagccagatgtggtggcatrcacctgtagtaccagctactcaggaggctgaggcagttgaatcattctatcccagaagttcggggttatagtgagctgattgcacctctgcactccagcc

SEQ ID NO: 334876 - DNA, 201 bp, Homo sapiens
ccaccatgttgtctcactcctcaagtctacttgtctttacatttttacctctggaacaacaggtatgatccaattcttttgaaggctaaaatgaatgcgasaaatttgcaaagcaacagtgttgggcaaatttctaccatgtgtagtgaccaaccatctgagaatgcatgcttgcaagaagatgtaaggatctcagaggct

SEQ ID NO: 334877 - DNA, 201 bp, Homo sapiens
aaccattttcataagctgttttattgccttaaaagtaggtgtcttttagggatgaggaaagttagacaacttcaaaataagagaacagtccccacaagacsactcccatttctgacacaatttcaggagtcccaaagaccactctcaggtttgataatttgctaaaaggactcacaaaactcaacttattacagctaaagg

SEQ ID NO: 334878 - DNA, 201 bp, Homo sapiens
aacagtccccacaagacgactcccatttctgacacaatttcaggagtcccaaagaccactctcaggtttgataatttgctaaaaggactcacaaaactcarcttattacagctaaaggatctagattataatcagcccagggatgtcatatgtaaggcagaatccaggagggtaccaagggtgaagcttccagttatgctg

SEQ ID NO: 334879 - DNA, 201 bp, Homo sapiens
gggaatttcttattctagatgagagattttgaaattaaagtaatgagtcagttcagagatttgcacttacaagttcaaaacctgagaaagagtcattacarcaaaatctggaacaaacattaaaaagaaagtctagatcctttgcttatccagtttttcatgtttctaacttgtcactcctcctatcatccttggtgattt

SEQ ID NO: 334880 - DNA, 201 bp, Homo sapiens
ctgagtagctgggattacaggtgcctgccaccacacccagctaatttttgtatttttagtagagacagggtttcaccatgttggccaggctcttctttaamtcctgacctcaggtgatccacttgcttcagcctcctaaggtgctgggattacaggcatgagccaccgcgcctggccaagattcattttattaagaaagac

SEQ ID NO: 334881 - DNA, 201 bp, Homo sapiens
agatcctttgcttatccagtttttcatgtttctaacttgtcactcctcctatcatccttggtgatttttcacattttgccaaagcaatctatatacagcarcatgatgtgtgtgtgttaagtagagctaggcattttccctggattcttatattttacttagatttgttatagaaataaaaattaataagacatcttaagg

SEQ ID NO: 334882 - DNA, 201 bp, Homo sapiens
aatagcaagccagatgcaacatgccttcttgtgccatttcagtaataattattcattggcaacaggagatgtgttagaaataacatcaaatgaagtgttcractttttcttttttgtataattttggttataataatataatgtataaattgtgttattatgttataataatattcaatctgctcacctcaaaaatgtggg

SEQ ID NO: 334883 - DNA, 201 bp, Homo sapiens
agactttttcattttgagcttggagttcaccaaggagaaacctccagtcgagtttctgacccacctccctgtggcagaagccatccttactcattttttgyctggaatgcttcaaataactatagattccacagattcatagccaagacaaagagttccagataaatgttttacattttttaaatatttttctcttcaagg

SEQ ID NO: 334884 - DNA, 201 bp, Homo sapiens
acaacctagttcttgaactattccttgaggctgcatcaacatctgtttgtgaattggcaaagagagctttatgattggagggagtcactgtaaagacacayagagcacctgaggcaggtgaggtcagtggaaaaggtactcaaagtagatggatagagaaaaggtgagagagaaaaggaaaggggtgggggaacaagggag

SEQ ID NO: 334885 - DNA, 201 bp, Homo sapiens
attaattacccagagcacagctgacactaggctggaggcatttaaataagactttttcattttgagcttggagttcaccaaggagaaacctccagtcgagyttctgacccacctccctgtggcagaagccatccttactcattttttgtctggaatgcttcaaataactatagattccacagattcatagccaagacaaag

SEQ ID NO: 334886 - DNA, 201 bp, Homo sapiens
atctgaaaaacagataagcagagacagttgcaatagcctgaagtttatctttattggttcatttgtttttttgccctcagaagttattttctttttcctgstttcgtttatctctccaaatgcttcttctttaactttatgattttctaaacattcttgagactataaagaagttactttctttaatcaaatttatttaat

SEQ ID NO: 334887 - DNA, 201 bp, Homo sapiens
tttaatctttgatgataaataatactattgcatctatctcaatcatcttatcttttcccacttatttgttctatatttgttcatttctcttctcctgctttccccccattcatctttccttattattattttatctcacttcattttattacattcatgttagtttaccattttctaactgagcttgtttgattgctgagt

SEQ ID NO: 334888 - DNA, 201 bp, Homo sapiens
ctgaccactgacactgattataatttattttctattttttcttttgaataagtgattatattaggatatctttttgttttactttaaattaaaaaaaaaamcccacattgctttgatttgcacttgtctccttaactgaagaagtcatttccacattcgtttgatcaactgccaccatctgaaaaacagataagcagagac

SEQ ID NO: 334889 - DNA, 201 bp, Homo sapiens
ataatttagctgacttacaaagatgcgtgcaataccccaagataaaataagacaagtgaaagaaaataaacagagagctatccaagaatgtactaatgtgytttgtactgtagcaggataggactgacccaaagactgtgtttagactaaaattaaaatttctataaacataacacgcatcagattatgaaattagattca

SEQ ID NO: 334890 - DNA, 201 bp, Homo sapiens
cacactctgtgggttgcacccactgtccagcaagtccaaatgagatgaatccggtacctcagttggaaatgcagaaatcacctgtcttctgcgtcgctcaygctaggagctatagactggtgctgttcctattcagctatcttggaacaataaaaacacaaaggtttacttctgagcactcattttaatcttgttttcatt

SEQ ID NO: 334891 - DNA, 201 bp, Homo sapiens
tggaagtcagaagattatagagcaatgccttcaaagtcctgcgtaaaaatgactacttacctagaattctttacaagcagccattcaagtgtataggtggmaaaaaaagacattttcaggcacataaggactgacaaaaacttacctcccaaatgctctttatcagatagctactgaaaccaaatgtgtgctaccactgta

SEQ ID NO: 334892 - DNA, 201 bp, Homo sapiens
agaagaatggggtgtgaaaattattttgttttcaaattcaaaaatatctagaactataagacctgagttgttagactgaaaaagcctaaaaatttcccagygaaatggatagatgagactggtcccagtaaaagtcatcatgatattacagactactgaaaacaaatagaagattccaaaaatgaaaaaaaatagaaatac

SEQ ID NO: 334893 - DNA, 201 bp, Homo sapiens
gggagaaaatgaatctaaataaaaggcagctgaaaaaaatgaatgcacattttatacataggtgaaataaagctcggaaaaaaaaagagaaaatgaatctmaatgaaaggcagctggaaaaaaaaatgaatgcacatcaaaatagtaagttccccaaaacgaccaggaaatgtttagaaaaacaattactcacaggcttga

SEQ ID NO: 334894 - DNA, 201 bp, Homo sapiens
ggcatgaacccaggaggtggagcttgcagtgagcagagattgcgccactgtactccagcctgggcgacagagcgagactctgtctcaaaaaaaaaaaaaaraaaaaaaaggagcaccttgtggtctgccagcactcttctagatactatgcttgtaaattgtggtaaatattatcacctttttttttttttaagttgagaa

SEQ ID NO: 334895 - DNA, 201 bp, Homo sapiens
aaaaaattattattgttaatattctgaaagatggggacaaaaaagtgtcaataatataaaaataacatactacaaaaagaggaatattcagagaacataaktgttggaaaatctctcaaaaagtaaagcaaaaggtaagagaaggaaaacaggataggcaacattaggaaaccagtgattctgtccaggagggctgatctt

SEQ ID NO: 334896 - DNA, 201 bp, Homo sapiens
gagacgtaattctggaaaagatgaacttctgaaaataccaggaagaacagaggtttaaaaagtaggggatataaaagaaagtctccctccctataaatatrtatatatgtatatagatagatatacatatatgtatatgttctctttaatatatataacttcttttaatacttgactgttttaatctttgagattcttgtc

SEQ ID NO: 334897 - DNA, 201 bp, Homo sapiens
catgttttatgttcattctgcctttgaatttttttccctagtgcctgtttttgtcttttcttataggtgccacttgtgtgttaaagaagaaattttcagcragccagttttggagtgactgcaagaagtatgatgtgactgtgtttcagtatattggagaactttgtcgctacctttgcaaacaatctaaggtaggcgtaa

SEQ ID NO: 334898 - DNA, 201 bp, Homo sapiens
atcgctgcgcttctcagtcatcatcatcccagcttttcccggctcgaattcagcctccaactcaagctcgcgggaaagactacctgagaggagaaaagctkctgtccctggaccttcttctgagggtggtgaggtttgtttagggtcgcagaagcagggaggactgactcagccctcacagagaagaggtctggaaagtcc

SEQ ID NO: 334899 - DNA, 201 bp, Homo sapiens
atttatttaatttgtcttcagtaaaagttgttttaataactccatattccaattatttatttcaattagcatagtctactacagtagactaaattgcttgyacaagtaactaaatgcacaagtaactaaatgcttgtttctatttgtttgatttttttttttgcagcttctttccacttttgacttaataaagtatgactt

SEQ ID NO: 334900 - DNA, 201 bp, Homo sapiens
caaaattcatggatgtttgctccttatataaaatgatacagtatttgcctatgaggtgtgcacatcctcctgtatactttaaacaggttgcttataatacrtaatacaatgtaaatgctacataaatagggtcgtatggtattttttatttatattttttattgttttattattattttatcttttttaccaaatattttc

SEQ ID NO: 334901 - DNA, 201 bp, Homo sapiens
tagaaatggtgcaactttagacagattactcaacctaagtcttattttcttcatatgtaaagtagaagtgacaatgtttattaagtgaggttattgtggaygattaaatgggatgtatatatattcctgggggacctggtatgtggcttgttactttcctctcctcagcttctccctctcactcccctcccttctctacca

SEQ ID NO: 334902 - DNA, 201 bp, Homo sapiens
gtgaaaacctggcctcaggagaccaacctcgcacagcggccgtgggggagatctgtgaggtggggcctgagcataggagctggcagccctggaatttagcrggagacagagggctcctggagggggagagctataggaggtgggtggtgggggctccttggggcccagaagaggatggaggtggagatgtgagggaggttt

SEQ ID NO: 334903 - DNA, 201 bp, Homo sapiens
ccctttgggcaacagggagagaattgggggagctggggccaggcaagtgtttgggagtgggcttcccatcccaggaaaggatcccatcaggggctgctgakctccgggcaggggttcacacccaccatcttcccaccagggcacctgtcaacgcggggaccagtgctgctactcccacagccccccgacacccagggtttc

SEQ ID NO: 334904 - DNA, 201 bp, Homo sapiens
acatgagtctcccctttgggcaacagggagagaattgggggagctggggccaggcaagtgtttgggagtgggcttcccatcccaggaaaggatcccatcakgggctgctgagctccgggcaggggttcacacccaccatcttcccaccagggcacctgtcaacgcggggaccagtgctgctactcccacagccccccgaca

SEQ ID NO: 334905 - DNA, 201 bp, Homo sapiens
aagatgtggcccagcgggctgcccggctcaagacatttccttgcaagaggtttaaggaggtgaggtccctcctccctttcctccactgcaggacacatgaktctcccctttgggcaacagggagagaattgggggagctggggccaggcaagtgtttgggagtgggcttcccatcccaggaaaggatcccatcaggggctg

SEQ ID NO: 334906 - DNA, 201 bp, Homo sapiens
gctatggaggagagacgcaggctgcttcagaacaagcggaaggagccgccggaagatgtggcccagcgggctgcccggctcaagacatttccttgcaagakgtttaaggaggtgaggtccctcctccctttcctccactgcaggacacatgagtctcccctttgggcaacagggagagaattgggggagctggggccaggc

SEQ ID NO: 334907 - DNA, 201 bp, Homo sapiens
atggctttcattttgatcccggccgcccaccgtacgtttcctcattgactggccaaccactatcatgtgattcgcccacccactgtgccaacatggcggcrcccaggtcctaattcgggaaacgtgcaccttgactaattcggttttctgtggctacgagagcaggtgaggacgggctaggcagcgcggggagggattcgg

SEQ ID NO: 334908 - DNA, 201 bp, Homo sapiens
taggcagcgcggggagggattcggactcggggcgggcctgcacgagggcatcggctccacagggaccagtcatccccaaaacgaggggatatcagcttacygaggccgcaggttttcctagtccctacctcatagatatgtaggacatccccgggcccggaatgcggctctctgaccctctctgtgccctcccccgccccc

SEQ ID NO: 334909 - DNA, 201 bp, Homo sapiens
gagggcagggctgacctcatgcaggtgggagggcaggtggtggtcacctggaggtcccttgggcctagtattccctaacctctgacctctgcccccaggaraaggaatgtccggtgaaacgggagcgactatcagagactagcccagcgttccgcattctcagtgtggagcccaggtaggggcaagcacatgcaggagcgg

SEQ ID NO: 334910 - DNA, 201 bp, Homo sapiens
cttccaccttcagcgtctcggcaaagcgtcaggagtccccagcggccggtgagcagggaggaaggagaagaaggggagtcccagggttttcctccctcccyaccaaccacccctctctgtttagggccaagttctctgcagcctgtggtccccctgtgacccccgagtgtgaacactgtgggcaacgacaccaggtagggc

SEQ ID NO: 334911 - DNA, 201 bp, Homo sapiens
aggccaagacaggcagatcacctgaggtcaggagttcaagaccagcctggccaacatgacgaaaccctgtctctactaaaaatacaaaaaaaaaaaaaaaattagccaggtgtggtggcacatgcctgtagtcccagctactcgggaggctgaggcaggtgaatcgcttgaacctgaggcagagtttgtagtgagccgaga

SEQ ID NO: 334912 - DNA, 201 bp, Homo sapiens
gggcagagcttgcagtgagccaagatcgcaccactgcactccagcctgggtgacagagtaagactccgtctcaaataaataaataaataaataaataaaaataaaaataactaaatctgctgactgggctgggcgtagtggctcacacctgtaatcccagcactttgggaggccaagacaggcagatcacctgaggtcagg

SEQ ID NO: 334913 - DNA, 201 bp, Homo sapiens
gtcttttataacccggtgcaggaattcaatcgggacctgacgtgagcaggggtcagacgttagcctggcatcggctagtgggtcagtgtggatggcggggkcggggtatgagctagtcctctgtctcccaccagatgtgctgtgatcaccgagtttgctcgcattcagcttggggccaaaggaatccagagtgagtggagg

SEQ ID NO: 334914 - DNA, 201 bp, Homo sapiens
ggggcagagcttgcagtgagccaagatcgcaccactgcactccagcctgggtgacagagtaagactccgtctcaaataaataaataaataaataaataaaaataaaaataactaaatctgctgactgggctgggcgtagtggctcacacctgtaatcccagcactttgggaggccaagacaggcagatcacctgaggtcag

SEQ ID NO: 334915 - DNA, 201 bp, Homo sapiens
ttattgtgagctttgatagtgccactgcactccagcgtggtccacagagggctcttgcccttgttcctaaagggtcctgtcatgaagtcagcccgggaaaygctgtctcctttcccatatcagagtctcacactagcaggaaagccctagccgttttgcttttttttcttttttgagatggagtttcactcttgttgccca

SEQ ID NO: 334916 - DNA, 201 bp, Homo sapiens
cctggtgcggctgctgcgcgaccaagccgcagctctggccgcaggccccacccctcccgggcctcgcaaacggccggtgcaccgggtcccagacgacggcscccgccggggatccggacgcagggccgaggcggcagcgcgctcgcagcccgcgcccccggccgaccccgacggcagccccggtggagcggcccggcccat

SEQ ID NO: 334917 - DNA, 201 bp, Homo sapiens
gggggcagagcttgcagtgagccaagatcgcaccactgcactccagcctgggtgacagagtaagactccgtctcaaataaataaataaataaataaataaaaataaaaataactaaatctgctgactgggctgggcgtagtggctcacacctgtaatcccagcactttgggaggccaagacaggcagatcacctgaggtca

SEQ ID NO: 334918 - DNA, 201 bp, Homo sapiens
ccggggggcagagcttgcagtgagccaagatcgcaccactgcactccagcctgggtgacagagtaagactccgtctcaaataaataaataaataaataaataaaaataaaaataactaaatctgctgactgggctgggcgtagtggctcacacctgtaatcccagcactttgggaggccaagacaggcagatcacctgagg

SEQ ID NO: 334919 - DNA, 201 bp, Homo sapiens
ggtgttccagtgtgtgggctgcggggccttccaccttcagcgtctcggcaaagcgtcaggagtccccagcggccggtgagcagggaggaaggagaagaagsggagtcccagggttttcctccctccccaccaaccacccctctctgtttagggccaagttctctgcagcctgtggtccccctgtgacccccgagtgtgaac

SEQ ID NO: 334920 - DNA, 201 bp, Homo sapiens
gataatcatggtcatttggggacagtggctttggccaggacaggagtgcatggccacattattttagttttctgtattaaaacaacttttcaaaaaaaaawtttttttttaaaggtcgtttttccaggactgggtttaaatcctagctttgctggtagctctgggcaagtgacttcacctttctggtcctcgggttttttt

SEQ ID NO: 334921 - DNA, 201 bp, Homo sapiens
ccgaggtgggcggtgttcaagaggtcaggtgttcaagagcaccctggccaacatggtgaaaccccgtctctactaaaaatacaaaaaaaaaaaaaaaaaaattagctgggcgtggtggtgggtgcttgtaatcccagctattcgggaggctgaggcaggagaatcacttgaacccgggaggtggaggttgcggtgagccga

SEQ ID NO: 334922 - DNA, 201 bp, Homo sapiens
aaaatcgcctttcccagtgccaacgaggtcttttataacccggtgcaggaattcaatcgggacctgacgtgagcaggggtcagacgttagcctggcatcgrctagtgggtcagtgtggatggcgggggcggggtatgagctagtcctctgtctcccaccagatgtgctgtgatcaccgagtttgctcgcattcagcttggg

SEQ ID NO: 334923 - DNA, 201 bp, Homo sapiens
acctactcctcccctcgcacaggggcaaggcggccgacgaagctatggaggagagacgcaggctgcttcagaacaagcggaaggagccgccggaagatgtkgcccagcgggctgcccggctcaagacatttccttgcaagaggtttaaggaggtgaggtccctcctccctttcctccactgcaggacacatgagtctcccc

SEQ ID NO: 334924 - DNA, 201 bp, Homo sapiens
gcataaaactttagttcctgcttctttggaggaaagcaatggaggtgttgatcgtggggtcctgggctccaccccattcctgggcggggggggggggggggttggtagtcctgctgctgggtgcctgcctgcctgggggctcttgcagttgcccagatacacagacgggccaaagcatgagtatcacaagtgggtggcagt

SEQ ID NO: 334925 - DNA, 201 bp, Homo sapiens
tcctcccctcgcacaggggcaaggcggccgacgaagctatggaggagagacgcaggctgcttcagaacaagcggaaggagccgccggaagatgtggcccakcgggctgcccggctcaagacatttccttgcaagaggtttaaggaggtgaggtccctcctccctttcctccactgcaggacacatgagtctcccctttggg

SEQ ID NO: 334926 - DNA, 201 bp, Homo sapiens
cctgatgggatccctctctccacacaggctctggcaatgacactgatgaaatctagggtcagacaatgttgggccaaccccaaactctctccaaacccccrggcctccaggcagactccttcaatagaccctgtaaggctgaccaaaactcacatctcctcaaagcccagctcaagaacctgctggggctccctgctgccc

SEQ ID NO: 334927 - DNA, 201 bp, Homo sapiens; identical to SEQ ID NO: 70450

SEQ ID NO: 334928 - DNA, 201 bp, Homo sapiens
accccatctctttaaaaaaaccaaaaatgtttattagatgaatgagagaatcctgacatgagcagacacctcgtgctgtgttgtggaggcggacaggccckgtggggagtggggacacactcgtgtggcagcttcccccagccccaacgccccacccctgcttccctaggctgcaggccaacttcaccatccgggaagatg

SEQ ID NO: 334929 - DNA, 201 bp, Homo sapiens
gttctctgcagcctgtggtccccctgtgacccccgagtgtgaacactgtgggcaacgacaccaggtagggctaggccaggggaggcaaaggagcaagaggktcttgaaggtcatagtccctgctcacctgtccccggtgcgcccccagcttggtggccccatgtgggcagagcccatccatgacctggattttgtgggccg

SEQ ID NO: 334930 - DNA, 201 bp, Homo sapiens
ctccacccgcctttctctcccaagtgagctaagatctcactcctctggaatgggggccacaggccacagcaaacagggatggccagccccgcagtctcaawtcgaggttcccagtggggcttaagggctcctctattggggttccctcaaggctggcactttttcaacctgcaagtctgaactcagattgcctgagctaag

SEQ ID NO: 334931 - DNA, 201 bp, Homo sapiens
gcaaatggatcacttgaggtccggagtttgagaccagcctggacaacatgatgaaacaccctctctaataaaaatacaaaaattagctgggcatggtggcragcacctgtagtcccagctactcaggagtctgaggcaggagtatcacttgaactcaggaggcagaagttgcagtgagctgagatcacgccactgcactcc

SEQ ID NO: 334932 - DNA, 201 bp, Homo sapiens
gcgtgaacccgggaagcagagtttgcagtgagctgaaatcgtgtcactgcactccaacctgggcaacagagcaagactccatctcaaaaaaaaaaaaaaaactatcaggcctagctgggtggcacatgcctgtaatcctagctgaggcggtagggtcccagaagaagaagaagaagaaaaagaagaagatatatatatata

SEQ ID NO: 334933 - DNA, 201 bp, Homo sapiens
ctatctcagctgtccctcccactttccaggtgctgccagacacatgacaactgctatgaccaggccaagaagctggacagctgtaaatttctgctggacamcccgtacacccacacctattcatactcgtgctctggctcggcaatcacctgtagcagtaggtttatcccttccttgacctatgaattctagttggttctc

SEQ ID NO: 334934 - DNA, 201 bp, Homo sapiens
ttatcacatttattatttattgtttttctctcccactaggttgtaagctccatgaggttagagattattattattattattattattattattattattatatctgttcactgctgtatctctagctcctaggacagagcctggcacatagtaagtgctcaataaatattcactggataaacagtgcagatagtttaaaac

SEQ ID NO: 334935 - DNA, 201 bp, Homo sapiens
tatctcagctgtccctcccactttccaggtgctgccagacacatgacaactgctatgaccaggccaagaagctggacagctgtaaatttctgctggacaamccgtacacccacacctattcatactcgtgctctggctcggcaatcacctgtagcagtaggtttatcccttccttgacctatgaattctagttggttctca

SEQ ID NO: 334936 - DNA, 201 bp, Homo sapiens
ggcagcgtgggacccgagggagcaggaaggcagtgtgtccccggggtgctggcagaccgatttgaactctggctatgtcttcttgcagtggccgccgccgmcagcggcatcagccctcgggccgtgtggcagttccgcaaaatgatcaagtgcgtgatcccggggagtgaccccttcttggaatacaacaactacggctgc

SEQ ID NO: 334937 - DNA, 201 bp, Homo sapiens
ggtgctgccagacacatgacaactgctatgaccaggccaagaagctggacagctgtaaatttctgctggacaacccgtacacccacacctattcatactcrtgctctggctcggcaatcacctgtagcagtaggtttatcccttccttgacctatgaattctagttggttctcagtaggccggggggaaataatagtaaca

SEQ ID NO: 334938 - DNA, 201 bp, Homo sapiens
gtcttcttgcagtggccgccgccgacagcggcatcagccctcgggccgtgtggcagttccgcaaaatgatcaagtgcgtgatcccggggagtgaccccttyttggaatacaacaactacggctgctactgtggcttggggggctcaggcacccccgtggatgaactggacaagtaagtgatccgcctgcaggaaaattgga

SEQ ID NO: 334939 - DNA, 201 bp, Homo sapiens
cgggccgtgtggcagttccgcaaaatgatcaagtgcgtgatcccggggagtgaccccttcttggaatacaacaactacggctgctactgtggcttgggggrctcaggcacccccgtggatgaactggacaagtaagtgatccgcctgcaggaaaattggagtgcctgccgggggcggggtggggcacacgccaaggatctc

SEQ ID NO: 334940 - DNA, 201 bp, Homo sapiens
gaacctggacaccaagaagtattgtcagagttgaatatcacctctcaaaagcatcacctctatctgcctcatctcacactgtactctccaataaagcaccytgttgaaagacctcatgtttggatattgttttattctctgtctataaactaggtctctgcctactcttttatttttatgtatttattttttctaggtgga

SEQ ID NO: 334941 - DNA, 201 bp, Homo sapiens
gagagtgggcaggtgagggctgacctattgctctgcacttactcctatctcagctgtccctcccactttccaggtgctgccagacacatgacaactgctaygaccaggccaagaagctggacagctgtaaatttctgctggacaacccgtacacccacacctattcatactcgtgctctggctcggcaatcacctgtagca

SEQ ID NO: 334942 - DNA, 201 bp, Homo sapiens
tcttgtcaaataaacaaatatgttccaagaggaccctgtagcgaacgcaccccgttagagatggaaacaatgaccgacgtgcaaaacagtgggcgatgctkccctccagtggcagaatgtagcaacagtaaacatcacagcaactatccacgtgtcattttctagcagtggttgtcactgcaccttctgaatacaggattt

SEQ ID NO: 334943 - DNA, 201 bp, Homo sapiens
gcccaggagttggaggctgcagtgagctgtgatcacgccactgcactccagcctgagtgacagagagagacactatctcaaacaaacacacacacaaaacmcaaacaaaacaaaacaaaacaaaacaaaacaaaacaaaaaaccaataacagcttgcatttctggagcacttactgcatacttccttgttcggagttttcc

SEQ ID NO: 334944 - DNA, 201 bp, Homo sapiens
gtaaattatatgtaataaagtttaaatgcattttaactgtaatcttattgtttattttggttataaaagtaaacaagccaaaagtaatgcaacttcaaackctacataaatatctattatggaaagtggaaggcatctataatcctactacccaaagataaccagttacatattcctccagatttttggggcatacactag

SEQ ID NO: 334945 - DNA, 201 bp, Homo sapiens
cttatcacatttattatttattgtttttctctcccactaggttgtaagctccatgaggttagagattattattattattattattattattattattattatatctgttcactgctgtatctctagctcctaggacagagcctggcacatagtaagtgctcaataaatattcactggataaacagtgcagatagtttaaaa

SEQ ID NO: 334946 - DNA, 201 bp, Homo sapiens
ccttatcacatttattatttattgtttttctctcccactaggttgtaagctccatgaggttagagattattattattattattattattattattattattatatctgttcactgctgtatctctagctcctaggacagagcctggcacatagtaagtgctcaataaatattcactggataaacagtgcagatagtttaaa

SEQ ID NO: 334947 - DNA, 201 bp, Homo sapiens
cactgcactccagcctgggtgacacagtgagactctgtccactatcaaaaggcaccattaagcagtttcagaccactggaaactgacagaacagccaccayttctgggtatgtggtgggcaatagaagaccttccatttgaagaagggagtgtgtgtggacttatcttttggcataatttctccctcatttatttatttat

SEQ ID NO: 334948 - DNA, 201 bp, Homo sapiens
ccccagtagctgggactaaaggcgcctgccaccacgccccgctaatttttttgtatttttaataaagacggggtttcatcgtgttagccaggatggtctcsatctcatgaccttgtgatccgcctgcctcggcctcccaaagtgctgggattacaggcatgagccaccgtgcccggccttatcacatttattatttattgt

SEQ ID NO: 334949 - DNA, 201 bp, Homo sapiens
agctgttggagccgctgttcttgtccatgtcggaggcggtggcggcggcgttgggggagctcagcggcatcaacgggggcctcggcggcgacggcagtcgragcggagcgggcgcggcggggacccaggctcatggcgttcagggccggcgggggtcggcggcggcagcggttctcggccttcatggcgacatttttccct

SEQ ID NO: 334950 - DNA, 201 bp, Homo sapiens
ttcccaggtttaagctattctcctgccgcaggctcccaagtagctgggataacaggcgcctgccaccacacctggctaatttttgtatttttaaaaatgtrgagacggggtttcaccatgttggccaggctggtctcagactcctgacctcaggtgatcccccagtctcagcctcccaaagtgctgagattgcaggcatga

SEQ ID NO: 334951 - DNA, 201 bp, Homo sapiens
tgtttgaaagtgtggctaagaagtatgatgtgatgaatgatatgatgagtcttggtatccatcgtgtttggaaggatttgctgctctggaagatgcacccrcttcctgggacccagctgcttgatgttgctggaggcacaggtaatgtcgagtttggtatccttcactaccattgagcatgttttacagaaattagtctct

SEQ ID NO: 334952 - DNA, 201 bp, Homo sapiens; identical to SEQ ID NO: 70488

SEQ ID NO: 334953 - DNA, 201 bp, Homo sapiens
tttgatgatgacaagtttgatatttacaccattgcctttgggatccggaatgtcacacacattgatcaggtatgaatggctgcatcctcagcttgtatgastctcaggaaattacctctgttgtagagctacagtgagtgaggaaagaaggagagttttgttttttgagatggggtcttggtatgttgcccaggctagtct

SEQ ID NO: 334954 - DNA, 201 bp, Homo sapiens
cggcacaactgtgtatcagatttcagggcgcgttcggctaataatgttgccggccagccgccgtcgttcgtggagtgacgcaacaaggcgtactctctggscgttgtcactcgactaccaagatggcggcccccgggagctgtgctctatggagctattgcggccgtgggtggtcgcgggcgatgcggggctgccagctcc

SEQ ID NO: 334955 - DNA, 201 bp, Homo sapiens
ctgggctcaagcagtccttccacatctgcctcccaagtagctgggattacaggaaccttacaggaacccaccaccacacccagggagagagagagagagakagatagatagattttttttttaatcttaaaaaagataatgtttaagggcttggcgcttgagtggaatgcctgtttgaagtttagggtcctccatccttta

SEQ ID NO: 334956 - DNA, 201 bp, Homo sapiens
aatcagagacatgtcagaggctgacaaagacaagggccctcaaacactgttttgacaaaagatagctggattcatggcttttctacaggaaaaggggaacrttcagctcttaatctgatggagctcttctttgttcctactttattttttgtagagatggggttttgccatgttgcccaggttgatctcgaacccctgagc

SEQ ID NO: 334957 - DNA, 201 bp, Homo sapiens
gaactggggaggtggagggttgcagtgagctgagatcgtaccattacactccagcctgggcaacagagcaagattccgtctcaaaaaaaaaaaaaaaaaaacgcaggattacaaaggaaaaagtcaaatttttgaccagtgacatttcaccatctaaatgactgttttatcttctgcttaacctttaacccccttttcttc

SEQ ID NO: 334958 - DNA, 201 bp, Homo sapiens
gattaccccagctaactttgtctagtcaccggcagcagaatgcctatagcatttgggatacgtagggttattgctgctgttacagcttcccaagtgagaasaaacaagaggtttgtgggccatgataacttttttaatgcctgcagaagctaaagctgtcttggcctcatggaattgagtgaggtctactgaggagtgtgt

SEQ ID NO: 334959 - DNA, 201 bp, Homo sapiens
ctcggcctcccaaagtgctgggattacaggcatgaacctggccggtgcctgtctgcctgtcacatttccttttttttttttttttggagatggagtcttgytctgtctcccagactgcagtgcagcagcggtgcaatctcggctccactgcaacctccacctccggggttcaagcaattctctgcctcagcctcctgagta

SEQ ID NO: 334960 - DNA, 201 bp, Homo sapiens
tgctgttacagcttcccaagtgagaacaaacaagaggtttgtgggccatgataacttttttaatgcctgcagaagctaaagctgtcttggcctcatggaaytgagtgaggtctactgaggagtgtgtcctgttgttccttgtcttgctcaggcactccaggaagctcatcgggtgctgaaaccaggaggacggtttctctg

SEQ ID NO: 334961 - DNA, 201 bp, Homo sapiens
gagcttgcagtgagccgagatcctgccactacactccagcctgggcgacagagcaagactctgtctcaaaaaaaaaaaaaaaaaaaaaaaaaaaaaaaaaattgccaagagtagtttgagcactatttgccaccttcttgtcgtatgaaatatcttttctatgccttggcaaattgccatatttctttctaagtttttatc

SEQ ID NO: 334962 - DNA, 201 bp, Homo sapiens
agtaagtcaagaatcttacccaagtcacacaacttctcagtggcagatcccaaattggagttgaatcttcagatctcagctctgagaccctgagacagaarttttgctgtcatttcccagcagcttcagggtgacttcggtgtatcattcccattcttgaaccattccattctcctgtccatactaggatagtttgattgc

SEQ ID NO: 334963 - DNA, 201 bp, Homo sapiens
gcagtggctcacgcctgtaatcccagcactttgagaggccgaggcgggtggatcatgaggtcaggagattgagaccatcctggctaacacggtgaaactcygtctctactaaaaatacaaaaaaattagccgggcatggtggcgggcgcctgtagtcccagctactccggaggctgaggcaggagaatggcatgaacccgg

SEQ ID NO: 334964 - DNA, 201 bp, Homo sapiens; identical to SEQ ID NO: 70482

SEQ ID NO: 334965 - DNA, 201 bp, Homo sapiens; identical to SEQ ID NO: 70484

SEQ ID NO: 334966 - DNA, 201 bp, Homo sapiens
gaatttcacttccagcattatcagcattttcatttttgttgctcaattccctctttcatttatccagttatgccacgtgtgctttatcactgaaagataargaggcaatacaagtacatgctttactgtctgtgaactgagtaactgatgcagtgaccagtcacctaaagtctgggaaagaagtgcgtgattggttgctga

SEQ ID NO: 334967 - DNA, 201 bp, Homo sapiens
tgggaggctgaggcgggaggatcacttgaggccaggagttcaagaccagcctgggcaaccgtgagaccctatctctaaaaaaaaaaaaaaaaaaaaaaaaatttaaatcaggaaattttccataaaaatctgaatttccagcttcacttgagaaatcagatacatggcagccctgggtaggcctatctccccacatgccac

SEQ ID NO: 334968 - DNA, 201 bp, Homo sapiens
gaggacggtttctctgtctggaatttagccaagtgaacaatcccctcatatccaggttggcattgttaatagggctttatcttcattgtatagccaaggtktcccaccccgaaatggattgaaaatagccagtaagctataagcatgaactttgtagttcagagtaccagaggtcagccagttctgaatgacaatacctag

SEQ ID NO: 334969 - DNA, 201 bp, Homo sapiens
tgtaccccagcctgggcgacagagctagacgccgtctcaaaaacaaaagtccgggcacggtggctcacacctgtgatcctaacactttgggaagccaaggygggcagatctgaggttaggagatcgagactatcctggctagcagtgaaaccccatctctactaaaaatacaacagattagctgggcatggtggcacgtgc

SEQ ID NO: 334970 - DNA, 201 bp, Homo sapiens
ccaggcagcctaaccacccaggacttgggctctccagctcaatgctctacatgaaatgaattcactgggggcaggaaaaacagctacccacactgagaccyggaactcactttctctttcaggacttgcatgggtattaggagatgctgaagaactgccctttgatgatgacaagtttgatatttacaccattgcctttgg

SEQ ID NO: 334971 - DNA, 201 bp, Homo sapiens
attgcttgaactggggaggtggagggttgcagtgagctgagatcgtaccattacactccagcctgggcaacagagcaagattccgtctcaaaaaaaaaaamaaaaaaacgcaggattacaaaggaaaaagtcaaatttttgaccagtgacatttcaccatctaaatgactgttttatcttctgcttaacctttaaccccct

SEQ ID NO: 334972 - DNA, 201 bp, Homo sapiens
ggaggtggaggttgcagtgagctgagatcatgccattgcactctagcctgggcaacaagagcgaaactctgtctcaaaaaaacaaacaaataggctgggtrcggtggctcacacctgtaatcccagcactttgggaggccgaggctggcagaccacctgatattgggagttcgagacaagcctgaccaatgtggagaaacc

SEQ ID NO: 334973 - DNA, 201 bp, Homo sapiens
gaagaaagcagagaagcaaagaacaaagagtgtattattcatcctttcaaaactacttttcttgaaaggctgtgatagggaggcagaataataaaaaaaaataggctgggcgtggtggcccaagtctgtaatcctagcactttgggaggccaaggtggaaggatcacctgaagtctctagttcaagaccagcctggccaac

SEQ ID NO: 334974 - DNA, 201 bp, Homo sapiens
gtggttctggcttgctaagtggataccagagctttcgttcccatttatgagcttcctaggttcataaaacggacagaacaaagaagtctgtcctatgtttrtttttcagagtagtgtaacatatgtttctcaagaatggtctgcatctttagcatcagaatcgccagagaaatttgtttaaatagagattaaagggatata

SEQ ID NO: 334975 - DNA, 201 bp, Homo sapiens
tcatttttgttgctcaattccctctttcatttatccagttatgccacgtgtgctttatcactgaaagataaggaggcaatacaagtacatgctttactgtytgtgaactgagtaactgatgcagtgaccagtcacctaaagtctgggaaagaagtgcgtgattggttgctgaacatgttgtgtatctgttatttacatagt

SEQ ID NO: 334976 - DNA, 201 bp, Homo sapiens
atggtgaaaccctgtctctactaaaaatacaaaaattagccaggcgtggtggtgcgcgcctgtaatcccagctactcaggaggctgaggcacgagaatctyttgaacccaggaggtggacgtcgcaccactacactacagactgggtgacagagcaaggctctgtctcaaaaaaaaaaaaaaagttaatgtgtaacttaac

SEQ ID NO: 334977 - DNA, 201 bp, Homo sapiens
ggcgtactccaccatgcccagctaatattttgtattttagtagagacggggtttcactgtgtttcccaggctggtctcgaactcctgagttcaggcagtcygcctgcctcggcctcccaaagtgctgggattacaggcatgaacctggccggtgcctgtctgcctgtcacatttccttttttttttttttttggagatgga

SEQ ID NO: 334978 - DNA, 201 bp, Homo sapiens
aggcacaggtaatgtcgagtttggtatccttcactaccattgagcatgttttacagaaattagtctctcttgtaatgagctagctcacctaacacgaggcrgaagatggtgattgaaaatctgcatacttataacttctgagaaaggcacgcacttatctttttgactgaatatcaatcaaaagcatagaataacagtttt

SEQ ID NO: 334979 - DNA, 201 bp, Homo sapiens
gctgccttctagagggatgatagatcatttgaacccaatgacaatttttaaccagaaaatttaattgtacctgaatcaacctttcagcctaggacgaagtytaggcccaagtcagagtattaatgatcatgagaattgtgtgctgaaccagtaaacgagtttaccttttgatggtacttgtcattttttcttgaagggggt

SEQ ID NO: 334980 - DNA, 201 bp, Homo sapiens
cactccagtctgggcgacagagcaaggctccattgcaaaaaataaaaataaaaaataaaaaataaaaaaaaaagtgaataacccacgtacatgtcattccyacagtagaagcatttctgtaagctagattccttgaagtaaaattgctttatcagagaggatatccattgtgattttgaaaggtaactctaaacttaccct

SEQ ID NO: 334981 - DNA, 201 bp, Homo sapiens
ggacagaaggactggtgtgacccccctggactgccatctgcatggggctggggtcctcctgtgctatttgtacaaataaatctgaggcaggaaaaaaaaawaaatcaataaagaggtaatgttaaggtgtagatttgggcatcaagcattacgacttagtttcaccttgcaaagccaggtcatttcaggggaaaaaagctt

SEQ ID NO: 334982 - DNA, 201 bp, Homo sapiens
ggagaaggggggcaaaggtgaaaggggcgagagggcggatgggagggatctgaccgtccatggtctggtttcttctggccagttagggttgatttaacatycaattagttccagtgttgttgtctgtgcagttatgattttttttttttttggagacagaatttcgctcttgttgcccacactggagtgcaatggtccgat

SEQ ID NO: 334983 - DNA, 201 bp, Homo sapiens
caatgagttgagcagaagacattggctttatagacacagaaagactgaagaaagcagagaagcaaagaacaaagagtgtattattcatcctttcaaaactrcttttcttgaaaggctgtgatagggaggcagaataataaaaaaaaataggctgggcgtggtggcccaagtctgtaatcctagcactttgggaggccaagg

SEQ ID NO: 334984 - DNA, 201 bp, Homo sapiens
atgtcgcctaaagaaaaacttccacaaagatttagtcacatatacgctcattgcatcacatttaatagtaattaaaaattggaaataacctatttcttccyaataaggacatggctttaaattaaggcatatccagtctatgaaatattgtttatctatttaaaacaataaggaaaacttacaagtaatgatggaaaggtt

SEQ ID NO: 334985 - DNA, 201 bp, Homo sapiens
ctgacccacttaattcaggttcttgcttgatccctataggcatttgagtttgtgaccccaggtttagtccttctttcttcttatctagggaagaagtgagrggcatgttctaatcttcatcttttacctttttgtttgcctaggctttatgatctatatagcttccaggtcatccctgtcctgggagaggtcatcgctgga

SEQ ID NO: 334986 - DNA, 201 bp, Homo sapiens; identical to SEQ ID NO: 70489

SEQ ID NO: 334987 - DNA, 201 bp, Homo sapiens
ttttgtgtttttactagagacagggttttgccatgttggccaggctagccttgaactcctggcctcgagtgaaccaccccccttggactcccaaagtgctrggattacaggcaagagccaccgtgccctgtatgcatacttctaatggatcttgtcttttattataataaccatgagaaaaattccaatttcccccaccct

SEQ ID NO: 334988 - DNA, 201 bp, Homo sapiens
cgtgaacccgggaggcagagcttgcagtgagccgagatcgcgccactgcactccagcctgggcgacagagcgagactccgtctcaaaaaaaaaaaaatgtractttaaagggaaacacttctgagagtcttggatagtagactctttctctctttagctatcccagattccacagtctgtgttgatcctatggagaagact

SEQ ID NO: 334989 - DNA, 201 bp, Homo sapiens
tttcaccatgttagccaggatggtctggatctcctgacctcgtgatccacctgcctcggcctcccaaagtgctgggattacaggcatgagccaccacacckgccaatgtataatcaacattttacaatgtataatcaatgtataatcaacatttcacacagtggcaagcaaggaagaagttaactactgaactaaatatga

SEQ ID NO: 334990 - DNA, 201 bp, Homo sapiens
ctacttgggaggctgaggcaggagaatggcgtgaacccgggaggcagagcttgcagtgagccgagatcgcgccactgcactccagcctgggcgacagagcragactccgtctcaaaaaaaaaaaaatgtaactttaaagggaaacacttctgagagtcttggatagtagactctttctctctttagctatcccagattcca

SEQ ID NO: 334991 - DNA, 201 bp, Homo sapiens
cgagtgcctgtagtcccagctacttgggaggctgaggcaggagaatggcgtgaacccgggaggcagagcttgcagtgagccgagatcgcgccactgcactscagcctgggcgacagagcgagactccgtctcaaaaaaaaaaaaatgtaactttaaagggaaacacttctgagagtcttggatagtagactctttctctct

SEQ ID NO: 334992 - DNA, 201 bp, Homo sapiens
ctcaagctatgtcggtcaaaggccaaggccaaagatcaaaccaaggcccaggctgcagctccagcttaggctcccaaaggtgcccggacacctacgaaggyttcagagtagatatctctgtctgccaatgtgaggacagaaggactggtgtgacccccctggactgccatctgcatggggctggggtcctcctgtgctatt

SEQ ID NO: 334993 - DNA, 201 bp, Homo sapiens
gttgccggccagccgccgtcgttcgtggagtgacgcaacaaggcgtactctctggccgttgtcactcgactaccaagatggcggcccccgggagctgtgcyctatggagctattgcggccgtgggtggtcgcgggcgatgcggggctgccagctcctcgggcttcgtagctcttggcccggggacctactaagtgctcggc

SEQ ID NO: 334994 - DNA, 201 bp, Homo sapiens
cccagtactttgggaggctgaggtgggcagatcatgaggtcaggagtttgagaccagctggccaacatggtgaaaccccatctctactaaaaatacaaaarttagccaggcatggtggcaagtgcctgtaatcgtagctattcgggaggctgaggcaggagaatcacttgaacctagaaggaggaggttgcagtgagccga

SEQ ID NO: 334995 - DNA, 201 bp, Homo sapiens
gcccaccaccatgccggctaattttttgtatttttagtagagacggggtttcaccatgttagccaggatggtctcgatctcctgacctcgtgatccgcccrcctcagcctcccaaagtgctgggattacaggcatgagccaccgcgcctggccgataagaatctcttttttttttataagaatctcttaagggagtggacc

SEQ ID NO: 334996 - DNA, 201 bp, Homo sapiens
acccaggacttgggctctccagctcaatgctctacatgaaatgaattcactgggggcaggaaaaacagctacccacactgagacctggaactcactttctstttcaggacttgcatgggtattaggagatgctgaagaactgccctttgatgatgacaagtttgatatttacaccattgcctttgggatccggaatgtcac

SEQ ID NO: 334997 - DNA, 201 bp, Homo sapiens
aatctctatacttgaaacatatttatctgtagctatgttggtgtgatcctctccccaaatggaagctcagagggcaagaagacaccttgctctgtagaggktaatttagcagaatctaccaaaatctaaaatgcatataagcctaggatcccacttttttttttttttttttttgagtccaagtctcgttcttgttgccca

SEQ ID NO: 334998 - DNA, 201 bp, Homo sapiens
gaactttgggaggccacaataggaggattacttgagcccaagagttccaggctgcagtgagctatgattgcacctctgcactccagcctgagtgacagagygagaccctgtctctaaagaaacttaaacaataaaaaaagaaataacttgcccttcagccacaaggagtgcagttagctagcagcctccacctattagcac

SEQ ID NO: 334999 - DNA, 201 bp, Homo sapiens
acatggtgaaaccctgtctctactaaaaatacaaaaattagccaggcgtggtggtgcgcgcctgtaatcccagctactcaggaggctgaggcacgagaatytcttgaacccaggaggtggacgtcgcaccactacactacagactgggtgacagagcaaggctctgtctcaaaaaaaaaaaaaaagttaatgtgtaactta

SEQ ID NO: 335000 - DNA, 201 bp, Homo sapiens; identical to SEQ ID NO: 70486

SEQ ID NO: 335001 - DNA, 201 bp, Homo sapiens
actaaaaatacaaaaattagctgggcgtggtagcacacgcctgtaatcccagctactcaggaggctgaggcaggagaattgctttaacctgggaagcggakgttgcagtgagctgagatcgtgctactgcactctagcctgggaatagagcgagcctccgtctcagggaaaaaaaaaaaaagatataaaataaaaaatgac

SEQ ID NO: 335002 - DNA, 201 bp, Homo sapiens
agcaaaatgagggcaatggcctaagctccaaagcaaaagattcatcccaaagtagccttaattgcttctgtccaaaagtttgtacaagtgtgtagatgtgygccccttctagtcttgtcccccaccacttcctgacttgcactagcctccagccacattaaatcatagtttccaaaagcagcctgctctctgtcttccaca

SEQ ID NO: 335003 - DNA, 201 bp, Homo sapiens
aattcagaaagtgaaatgccatatgttctcataagtgggaactaaataatgtgtacacatgaacaaagaatgtggaatctcactggagacctggaagggtrggagagtggaagaagagtgagggataagaatttacttaatgggtataatgtgcagtattttggtaatgattacactaaaagtccatacttcaccactatg

SEQ ID NO: 335004 - DNA, 201 bp, Homo sapiens
ccctgaagaagcgcggatacgatgtcaccaggaaccctcatctcaacaaggtaatgggccagagggcaggacggcccgcgttgcgatcccgtggctgccgsaaaattgcgccccgccccctggacccagaaaggatcctcccgggcgcccttccagcggtttttctgtttttgccttgcaggggcttgttgtgacttggtt

SEQ ID NO: 335005 - DNA, 201 bp, Homo sapiens
agcaagactccatctcaaaaaataaaaataaaaaataaggcacaacctgcaacacagggagtggatccaaaggctcacagatgggccaggtgttagcaacrgaaatttttaaaagacttacataaaattccggtttctcattcttgtggtttcttatagcttcagcaactccaagattataggcagcatttttctgattct

SEQ ID NO: 335006 - DNA, 201 bp, Homo sapiens
tccttttgttaaatttataaagaagaaatcaagtccaaagtgaaatcctctttcctacagatattaagctctaaaagttaaattcaaaaatccttctctcyccagttatttccaggtagatgggcctcactcataggcctggggaaacattccaggctcagggacagaagagtgtgcccattactgggagctctagagggc

SEQ ID NO: 335007 - DNA, 201 bp, Homo sapiens
gggtaagggcagtggtgtgctggtaaatctttaataactggttatctgtgctgggtgaggggcgggataggaaattatggaatctgccggattccatagtgtaaatacttgtacgatggctgatttcaggttaccagtttgacataactgaatgtagaattgagaaaagatgtgcacaaatggccactgggtaagagaatc

SEQ ID NO: 335008 - DNA, 201 bp, Homo sapiens
gcccaagccaatctgaaccaaagtgtagacaggcaaccaccacactacactgcctcttacagtttcggactgtgcacagctggtgggcattctgggtgggrtgtcgttgcagctccaggaatgtttgacttcccaggggtctcaggtggggattgctagataccacttctagagctctcctgggaggaattgatccagcag

SEQ ID NO: 335009 - DNA, 201 bp, Homo sapiens
gcggttcttcaattcagtaattctgggccaatggaaaggaagtgcaccaagggttaccccatctaggtcagaactcttgtaaaatgctctaatgatctcarttctacacttctgtgtccaggtgacccgctctgtgggggcttcttggtggggcagtaatgactttccaccattcacttgtcctcataaagttcgtgctga

SEQ ID NO: 335010 - DNA, 201 bp, Homo sapiens
catggggaggaagccatatggggtccagtgtcagtgaatactctccctctcccaggccacatccctgttgaccagccctgtcttcacatgcctcatcctcytgggctccaagcaatgtgctgcacccgcctttagacctaacatttcccagctttggtgtagggtccaacccgtatgggtgatggaggtctgaaagaaaac

SEQ ID NO: 335011 - DNA, 201 bp, Homo sapiens
gcatcatcaaaccagccttctgcccaatctcagggcaccaaagcactgattcctttggccaagactgcttgacattccaatttcacccagactctgctgcsaaactttcagctgtgctgctggaaaggcgtccttgagtagactgtgtacaaggtctgcagccggttctggttaacctctcatctggcccttttagtccct

SEQ ID NO: 335012 - DNA, 201 bp, Homo sapiens
tggatctgatccccttgtgaataggttggatgaagctaacaggttaaagtaagtatctcaactttagtgagcattaaaatcacctggagggcttgttaaamtagactgagcaagtctgggatgggaccagagaatttacgtatcaacgaagtccaggtgatgttgatgcttctggccagggaccacactttgagaatcacc

SEQ ID NO: 335013 - DNA, 201 bp, Homo sapiens
aaaatcacctggagggcttgttaaaatagactgagcaagtctgggatgggaccagagaatttacgtatcaacgaagtccaggtgatgttgatgcttctggmcagggaccacactttgagaatcaccggacaaaaggatggtgaaaggcagctcactgcaaagtgaacagagaccatcggaaggaggcaggagtagaagaca

SEQ ID NO: 335014 - DNA, 201 bp, Homo sapiens
gctcactgcaaagtgaacagagaccatcggaaggaggcaggagtagaagacatttccacggcccactgtacattagtagaaggagctgggagtcatgaaayatgggttcctgtcatgaactagtagcgtgacctataatccctccccctttctgggcctcactttcctcatctataaagtgaggatattagtaggtgatct

SEQ ID NO: 335015 - DNA, 201 bp, Homo sapiens
aattgtatctagatcccacattgctgaaatactttggaacagaggtagaggagagaaggaacatttatttttgtgtctgaattatacagagttcaatcacygagggaactggcttacttttttagtgaaagctttgagatttgcatctgaaaaagtgaatttgtgcttaaatgcatgtggcctgcctaggactttagcatc

SEQ ID NO: 335016 - DNA, 201 bp, Homo sapiens
aatataaaagaatttttaataactgaaagttcaacaaattctaatgccaaagcctgggattgtgggaacacttgttggaatttctaaagactgttgtttaktgcatggaggcatctgaacccagaaggtaaattctgaaacacctggaccatattagagtgtctggggccgagaaggtatggtgaggggcccacccagagg

SEQ ID NO: 335017 - DNA, 201 bp, Homo sapiens
ctttccaactatccacctctgttcccttgttcggtcgggatggacaaaatcctaaagtcaccaagtatttcaggagcagatatgaaatttctcttgaaaakaaatggaatctcttccacgctggttcttatccaacaacttcgcaaaaactaatctttcaatagcaaaacaattgaaatagccattattctcaaatgttgt

SEQ ID NO: 335018 - DNA, 201 bp, Homo sapiens
ttctgctttacagggttcattttcatttatataaaagtgcatttaacacattgttttatattttgatttatttcaaatctcctcagaccttccctctcccyattattccaacctcgattgtaattatgatttgaatgttatttctcctgaaagcccactagatctttattatcaaattatgctgaagttagactaactttg

SEQ ID NO: 335019 - DNA, 201 bp, Homo sapiens
cctcagtctccctttagtgccccctattggcagaaatgaacaagaaccctgctgccaaagaatgggtttatagggcccaagcttcagccataagccagagyagaaaaagctagatctggagctgagcaaaatggcatgatagctcgtgaggctaaatgacttagcatttataaagtgcttagaacagcacctggcacgtag

SEQ ID NO: 335020 - DNA, 201 bp, Homo sapiens
tgcagttccacatggctggggaggcctcaggaaacttatgattatggtggaaggcaaaggggaagcaggcaccttcttcacaaggttgcaggagagagaartgcaagcaggggaaatgccagatgcttataaaaccatcagatctcatgagaactcactcactatcacaagaacagcatgtgggaaactgcccccatgatc

SEQ ID NO: 335021 - DNA, 201 bp, Homo sapiens
ccaggcctctagaggacagcaacagagcaaggttacatctaggctgaggtccaggactcagacaaattaaaaactgcaggctcataggcaaggctaccacratacttttcttgttgttgtttatgttaagcgcttataagtccagagcttaaaaatccaatgaggaatgatctcattcatcagagcaatcaccctgggtag

SEQ ID NO: 335022 - DNA, 201 bp, Homo sapiens
actgctctgtgttccttttcctgtaggggaggagccacctgaaccatgaaaaggagatgtttgcccaagaccatcctgaagtcaactccctggaggaggtrgtgaggctggtgaagcccacagccatcataggtaggaggagggagggtacccactacccagcccagctaaccctcttgacttgcagatggagagacagag

SEQ ID NO: 335023 - DNA, 201 bp, Homo sapiens
cctcaggtgatccacccaccttggcctcccagagtgctgggactacaggcgtgagccactgcacccggcctctgtgtgttcttaaaggtgaactgaatctyttgtaggcaaaatatagtgggtctttttttttttttttaaaccattcagccacgttagccttttgataggagaattaattcatttacattcaaagtaatt

SEQ ID NO: 335024 - DNA, 201 bp, Homo sapiens
gtaggcaaaatatagtgggtctttttttttttttttaaaccattcagccacgttagccttttgataggagaattaattcatttacattcaaagtaattatkgataagtaaggactcactactgccatttttttaatggtttcctggttattttgtggatcctctgttcctttcttcctctcttgctgttgtggtttgactg

SEQ ID NO: 335025 - DNA, 201 bp, Homo sapiens
tcctttcagacatataattccaggcacttagctgtctcttacatttgcttccagggatcatggtccctgaagtttaagcatatgttttcccagtgaacttytgtgcactttgaaaactgcattctgttctctcttattaaattccagctttcataactaatatgcaatgatagctccagaaatgtttatctggtaaattaa

SEQ ID NO: 335026 - DNA, 201 bp, Homo sapiens
cagtctccatgtgggcacaccccatggccccatggactccttgccctgtggagagaagcaattggaagaaagccagaggatgaccctctaaactgctgggrcctcgggcaggaatctttcttgcccaggtctatgggcaaatttaattaatgcaatacctagtactatggactttgctcagttcctaatctgactgcctgg

SEQ ID NO: 335027 - DNA, 201 bp, Homo sapiens
cattcttcttattcaagaagaacagatggagaaactctttcaactcttggaactcaactggaacaattattttctgccaaaaataaaatctcataatcaamaaagaggatagagcaatatctgagatttgcaaattccaggaagaaaaaaaagagtacaaacaattagaaacctatttcagtttttctctgtgttaataga

SEQ ID NO: 335028 - DNA, 201 bp, Homo sapiens
taaagagaggctcctttacgactgactttgtacatgtattattttatttaatgctcacaccagcttagtgagatagatttaatgattacagctccatttttttattattattattattattatttttgttttgttttgttttgttttgtttgtttgtttttgagatggagtctcgctctgtcgcccaggctggagtgcagt

SEQ ID NO: 335029 - DNA, 201 bp, Homo sapiens
cccactgatggagtcacatggacagatgtcagggtccacacctttacacctgggctctaaagtcaggagcactccacatccactggttatctgggagggtyagaaggaaagggggcctccatggggctgggagggggacatagccactccctctgtaacttcccacctcagaggcgaacaggataggctttccaaggtaca

SEQ ID NO: 335030 - DNA, 201 bp, Homo sapiens
ggttatctgggagggtcagaaggaaagggggcctccatggggctgggagggggacatagccactccctctgtaacttcccacctcagaggcgaacaggatrggctttccaaggtacaggaagttagctatggttgttcagtgggttcaaataatcaaaatattcttcaggatagaaaataacaccaaagaaggattatgag

SEQ ID NO: 335031 - DNA, 201 bp, Homo sapiens
tagtgtctgcatttctcaggtgatcagaatctcatgtgtatcagtccattctcatgctgctataaagaaataacagagactgggtaatttataaagaaaakagatttaatagacttgcagttccacatggctggggaggcctcaggaaacttatgattatggtggaaggcaaaggggaagcaggcaccttcttcacaaggt

SEQ ID NO: 335032 - DNA, 201 bp, Homo sapiens
gatgaagcccagagtaacacccacaatataaatgggttccaaaatggcccaagtgaatccttgtcgctgtgttttttcttttaaactttctggtgtgagargagatgccaaggcatacagtgaataaaagccttgtctctgaaggccctgggagttcacttttctgaaccctcctctgagttccttcctaagcatttcttc

SEQ ID NO: 335033 - DNA, 201 bp, Homo sapiens
aaaaaaaaccttctggttttgttcactactctgaaatatactaaaaagcatgaacactgtaaaagcatactgaaattcctagctctcaaataatttatggrtcaaaggtcttttatcttcaatcctggtttgatttaataggattgaaacctttttccagttaacaacttcaacctgtaaaaccattaatttcctttgagg

SEQ ID NO: 335034 - DNA, 201 bp, Homo sapiens
cagttgtctgtggccaccccatcccgcacttcagtcacacgtccctgaggacgttccacagaaagcagtggaaagtgtgattttaaagctcttccaaggcrtggacagttacctcacttgagtctctccagttctgccctccaggcctacacagccttcgaggatttcttagatctgcttcctgggcttcttagacctagc

SEQ ID NO: 335035 - DNA, 201 bp, Homo sapiens
ttcttttttcaattctattttaggaaatttgcaagaatcactcttctacaggccgagataagggttaagagtctttttctcaagaaataacattctcctawgtgaacattatctttgtttttctttctctctcgtgtaactgaattcaaacattcaagaggatttttctggctcctgatggaaactgaagatagtgatgta

SEQ ID NO: 335036 - DNA, 201 bp, Homo sapiens
taactcactgcaggatgtttagtgccttgggatccccgggcagcctataatttgctcaaaagctggaaatgtttctgcacctctgcagagcctggcctgcrgcttcctgtgttttcccaccttcctgcctcccattgtgcctcagagcaggataataccactttaaacatgtcacattagctgtcaaaggggttttgactc

SEQ ID NO: 335037 - DNA, 201 bp, Homo sapiens
tgtcacattagctgtcaaaggggttttgactcattctcaaggagagaagattgaaacagacccagctgtggaatacagagagctccttggcacctaaatgrctaccccaatcatccgtaaagagctgccaggaaaccatatcagcgggatctcagggaggctcactttagcacccccttcagacttaccagactggacgag

SEQ ID NO: 335038 - DNA, 201 bp, Homo sapiens
ctgactcccgagcccacacttttaacctctgaactaagatcagcaacactaacagctaccatttgttatgtatttactatgggccagcagacactgtaatrtattttttaaagatacattgacttatttaatcattgtaacaaataagtgtatggtgcaggtggtgtcacttcttccattttacacatgaggaactgaagc

SEQ ID NO: 335039 - DNA, 201 bp, Homo sapiens
gaaaaacttgtgccctgtttttagagcttttcctgcctctggttattctagatggtctttagctcaaaataatctacaggtcaaacagacacattttaggwtggcatattctggtacccttcacctggaccttgctctcaaaccttatgagtaagttaattcaaatacctaccctgccccactttagtgcggtaaatggag

SEQ ID NO: 335040 - DNA, 201 bp, Homo sapiens
gatacaacatagcacacacacaagttgcctttgttccaactctcttccagctttattcaacacttttcatcctcatccctcaactatcattatcatctttmatgtatccattttccatttattcagaaattgtgcattgcacatctattatggactaagtttagggatatagtggtgaataataacaacaaaaatagatgc

SEQ ID NO: 335041 - DNA, 201 bp, Homo sapiens
tcctcatccctcaactatcattatcatctttaatgtatccattttccatttattcagaaattgtgcattgcacatctattatggactaagtttagggatayagtggtgaataataacaacaaaaatagatgcacactttgccctctgaagttcacagtctaatgagggcgatggggattattaatcaaatagccacacaaa

SEQ ID NO: 335042 - DNA, 201 bp, Homo sapiens
gaggcagaggttgcagtgagccgagatcaggccactgcattccagtctgggagagagtagtgagactctgtctcaaaaaaaaaaaaaaaaaaaaaaaaaaagaatgtatagggttgtgtctcagatgagcaaactgaggttaagtgacttgtctgaggttacccacaattaagtgttggtgcccagcccagagctgtggtt

SEQ ID NO: 335043 - DNA, 201 bp, Homo sapiens
ggtttaattaacacaaggcagctgagaggagggagtggcttagcctcctgagaactcagaggctagggattttatggataatttggtgggcaggaggctakggaatgggcactgctgattggggatgaaatgataagagtgtggaaaatggttcttgcgcactgagtccacctccaggtaggggccacaggaccatttgag

SEQ ID NO: 335044 - DNA, 201 bp, Homo sapiens
gcagtttcagcccccaaaactgaacaaggaagggatcagtttcatggagagactattatcacacttgcttcaaagttaaattagaaactaaattcctcccrtggttagcctggccctgcccaataatgagtgaggacagccagcctgtgagactagaagcaaaatgaagtcagccatgctagatttctctcactgtcataa

SEQ ID NO: 335045 - DNA, 201 bp, Homo sapiens
gggagtaggaaagagaatcagttttgtcttgagtctttgttttttcttgtctttgagtcataatggtggaagattagatgataaatttggtttggtacatrctaagtttgaagtacctttgaggtatgcacagggaaatatcaggtaggcagttaaataaaaggtctagtgcagtggctctaaaatcagggataatttttt

SEQ ID NO: 335046 - DNA, 201 bp, Homo sapiens
cctccaggggacatttgccaacgtctggagatattcttggttgtcacaatgtagtgagaggtgctattggtatctggaaagtagaggccaaggatgttgcsaaacatgctacaatgtgcaggacaaccacacccctcacagcaaagaattatccaacccaaaatgtcaatagtgccaaaggtgagaaacgctggtctatag

SEQ ID NO: 335047 - DNA, 201 bp, Homo sapiens
tgcataatggcgggatgacttacccaacataagagactgagaaggagccacagagaagtaggaggaaaactcaaagaaaatggagtcacaaaagccaaatkttgggtaggggagtgatgaaaagtgtcagatgctaccaagaagacaaaggaaatggggactgatgagtgttcattgcacttaggaatgtgaaggtcattg

SEQ ID NO: 335048 - DNA, 201 bp, Homo sapiens
ccagctgtacttttttttttttttttttgccaatccccctgtgtgtgcatagtttagtggtcagccaataatttgggtagattggggagtttatcctttcygtggcttattcccttccagaacccaccccctcttcatttcctggcttctcttctagccccaactctattatctgatacctcaagctattaagactttggc

SEQ ID NO: 335049 - DNA, 201 bp, Homo sapiens
gtggaaacaactgggcctctgtgttgtgtgcaggtgaggcaactgattttctctagttataaacttacccagtagcaggactcccgtggggttttcttctmgggggaaagagatctcactacaacagtgtcggaccagtgctatcattgtgctttagcagtatgcagtttttatattttaaggcactaacattaatagata

SEQ ID NO: 335050 - DNA, 201 bp, Homo sapiens
agctgtacttttttttttttttttttgccaatccccctgtgtgtgcatagtttagtggtcagccaataatttgggtagattggggagtttatcctttctgyggcttattcccttccagaacccaccccctcttcatttcctggcttctcttctagccccaactctattatctgatacctcaagctattaagactttggcct

SEQ ID NO: 335051 - DNA, 201 bp, Homo sapiens
ctcaccaagttttaactgccactaacgcccagatacttaacttgaagcttctgttctgtcttctttttttttttttccttaccatggataatacagagaargccttttgtttcagactcggtggaaacaactgggcctctgtgttgtgtgcaggtgaggcaactgattttctctagttataaacttacccagtagcaggac

SEQ ID NO: 335052 - DNA, 201 bp, Homo sapiens
tccctggaatcagccttggggtcatttggtcagggaattctggcatcttgggtactggtctagaggaaggaaaaaagggcacagactctggggagcacagkctccatgtgggcacaccccatggccccatggactccttgccctgtggagagaagcaattggaagaaagccagaggatgaccctctaaactgctggggcct

SEQ ID NO: 335053 - DNA, 201 bp, Homo sapiens
aatgaagctggatcccattcccagcccctgtgcagcaggttctagccctcaggaccattcagacaccttcactgccatcagaaactagtataggaaataaytgggggtgggaggaaagcaggagtgaattcaataagggcttaacaagcaatctaatgaaagcaccaaacctaaacaatgatttttttctctgaggtaaaa

SEQ ID NO: 335054 - DNA, 201 bp, Homo sapiens
gaagttgcttatcagcttaaggagattttgggctgagatgatggggttttctaaatatacaccatgttatttgcaaacagagacaatctgacttcctctcwtcctatttgaataccctttatttctttctcttgcctgattgccctggccagaacttccaacactatgttgaataggagtgatgaaagagggcatccttgt

SEQ ID NO: 335055 - DNA, 201 bp, Homo sapiens
tttttttttttttttttttttgagatggagtcttgctctgtcgcccaggctggagtgtgcagtggcatgatctgggttcactgcaagctctgcctcccggsttcacaccattctcctgcctcagcctcctgagtagctgggactacaggcacccaccaccatacccggctaattttttgtatttttagtagagatggggtt

SEQ ID NO: 335056 - DNA, 201 bp, Homo sapiens
cacattgattttgtatcctgagactttgctgaagttgcttatcagcttaaggagattttgggctgagatgatggggttttctaaatatacaccatgttatwtgcaaacagagacaatctgacttcctctcttcctatttgaataccctttatttctttctcttgcctgattgccctggccagaacttccaacactatgttg

SEQ ID NO: 335057 - DNA, 201 bp, Homo sapiens
ttctccactggacaccaaatatagcttctttctgtctacctccctttatgtcctacccactcctggttctctccagggaatgatattacttaaaaacagascaggttggggacagaaccttggccctcaggagccaggctcgagccatagccaaggccctagtcctagctcattttttacatctgtgtctgggtatcattt

SEQ ID NO: 335058 - DNA, 201 bp, Homo sapiens
ttggccacctggaggtacttggggaccctgacaagaggtgggtcagtcatttgattggactgggtttcatggggaccaaggaggaaggaactagatgcagytaatatattcagctctctagaagagtttgcctataaaggagagtaagaaatagggtgggacatataggaccaagggagggccttttaaagatggaagttt

SEQ ID NO: 335059 - DNA, 201 bp, Homo sapiens
actcagtagatgtttacacagagttggatgaattcagttgatagacatgctgagcatcttccatgtcacagatactgtgccaggaggttctccactaataytttcggtgcttttgtgcaaattatgaggaactagaaagaatgatgaaaaggtacctctgtttaacaaaaaggcaccctttcctccaacctgacacagggg

SEQ ID NO: 335060 - DNA, 201 bp, Homo sapiens
tcatagcacttgggaactgatgcagaacctcttcttcactacttcattctgttcccacagtcactgggagaagttggagtaaggacttctgaaacccccartgtgggtcctgaagaatgtgtaggagtgagactgtgcatggtggctcacgcctgtaatcccagcactttgggaggctgaggcgggcggatcacttgaggt

SEQ ID NO: 335061 - DNA, 201 bp, Homo sapiens
tttaaatctgcctatagacttagacatgagacatcaatcaaatacatttaagatatgataaccttaaggttaatgtatcttaaatgtatttgattgatgtmtcatgtctccctagaatgtataaaaccaagctgtaccccaaccactttggtcacatgttgtgaggatctcctgagggccctgtcacgggccgtggtcact

SEQ ID NO: 335062 - DNA, 201 bp, Homo sapiens
gtgggacttgcttttcaggaaggagggggcgggccaggccaggctgccttgagctgtccagcgtaaatcacaaagaggagtgagaactgcttttctgactytttcccacagtggccattgcctggagcctataggaaggtccagctgagaatagcctcctccctaacagttttcccaagctcctaaatctctccctcaccc

SEQ ID NO: 335063 - DNA, 201 bp, Homo sapiens
agacatgagacatcaatcaaatacatttaagatatgataaccttaaggttaatgtatcttaaatgtatttgattgatgtatcatgtctccctagaatgtayaaaaccaagctgtaccccaaccactttggtcacatgttgtgaggatctcctgagggccctgtcacgggccgtggtcactcatatttggctcgaaataaat

SEQ ID NO: 335064 - DNA, 201 bp, Homo sapiens
aagcaggcacaatcagcagaacttggtgaccaattggctgtggttgactaacagagaagaatcaaagaagactggacgtttttgaacttggaagatacagrgtaacagagagcaggaggacagcagagtaaaaaggctcaaaaggagtaagagggaaaagaggattcatttggttagggacttgtgggaattgggaagact

SEQ ID NO: 335065 - DNA, 201 bp, Homo sapiens
tgagacatcaatcaaatacatttaagatatgataaccttaaggttaatgtatcttaaatgtatttgattgatgtatcatgtctccctagaatgtataaaascaagctgtaccccaaccactttggtcacatgttgtgaggatctcctgagggccctgtcacgggccgtggtcactcatatttggctcgaaataaatctctt

SEQ ID NO: 335066 - DNA, 201 bp, Homo sapiens
tacacgcttgtgaaaggcaggcaagcagacaggaagggtgtgtggtagatatggcaattcaggggaaggagaaatttcagtagattataatgggcaggatwtatgctgctgacgaatggggagaagaaccctccaggaaaaaggaatagagaggttgagatggagaggtggtaggcaaattcagagtgtgcctgggaagaa

SEQ ID NO: 335067 - DNA, 201 bp, Homo sapiens
aatagtagcaagatatactttcttgctcaaaggcatttcccacgtaggtattaacaggtaaaaagtcatgctgtgtctaaagctgcacatgctccagagarcatacttcacagaggtggggtgaggtggacaaggagctgacaacaggcttgttcccaaagacttctagtgtttctccttccctttccaacaacaagatgt

SEQ ID NO: 335068 - DNA, 201 bp, Homo sapiens
gggcatagtctctaacagggagatctaccaagaggaggtcagatgcaggctgcagagagggtggcgccaaagcagggcaggactttgccaagatcacaggmactttaccccagccagttggggtggtagaaggagccctgaaccaggaaccctgccctgtcacattcactagaaagatgaccttgcaaagtcatctaatct

SEQ ID NO: 335069 - DNA, 201 bp, Homo sapiens
tgtgtctaaagctgcacatgctccagagagcatacttcacagaggtggggtgaggtggacaaggagctgacaacaggcttgttcccaaagacttctagtgyttctccttccctttccaacaacaagatgtgtggttgtcatggtttctacttcctctaaaagtcctttgaccaaaaatagtcacatggccccagtccagct

SEQ ID NO: 335070 - DNA, 201 bp, Homo sapiens
aaaagccagcctctgatcttggtttctcaccaagttttaactgccactaacgcccagatacttaacttgaagcttctgttctgtcttctttttttttttttccttaccatggataatacagagaaagccttttgtttcagactcggtggaaacaactgggcctctgtgttgtgtgcaggtgaggcaactgattttctctag

SEQ ID NO: 335071 - DNA, 201 bp, Homo sapiens
gagagggtggcgccaaagcagggcaggactttgccaagatcacaggcactttaccccagccagttggggtggtagaaggagccctgaaccaggaaccctgscctgtcacattcactagaaagatgaccttgcaaagtcatctaatcttttaagataactgatgtggaaacatccagccagtgccaggcatgtggccgacac

SEQ ID NO: 335072 - DNA, 201 bp, Homo sapiens
aaatagaggaaggggacagttagctttaattagatttcatctgaccatgatgaaagtattaaaattgtacaagtaggatatttacagggcactttacattstgcccatttttttcactagtcaaaagagactgaaattcagtatgttctcaaattagctaaagaaaacccttgtcaaagacccctcaatccatctggttat

SEQ ID NO: 335073 - DNA, 201 bp, Homo sapiens
tagacattcaaggtctttcacagtctgactcctgcctgacttcccattttttcccttcctgcaacctacatctcctcgctccccaatcacatcctacattstccccacccccagcacctctaccctggattttaactttcttttgtatcaaatgcccttctccccgcccataccccacaatctccacctgtccaaggtagg

SEQ ID NO: 335074 - DNA, 201 bp, Homo sapiens
atcttgtctgtttttttactttgtttccttattactgtatcgtcagtttataatggtatccagtacctagtcggtgcttattaaatatttgttgaatgaawgaatgagtcatcagtctcttaagtacacttatagttcaatctgaagaaaaatcagaaacaaaaagttttgtgctcattacagcataattcataattgtgg

SEQ ID NO: 335075 - DNA, 201 bp, Homo sapiens
actgcccagggcaggagctctggggccaaaaggtggcaactgggacagggtgaggagcatgtttgtgggtggttatatctacacagcaatgggccatttcyttcttggcatcctcccgaccagggcattccccctacacagttgtggagtagaggaccttcttccctggttgcccacccctagctccatcctgttccctct

SEQ ID NO: 335076 - DNA, 201 bp, Homo sapiens
gtcatttgagtttaaatagcctatttccccccgtcaaggcctaagaaactggctttgagcaagtggtgagagctgagttattgggaactttgtgaagcaaytgtctggtgctttagaaaaaaaagcagcagcctggatgttataacccagggacattcttgttcaagtgattgaattcccaacacacctggccatcattgt

SEQ ID NO: 335077 - DNA, 201 bp, Homo sapiens
acttggctttcaggaacacgtttcccttatatcttcagttcttttcacaagttctatccaactctgtctatcaactaaaacctacccttaccctgagtgamtgcttcatccaaacccctctcatatggaggttgcttattatttcactcttcggctcccaagtcaggacacagctaggtatcctttctttccctaaaacca

SEQ ID NO: 335078 - DNA, 201 bp, Homo sapiens
tccacaggcaatcattcccacttttcctgacaacaccataaactgtttgcccctatacctggaagtgaggattccatcccatcagcatttaaacatgctcraatatctccaccttaaaccaccccctttagtagccaagctttttgaaaaagttttgtgcatttgctgtttccattttgtcacaactttcctcaaaccact

SEQ ID NO: 335079 - DNA, 201 bp, Homo sapiens
gaaagacactgccaagagaatgaaaagacaagccacagactaggaaaaatatttacataatacatgtccagtaaaaggcttatatttaaaacatgcaaagraatatttaaaaaagtttttaatataatttacataccatacaattcacccatttagagttgtccttttgtgtctggcttattttacttagcatagtgtttt

SEQ ID NO: 335080 - DNA, 201 bp, Homo sapiens
actgccaggctgggactcttggtctaccaggaagaagcacatgtgagccctgaatgaagaagcacacagcaagaaatgtagctgagggaggacttcaggcwgggcccacattgaggagcacccaatggtggtgcagcaaaccagagaggagagaaggggctcttaccagtatctccaggaagggcacataaaggaaggaaa

SEQ ID NO: 335081 - DNA, 201 bp, Homo sapiens
acatccaaggtaggtttccaccccacctgatgaagctacaggggactaacttatattctcaacctcactgggatgccaaaggggtgaggaaaggctgtcascccatagttggtttgctgccagcagctgttgaaaaaagaatattaaacttagattcaactcctacttggctaattcttaattctctgaattcagtttcct

SEQ ID NO: 335082 - DNA, 201 bp, Homo sapiens
ggatatgctgctggggtcctgtaaagttatctctttcactcacattcctggacagttcaaccatggggaaaacttggacataggaggcactcagtagatgyttacacagagttggatgaattcagttgatagacatgctgagcatcttccatgtcacagatactgtgccaggaggttctccactaatattttcggtgcttt

SEQ ID NO: 335083 - DNA, 201 bp, Homo sapiens
acctgctgcgtgtgcagatatcctctctgagctttgctttcctattgtgaggattaactatgataaagtctatacacatcgaagggcacttgaatggataytgtcatcactggaggtggtggaggcagctgtagcccacaccgcagtacagtcagggcctgagggggctcccttacctgggaatcacaggccacaaatgag

SEQ ID NO: 335084 - DNA, 201 bp, Homo sapiens
attggacacagcagccccacttttgggaatttatctgatagaaacaaaagaaccagtataaaaatatatattaaaaatgtttaatacaaaatatctggaamcaaagtgaatgttcatcaataatgcaaaagttaaattattatacatctatattatagataatatgctgctattaaagaagaatgaatctcatatatatgt

SEQ ID NO: 335085 - DNA, 201 bp, Homo sapiens
cacatcgaagggcacttgaatggatattgtcatcactggaggtggtggaggcagctgtagcccacaccgcagtacagtcagggcctgagggggctcccttacctgggaatcacaggccacaaatgagcagtcaaatgattcgacccctaaacatatttgatttggctcttagtggttttccaacattttgaatttgtaggc

SEQ ID NO: 335086 - DNA, 201 bp, Homo sapiens
caatgacccctgcttgggcttccttcctctctgacccccattaccccaggcagtttctatttcccttgaggtgggtgtgaccactgggctgtgttttttarcattctcaaggcaggctgccccagtggaacgactggaattcaaagcaccaggggccaaaatgtctgaatcagacagattagtgtcctgcaaacccagtga

SEQ ID NO: 335087 - DNA, 201 bp, Homo sapiens
ctgacccccattaccccaggcagtttctatttcccttgaggtgggtgtgaccactgggctgtgttttttaacattctcaaggcaggctgccccagtggaaygactggaattcaaagcaccaggggccaaaatgtctgaatcagacagattagtgtcctgcaaacccagtgagagaaactgagccaagcgtaggtgagatcc

SEQ ID NO: 335088 - DNA, 201 bp, Homo sapiens
gagatccagctgcaggagtcctggcagtttgtggtttaaggagctcaggccccagccaagggtttctctgctctgggaaccaccatgggcatgtctgtgaytcgcagctctgtctctgtgtcagaaaacatgaaaaaatatccaaggattccctcttaattacatttatctttgagatcagtgcatgttattgaggccggg

SEQ ID NO: 335089 - DNA, 201 bp, Homo sapiens
aatcattgccaagtccaatgtcataaagtttttcccctatgttttcttctaggagttttatagtttcaggtcttacattttacatctgtaatccatttttsaatataagataagggttaatttcattattttacatgtggatatacagttttctcaataccattgttgaagacaattaactctttatttatctgtcatatc

SEQ ID NO: 335090 - DNA, 201 bp, Homo sapiens
gggcatgtctgtgattcgcagctctgtctctgtgtcagaaaacatgaaaaaatatccaaggattccctcttaattacatttatctttgagatcagtgcatrttattgaggccgggcacagtcactcacgcctgtgttcccagcactttgggaggctgatcggggcgggatcacctgaggccaggagtttgagaccagcctg

SEQ ID NO: 335091 - DNA, 201 bp, Homo sapiens
agtcagcacttatccactctccttaggaaatgctccaaattgaatttctattgagatatttcccaaggacaaggttgtcacctctacttctgaatgtgtgytaaggattagcatttgtacaggacttttatctttcttctggtgcagtttctcataatcaccaggggtgcaggtaaaaagccctggaatcaacatttacag

SEQ ID NO: 335092 - DNA, 201 bp, Homo sapiens
tcctctaatccactatactgattagtagatgggcacagaaggtcattcccaacagaggaactaccacatgcacacaaagaggtatgaaaatgcctgcttcytctgggaatggtatagtttgctctattaaaggccacccatggaagagtggctggtggcaaagccaaaaatgatgcacagcttatgaagagccttgcaggc

SEQ ID NO: 335093 - DNA, 201 bp, Homo sapiens
ccttgcaataaccctgtgagtggagcatctatcattaccctcttttttacagcataggaaactgaggcccagagagttttatttgcccaagaagatctgckagaagcggcagggctaggagccgaatccaagtttgtgctcctctccccacattacacctgtgcctaatttctgttgctttataagtaaagattatttctt

SEQ ID NO: 335094 - DNA, 201 bp, Homo sapiens
gccatcaactttttacccaaactgcttcacttaaaatgcaatagttgacattaatttagtgagtcctttctaagcatcaggcactctgttgcacactttayacacattatgagttatttttttcctaggggagaaaactgaaacttgaaaggttaaaatatacctaggccatgcagctagtaagggtcagagttgacattc

SEQ ID NO: 335095 - DNA, 201 bp, Homo sapiens
aacaaacactcagcacatactaatgaataaatgaatggcagtatctactgtagaaaggtaattcttatggatcgtggaagcaggtgtggcctcatagcagmggttgttctgtcccaatagggatccaggcctccaaagccaccgtggccagaccctgacagagcctaactctttctgtccttcttgctgcctgggtcagaa

SEQ ID NO: 335096 - DNA, 201 bp, Homo sapiens
atttgtgtttctttccaaaatttttctatgcctatacataaagatagttattacctaggtgtaatcataatgtaattttgttctaattttttcaattaagwttattttgtgaacactttgccttatttaataaaagtttattgagtgtttagtgggtatcaggcaccctgctgagcctgagggagataaatgagggtcagc

SEQ ID NO: 335097 - DNA, 201 bp, Homo sapiens
gccagcagcacacagacctgtgtttacattccagctctgctacttattaactgtataatcttgggtaggttttctatttcgtagggatgtggcagaaggasaaaactgaaatagtgccttagttcattctatacctaccacaagagtatttgatattaagactgaagtagtgttaatatctttattaatttaagttataaa

SEQ ID NO: 335098 - DNA, 201 bp, Homo sapiens
ttttttcaattaagtttattttgtgaacactttgccttatttaataaaagtttattgagtgtttagtgggtatcaggcaccctgctgagcctgagggagayaaatgagggtcagcctgaatagaatgttctagttgtcagtgtttcaacactgtcacctaattggtcactttaatgagtcgcgtgtcacatctactcaaag

SEQ ID NO: 335099 - DNA, 201 bp, Homo sapiens
caaaattttcaaagttataaagtgaccaacattaggaagatggtgatttttctcttttcaaatggattcactatgtgatctcccaactacagttccttttwtttttttcaatgaatccgtttgcaagatattccccccagaagtcccagggcacaccttttgctcagagcaagcctgagatgtaacagagggaagcttggc

SEQ ID NO: 335100 - DNA, 201 bp, Homo sapiens
tataaagtgaccaacattaggaagatggtgatttttctcttttcaaatggattcactatgtgatctcccaactacagttccttttatttttttcaatgaawccgtttgcaagatattccccccagaagtcccagggcacaccttttgctcagagcaagcctgagatgtaacagagggaagcttggccttctacacttttat

SEQ ID NO: 335101 - DNA, 201 bp, Homo sapiens
gaccttggccaagtcattgaatctttctgaaatttcagtttctttatctataatgtgaaagaggtagcctaggtgatccttaaggtcccttccagccctawcacctcatgattctacatgaaggtgagaagccttcttaaagtctcaagggctcctttgagagtaagggagaaggaggtcaagatataagcactgatcagg

SEQ ID NO: 335102 - DNA, 201 bp, Homo sapiens
tcttgatagtctttacattttggcatgattttgcagtggctggtaccagttgtgcctttccatgtttagtgcttccttcaggagctcttttagggcaggcytggtggtgacaaaatctctcagcatttgcttgtctgtaaaggattttatttctccacttatgaagcttagtttggctggatatgaaattctgggttgaaa

SEQ ID NO: 335103 - DNA, 201 bp, Homo sapiens
gcagtcttctcattctcattcagcagagtgctgtgaggaccctaggaggtgtgtgcatgtgactccaaggccctcctcagctttgcttttctgatcccctrtctgtgcaatctctttggcaatgatctgggtcaaaatggactcagtgctgtctgagtaaccttgtttctctaaatgatattgggtcatttgcttgtttcc

SEQ ID NO: 335104 - DNA, 201 bp, Homo sapiens
gagcagaaaaagctagatctggagctgagcaaaatggcatgatagctcgtgaggctaaatgacttagcatttataaagtgcttagaacagcacctggcacrtaggtggtaagtgtatgctataatgcattttaaataaataaataaatccagcaaaaaacaacgtgagaagtgatgttaggatctcagttttatccatgag

SEQ ID NO: 335105 - DNA, 201 bp, Homo sapiens
gaagaacattaatcagctgatcaggctcacacttaagggatgaatttgctgccctaattaatgtataatatttaatccaagcccttccttatttccacttytaaaaggtatcatgttgacaactgtattagtctgttttcatgtacctgataaagacataccccagacgaggtaatttataaagaaaaggaggcttaatgg

SEQ ID NO: 335106 - DNA, 201 bp, Homo sapiens
attatctttgctgaatcacctacatctctgtaaagtagatgaggtacatattattcccatttcccagacaggtaaaaccaaggtctagagaaataactccytttcgtaatgtgacaagagggtaagaacattagctaaagtggaccctctacatctttgccgcatttatcctagtaacttggaaccagaagcttacgtggg

SEQ ID NO: 335107 - DNA, 201 bp, Homo sapiens
catgacagcagtgacggggtttctttctgctgatcccctgtgcctggcacaaggtctgacacttagaaggctctggataaatatttattgcatggttgaayacatggagaaggaatctgagtcacagaaaggtttagccaacagttacctgtaagagctgggattcaaacccaggtctctttgactccagagcccatattc

SEQ ID NO: 335108 - DNA, 201 bp, Homo sapiens
ttgaaactcagaagcttataaagaaaacttcttcagcagctgttttacagagttttttgactttaaaaactttcccgccccttccttttaagagcgactaygagaaagttgacgtactgagtcttctctcagattacaagaggaagcctccacatgggaagcctagcagttgtctggaatgctgtgacttatgactcttct

SEQ ID NO: 335109 - DNA, 201 bp, Homo sapiens
aggaaaatgctatgggaattcagagaaggaagtgataaaattcagaagggaagcttcctggagggaaatgctttttgaactgttccttgaaacatgcaagkgtggtaagatttgtatcaaggagataaagaaattgagaagtaaaatggcatgtattcaagaaagtacaggccttatacaaaattggaaatatttcagttt

SEQ ID NO: 335110 - DNA, 201 bp, Homo sapiens
gctttttgaactgttccttgaaacatgcaagtgtggtaagatttgtatcaaggagataaagaaattgagaagtaaaatggcatgtattcaagaaagtacargccttatacaaaattggaaatatttcagtttggatggagcatggaaagaataaaggggaaattcaaagggcagcttgggcctagcccatggaaggcttta

SEQ ID NO: 335111 - DNA, 201 bp, Homo sapiens
gtattttggactctattctatggacagttcaaagtaactaaaggtctttgagcctgggaatggcataatgaaaatgggcttttgacacaatgaatctgacrttggttggcaggagagaatggaaggaaggaagatgagaggcaaggagtctggttgtgaaactgttggaataactcaactataaccatggtaggattgcgg

SEQ ID NO: 335112 - DNA, 201 bp, Homo sapiens
tacaccaggttgcagactatttcatagctttactggatgcaacaaagcccagcaaaacccagctgtgagacgtgctagttgtttccagtatatacccacawgggcttctgggaagaaagattcattctttgttccacctgttataggaattcctgctccttggattttatttttctattttacattcagtcattttgtttt

SEQ ID NO: 335113 - DNA, 201 bp, Homo sapiens
gggctctccttggctagacattcaaggtctttcacagtctgactcctgcctgacttcccattttttcccttcctgcaacctacatctcctcgctccccaawcacatcctacattctccccacccccagcacctctaccctggattttaactttcttttgtatcaaatgcccttctccccgcccataccccacaatctccac

SEQ ID NO: 335114 - DNA, 201 bp, Homo sapiens
cccttccttggaggagctgggctggccagaaagaggatcccaagctcctctgaatgcctctcctgcctgctgcctcccaggtgtggccacaggcccttagrgcccttcccttgcattacgttaatctctaactcctatttaccctgccctccccagcttactccacaaaacaaaccatcactctgcatcaaggcagatcag

SEQ ID NO: 335115 - DNA, 201 bp, Homo sapiens
ctacatctcctcgctccccaatcacatcctacattctccccacccccagcacctctaccctggattttaactttcttttgtatcaaatgcccttctccccrcccataccccacaatctccacctgtccaaggtagggcatgtgtgtccgttcacccatgaagggttatcctcccatcttctaatctctgccaccctttatg

SEQ ID NO: 335116 - DNA, 201 bp, Homo sapiens
cagggtttctccaccaggtggccagagccggacccaaagtcagggttctgagtctgcagttcccatgctttccattaggccaggctgggagtgatccgccrtgtgggaaagatctgcactgtccaatacagtatgtgactctttatatttaaattaattaaaattaaaggaaaatacaaaattcaatttctcagttgtact

SEQ ID NO: 335117 - DNA, 201 bp, Homo sapiens
cactacatctagcacatagtaggccctcagcaattctttgccaaatgcaaaaggtaaatcccagtgtagcttgaaactcttcctgatttcatatgcaatartgatcctagaagatgtcacaaggagccctgttctttgcagatcggatttttcataatccaggagtaggtcggagagcacttggattagcctctaaaccct

SEQ ID NO: 335118 - DNA, 201 bp, Homo sapiens
ccctgttctttgcagatcggatttttcataatccaggagtaggtcggagagcacttggattagcctctaaaccctggagctgtagcagcagcacgaacacktattttttattttctcctttaattatgcccttccctacccaccaccccgagtctcaggctgagagtgtctatttagtttccttgagggagagtgaagtga

SEQ ID NO: 335119 - DNA, 201 bp, Homo sapiens
agcctcacatcctcagtggatagatagaattcaatcctcgggagccccactctactgatctcccagagggcagggccatgcctggtgcagagcaggagccyagggcacattatttgactgtctcccaaccagtcccactgtaccatgtgctcagaatcactgaccccaaggggctgggcctctgaagcccgagcacttgaa

SEQ ID NO: 335120 - DNA, 201 bp, Homo sapiens
agtgctcaatagccacagtgtggtggtaagtggctaccacattggacagcgcagatacagaacattttcctcattgcagcactgagcagactaatgttgcygttctagtgagggcaggctgccacaaactagttataggaatggctcacctagagcctacagagaactggaaccttctatatctttccattgctggttccc

SEQ ID NO: 335121 - DNA, 201 bp, Homo sapiens
tatgaatgatgtctacacatacaaactgacatcctcataagcacacccacctgttcatgtgagtatgtctacactggacacctgcccctgcagcctctctsttatccaggtcatcattcatgtacagctgacccttgaacaaaggtggtggttacaggtgccaatgccccacacagtcaaaaatctgcataacttttgcct

SEQ ID NO: 335122 - DNA, 201 bp, Homo sapiens
ctgatctgaggcaaatacagaggaatgctcaacagtagctgaagtctaagatacctggctctgtaggtaaaaataatcacatccctaatcaaaaaaactcmactcagtcaacaacttttaaaatctttcaagtcttgaagctgttgattagctcagaggaaagactcagaaatttggaaatatttaggcctgggttctact

SEQ ID NO: 335123 - DNA, 201 bp, Homo sapiens
gagaaaattcagagaaatgttaaaaataagatatcagccacataacaagcactaatcattgtttacatattggtatatttccccagcctttttttttccaygcacttataaaagtggtgttcttattatatatacagtattttatatttctttttcaaatttaattatctgtcatgagttttctttcaggctattaaccat

SEQ ID NO: 335124 - DNA, 201 bp, Homo sapiens
acatcctcctaaacacaggcacaggaacacggccaggccctgcagccccccaggcccatccgcccccaaactgctgcgataatgtgcctctgagatgaaastatcactcactatgccaccctctcttcatgagaaagttcacaccccttcaatgaaaatataagacttcgggatctttcttctgctctctgcccttccctt

SEQ ID NO: 335125 - DNA, 201 bp, Homo sapiens
ggggagagctgtgtggaatggtggaggcagggaggcctcctggaggttgcaggtagtcgactgtggattggaagcaggggaggaggaaggggtcagagaayggggaacaggggtgctggtgtgagtcaaagcgcaacagccagaatgcatgtgtgggaagaacacacagggctgcaaaggccggcgtggtgcctgagccca

SEQ ID NO: 335126 - DNA, 201 bp, Homo sapiens
ttctccagaggcccaaagaggtcacaacttttcttcaagtgagtcagggatagatctaaaagaaaagaactcaaactcaggtaataacagctaaggttaawcgctgaacgcttattgtatgtcgggcactgttctaagcactctacagttttaaaccgatgagacattagcatctctgtcttatgaatgaaaacactgaga

SEQ ID NO: 335127 - DNA, 201 bp, Homo sapiens
agacaacacccctccaggtttcctgttgaaggaaaacatctgctgtccacagccctgaaactctgcgtcacttttacctgccaataccaaggagatttggraaaataaatatgtggcgccatgatcccatgaagaagggacatcccatgattaagttccaagtgggtaggggaagggagcgcctgctcagccttccatcat

SEQ ID NO: 335128 - DNA, 201 bp, Homo sapiens
aatcctacatgaaaagtaacttcacatgaaaattccaaatccatttgtcagagcgtgtgtagctggactcactcctctgtgagttgcacttgttccaggckgtccatcaactctctgtattgtctttgctttatttcgttttcctgtctgttatccatttgtttcaggagactccgggaatattcctcttgcttaagagca

SEQ ID NO: 335129 - DNA, 201 bp, Homo sapiens
atttgatggtgggagctattgaaatatcctccctctgatgccagtaaatttcatcctggtaacttgggcatggctgagcccatgggtaaatagagttcagkagctgaaccagagatgatcattcaggaaagctgatgaaataggtaaagtcaggagtgataggtaaaagatttaaaatggttcggcataagcactgaccag

SEQ ID NO: 335130 - DNA, 201 bp, Homo sapiens
gtggaaagggattcatctcacttgatctagaagtgcacaggaaggagcactgtgagctgttcctagcattttgtaaagtccgagagaaaccttgatgatgytttaacaaatgaagtttgccaagcaatcttttaaaaatcaaagatccatgtcaggtggaaagaataagttggcaagagacaggtgttggccctggattgc

SEQ ID NO: 335131 - DNA, 201 bp, Homo sapiens
aaggggcctgagtaccatctcgttcaacccccttgttttacatgggaaacgaggctcagagcagaaagcgcttccccaaggtttgactcgaaacccagtgsttatcccaccctgtgctaaggcagggtgggggaatcccgggggatggagcttggctttaaaatgaccctgctgagccttggagatcttctcttggcagaa

SEQ ID NO: 335132 - DNA, 201 bp, Homo sapiens
cacacgtgtaacccatgaggatgcccttgctaggatctttgtatcttaccccaggcttagctgagtttcccaaggaatgagtggtaggtgggactgccacygtgaggagaaagcgtgctgtgcccacagcgtgaacccaatcccgtgacctcccagacccccaggttccctaagtaacatcacagaatgcctgttgctatg

SEQ ID NO: 335133 - DNA, 201 bp, Homo sapiens
ggaagtgaagagacatagaaggaaaggctgtggtcagagactgagatgggacagtgtgaaatcctagagtaggagtagttcctgggaataaaaggtccagraagcagccaggggatggttacccaaggtggagaggagttctggggttccttaaatccggtgagttctaggaactatgaatccagattattggatgagtga

SEQ ID NO: 335134 - DNA, 201 bp, Homo sapiens
atggctggaaggttcaagattgggtatctgcatctggtggaggcctcaggctgcttccattcatggcaaaaggccaaggcaaaggggagccagctgtgcasagatcacttggtgacagaggaaacaaaagacgggtaagggagatgccaggctctttttaacagccagctctgaggaattaatagagtgagcactcactcc

SEQ ID NO: 335135 - DNA, 201 bp, Homo sapiens
atcactgtacaattagctggggagatgcggatgaatgaggagctcaaagagcttgcattgtgtgatagaaatcattattccctatttaacagagagcagaraaaagttaaataccttccccaaagccacagagctagtcaagtgacaaagcctcaattcaaacccaggtctatctgatttgaaagcctagagcccctttgg

SEQ ID NO: 335136 - DNA, 201 bp, Homo sapiens
agagttggcagacaaactccaaacattaagtttccgccaactccttcatagatccaatccaccccttcctaaaacattaaactatagtatcagatcatcayaggtgctcaatgaatgtgtttggatggatgaatttatggatgggtgaatggatggatggataaatcaaggatggatggatgatggatggatggatggatg

SEQ ID NO: 335137 - DNA, 201 bp, Homo sapiens
gaaagcaaaatataaggactttttaaaagctttttatagtcacccttgtatctcagcagtatctcattatggttgacctttgatctttactgcagtatacygagaaattttttgaaaatctaaaaatcccttagtgccactggggaacttaacttaccccagaaactgcatatgcaggattgagaaattcactctatgctg

SEQ ID NO: 335138 - DNA, 201 bp, Homo sapiens
ttttttttttaagaacctgtaaggctatcaaaattaaactgaagctggttcttgagtcagacagaaccagatttaaattccagctccaccacttaccaagygcaatagagtacatagcctgtgagcaaataacttgcaatctgtagctccagattccttctctggaaacagcgcctacatcataaggtgatgtgaagatta

SEQ ID NO: 335139 - DNA, 201 bp, Homo sapiens
tgtcacaattcattatctccatttcagaaatcctgaataccacatccagtgctagagaagctacattgagggttaaaaattacctaaagtgcctttggagkgcaataactacgatagtgaagagaaccaaaagctgagcctggtagagagaagactcagagactgctctgtctatgtcagggatgtgctagtacctccaga

SEQ ID NO: 335140 - DNA, 201 bp, Homo sapiens
ccagggctggggggtgaagagttcaaaattgcaaaaggggacagataagcagaagcctccccggtaagtgggagcttctcgcaggacagaaggatagacakcaggctgctgccagcactagaatcgggaagctgcccagagccctgagtagggagctgagagcacggcttcttgggaggggtcctgcctctgttccacagt

SEQ ID NO: 335141 - DNA, 201 bp, Homo sapiens
ctaaagtgcctttggagggcaataactacgatagtgaagagaaccaaaagctgagcctggtagagagaagactcagagactgctctgtctatgtcagggaygtgctagtacctccagattctaaaagctcttctttcagaagagaattggacttgtttgtatgtatctacatggaaaagaaccaattggtggaatgctaaa

SEQ ID NO: 335142 - DNA, 201 bp, Homo sapiens
ggagagatggcctcgccctgaatccacccagcaccccctgcacaaagttcttcctgcagagccatgtctcccaaagtgtgttccaccataggtggtgaggwtgagatgcaacagagtaaggtgtctggtcaaataagctttgaacatgctgggttaaacaggtttcttattgcaagatttttcagagcttttaatacacat

SEQ ID NO: 335143 - DNA, 201 bp, Homo sapiens
ctgctaataaaaagctccaccttcctacccctacccactaatggggatgtatgttaagattttttggcctgaaataaacttactatggctcagttcctgcygtggagcttggccactgaggagaacctgccaggacagaaggaatctccatttagtctgtgaaccacagcaacagacagctgggagtgtccttctcaaagc

SEQ ID NO: 335144 - DNA, 201 bp, Homo sapiens
ccatttagtctgtgaaccacagcaacagacagctgggagtgtccttctcaaagctgagacaaagactgatggcaaggactgattgccccactcttcccgcwctttccctgtcatgcagtggatgggtgcattgtacccgggcaccacctcctgctgtcacgagttttccctgatggtttccattcacatttttcatttctg

SEQ ID NO: 335145 - DNA, 201 bp, Homo sapiens
gtaccccacatgcagacacatggagctgtttgtttttaattaaatcaatccatttgtttacattcattggtttttgtgtcttgcctctatagccaattttgctcccaggcaaaaccaagtgggatggttttctgggtcccagagcaaagagaagaaggacttcccattcttttctcagaaattcaagactaaagccatcaa

SEQ ID NO: 335146 - DNA, 201 bp, Homo sapiens
atttctgttacttacagtagcaaggatgggagttgactgtgttctgagtttgcacctggagccctaactctgtctgataattggcctgggctggacagaarcttgatgtcagcagcagctttggcctttaggcaggccaggaaaggaaatcacccgcttcttccctagttcccaaaccctaaatacagggattcttaagct

SEQ ID NO: 335147 - DNA, 201 bp, Homo sapiens
gaatcaagcccaacagtctgagatatctaagcctgtcacagcccagctccaaaattcagtgttctaactactctgatctgttctccatgcccaagtacacygatgttcttctccatgccttggcacgtatggtcctgtctgcctcaaactcctgcatctcccctttccttggtctccactcatcacaattctggttatcct

SEQ ID NO: 335148 - DNA, 201 bp, Homo sapiens
gtaaacatttcataatattgtagcttcaaagaaggcaggctgtaaacacatttgcatccagttagctgacggtttatagatctgagggactcttgggtccwtgctttccatgaggaagcatttatttcattggctttgcctctgaagtgcagttcccatcaacccactcagagaggaagtgcttcattagcatctttggtc

SEQ ID NO: 335149 - DNA, 201 bp, Homo sapiens
ggccctggtctagctattttgtgtgcattattgttgagccctataacaactccttgaggtgcttattatttcactgagatgaaaacgaaagctgacttatytaagacatcacagctgaccaagagccaatttcctgtgttgttcctgaattcatagtccagcttctggttggccctggtaaacatgacacatcattctggc

SEQ ID NO: 335150 - DNA, 201 bp, Homo sapiens
tcattctggccttcacttaaactcccttgccagataagtctgcacccaggaggggcacacacatgggtgcacacacacactctcacacttgggaaacatamtatatcatgttggacagagcacttgggctggagtcagaggtagtggttcagcccccttatctaaataccatgtggccttggagctactccacagctccaa

SEQ ID NO: 335151 - DNA, 201 bp, Homo sapiens
cagttctcactaaagattgtagcactttaaaacacaaagtatattggaacattttacttttcattccttcctcaccagccatagatgacaacaattttttwaattatccaaatgtagtaagccataaatagtcctactttaatttccttttgctttgttttgttttggtttcaccatcgtggagtgttgctgattgtgatt

SEQ ID NO: 335152 - DNA, 201 bp, Homo sapiens
ctttgtccctggcaatcacagccatggtgatcaaaaggataggtgtggggagaatttcctagccctgagaaggaaatacgtacatataagcaggagttgastggaccattcctcagataaccttgatctcccattgacctgtacaatgcactaaatgttctgtttgctcacattgagttttgtctaaaaagagtggcttct

SEQ ID NO: 335153 - DNA, 201 bp, Homo sapiens
caaaactaaggcaccagatttagggctcagtgatgcagaaatatacaatgcagtgagtaagtgcagggctagtctgtctctctctctctttctctctgtcytttttttttttttttttttgacagagtttagctgttttgtccaggctggagtgcagtggtgtgatctcagctcactgcaacctccgccccctgggttcaa

SEQ ID NO: 335154 - DNA, 201 bp, Homo sapiens
gccccctgggttcaagtgattctcctgcctcagcctcccaagtagctggcattataggtgcccgccaccatgcctggctaatttttgtatttttagtagaracaggttttcgccattttggccaggctggtctcaaactcctgacctcaggtgatctgtacccaccccactgccccccagcctcccaaagtgctaggattg

SEQ ID NO: 335155 - DNA, 201 bp, Homo sapiens
ttcagagaaatgttaaaaataagatatcagccacataacaagcactaatcattgtttacatattggtatatttccccagcctttttttttccatgcacttataaaagtggtgttcttattatatatacagtattttatatttctttttcaaatttaattatctgtcatgagttttctttcaggctattaaccattcttcca

SEQ ID NO: 335156 - DNA, 201 bp, Homo sapiens
aaggaaagtatagaataagattagatattcattaaagtctcttctttagaactgatgatagcaatacctctaaggtgaggataatcaatatatgggtttgsatctccctatggttagtaattccctatcaaaggggttgtaataattttggatgaaatcattttgaggtggcagaggaatgaagggagctctgatgctccc

SEQ ID NO: 335157 - DNA, 201 bp, Homo sapiens
cacttataaaagtggtgttcttattatatatacagtattttatatttctttttcaaatttaattatctgtcatgagttttctttcaggctattaaccattmttccatagtgtcggtttaatagctacctgatgtatcataatttacataagaaaacccccacagttgggcacttaggttgtttctagtcttttaaaatata

SEQ ID NO: 335158 - DNA, 201 bp, Homo sapiens
tgttttgaaagatatagtagagcacagtgaatgtatgactgaatgaatggaaaagaaagatggaagtgtgagaaggaggtagagagggaggcccacttccytaatatctgaaaacattgaggggagaccaacttcttagccttgtcacttctgagacacacagttctcagagagcaccagtggcatttcccaagtctaaat

SEQ ID NO: 335159 - DNA, 201 bp, Homo sapiens
agggcctcccatgagaaagctgagtgtgttcaggagctccagtgccagggcagccctcactccagcagggccaccctgagttctacacagaaaaagtctcygtttttcaccatgtgttgcaccttctcatcttgggataaaggtggggctgcacgtgtcccattctcacagtgtctcttatgagaacagttcctgcaactt

SEQ ID NO: 335160 - DNA, 201 bp, Homo sapiens
ctcctctccccacattacacctgtgcctaatttctgttgctttataagtaaagattatttcttgatttttagaatttttattgctaaaatgaatttagaamattattcaaaattttaaagaaaaaggaaatggtatttctcccacaatgttgcatttgtgtttctttccaaaatttttctatgcctatacataaagatagt

SEQ ID NO: 335161 - DNA, 201 bp, Homo sapiens
tcgttttaccatatataaaaattaactcagtgcatctaagatttaaatataagacatcaaactataaaaaaatcctcaaagacaacataagaaatactctyttcaacatcaactttggcgaagaatgtttgactaagtccccaaaagtaatagcaacaaaaagaaacaagaagacatataagtgtccaacaaacatgaaaa

SEQ ID NO: 335162 - DNA, 201 bp, Homo sapiens
tgactagagatgtatacacagcctttcctctgaactcattccagctctccccgttccccagcccggtctgcaagtcaagagtctggaccttcccagccacwattgacctcctccaggaggacccggcagagggtgaggagctgccccttggctccctggttccctggcccccacaatatcaagtgatgggacgaagaggat

SEQ ID NO: 335163 - DNA, 201 bp, Homo sapiens
tagttttagaaggaatggtaccagctcctctttgtacctctggtggaatttggctgtgaatccgcctggtcctgggcttttttggttggtaggctattaawtactgcctcaatttcagaacttgttattggtctaatcattgatttgtcttcttgggagggtgtatgtgtccaggaatttattcacatttttctagatttt

SEQ ID NO: 335164 - DNA, 201 bp, Homo sapiens
cagcaggagtggtcattcacaccaacgcacacacagataacccaatagcgtatgactgctgtgatggaaggagctgcaggaggtggggtggaggggccctraacacaggctaggtgttaaggtgagcatctctcttgaactgaaattcctggttgtttcattctatgcttgtatccccagggcccagcacaatgtgaggca

SEQ ID NO: 335165 - DNA, 201 bp, Homo sapiens
gtgagcctcctgccgcagcctcctgagcagctgggaccaaagacatacaccaccatgcccagctaatttttaaaaattttttgtagagatggggtctcacygggttggctaggacagcctcagactcccgggctcaagagaaccttccaccttggccttccgaagtgctgagattacaggcgtgagccaccgcatcaggcc

SEQ ID NO: 335166 - DNA, 201 bp, Homo sapiens
gtgtcgatttgagatctttccagctttctgatgtgggcatttagggctacaaattttcctcttaacactgctttagctgtgtcccacagattgtggtacawtgtctctttgttctgtaaactcccctcttaatactgctttagctgtgtcccagagattctggtatgttatatctttgttctcactggtttcaaagaactt

SEQ ID NO: 335167 - DNA, 201 bp, Homo sapiens
aaatgaggaccatctaagagtccaacctcaatcactggcttagcctccagaccctttcagaaatgacacctgggcgggggggatccagttaccttcttacycccccctctcctcccaccttctggttcttcctaataatcctggatacttgttggaaaaaaaaaaaacaggaacaccgggagtaggctcagtcaatgggtg

SEQ ID NO: 335168 - DNA, 201 bp, Homo sapiens
ttctgccttagttttgttatttacccagtagtcattcaggagtacgttgctcagtttccatgtagttctgcagtttggagtgagtttcttaatcctaaatkctaatttgattgcattgcagtctgagagaatgttagttatgatttccattcttttgcatttgctgaggagtattttacttccaattatgtggtcaatttt

SEQ ID NO: 335169 - DNA, 201 bp, Homo sapiens
gcacgggaaggcatacgatgacttgctggatgagttcatgcaggctgtgacagacaagtaagtggaccagtctgtcccttttgaaagaggacttttaagaratgccgtgactaaagtcaacactggttttggctgatatacaaagtaaaggcagtagatgcatgcttttccaggtattctgaaaattccaacttgacccct

SEQ ID NO: 335170 - DNA, 201 bp, Homo sapiens
ccctgaggaacttcagctgctttcatgcggggaataattgcatttctacatgtggggaaagcactcacacatctgggtacctcggccccaaagacacatcrtgggcaagaatcaggcctgcccttctccacaagcaggcacatgttgggcctgattccccacaaagtgccttgacttcatgacagtgaaacggcctgcttg

SEQ ID NO: 335171 - DNA, 201 bp, Homo sapiens
tagttcccaaaccctaaatacagggattcttaagctgcttagatgagagtgttaaagaagggaaataataaataaacctttttaaaaagtcatctactttktagctctaggaaaattttttttttagtctctccatttttttgtctctgtgcattcattcattcattctctctctctctttcccctcaccataatcacaca

SEQ ID NO: 335172 - DNA, 201 bp, Homo sapiens
tagatgagagtgttaaagaagggaaataataaataaacctttttaaaaagtcatctactttttagctctaggaaaattttttttttagtctctccattttkttgtctctgtgcattcattcattcattctctctctctctttcccctcaccataatcacacacacacacgtaatccctgagatacacaccatattggaaat

SEQ ID NO: 335173 - DNA, 201 bp, Homo sapiens
gtctctactgtgccctgatcagatttacagggatcaaaggaattgttacttgtcgggcctttgtgcagagcagagcaccaaagttaaagctaaaaacaagsagataagattccaagactgttcacttgcctcttgatctgtggtgtcaaggaacacatctgtttcttttgctgtgttaaaaaaccatcctaaatcttactg

SEQ ID NO: 335174 - DNA, 201 bp, Homo sapiens
aggatgagacctggaactggaacagtctaacttccaccacattatactggttgaagcaaatcataggtccatactagattccaagggaggaggttatacamggaaataaatactaggaggtatggtgcattgggggccaccaatgtcagagactgccacaccctatctagcctgggtaggatgaggaatggggcagctctc

SEQ ID NO: 335175 - DNA, 201 bp, Homo sapiens
gttattgctatcagatacgtttaccatacagcttgctggagatggaaacaaggctcaggcagggtgccctagtgaggtgttgtcagcattgttcagatttkttttaaagctcatcagctatctttagtgttactatattttatatggggcccaagacaattcttctatttccaatgtggtccagtgaagccaaaaggttgg

SEQ ID NO: 335176 - DNA, 201 bp, Homo sapiens
acacggaaataaatactaggaggtatggtgcattgggggccaccaatgtcagagactgccacaccctatctagcctgggtaggatgaggaatggggcagcyctcactataggaaggcgtgagaaaagaataactcagttacacagataagcaggggaatggtatataaaatcaatgagcatgtctacctagtacctgctgt

SEQ ID NO: 335177 - DNA, 201 bp, Homo sapiens
tctcaagaggactaaagaggagagcccacagggaactacagtactaaccgaagcatgaggagggaagagcctgatgagttcctagatgtggaaatgagagrtggaaatccaagaggccaagaaagaggagtctgtggtatgtgagggtgagctggatgtgaaggtaaaagtgagaggaagaattgtcagattgtgaactgt

SEQ ID NO: 335178 - DNA, 201 bp, Homo sapiens
atagtcaaaaacatttcgtatgtatctattgaagtttagataacctgagactctacactttcttagcctctaagtgtctgtgtaagtctggagctcaagargagttctggtgcagaaacataaagttgggagttgccaacccatagatagtattaatatcaagggaatgattgagatttcccaaagagaagagaatatgac

SEQ ID NO: 335179 - DNA, 201 bp, Homo sapiens
gattttaaataaggttaaataagaatggtgctggctacatctattatttaggtttctccagagtaacagaaccaataggatattaggtatttagatacttsagagtggatttattatgagaagtggctaacgtgatgatggaggtaaagaaatcccatgatatggtgtctgcaagctggagaaccagggaaactggtggca

SEQ ID NO: 335180 - DNA, 201 bp, Homo sapiens
atgggaacagatggaattgattagcttttaagagacccttgagctctgcatttctgcagctttgcctttcctagtagcatacactgagaggttcatgaagytataaattaatcagctcaaatcaaggccaaggggaaaaatgactccctgccccacgggcagggcatgggcacaaatcagtggaaatgacaggactagaac

SEQ ID NO: 335181 - DNA, 201 bp, Homo sapiens
ttttctgtaaatactgtttgtattagtccgttttcacactgctataaagatactacctgagactaggtaatttataaatgaaagaagcttaattgactcayagttccacatgtctggggaggcctcaggaaacttacaatcatagtagaaggtgaaggggaagcaggcacatcttacatggcagcaggacagagagaaaag

SEQ ID NO: 335182 - DNA, 201 bp, Homo sapiens
gaaatcccatgatatggtgtctgcaagctggagaaccagggaaactggtggcatagctcagtataaatccaaagtggggccgctggtgcacatcctggagwcagaaggccaaagagcctggagttctgatgctcaagggccggagaagatgggtgttccaaattcagaagagagaacgaattcacccttcctctgcctttt

SEQ ID NO: 335183 - DNA, 201 bp, Homo sapiens
acacaaggaaatagacaattcaggaaattcactgactccccaaacctgtacaaatagagatatagctgaatctagggttggagtttctatttgcctccagractctttctgctactaagctataaacttccagtggtcaggagacaaatttgtttgctcatcattttatacccagcagctagcacagggccttccatacag

SEQ ID NO: 335184 - DNA, 201 bp, Homo sapiens
gcatggaaccaacccaaatgctcatcagtgatagactggataaagaaactgtggtagatatatatgatggaatactatgcagctataaaaaacgagatcayatcctttgcagagacatgaatgaagctggaagccatcatcctcagcaaactaacacaggaacagcaagccaaacgccgcatgttctcactcataagtggg

SEQ ID NO: 335185 - DNA, 201 bp, Homo sapiens
gactaaaatgtaaaacccaaaactataaaaaccctagaagaaaacctaggcaataccattcaggacataggcatgggcaaagactttatgactaaaacackaaaagcaattgcaaccaaagtcaaaattgacaaatgggatctaattaaactaaagagcttctcaacagcaaaggaaactatcatcagagtgaataggcaa

SEQ ID NO: 335186 - DNA, 201 bp, Homo sapiens
aaaccagccaagttgacacctaaaattaaccatcacactaagataggccttgcaatccaggcagaaggtcatgattatgagagctcaaaagtggaaggggmtacagtcatctaatgcagtggtttttaaaccaagcttccctgggccccaggactccaaagaagcatatcaggagtgctagaaatgaaatactttccacca

SEQ ID NO: 335187 - DNA, 201 bp, Homo sapiens
ctccctacttaaagacagagctctaactctataactttgtttaaaatgcattgcatgttaaatttttaaaacatgaatgtaaaaagtaaatgtaaaaagtktaaaaattcctttaaggatcttcagcaagaagacttgcatagggcttagtgggcactcagtaaatgtttctgaaacttaattggatttaaatgctaggat

SEQ ID NO: 335188 - DNA, 201 bp, Homo sapiens
caacaactccttaagctgataagcaacttcagcaaagtctcaggatacaaaatcaatgtgcaaaaatcacaagcattcatatataccaaaaaaaaaaaaaagactaaaatgtaaaacccaaaactataaaaaccctagaagaaaacctaggcaataccattcaggacataggcatgggcaaagactttatgactaaaacac

SEQ ID NO: 335189 - DNA, 201 bp, Homo sapiens
tttttaaaccaagcttccctgggccccaggactccaaagaagcatatcaggagtgctagaaatgaaatactttccaccaaccataaaaaatgtaaaccacytgaggaaacactttattgtttttcattgccttctatatctggtttctgctcaatattttattaaagaattattctgcaaaaaatgtttgaaaattaccaa

SEQ ID NO: 335190 - DNA, 201 bp, Homo sapiens
aaaattcctttaaggatcttcagcaagaagacttgcatagggcttagtgggcactcagtaaatgtttctgaaacttaattggatttaaatgctaggatggygagataaaagtactttcaaaaagtttctgttaccaggataaaggatagactttatcccttatttgcaaagtaactttatccccaaatccagcctatcagc

SEQ ID NO: 335191 - DNA, 201 bp, Homo sapiens
gtaagggggtgggagtggaggtaagaagtagtaaggagcagagaaaattaccttttactagacaaagatgcaggaagcttgaattcaagtaatagcaggamaaatacaggtaaaatgctggctaaaataattaagataaataggtaaatgattttgattattgaactgagagggcagtgtttgagagtaaacctctaccta

SEQ ID NO: 335192 - DNA, 201 bp, Homo sapiens
aggctggagtgcaatggcacgatctcacctcactgcaacctctgcctcctgggttcaagcaattctcttacctcggtctccctcggtaactgagattataygcacctgccaccacacacggctaatttttgtattttagtagagatggggttcaccatgttggtcaggctggtcttgaactcctgacctcaggtgatccac

SEQ ID NO: 335193 - DNA, 201 bp, Homo sapiens
tcaccatgttggtcaggctggtcttgaactcctgacctcaggtgatccacccaccttggcctcccagagtgctgggactacaggcgtgagccactgcaccyggcctctgtgtgttcttaaaggtgaactgaatcttttgtaggcaaaatatagtgggtctttttttttttttttaaaccattcagccacgttagccttttg

SEQ ID NO: 335194 - DNA, 201 bp, Homo sapiens
aaactcattctttgtccagttttgtttccttgctggcaaagagttgtgatctttttgaggagaagaagcattctggattttggcattttcagcctttttgmcctggtttttcctcatcttcgtggatttgtctacctttggtctttgattctggtgaccttcagatggggtttttgagcgttcgttctttttgttgatgtc

SEQ ID NO: 335195 - DNA, 201 bp, Homo sapiens
gccttgtttggggaatttcttctaaatggcttcctgtgaaagtacacaaaatcatatcaccttcccaaaaaatatgcctatttgggaatttgactcttcamactggaaagggtatacttatcccgtgagggaatacattttgccagcaaagagatagaaacagtaggtactgcaaccaaaactctgggaagtgagctttat

SEQ ID NO: 335196 - DNA, 201 bp, Homo sapiens
ttgtttccttgctggcaaagagttgtgatctttttgaggagaagaagcattctggattttggcattttcagcctttttgccctggtttttcctcatcttcrtggatttgtctacctttggtctttgattctggtgaccttcagatggggtttttgagcgttcgttctttttgttgatgtcgatgctattgcttcctgtttg

SEQ ID NO: 335197 - DNA, 201 bp, Homo sapiens
tggtccgtgtgttcctgagggtgaggtgttcttatatttttttgcagctgtttgaagctgagtgttacttgggcctttcaaactcaccactcagagtcagtcacccgctcaagtaaccaaacatcttttcatgagacacagttctctgtacagaaatgagaaacagaagcttgcccaagagaaagctgcaaaattgctctg

SEQ ID NO: 335198 - DNA, 201 bp, Homo sapiens
taaggataggttaaaataattttaaatgcccagaaagtaagaaaatgaggcagagattgtgcaggggacaactagcattctcacaacattgctgagaagcragttgctatgccttcttagaaatgtaactgtcagtttctggtaatatttcaaatgtatcatacattagccaggagtggtggcatgcacctgtagtcccag

SEQ ID NO: 335199 - DNA, 201 bp, Homo sapiens
ttccccaaccccttgcacttcccaggtgaggcgatgccccaccctgcttctgctcaccctctatgggctgcacccactgtctaaccagtcccagtgagatragccaggtacctcagctggaaatgcagaaatcacccgccttctgtgttggtctcattgggagctgcagaccggagctgctcctatttgaccatcttgcct

SEQ ID NO: 335200 - DNA, 201 bp, Homo sapiens
tgtcacagggtatgactctatccatgatgctacagacatcatagaaagtccaatgatgaaaacaattttccagaatgaaaaatccctgggagactagaagwcttatagttcttgcacaattgtagaagatctttggttttacaccatgagttttccaagtctttgatcctgtgtaacttactcagtgtagtataactatag

SEQ ID NO: 335201 - DNA, 201 bp, Homo sapiens
actgaatgaatggaaaagaaagatggaagtgtgagaaggaggtagagagggaggcccacttccctaatatctgaaaacattgaggggagaccaacttcttrgccttgtcacttctgagacacacagttctcagagagcaccagtggcatttcccaagtctaaatttaacaccagaagcctcagtgggagtagattcagaac

SEQ ID NO: 335202 - DNA, 201 bp, Homo sapiens
tgtttttttcttttcaaatgggttagaagaagacttttctcctattttgtccttttctacttggggtcaggacatggtatttagcccagagaattgcatamgggtcagtaaaaactatacttaatttaaatatatattatgcattcatttttttgagatctactcacatatgcccttcattgacccccccccccagtgaaa

SEQ ID NO: 335203 - DNA, 201 bp, Homo sapiens
tgagtaaaaacacaattgctacagtcctgcctatataataccatgggacatccacacatctgccccactacctccagtgctgtgagacagttcagctccawcatttcatgaacagtgtccatcaattacacaggaacctctcctggatctacttattatcacctgctgtgagcaagataaggtccctcccctataggagct

SEQ ID NO: 335204 - DNA, 201 bp, Homo sapiens
ccaggattctaggagaggcaccaccacacaagggtatcctctgaacccttgctttggaaggcatcattttatatcctggatacggatgcttagatgtatgwttttgtgccaggaggaactggttatggcaatgtgtgggggagatgtttatcctttggatgaatatttgggtaggaggtttgtgtttcaagaaactgagca

SEQ ID NO: 335205 - DNA, 201 bp, Homo sapiens
gaagtccccattggatggaaagagtcactttctgcttgaagtcagcctgaaagcaaagtcctctgttgagtaaaaacacaattgctacagtcctgcctatrtaataccatgggacatccacacatctgccccactacctccagtgctgtgagacagttcagctccaacatttcatgaacagtgtccatcaattacacagga

SEQ ID NO: 335206 - DNA, 201 bp, Homo sapiens
aacccttgctttggaaggcatcattttatatcctggatacggatgcttagatgtatgtttttgtgccaggaggaactggttatggcaatgtgtgggggagmtgtttatcctttggatgaatatttgggtaggaggtttgtgtttcaagaaactgagcactaattgtaaatacaaccattttgctgtgattgactcacttct

SEQ ID NO: 335207 - DNA, 201 bp, Homo sapiens
ggagctacctcatgcaccaggtcccttcttactatgtctagtctttgagccctggctctccaaggctgtgcaaataatgtcttccaaaggcttttcagctkcccccagccccacgcacactacttatgactttgtgttacagttctctgttcctcttgtctgagtactctgtttgtctttcttctcattgctatgatgggt

SEQ ID NO: 335208 - DNA, 201 bp, Homo sapiens
gtgtgttcctgagggtgaggtgttcttatatttttttgcagctgtttgaagctgagtgttacttgggcctttcaaactcaccactcagagtcagtcacccsctcaagtaaccaaacatcttttcatgagacacagttctctgtacagaaatgagaaacagaagcttgcccaagagaaagctgcaaaattgctctgagatca

SEQ ID NO: 335209 - DNA, 201 bp, Homo sapiens
tttttgagcaaaagcttttattttaacaaagacacattaagttctacttatttatttgtgtgctgtggttgtgatttttttttgcatttgtatatgaaaawtcaatagtaaatgctgatttccttttcctgtggctgtaattgctatgttaatttaaaggtctgattacagaaatgaatgcagctgtgctgctcttgcact

SEQ ID NO: 335210 - DNA, 201 bp, Homo sapiens
gttgtctctgttacagaggcagagccttcgtgctcgctattttcccagccttgaatgtcctttcattttcagggctgtttccatctcatcattcaggcctscagataggtccacagcaggcaaggtcaagtgtggaggtctgtacaagacaggatgttagaactgagcgtcctgccaaaagcttagctgaggttctgtagc

SEQ ID NO: 335211 - DNA, 201 bp, Homo sapiens
gtcaagtgtggaggtctgtacaagacaggatgttagaactgagcgtcctgccaaaagcttagctgaggttctgtagctccaagcttctcctgttggttttmacacaacatatgcaaagaaaaatccctaggcatatagcatccagactacaaaggaagttaatgaggattttattttaattttaaaagattgtgaaaagct

SEQ ID NO: 335212 - DNA, 201 bp, Homo sapiens
ggaaggagctcaggcttaggaattcaagggacatggatttacatcctgaccctgccacttactagcagtgtgatcttgggaaggttacttgatctatcttycctgaagtttgctatctgtagaaagaggataacagttctaacctcctaaggttgttttgaggattaaaagagatattatagctatttaaagtgcttgttt

SEQ ID NO: 335213 - DNA, 201 bp, Homo sapiens
gactttaaaagtcatgaccttattcccaggaaagcgctagcaactgaagagaacactcagaaagggcctcattaatcaaaaaaccttcatggaggacaccygtggcctcatgccaacctgatatgcacaatctaaggacaaatatgggctgacatacatgctgaagcccccaagccagccagtgggttggtggccaagaaa

SEQ ID NO: 335214 - DNA, 201 bp, Homo sapiens
tttcctgtgcttcacagagggttttctggaaactctccagctaaaaaaggctgagagcccaaagagatcccagactcagccctaccttctaaaggattcayggtctccctgagagacaaggcttgttatgactgagacacagctgacatgtcctgggggaaatgggaagggaaactgcattccaactagtggaatctggaa

SEQ ID NO: 335215 - DNA, 201 bp, Homo sapiens
cttccactatctctctctgctccgtggatgcagggtgtcccagggttgtgtccttgccctgctccctgctctgtgcacaggcgctgcctgagaaccctcayccaatcccatggcttcaactgctcacagtgccctgagctgcctgttcccctccgctgacctcatgtatagcccattgcttcatgaacacgttcgttagaa

SEQ ID NO: 335216 - DNA, 201 bp, Homo sapiens
gtacctagtgtctgttctctctgtctggtccttgggctgagctgtctgtttcctgtgcttcacagagggttttctggaaactctccagctaaaaaaggctsagagcccaaagagatcccagactcagccctaccttctaaaggattcatggtctccctgagagacaaggcttgttatgactgagacacagctgacatgtcc

SEQ ID NO: 335217 - DNA, 201 bp, Homo sapiens
gtaagtttgcctttctttccccatccccaaccttgatgagtaaaggacttcaccctccatcctcggcccttcctgggctcctccttctcattcatctccayatctggtctattattaaatcctgtccttaataatcattgcctccgaggactcagtgcctatagtgtgctggatttttatgtacattatctcatctaattt

SEQ ID NO: 335218 - DNA, 201 bp, Homo sapiens
acttttccagcaagctgacatttgtcactttggcagggaacaaagcttgtctatctcgaagtcttttgggtgatgagatatctgtagaataaagaatgaawgaaaacgagtctcctttcaactctcaaaccactaactgtgtagtttttaccaagggaaattttcatataagatacactctcttatctttaaataatcacc

SEQ ID NO: 335219 - DNA, 201 bp, Homo sapiens
ccctttctactgagtcacactgacttttacctatctgtgggtgggaccccttctgttcctttgtctcctgagtatgcacttatgtgtgggtgttcttttcytgtttttcccaggggatggcctttacccttgaagaaaggctgcagcttggaatccacggcctaatcccgccctgctttctgagccaggacgtccagctcc

SEQ ID NO: 335220 - DNA, 201 bp, Homo sapiens
cccattgattagaaacttcccatttcctcctacctctaatccctggaaaccaccattttattatttgcttctatgagtaggattattttagatacctcatrtaagtggaatcaggcagtatttgtccttctgtgactggctcattgtgtttagcataatgtcctcaagattcatccatattgttgtatattgcaggcattc

SEQ ID NO: 335221 - DNA, 201 bp, Homo sapiens
acctctaccagatgaaattggtaatacatgaactccccttcttaaaaagtttcctgtgcttcctcccacctacagcacaaagttaaactccttagcacaaygcacaaggcccttctcgaggggtgtctcaatcgagcctcatcatccctactccctagtctgtgctgtgcgtgctacacaagactcactgctcctaagtgc

SEQ ID NO: 335222 - DNA, 201 bp, Homo sapiens
acttgacacctctgtggaatctcagaggatatgctagagtcttaatgtccttgattgctatctcctaatcaagttggggactgatattcattcattcattyatcattcattcattcattcatatattctctctctttctttctccctctccctcccccaaccctacccccatttatttagctcctactacaagccaggcac

SEQ ID NO: 335223 - DNA, 201 bp, Homo sapiens
ggagtccttccttcccccggctgagaggacatagtaacaattacaatgagtaacctcatgagggtgaaaaatactcctacatcgctgatgagcaaactgartttcagaaagatgaagtaacatgcccaaggtcaaagagctaataaggagtggagctggctgtcaaacccaggtctgactccaaagcccaagttcttacat

SEQ ID NO: 335224 - DNA, 201 bp, Homo sapiens
tacattgattcaagaatgatggcaggcaaacagattcttaacgcacttgtccagatctttggcttctcactttctctgtaattctactcctctggcctcamagcatcctaaagcttagcttttagaccctactctgctacttaccagctgctgtgtaactataagcaaagcacttaaggagaaacagaaactaaccttctt

SEQ ID NO: 335225 - DNA, 201 bp, Homo sapiens
tctgcaaaagagagcatggatttgcaccaaaacttgcatgcctacagggcataagggctaagaaaagttgcctgttcctccacagtcccagatgtggggarctctgccaagggtcttctcttgggagctggcggcctgtggccagaggttgatctcaggccactctgtttcaggcacagcctccgttgctgtggcagggat

SEQ ID NO: 335226 - DNA, 201 bp, Homo sapiens
atacggggactaggttaaacaaagcagccccagaagaactagggaaagaaattatcaagccaaaagaccaggagtccagttctggctctgccatttgaccmgactgtgcttatctctcaacttccctaagtctgtttccttgtctgcaagatgagtatcaacatcactgagttgttctgggaaatgacataggctgtgtta

SEQ ID NO: 335227 - DNA, 201 bp, Homo sapiens
gtggatggtcccccccagggaatggtgcccataaggagctcagcattgttctctgtgtttgacaggttaatcattcaacagtaacagtatcaggccagctyggtaagaggaagcccatgcatagcctccatccttaccaccatggctgttttatgcataagtccgttaagcaaaccctgggtgactaaagaaagatgctgt

SEQ ID NO: 335228 - DNA, 201 bp, Homo sapiens
aagtaagacaggcctctgtttcctgacatgccttttcccactccccacttgacacctctgtggaatctcagaggatatgctagagtcttaatgtccttgaytgctatctcctaatcaagttggggactgatattcattcattcattcatcattcattcattcattcatatattctctctctttctttctccctctccctcc

SEQ ID NO: 335229 - DNA, 201 bp, Homo sapiens
atattggaacattttacttttcattccttcctcaccagccatagatgacaacaattttttaaattatccaaatgtagtaagccataaatagtcctactttmatttccttttgctttgttttgttttggtttcaccatcgtggagtgttgctgattgtgattactttattgtgagctctctgtatcagagtctataccactt

SEQ ID NO: 335230 - DNA, 201 bp, Homo sapiens; identical to SEQ ID NO: 70510

SEQ ID NO: 335231 - DNA, 201 bp, Homo sapiens
agtctcatgatctgattatgagctaagaaaactgggaagtctagagtttaaaaagctgtcccacgggcatgctgaccattagctgacatgctactcacaaycaggatgtcaggagggaggttgggaacatcatagcagtctaaggagaagacagtcctggtggggatgactgtggtacccatgtagagacatgaacccaag

SEQ ID NO: 335232 - DNA, 201 bp, Homo sapiens
cttaagcacacaggccctagagcttgattccctggattcacatcctggctctgttatatgatcttgtacaattcagcaaaccataccttattttcccaatytgtaaaatgaggatggcaataatgaggattaaatgaataactgtcttcatgttaagacatataaagtacttggaacaatatctgatgttagtgactagct

SEQ ID NO: 335233 - DNA, 201 bp, Homo sapiens
ccctgaacacccctctcaggtttcccaatctctcctccctctactcttccttctcctttttttcttcctccttcccttcctcatgcccaaaatggctgttygtaggaatggaaggagaggggtgtattttgggagggatttggggactcaattaatggaacatatcaaggttaagggagaataagtgcaggaaggaaattc

SEQ ID NO: 335234 - DNA, 201 bp, Homo sapiens
atagaggctaaaaacactactcacctcaaaagtcccacaccccatcactgtgatgtggaacagcacacacttaagaacaccaggacatgcaggtgccaagyagcagcagcttggctgttggagctctggaccaaggagaacatgttgtggatatttacaagtaagatcccttatttatgtcattcttcatcagaataagat

SEQ ID NO: 335235 - DNA, 201 bp, Homo sapiens
tttctttaagtgatttaaatacttatttaaactgcttgttgatacttccttggatgtcagcttggtgtttcttttgaatgcagtacagtgctgagcctgaycatgatatagtccagcttcattcaggttagataaaaaagtagatatgggaaaaggaggcatggttaaggatgcctggggtagcaaggaatgtcttgctga

SEQ ID NO: 335236 - DNA, 201 bp, Homo sapiens
ccttctcctttttttcttcctccttcccttcctcatgcccaaaatggctgtttgtaggaatggaaggagaggggtgtattttgggagggatttggggactsaattaatggaacatatcaaggttaagggagaataagtgcaggaaggaaattctggttccttttctttcctcctatctggactccaaaggcaccgtcatgg

SEQ ID NO: 335237 - DNA, 201 bp, Homo sapiens
tccagtataaatgccaaagcagtgcttaggaacataaatggaagcagctctagcccactcactaggtttgaaacatccaggcttgcatgtcttctgccttycccccatcgcccaacacacaagaaggaatagtatcttgctttctctccctctgaaatgtaccttgaatctatgttttcacctctactccatttgcactgg

SEQ ID NO: 335238 - DNA, 201 bp, Homo sapiens
cactgctccctggcatcctgctgctgtcatcctgccctccccatcgttcccattccttcctctaactcctacagaatgcagacctgaagatgaggcccacrgtcacaagctggttagggatgggtccaggccagaagcctgtgatgtgtgttctcattgttaagcagacaatgagaagactggtaaggaattccaggacta

SEQ ID NO: 335239 - DNA, 201 bp, Homo sapiens
ggaatggaaggagaggggtgtattttgggagggatttggggactcaattaatggaacatatcaaggttaagggagaataagtgcaggaaggaaattctggytccttttctttcctcctatctggactccaaaggcaccgtcatggcagaatcagcatggggctgtgagccagtggccctactctcatctcagctctgccac

SEQ ID NO: 335240 - DNA, 201 bp, Homo sapiens
acgtgtgaagtggtggagggtatcttctcgttaaggatgaaattccagaccctgctgaaacagtgtgggtgtcactgctccctggcatcctgctgctgtcrtcctgccctccccatcgttcccattccttcctctaactcctacagaatgcagacctgaagatgaggcccacagtcacaagctggttagggatgggtccag

SEQ ID NO: 335241 - DNA, 201 bp, Homo sapiens
attagatttatacaagttgttttctaaatgttagatcatttaatccttgccacactctattttacccataaaggtattttcaaaatacaaataggggcctrtaacccaactttccagagctttcagaatagaaaaccaaatctctaacattgtctccaacatcttgcatgggctggccccatactgcctgtgttctgtctg

SEQ ID NO: 335242 - DNA, 201 bp, Homo sapiens
agccagacaaaagacacaaagctggaactggaaccccattatgtctgatttggaattctccactctctccatggcatcaggctgcctgttgctcctgcacrtgtgaagtggtggagggtatcttctcgttaaggatgaaattccagaccctgctgaaacagtgtgggtgtcactgctccctggcatcctgctgctgtcatc

SEQ ID NO: 335243 - DNA, 201 bp, Homo sapiens
gaaagaggaggtggcagttagtggcgttggtgtcactgagtggcagctatgagactagttctctcagtgacagccaaactgcaaaccgggttcaacttctkcttcaggaacaaactgctgccatggagttgaagaactaaggctgtggggctgccagatttagcaaaaccaaaatgcaggacactcagttaaattttggtg

SEQ ID NO: 335244 - DNA, 201 bp, Homo sapiens
tcagatgttcctataattagtagccactccagaaactctgcatgaggtatggccttgggcagtaatctggttgagtggggcattgggaataaggagaatakaggagtgttctcaaacctatatttatatggtaaacatattgtttttattggattctgtttattggcttggaggggatttgtcagagaatccacaaatttc

SEQ ID NO: 335245 - DNA, 201 bp, Homo sapiens
ccctctgaatcgtccagcttctttcttttggccaataagccagcttcaacttcccaacattgtggggaacatggctgccccacagctcccaaagtttataytaaacttccgacctcaaagaggtataaaatcctggtctcaaaaataaactataagagaaagaatggattggtccagcttgagttaggtggatactcctgg

SEQ ID NO: 335246 - DNA, 201 bp, Homo sapiens
atttatccatcataaatttacacagcttaaccaagatatcacattcctctgtctttgcctagaattaaatggaataaaactattaatactggttatctcaygcaagtatcaaaagttctgcttggcagttatgtgtctttaaacattggaaaataaattaactattaataaatgcaggatttttcaaaacatgaaattcat

SEQ ID NO: 335247 - DNA, 201 bp, Homo sapiens
accagctgctaaacagtcatcccttttcctcaaatacaaaagaaggtggcggcagtcagccaagaaaaacatttctccttgtagagagaagtggactgttstgaaaagccacagtgatcattaacaaagatgatgtcataattagatacctgggcctccctaaggtgctctgagccaaggaaagatgatcatagtctttac

SEQ ID NO: 335248 - DNA, 201 bp, Homo sapiens
cagccagattttcaagacaaataacatctaaatcaataccaatcaaccaaccaaagacaccacatccctccactgaaattcctccacttttctgtactggragagttataagcaccatggactattggtcacttcccagtatgcaatgaaggattttcccattatgcccatgtaagaacatgagtcctgatcagcatctgg

SEQ ID NO: 335249 - DNA, 201 bp, Homo sapiens
acccagcatccatatacactgtctggcacatgtgtacttccacacaacaaaaacaactctggccaggtgtggtggctaacgcctgtaatcccagcactttsggaggtcaaggcaggcagatcacctgaggtcaggagttcgagaccagcctggccaacacgccaaaacgttgtctctactaaaaatacaaaaaattagctg

SEQ ID NO: 335250 - DNA, 201 bp, Homo sapiens
agagttccctcgacatcatttgtcccttggatcccaacccagaccttactttggtggaggcccggtcaggaacctgggctgtattgtattacttaaccaaycacaagcatgagaaacctcatgctctgctgggaaaatgcaccaagacaagtgggcctaggtcagatggatctgattttttaaaaacctcaggaaactgga

SEQ ID NO: 335251 - DNA, 201 bp, Homo sapiens
tagtagaaatgggcttcattacagagtggtctccagctccccatagtggcccctcctagtaattttttctaaattaagcaagcgtgcgtggactcaagagstacacggcagtatttcttggctgcttctttctccctctgcaagaaacaggaataacatttcataaataatgagctgcagctgaactttaatctgctagat

SEQ ID NO: 335252 - DNA, 201 bp, Homo sapiens
ggccctcttgtcactcccagggctggccatggcagccatgggagccaccagcgcaccttagctatagtgatgctgccttggctgaccaccaaagccagggycctactctctcccttccccatcctcatccatgatagggcaggcagagctccaagcccaggagtccaggagccaaccagtggcaaaaacacagatgaagga

SEQ ID NO: 335253 - DNA, 201 bp, Homo sapiens
tttccttctcctgcctgattgccctggccagaacttccaacactatgttgaataggagtggtgagagagggcatccctgtcttgtgccagttttcaaaggraatgcttccagcttttgcccattcagtgtaatattggctgtgggtttgtcatagacaacccttattattttgagatatgtcccatcaatacctaatttat

SEQ ID NO: 335254 - DNA, 201 bp, Homo sapiens
ccctttgtaagctgcagaacaaatgtgcaaatgaatgtgagataaactccctttaatgattgttcccttacatgtgattgacattttctctgtgaccatayagcatagtgctgcagttttaatccaaagatctgatttcacatactaactccaaagccccttgcatatcactcttatttttagatgtcatcctaacaagtt

SEQ ID NO: 335255 - DNA, 201 bp, Homo sapiens
atcttaccagagaacaatgcctggtgccagaggagtctctagtggaagagctccaggcctcagggtccagcaagagagatatttggaggatgcaggggctmcccacctacttgtggtggggaagctggtctgtctgcatgcacttggatgtggagtgagctttcttctgggatctcagatggccacaggctacacagaggg

SEQ ID NO: 335256 - DNA, 201 bp, Homo sapiens
tagaaaactttaaaagcaagctgggaaaattaaaagattacatgtctgagaccatttcatgaaggcaaattgcccaaaggacttcacccacccgaaatgawatatagttatttagttaagaataattattatagtcattgataagattgtttcatattcattaactctgtttaagaaaatagggatatatgtcatacactt

SEQ ID NO: 335257 - DNA, 201 bp, Homo sapiens
ctaacccatgcccagcactctaagcactggactgtggcaagtcactgcccctgtgtttctgcccctgtaatgtgaatccatctcccagtccttctaccaayagccttgactagctaaggttctggaaggaccacggcaggaacaaatatttgcccacccactggtatttgggctggacagcataagccatgcacaaaatta

SEQ ID NO: 335258 - DNA, 201 bp, Homo sapiens
atggatgggaaactgaggtagaatagagaggtgaagtgacatgtgcaggtaactcagttgaatgtggagagccaggtccggcctatggccttctaacccaygcccagcactctaagcactggactgtggcaagtcactgcccctgtgtttctgcccctgtaatgtgaatccatctcccagtccttctaccaacagccttga

SEQ ID NO: 335259 - DNA, 201 bp, Homo sapiens
tgagaatttcctaataaagtgatgtttcaggtgaagagaaattccagtattttcatgttgaaaatatgtccaagagaagtaaacctaaatatcataaaagwtttattcataaaatctctttacaattatttatgataatgaaacatttagaaaatagcacaaatgcctaacaaaggaatagttaagtaaattatggcatat

SEQ ID NO: 335260 - DNA, 201 bp, Homo sapiens
tgtactgtcttaaagtgacaagaacatataccaaaatgtcaatagtggttgtgctttggtggtgagactataagttttacttccttctgcttatccatgcrttctatgcaattaggatgtttatgagtttttttaattgttattggtggtttttaatcttttcaaagaagtatgctctgaaatcactacaagaatattttg

SEQ ID NO: 335261 - DNA, 201 bp, Homo sapiens
tgcagcaccatttacaatagcaaaggcatggaaccaacccaaatgctcatcagtgatagactggataaagaaactgtggtagatatatatgatggaatackatgcagctataaaaaacgagatcacatcctttgcagagacatgaatgaagctggaagccatcatcctcagcaaactaacacaggaacagcaagccaaacg

SEQ ID NO: 335262 - DNA, 201 bp, Homo sapiens
cttgccctgctcactcagctggtccagtttgtgtaagcacaaagggctctaagacactcaccccccatattttcctcacatgttgctctcacagagaaatrtctaacctccctgctctggacttgtagaaatacctgagtgaagcttctagtattcaattccagccccaaatattaagtaggttgtgctactcctccaatg

SEQ ID NO: 335263 - DNA, 201 bp, Homo sapiens
agtgctgagattctgagtatgggaagttgagaagaggaaggaggtgcttcactgctacttacctcacaccaccaccaacacccccatgtgtatggggtaartagtaatgaagtacttcctcaatagctttctgaaagcaaggtgcagactcagacagaggtgaactcttattagctctgtgatcttgataagtcatcccac

SEQ ID NO: 335264 - DNA, 201 bp, Homo sapiens
gggaagctatctgtgtggcttgggaaggtgcctctttctccattgcaggaattctccactggagaagcatcagatgttcctcagcccctgccagggctggrgggtgaagagttcaaaattgcaaaaggggacagataagcagaagcctccccggtaagtgggagcttctcgcaggacagaaggatagacagcaggctgctg

SEQ ID NO: 335265 - DNA, 201 bp, Homo sapiens
ctcacatagttacccacctttttttgtgttgagaacacttaagatctactctcttagaaaatttcaagtatacaattcttattaactatagtcaccatackgtacattagatcttcagaacttactcacctttttttctctttttgtttacaagtgtctgctgtaaggagaggctttattcataattaaaaatttataccc

SEQ ID NO: 335266 - DNA, 201 bp, Homo sapiens
tcaagatgcagtataaagatgtggttaagtggagtgttactacctgatgttgagtcttggacaggtaacttaattctctgtttctccatttcttcatccayaaaatgggaataatactagaatgtactttatgagaattgggggaggacaaaataagttaatgtatgtaaagtgccattcatgattgaatagttaatcctt

SEQ ID NO: 335267 - DNA, 201 bp, Homo sapiens
agcagcaatggcagtaatcctggggagagatggcctcgccctgaatccacccagcaccccctgcacaaagttcttcctgcagagccatgtctcccaaagtrtgttccaccataggtggtgaggttgagatgcaacagagtaaggtgtctggtcaaataagctttgaacatgctgggttaaacaggtttcttattgcaagat

SEQ ID NO: 335268 - DNA, 201 bp, Homo sapiens
caacaacatcaacaaaaaagacaccccccccccccggcaacaaataccccatccaaaggtcatcagcctcaaagatcaaaggtagataaatccgggaagaygaggaaaaacctgtgcaaaaagctgaaaattccaaatgccaaaatgcctcttctcctccaaatgatctcaacacatctccagcaagggcacaaaactgga

SEQ ID NO: 335269 - DNA, 201 bp, Homo sapiens
aacttcacatgaaaattccaaatccatttgtcagagcgtgtgtagctggactcactcctctgtgagttgcacttgttccaggcggtccatcaactctctgyattgtctttgctttatttcgttttcctgtctgttatccatttgtttcaggagactccgggaatattcctcttgcttaagagcattaagcgcaggactgag

SEQ ID NO: 335270 - DNA, 201 bp, Homo sapiens
aaatacataaattagccaggtgtagtgacgtgtgcctgtagtcccagctaatctggaggctgaggtcgaaggatcatctgagcccaagtaggtcaaggctrcagtgagcagaggttgtgccactgcattccaacctgggtgacagagtgagaccctgcgccaataaaaaataataataaattacattatataatcatgttc

SEQ ID NO: 335271 - DNA, 201 bp, Homo sapiens
agcagtgaatctaagggaagtattggagaagttgagcataacaatgtggcttggcaacactttcagtgtggcaacattaaagatgaagacatttggacagrtattggatacattttggaggtaaaggcaactggacttgcaaatgatcggaagtcaggaacagagaaaggaatattgtgatcatgactaaatacaggtttg

SEQ ID NO: 335272 - DNA, 201 bp, Homo sapiens
attgggtgctgtagccaaggagatgagagatcagtctcaaatccatctccttgaccaactaaaagtaggggtttatatagcagggaagaattgaaactatrtatgggaaaaccagaattcgggagggataaggaagcaatcatggtcaatggaggggcctggctcattgtctgaatgcaatcatctggtgagtttcaattc

SEQ ID NO: 335273 - DNA, 201 bp, Homo sapiens
tagattctatctcagaaagggacaaagaaaacaactcaatgttgattgtatcagctaagcactggaaagaaggaaaactcaaaaggtttgaagttccaagkttccatattttcttttcactttcttttaatataagtctaataaaaaatgggaatgccattcaaacagcattcccaatagctgaacttctaacttggaatc

SEQ ID NO: 335274 - DNA, 201 bp, Homo sapiens
gatttcctatactctgtttctttccttttagtccagcctctcagctgccagtactcagcctaccagtcactgcagacatattacaaggcaaaatagatagrtatacaaatgaaagtctacaaaaagagaaaataaacacaagtgactaagcaagggaaaagaaaatagagaaaacattaacattgtgaagaaggcaagaaa

SEQ ID NO: 335275 - DNA, 201 bp, Homo sapiens
caccttgcgttctctgcctgtatgctgcagttcaccccatcctggcatcccctgcttccagacttctgctggcttgtcgttctctactaaataaaaagccrcgacttgtgccttcacaacagtctgaccctacccctccccagcctcaaccacccaagcccacagagaacttgccgaaggtcacacagccagcagacagtg

SEQ ID NO: 335276 - DNA, 201 bp, Homo sapiens
ggaggcccaacttggaagctggtatggcaggaggtacacaaaagaaaagtgacaccttgcgttctctgcctgtatgctgcagttcaccccatcctggcatyccctgcttccagacttctgctggcttgtcgttctctactaaataaaaagccacgacttgtgccttcacaacagtctgaccctacccctccccagcctcaa

SEQ ID NO: 335277 - DNA, 201 bp, Homo sapiens
ttggcatctaatctctagatttcttatgtattttttctggcataggaatagcactaagccaaacatagaagttgcatttctgttaaattcgtggctttttkatatccctatggaagcttcatcagacttattcactaagcccatatgttggctaaaatgtacaataaattaggtcttttctcaagtcccactttcaaggca

SEQ ID NO: 335278 - DNA, 201 bp, Homo sapiens
gccaaaaatgtaaaacagcccatgtgtccatcaaatggaaaatggataaacaagtcgtagtatatctatacaaagtaacactacttagtaataaaaaggartgaactactgacataggtaataacatggatgaacctcagaatcatcatgctggctgataaaaacaagacacaaagaatacatactgtgtggtttcattta

SEQ ID NO: 335279 - DNA, 201 bp, Homo sapiens
tcatgcatgcacagccaccctgagcagcaagggatgtgagtcgctcaggctgggcttcccaggggccttggaatggaaagtggaatctcctgctgctgcamcttctacctttgtgcacggcatcactcccatggcatatgcactgatttccacatttgctaaatttttagcactatcctccccataatatctaggctcaac

SEQ ID NO: 335280 - DNA, 201 bp, Homo sapiens
gagagactgagtaatttataaagaaaacatatttatttggttcacagttaagaatggctggaaggttcaagattgggtatctgcatctggtggaggcctcmggctgcttccattcatggcaaaaggccaaggcaaaggggagccagctgtgcagagatcacttggtgacagaggaaacaaaagacgggtaagggagatgcc

SEQ ID NO: 335281 - DNA, 201 bp, Homo sapiens
actggaaaatttacttgtatggaagagcttattccctggaaaaatggtttgtggctgtgaattattgtgaatcccatagttggaagaacattaatcagctratcaggctcacacttaagggatgaatttgctgccctaattaatgtataatatttaatccaagcccttccttatttccacttctaaaaggtatcatgttga

SEQ ID NO: 335282 - DNA, 201 bp, Homo sapiens
gatggagcaaagaggggttctggactcacagcaaaggcaaaatccatcctgtgtattttgggtttaagttaactccaaatcagatcaattcaagagtggasgttttaactggctgaaatgagtttataatttctacataagtggtgaaaatacaatcttaaagtgctttgcagtctccagtgttgtaatagtctttggaat

SEQ ID NO: 335283 - DNA, 201 bp, Homo sapiens
gtctggaatgtgccagctaacccatcagaatgctgggtcagaaaaatcggctcaaacaccaatcttaggttttacaatagtaatgttatctatagaggcarttggggaagttagcaatcttgtggcctctggctgcatgactcctaggccatggtttctgagcttgtggctaatttgttggttttacaaagaacaatcttg

SEQ ID NO: 335284 - DNA, 201 bp, Homo sapiens
caccacaccacagaggcatcagggcctgctgctaccacatgtcagcttgctttttctctccttttacaaggtacatcattctcatgacactccaagaccgkaacgagaagctcttctaccgagtgctgacttcggacgtggagaagttcatgccaatcgtgtacacgcctaccgtggggctggcctgtcagcactatggcc

SEQ ID NO: 335285 - DNA, 201 bp, Homo sapiens
atcataggaagttgaagctgtcgttttgtgctgagtcagttcctggtggaggccacaagaccagatgagccagtttttctgtctggaatgtgccagctaayccatcagaatgctgggtcagaaaaatcggctcaaacaccaatcttaggttttacaatagtaatgttatctatagaggcaattggggaagttagcaatctt

SEQ ID NO: 335286 - DNA, 201 bp, Homo sapiens
ttccccaactgcagctcagcacagtatggcaaaggcccaggagggaaatagtgtacatggagccaggtatgtgaccatcacaggtgacctctccgagcctcagtattctcatttataaaattaatcctcatccaacttacaaaattgctgtcacaatcccattatatagtagagatcaatggataaattgaccattgctat

SEQ ID NO: 335287 - DNA, 201 bp, Homo sapiens
ccctcacatcactgaggttggacgcaaggaaatacagatgcaggttgcaatttgtcctcacaggatctagtttgcctgtgtgtaaccgcccaatgggttcwtcttgcctactgcccaaatgaagctgatttatcaagatgggggaattgcaatagagaaagagtttaatacaggcagagctggctaaatggaagactggag

SEQ ID NO: 335288 - DNA, 201 bp, Homo sapiens
ttcacgaagaccatggtattgcagtaaaggaagggtttaattaacacaaggcagctgagaggagggagtggcttagcctcctgagaactcagaggctagggattttatggataatttggtgggcaggaggctagggaatgggcactgctgattggggatgaaatgataagagtgtggaaaatggttcttgcgcactgagtc

SEQ ID NO: 335289 - DNA, 201 bp, Homo sapiens
tagtcaatcagcattaatttagaacaagctattacctactggtaattaaaaagagactttaaatattaactttacttaccagaagatacaggttttagaaragcctggtagccaaatggcactaaatgtagtctcaggcatgccatcatttattttgaggcatttggaggagaggtcactctgcaggtctctgtgaacatc

SEQ ID NO: 335290 - DNA, 201 bp, Homo sapiens
cagggacatgaactcgagatgctagacattctcatgacctggtgagaaagatagcagggctccagtttccaggcctgggttttctttccccaaaagacaarccatcagtcagacccattgaattcactgtatcaccagttaggttttgcaggaacaaggggcacgcatgtagctcccaggcctctctttgcagaccctgtt

SEQ ID NO: 335291 - DNA, 201 bp, Homo sapiens
tatatttatagaagttacaccctcttgatgaattgactcctttatcattatataatgatcttctttgtctcttttttacagtttttgatttaatatctatwctgttctgtctgatataactaaccctgttcttctttggtttacatttgcgtggaatatctttttccatccctccactttcagtttctggttttttttttg

SEQ ID NO: 335292 - DNA, 201 bp, Homo sapiens
ctgtctattattgaaagttggagattgaggtcttctgctattattgtattgcagtctatctcacccttcagatattttaatatttgctttatatatttaarttctccaaggttaggtgcaaatatatttatagaagttacaccctcttgatgaattgactcctttatcattatataatgatcttctttgtctcttttttac

SEQ ID NO: 335293 - DNA, 201 bp, Homo sapiens
tgccctttgtatgttcatgggatcaagtttgttgactgttttgtgtaaatctatatgcaaaatcttgatttttgtctacttgatctgcttctgaaagaggracaataaaacttcccactgctacggtaaacttgccaattttccttgtaattctgtccatatttgctctatttaccttggaccaatgcatctttacctttt

SEQ ID NO: 335294 - DNA, 201 bp, Homo sapiens
aactgctatgtatcaccattcaacttcttatgccctatcctgtttctcttgctcccccatagatgttctctgagaagacaccccagtaatcctctggatgygaatctcagattcagtgtctatttcctgaggaacccaacttataacacgtagaagaaactggccaaagttcttaattttccaatttgttgcaccagcccc

SEQ ID NO: 335295 - DNA, 201 bp, Homo sapiens
agaacaaagtgccctattcaatgtcaagaacctactataaatatacaatgatcaaggctgtgtggtccaatagcaaagacatgaaattaatctaagtttcmatcagtcgatggctggataaagaaaatggataagaaaatgaatatatatgtgcaatggaatactattcagccataaaaggaataaaatcatgtgttttgc

SEQ ID NO: 335296 - DNA, 201 bp, Homo sapiens
tgcattggagaagaatgtgtattctgttgcagttggaagaaatgttctgtatatatctgtagatccattttgttcaaagtgtaattcaagtcgaatgttahttattttctgtctgatctgtctattattgaaagttggagattgaggtcttctgctattattgtattgcagtctatctcacccttcagatattttaatatt

SEQ ID NO: 335297 - DNA, 201 bp, Homo sapiens
gaatcagaacatggtgcaataaggactggcccaacattgataattgttaaagctggataatagatacatgacagtttatcatactattatttctattagtrtgcatgttttacattttctataagttttaaaaataatttcagaaaatgcatcgtacaacagcacacacacccatgagttgtctggtacagaatccagaat

SEQ ID NO: 335298 - DNA, 201 bp, Homo sapiens
ttctgcccctgtggcctcctctgtcccctccttcacagcgcaggctgtcacacatgtggcaggttctccaacatatggccagagaatcagtgtatgcagtrctggaggggcctgaggatgatgtccagggccattcctcattttgcagacatagagactaatgtctgagggaggcagggtcttcagcaatacagtcaggac

SEQ ID NO: 335299 - DNA, 201 bp, Homo sapiens
ccagtgagtgaccctggctgatatcaaatatgatatacttcaacaatttgatttccaatacttattgagcactaagaatgtatcaggcattattctaaaarttttaggtaagtttattccttataacaaacttcaaagatatatactgtggtcaattcattttacagatgaagaaactatgacacagagaggcgaagtaac

SEQ ID NO: 335300 - DNA, 201 bp, Homo sapiens
ttctctttaggcttttagaaatataatacatacctagtgtacaaatagttatcagacattttatcattcaaaagcagccccaaaggaatatgacaattttrattgatctttgatgctggtatgtggtgggttacttggccagtgagtgaccctggctgatatcaaatatgatatacttcaacaatttgatttccaatactt

SEQ ID NO: 335301 - DNA, 201 bp, Homo sapiens
gagataaaggaagcggaataagtgaggagaagtggagggagaaagatcaggggtctccttactctctttgtgtcctctgaagcatttgcaaatcccgcctstggtccactagttgatgcaggatggctttcctcttgtggttagcagctgcctccagctggtgtttcatgtaattttgttctcgcttttgcttttccacca

SEQ ID NO: 335302 - DNA, 201 bp, Homo sapiens
tatatgattctaggttagggttagtcaaaagagaatgtgtgtgagatttggaaggcagaagtaaagcagcagccatgtgatctgaagccctaaaggtcatygtagggccaggcactgacctgctggctcaccgtgtaggcatgggccagcagcctggcctgcagctttgcagctcctgccagatctcctcattctgcttct

SEQ ID NO: 335303 - DNA, 201 bp, Homo sapiens
ttaacagtggaattttggatcaggcaaaattttgtatggtggaggaggcattccaagaacttttatattcacttttctcctttatttactgtttaacaagrgcatgaattactttataatatttaagataatttaccaaagagaggaagagagagaggtacaggtagagtgtagggatttatgcaaacactgaaggaaaca

SEQ ID NO: 335304 - DNA, 201 bp, Homo sapiens
tatgcatacgtattcatatatatttttgtaaacatatgggatatttgaggaaagatacatacacaaaaatattaacagtggaattttggatcaggcaaaaytttgtatggtggaggaggcattccaagaacttttatattcacttttctcctttatttactgtttaacaagggcatgaattactttataatatttaagata

SEQ ID NO: 335305 - DNA, 201 bp, Homo sapiens
ttacgtgctgatgttgaaaaagtttcaaaatatagtaagtgaaaaccagtagcagcatagtatttttatataatgtaatcctgtttccttcaaatataagwatataagtatgcatacgtattcatatatatttttgtaaacatatgggatatttgaggaaagatacatacacaaaaatattaacagtggaattttggatca

SEQ ID NO: 335306 - DNA, 201 bp, Homo sapiens
tatgtacttccactgctacaaatttggatatatttggatataaaattggatgtattagcatgatacatacaaagatatatgtatatgcaacattgtttatmatgttaattcttagaattagcctaagatgaccatcatagggaactggttaaattgtgaatacatacattggaatacatttcaagagtttacttaaaagga

SEQ ID NO: 335307 - DNA, 201 bp, Homo sapiens
ttatgcattccactgttgaagggcatttgcgttgtttccctttgaggctactgggaataaggctgctgcaaacagtctcacagaacacttttgacagatasatgtactcatttctgatgtgtatataactaggagtagattcatgggtcatgagaaatgcatatgatcaattttaatagataatgccagctaatttttagt

SEQ ID NO: 335308 - DNA, 201 bp, Homo sapiens
ctacgcatcccctggtttaatcaaaaccagaaaagggtctctgggcgtccaacgtgggcaggatgtgattaccagctggttgtcaaggcaacttagccackgcaggccaggcctgagccagggaattgggaagtgggtccccccgcctcccctgcaagcagatgaagattcaatccccagggccaccccctgctacccaac

SEQ ID NO: 335309 - DNA, 201 bp, Homo sapiens
caaaatcaaccgtctttgcatgaactctcaaaaggagccatttagggtccctgcatctcttttctctaggtaggcaaaagggttgtgatccatcccagcgrgtggtgtgggagtggctgtttttacctaacctttattgagcacttactttgtgctagtccgtttattgagcacttactttgtgctgtctacgcatcccct

SEQ ID NO: 335310 - DNA, 201 bp, Homo sapiens
ctaccctaaaaaatcatctttaaaaaaagttcttactgtaccatttacctcctccctggtatcatttacctaaattgtaaatttgcattgatttgtgtgaytatttgattaatgtgcatcttccccactaaacagtaaattccaagatgtttgttcaccgtaagttaactagtgctcagcatatagcagggtttcagaatt

SEQ ID NO: 335311 - DNA, 201 bp, Homo sapiens
aaaacaatgtcaagagaatgagaagacaagccacagactgggaaaaaatatttgcaaaagacactgtcatgcaaaatatacaaataactcttaaaaacacwaagaaaagaaaaactcaatttaaaaatgagccaaagccctttatatatatctcatcaaaaaatgacaagcatattaaaaggtgctccccattatttatca

SEQ ID NO: 335312 - DNA, 201 bp, Homo sapiens
acatgtcagcttgctttttctctccttttacaaggtacatcattctcatgacactccaagaccggaacgagaagctcttctaccgagtgctgacttcggaygtggagaagttcatgccaatcgtgtacacgcctaccgtggggctggcctgtcagcactatggcctgactttccgcaggccccggtgagcccccgtggagt

SEQ ID NO: 335313 - DNA, 201 bp, Homo sapiens
aacaagctacttattaacacttatcaacgagtgacttaattcatctgtgcctcagtttcctcctctctaaaatgcatttttaagactgggagagtacttaygatggataaatgaggccatccatgtaaaatgtttaacatacacctgagtgatagtaaaaaaatcatgtttgctattattattaatttaggcagtttccaa

SEQ ID NO: 335314 - DNA, 201 bp, Homo sapiens
ccttcagcacagagaaggattctgacagaatgggaaccataataaggaagctctaattaggagagatgatagagaaatgcccagagtttggacacccagargcagcatgagggcatagtctctaacagggagatctaccaagaggaggtcagatgcaggctgcagagagggtggcgccaaagcagggcaggactttgccaa

SEQ ID NO: 335315 - DNA, 201 bp, Homo sapiens
ttcttttttttttaacagactatttttaagagcagttttaggttcacagcaaaactgagcagaaagaaggtggggatggttaacgagtacaaaaaacaggkaaagaatgaataagatctgtatttgatagcaaaacagggtaactacagtcaacaatttattgtatattttaaaatatctgaaagagtgaaattggaatgt

SEQ ID NO: 335316 - DNA, 201 bp, Homo sapiens
ttgtttcaccacgaaggtccttctttccttttcttttttttttaacagactatttttaagagcagttttaggttcacagcaaaactgagcagaaagaaggyggggatggttaacgagtacaaaaaacaggtaaagaatgaataagatctgtatttgatagcaaaacagggtaactacagtcaacaatttattgtatatttt

SEQ ID NO: 335317 - DNA, 201 bp, Homo sapiens
gcgtggtagcacacacctgtaatcccagctacttgggaggctgaggcaggagaatcccttgaacctgggaggcggaagttgcagtgagctgagattgcatsactgcactccagcctggacaacagagcaagaccccatctcaaaaacaaacaaataatcagttgtgacaaaatagtcagttgtcatttgggcttgtcatta

SEQ ID NO: 335318 - DNA, 201 bp, Homo sapiens
tctactaatacaacaaaaattagttgggcgtggtagcacacacctgtaatcccagctacttgggaggctgaggcaggagaatcccttgaacctgggaggcrgaagttgcagtgagctgagattgcatgactgcactccagcctggacaacagagcaagaccccatctcaaaaacaaacaaataatcagttgtgacaaaata

SEQ ID NO: 335319 - DNA, 201 bp, Homo sapiens
taatcccagcactttgggaggctgaggcaagtggatcacttaaggtcaggagtttgagaccagcctggccaacatgttgaaaccctgtctctactaatacwacaaaaattagttgggcgtggtagcacacacctgtaatcccagctacttgggaggctgaggcaggagaatcccttgaacctgggaggcggaagttgcagt

SEQ ID NO: 335320 - DNA, 201 bp, Homo sapiens
ctctgggtcaggctctaacaaaataatcagttgtggccaggcacagtggctcatgcctgtaatcccagcactttgggaggctgaggcaagtggatcacttraggtcaggagtttgagaccagcctggccaacatgttgaaaccctgtctctactaatacaacaaaaattagttgggcgtggtagcacacacctgtaatccc

SEQ ID NO: 335321 - DNA, 201 bp, Homo sapiens
gacctcctatctcatcctgggactaagaatgccttaaccatctgggaatgcagccccactttgcctagttcctatttaagatggagttgctgtggttcacrtgcctctgacagcatcaaacatttgttgggactgaacctcagtgctcaattaggtatttgatgaagttcttgaaaagaggagattaaagaaaaaacctac

SEQ ID NO: 335322 - DNA, 201 bp, Homo sapiens
tgctccacagacagagcagccctgagggctgctggttgcccatttttatggttatttcttgatgatatgctaaacaaggggtggattatccatgcctcccrtttttagaccatatatggtaacttcctgatgttgccatggcatgacattgtcatggtactggtgggattgcagcagtgaggacaaccagaggtgactctc

SEQ ID NO: 335323 - DNA, 201 bp, Homo sapiens
taagataaggggggttgtggaagccaaggttctttttattttatttatttatttatttatttattttgagacaaagtctctctctgttgcccaagctggcrtgcagtggtgcaatctcggctcactgtaacctccgcctcccaggttcaagcgattctcctgcctcagcctcccaagtagctggaactacaggcacacacc

SEQ ID NO: 335324 - DNA, 201 bp, Homo sapiens
tgattttgctttaaagataatagtatcaattcttgcaaaatatagtaattaagaaaattaatcctttatcacaaacccttgtagcagagcacatctccccrtatatacaagcattgtacctagggtggacgcattcctcttctgactttcaggaacgtcctactcttatcaatggagtagctgttctttcaccactttatt

SEQ ID NO: 335325 - DNA, 201 bp, Homo sapiens
tggtatcaggatgatgctggcctcataaaatgagttagggaggattccctctttttctattgattggaatagtttcagaaggaatggtaccagctcctccytgtatctctggtagaattcggctgtgaatccatctggtcctggactttttttggttggtaagctattaattattgcctcaatttcagagcctgttattgg

SEQ ID NO: 335326 - DNA, 201 bp, Homo sapiens
aggggtagctatattaattttagaacagacttcaaatcaaggagagttgtcagaaataaagagcattacataataatagaggggtcaatctttcaagaagwcctaagaatttttaatatgtatgcacctaaaaatagtatgtcaaattacattaagcaaaaactagtagaactgcaagaagagataaatgaatccattatc

SEQ ID NO: 335327 - DNA, 201 bp, Homo sapiens
gagaaaagacagttggggtgggagaaagaaagtggtgattaccataaggacatatcatacacactcacaaataattatctgattctcaatgccctaaaatrgaatcttctggatgaagcttttagttgtacccaatgtaatattattactgcagacaattaagtagttactaacatattaatcagtacaattttctctaaa

SEQ ID NO: 335328 - DNA, 201 bp, Homo sapiens
acgtagaaaacagacatgcacaagccaatgttcacccattggtatgttttgtttggcctaattagcattttttgtttcaatatcaacaaaagtcgtcaacwtttaacagccaatagattttacattaaagtcaggatctctgcttcttttgaaaaatcagaagattgtgctcactttagtagcacatatagtaaaattaga

SEQ ID NO: 335329 - DNA, 201 bp, Homo sapiens
gtcataatcttcccaccactctcacttcgttcaaacttttccagcaagctgacatttgtcactttggcagggaacaaagcttgtctatctcgaagtctttkgggtgatgagatatctgtagaataaagaatgaatgaaaacgagtctcctttcaactctcaaaccactaactgtgtagtttttaccaagggaaattttcat

SEQ ID NO: 335330 - DNA, 201 bp, Homo sapiens
aatgcattacctttcaggggtcataatcttcccaccactctcacttcgttcaaacttttccagcaagctgacatttgtcactttggcagggaacaaagctkgtctatctcgaagtcttttgggtgatgagatatctgtagaataaagaatgaatgaaaacgagtctcctttcaactctcaaaccactaactgtgtagtttt

SEQ ID NO: 335331 - DNA, 201 bp, Homo sapiens
ctttgatttttccatcccttgcttgtcaatactagatttagacgtttctctccatgtaacgtttctccttcctcatagacttttctgtaatgaggactatraaactgaggctcacaggccccataattgagtcaaggcctacccagtgcaggagttgcaactgcggtctgcatgaatctaaagtctgtatttccattttct

SEQ ID NO: 335332 - DNA, 201 bp, Homo sapiens
acagaaaaaaaaaagtcaatgcattacctttcaggggtcataatcttcccaccactctcacttcgttcaaacttttccagcaagctgacatttgtcacttkggcagggaacaaagcttgtctatctcgaagtcttttgggtgatgagatatctgtagaataaagaatgaatgaaaacgagtctcctttcaactctcaaacc

SEQ ID NO: 335333 - DNA, 201 bp, Homo sapiens
ttcctagcctctaaatgtttacggttaagggaacaaattaataatgtttcctaaacagacccagacttgggagtgtccagatatcctgatatctggagaasaaaggcattcctgattttgctttaaagataatagtatcaattcttgcaaaatatagtaattaagaaaattaatcctttatcacaaacccttgtagcagag

SEQ ID NO: 335334 - DNA, 201 bp, Homo sapiens
tttgaataatggtgccatcttctcccagttacctaagccaaaatctggggtcatctttgacatctccttcttaacctcccttaactaatccccaacaaagstaaagctttccatctgatctttgtttcatacccttattacctttccccaaacgagttatactcaactgttaaacaatgaaagtcctatccttcttagttt

SEQ ID NO: 335335 - DNA, 201 bp, Homo sapiens
aggaaaataagactgggacttgctgggctgcattctcagaaaatgaggcattcctagcctctaaatgtttacggttaagggaacaaattaataatgtttcytaaacagacccagacttgggagtgtccagatatcctgatatctggagaagaaaggcattcctgattttgctttaaagataatagtatcaattcttgcaaa

SEQ ID NO: 335336 - DNA, 201 bp, Homo sapiens
ttttgaataatggtgccatcttctcccagttacctaagccaaaatctggggtcatctttgacatctccttcttaacctcccttaactaatccccaacaaasctaaagctttccatctgatctttgtttcatacccttattacctttccccaaacgagttatactcaactgttaaacaatgaaagtcctatccttcttagtt

SEQ ID NO: 335337 - DNA, 201 bp, Homo sapiens
ctcctcttccgggcccctctagcacggtcctctgttgccctctggcctatagaacagcatgcatttgggtttgagagcaacctggatttgcagccaagacrcccatgagagtaccttcctctccctcacaaccacccttctcataccaatcaagtctcaatgtccctaagcgtcctgtctagcaccttttcatttctctta

SEQ ID NO: 335338 - DNA, 201 bp, Homo sapiens
ggcatgagccaccgcgccaggccaagaatgaaaatatttaaaagtagagaaatagagaacagattcagaagctcaaacatgcatttaatagaagtgctgawtttttagaataaaggaaatggcaaagaacaatattctagaaaataacagataagaattttccagaaaatcatgactcctaagaatagtcatgcagaacat

SEQ ID NO: 335339 - DNA, 201 bp, Homo sapiens
gatgcttctgtctgtgaagtccttcatgattgcatctgatggacagactcctctcctcttccgggcccctctagcacggtcctctgttgccctctggcctrtagaacagcatgcatttgggtttgagagcaacctggatttgcagccaagacacccatgagagtaccttcctctccctcacaaccacccttctcataccaa

SEQ ID NO: 335340 - DNA, 201 bp, Homo sapiens
catgtaacctccccaaatgaccccatgaggcccatggtagatgcttctgtctgtgaagtccttcatgattgcatctgatggacagactcctctcctcttcygggcccctctagcacggtcctctgttgccctctggcctatagaacagcatgcatttgggtttgagagcaacctggatttgcagccaagacacccatgaga

SEQ ID NO: 335341 - DNA, 201 bp, Homo sapiens
cagctctgccactgatggtgggcctgtcatttaactgcgttgagcccaggtttcccctctagatggtggacatgtaacctccccaaatgaccccatgaggyccatggtagatgcttctgtctgtgaagtccttcatgattgcatctgatggacagactcctctcctcttccgggcccctctagcacggtcctctgttgccc

SEQ ID NO: 335342 - DNA, 201 bp, Homo sapiens
acaccgacttccctatctctagatgtgatctattggaagctgaaaaaaaacaacaaaaaccatctatcaaagagattgcagaagggagtgggaagtacctwccctcttaagtcccctcccactctaagattctgcaagactttacaggaaggacttactctcctagtttgccttttttctgatgatattcaccaggctcta

SEQ ID NO: 335343 - DNA, 201 bp, Homo sapiens
cctaatggccaatcccccagatccctcttgattcctgcccatttccaggtctgattgtcctagctcccatcactctgagcatcccaacagtcttccaatartttccttctgcttcagttagtccaaatcaatatctgtggccttgtctgcttacaagtttataaaaccactaaatatccaactagtgtggtggcataaaag

SEQ ID NO: 335344 - DNA, 201 bp, Homo sapiens
attttgctattctggaaaccctgagcaggctattcgatttctctgtgtctctgtttcaccatccataaaatgtttattatttccagatggtattaaggatkaagtgagatatatgtaaagtgccaacacagtatctgacatatcataaggatacaatatataattattgtgtaaatcatggaataaaatgcaaacagaatg

SEQ ID NO: 335345 - DNA, 201 bp, Homo sapiens
tataaataatataataatgttacaaagaaaaataaggcaggacaattggatgcacagtgaggtgtctatttcagatggattaatgtagcttctctaagatyacatttgagcagagacctgaatgacgtgaagaagccagccatgagaatctttagtggaaaactaaaccctaggcctttaattttgctattctggaaaccc

SEQ ID NO: 335346 - DNA, 201 bp, Homo sapiens
taatgaaagcaccaaacctaaacaatgatttttttctctgaggtaaaaatacgcagtttcacaatcacccccaaacatgtaaaagataaaaactttccccrggaaacgaagagccaaactttgagttttacacaagcaaccgggagccaggcaggaacttgttcaggggccacaggttgctctcgcccacgttggaggtgc

SEQ ID NO: 335347 - DNA, 201 bp, Homo sapiens
gcgcagtttacatactatttggcacattccatgcacaggctttgtgcagcatgctctttggtatcaggatattcaaaatgtaaaccttcttaatcccatckagggacaaaatatagcatagtggctaagagtttgggtctaagagtcaattattcttaacaaaaatttgttgagctccttattatgtgccaggctctggtc

SEQ ID NO: 335348 - DNA, 201 bp, Homo sapiens
acatcaacaggataaatcttaaattatatggaaatgcaaagaacctaaaatagccaagaataatctttcagaagaataaagttgaaaactttactatcagwtttcgagactaactataaagcggcagtaattaagacaaggtggtattggtgcaaggagaggcaaataggccaatgtaacaaaacagagtccagaaatacc

SEQ ID NO: 335349 - DNA, 201 bp, Homo sapiens
gtgtcatttaagagagtggatgctgtggttgcaccacctagatcctgccttgggtctgaaacactcattcctccagatgccattgtcagctgagggccacmagctgcatcgctctctaggaattgccctcgactgaaggtgaatgcttcacccaagattatgccatcatccccaagggaagcctacaggcaatgactggtt

SEQ ID NO: 335350 - DNA, 201 bp, Homo sapiens
tataaattatcttgggcagtatggccattttcatgatattgattcttcatacccatgagcatggaatgttcttccatttgcttgtgtcctcttttatttcrttgagcagtggtttgtagttctccttgaagaggtccttcacatctcttgtaagttggattcctaggtattttattctctttgaagcaattgtgaatggga

SEQ ID NO: 335351 - DNA, 201 bp, Homo sapiens
gacataggtaataacatggatgaacctcagaatcatcatgctggctgataaaaacaagacacaaagaatacatactgtgtggtttcatttatataaattgwagaaaatgcaaactaatttatagtgagtccagcaaatcagtgattggctggggccaggatcagaaggagaaatgaactgcaaagggggcatgggaaatat

SEQ ID NO: 335352 - DNA, 201 bp, Homo sapiens
acttgataagttggactttatcaaaattcaaaacttttgctctttaaaggcatcattaagaaatgaaaagtcacagaatagtagaaaatattcacactacmaatacctgacaactggtatataaaatgtatttttaaaatctcccaaagctcaataataagaagataattcaatttctttaatggacaaaatatttgaaca

SEQ ID NO: 335353 - DNA, 201 bp, Homo sapiens
acttggtgacagaggaaacaaaagacgggtaagggagatgccaggctctttttaacagccagctctgaggaattaatagagtgagcactcactccctaccragggaggtcatatatctctattcatgggtttcgcccccatgaccaaaacacctcccattaagcctcatctccaatattgggccaggatcaaatttcagca

SEQ ID NO: 335354 - DNA, 201 bp, Homo sapiens
tcatgaactgagacagattgaaaatatagcagatgtatatcttctgtcccttgcttactcaaggatttatgcagaaacagacttgcggtagcttcatagastgtgaacttagccaagatagaactacattttccagaattccctttcctatatgattctaggttagggttagtcaaaagagaatgtgtgtgagatttggaa

SEQ ID NO: 335355 - DNA, 201 bp, Homo sapiens
ccagaaactaacctatttgatagaagtcagaatatttatctctgcaaagtagagtattgactgggagttactacaagagagcttccttggaggctaaaaartgttctgtatcttgatatgattggtggttacaaaagtgtatgcatttgtaaaaatacatacatacttaagatttatttattttactgtgtgtaaattaaa

SEQ ID NO: 335356 - DNA, 201 bp, Homo sapiens
ttttaattctattacattaaaataatccagccatggtagaaacctgccttttggaggcagtggtactttctgatatctctatagatttataaaagtagatkgggaaaggtattttatttccttttcttggcctttaggtaccaccactagagggatctaaggaatggaagaattcatcacaaatgcaggaaagggcaggca

SEQ ID NO: 335357 - DNA, 201 bp, Homo sapiens
agaagagagacataagagtacaaactgtatgactgcatttatgtgaagcttaagacccagaaactaacctatttgatagaagtcagaatatttatctctgsaaagtagagtattgactgggagttactacaagagagcttccttggaggctaaaaaatgttctgtatcttgatatgattggtggttacaaaagtgtatgca

SEQ ID NO: 335358 - DNA, 201 bp, Homo sapiens
ttaaattttaaattacatattgaagtggagcccccaaaaattttaattctattacattaaaataatccagccatggtagaaacctgccttttggaggcagkggtactttctgatatctctatagatttataaaagtagattgggaaaggtattttatttccttttcttggcctttaggtaccaccactagagggatctaag

SEQ ID NO: 335359 - DNA, 201 bp, Homo sapiens
cactgatatacagaacatagataaatctccaaaatattatggtgagcaaaagaagagagacataagagtacaaactgtatgactgcatttatgtgaagctyaagacccagaaactaacctatttgatagaagtcagaatatttatctctgcaaagtagagtattgactgggagttactacaagagagcttccttggaggct

SEQ ID NO: 335360 - DNA, 201 bp, Homo sapiens
agtttatttttaaattttaaattacatattgaagtggagcccccaaaaattttaattctattacattaaaataatccagccatggtagaaacctgcctttkggaggcagtggtactttctgatatctctatagatttataaaagtagattgggaaaggtattttatttccttttcttggcctttaggtaccaccactagag

SEQ ID NO: 335361 - DNA, 201 bp, Homo sapiens
tttaattggctcatgtttctgcaggctgtacaagcatggtgctggcatctgcccagcttctggggacgcctcagggagcttttactcatagtggaaggcamagcaagagtaggcttatcacatggcgaaagcaggagcaagagagagagtgggtgggggaaggtgccacacacttaaacaaccagatttcgcaagaactca

SEQ ID NO: 335362 - DNA, 201 bp, Homo sapiens
ttcagaagagggaaccttgtattcctagacaccagcacagtggctggcctggaggaattcaataaatgtttgatgatgaataaataaattataatttattwgatttatgtccggagtgtcgactacctagatggtgatatataaagaggaagattcaggcagaaataaaggtaggcacatgatgattgaaaacattaaaac

SEQ ID NO: 335363 - DNA, 201 bp, Homo sapiens
tcaaaccgtagcatatgttaaatgtcatgtttgaggcatgaagacagtgtaatgggaattcaaggggaggaagattatatctctgttaggccattcttgcrtggctataaagaaatacctgagactgggtaatttattttaaaaagaggtttaattggctcatgtttctgcaggctgtacaagcatggtgctggcatctgc

SEQ ID NO: 335364 - DNA, 201 bp, Homo sapiens
ggaggtagttaagtatcattgtcccaggagaaaaacccccttggcctgagctgtttagggttctcagcacaattagggatgttgcaagtgatggaggaaaratgtgtgcccttctgatgaaatggttttggaaggcagcttgtcacatttggttattttccacctctatgtgagaacaaggaagtgttaatgaggcactgt

SEQ ID NO: 335365 - DNA, 201 bp, Homo sapiens
aaatgctagtttaagctcccttaccctttactagcaatgatatcatattagtaagagttctaaaaacttgaaagataatgtgtcatccacccttagcctayacttcacatgagttttcgtccttttttgagcaaaagcttttattttaacaaagacacattaagttctacttatttatttgtgtgctgtggttgtgatttt

SEQ ID NO: 335366 - DNA, 201 bp, Homo sapiens
ctttgtttcaaagttaaactataaattcctcccaaagttagttcagcctatgcccgggaacgaacaagggcagcttggaggttagaagcaagatggagttsgttaggacagatttcttttactgccataattttcctatgtcagatttttctcagtgtcataatttttgcaaaggcggtttcacttgtaggttccagattg

SEQ ID NO: 335367 - DNA, 201 bp, Homo sapiens
ctttgggaggccgaggtgggcagatcgtttgagctcaggagttcaaaaccagcctaggcgacatggcaaaaccctgtttctacaaaaagtacaaaaattakccaggcatggtggcgcacacctgtggtcctagctactcaggaggctgaggtgggaggatcacctgagcccaagaggttgaggctgcagtgagccaagaca

SEQ ID NO: 335368 - DNA, 201 bp, Homo sapiens
aagaggcagtagtaactgactttcccctttgatggtttttcttcgttacgcaaaacagtccctcatgtgctcctctaccccatcaaaatttctccatgggkggatttttttttttttttttgagactaggtctccctctgtcaccagcctggagtgtgcgatcacagctcactgcagcctcgacttcctgggctccagcga

SEQ ID NO: 335369 - DNA, 201 bp, Homo sapiens
aaggctgaacaaactccagcatctgagcctggaggatcaggccctgtggcagatgaggcttaaccctcagaggcaagctctgaacctggaagggaagctaygggaggctctgttctcaggatgatgtgcttaggacatttattccaataaggtgtaagactcaatcactcactggaggagaggccttcctcagactgagac

SEQ ID NO: 335370 - DNA, 201 bp, Homo sapiens
ggctcattctctgagagaatccctgggagcagtgaggggagggaatgagagggttgatggctgaaggctgtgatctggaggtagttaagtatcattgtccyaggagaaaaacccccttggcctgagctgtttagggttctcagcacaattagggatgttgcaagtgatggaggaaagatgtgtgcccttctgatgaaatgg

SEQ ID NO: 335371 - DNA, 201 bp, Homo sapiens
aatggcatgaacccaggaggcggagcttgcagtgagccaagatcacaccactgcactccagcctgggtgacacagcaagactatgtctcaaaaaaaaaaaagtataactgatatgctgaaaaaggagaaaatggaatcgtaaaatgctcagtggaaaataaagatgggtacaaaaaacaagggcaaaaagtagaaaacaat

SEQ ID NO: 335372 - DNA, 201 bp, Homo sapiens
ttgtccactgacaccagtctccataagagaaaagactatggcttctccaccatagaatccttccttatatggctcctcagcacctagcacagagtctagasactaaaagtgaggctgaagaggaaaggagggcccagtgatgaagtgccttgtatggacaccatgggaaggagtttgaaggagccatataaaggtctgaaa

SEQ ID NO: 335373 - DNA, 201 bp, Homo sapiens
ctgggcctggcacggtggctcacacctgtaatcccagcactttgggaggctggggtaggcggatcacaaggtcaggagatcaagaccatcctggctaacayggtgaaaccccacctctactaaaaatacaaaaaattagccaggcatggtggcgggtgcctgtggtcctagctactggggaggctgaggcaggagaatggc

SEQ ID NO: 335374 - DNA, 201 bp, Homo sapiens
ccagtaaacctgcttttcaagaaatgttaaaagatgttcctcagaaaaaaggaaaatgatgtaggtcagaaacttggatctgcatttaaaaaaaaaaaaaagggaagaccatcgaagaaggaataagtgaaggtaaaataaaaactttttttttctttgagacagggtctcattttgttgcccagcctggagtgcaacggt

SEQ ID NO: 335375 - DNA, 201 bp, Homo sapiens
agcaagtagcagtattcaaacctgaatctattctattccaacgtctttccttgttccatattgaaatccctcaatcctatattgttaaaactcagcatttytgaattatgtgtgtccccataaatatgctccctctccccaaacaaccacaagaaagcaaacacattcctaaagtgaatgaaatcagcaacaggtatctgc

SEQ ID NO: 335376 - DNA, 201 bp, Homo sapiens
agaaatggaacaatgattaaaacaactactaccacctacttttactgagtggccagtactcagtaaaagataataaagttgtctttattatctttgaatcrtacaacagtcctaggaggtgagagtgcattattgtccttagacaagcggttcagaggaggcagagacttgcctaaggccatatgacaagcaagtagcagt

SEQ ID NO: 335377 - DNA, 201 bp, Homo sapiens
ctgaagtttgctatctgtagaaagaggataacagttctaacctcctaaggttgttttgaggattaaaagagatattatagctatttaaagtgcttgtttarcacaatatctgacacattgtaggcccccagtaaatgctagtttaagctcccttaccctttactagcaatgatatcatattagtaagagttctaaaaactt

SEQ ID NO: 335378 - DNA, 201 bp, Homo sapiens
gcttatgtaaatatgcagtccaagagtaaacctgacttcagggatgtaaaccctactggatgagaatcttcatggatggggcctggaaagctgtatttttsccccatccttatttcctaccaggtaattgtaattctgttttggaaataactattttacgtagatcattcaagttgaaaattagatattacacagggagga

SEQ ID NO: 335379 - DNA, 201 bp, Homo sapiens
aattggggaggagagaaaagaaactgaatggagaggtgggccattgggagaggccaggagttggatactgtatcatggagagcataactgaaggtataacrtggcagataggaagagaggtgatgagagagaagaatgaggatcaagatctgcaagaggcaaagtgagatagctcaggatcagaatgagtgactgctgaat

SEQ ID NO: 335380 - DNA, 201 bp, Homo sapiens
ggtatttcttcacagccgtgtaagaaccagactaatacaggtgttatccataaatctaaggacctgacctttccatgatgttaaacaacatcttttatatrttcctgaagtcagctgatgcttgtctgggataagaagggtatctagaaggaggctgacagcctgttggcatcccctattcactcacccttggggacagaa

SEQ ID NO: 335381 - DNA, 201 bp, Homo sapiens
agtgtgttgtatggataattagaagtttattggtgatgctggaaggcagattacataatatatcttctcgagatctctgcttcaggtatgatgtaaaattgtgcctcctagttgagagaaacagtggattattgtgtaaatattagctccataagtggcaatttactctagatttgagcttgtacaaagactcagttgcat

SEQ ID NO: 335382 - DNA, 201 bp, Homo sapiens
tctgaagatgaacactgaagagtgacactataggatttgaactttagacagatcatctggccccaggtaggagacagaaacagagtctgggagactagtcmagaaggaatttagtccctatgagggaaatgaggaccttgtatgacgaatagtgaagcaaacacagacatgagaggcctaaggaagcaaaagactgggctc

SEQ ID NO: 335383 - DNA, 201 bp, Homo sapiens
taatctcttccagatacaccctcatagacactcagaaataatgttttacctgctgtctcggtattctctgactcagtcaagttggcacataaaactaaccrtcacaaatagatattatttccattttacaggcgtgttaactgagacacagaagtgatgtcatttacacaaggtcattctcccaataagaggtggaggtag

SEQ ID NO: 335384 - DNA, 201 bp, Homo sapiens
gcatttcctgaatttgaatgttggcctgtcttgttaagttggggaagttctcctggataatatcctgaagtgtgtttcccaacttggttccattctcctcrtcactttcaggtacaccaatcaaacgtaggtttcatctcttcacatagtcccatatttcttagaggctttgtttgttacttttcattctttgttctctaa

SEQ ID NO: 335385 - DNA, 201 bp, Homo sapiens
aatttcttcatttacactgttgcatattattcctttttatgagtatggcacaatttatgcattccactgttgaagggcatttgcgttgtttccctttgagrctactgggaataaggctgctgcaaacagtctcacagaacacttttgacagatagatgtactcatttctgatgtgtatataactaggagtagattcatggg

SEQ ID NO: 335386 - DNA, 201 bp, Homo sapiens
cattagccaacacatactgcagattcattttgcctgttgaatctttggaatcatatagtatgtatccttttctgtctggctctattcaaattcacattatstttatgaggttcatccatagtttctatggtaataatttcttcatttacactgttgcatattattcctttttatgagtatggcacaatttatgcattccac

SEQ ID NO: 335387 - DNA, 201 bp, Homo sapiens
aaactattcagaagagagtttgaagagtgaagctggaatctgaacaccatggagtttttgacactacctttttacatcatgtcccacaatttcctctgtaycgctgctacatatcctttataatcaatatagtagaaaagaaaaacaatagtagagaaaacaaatgaaagcaaaataggttctttgaaaagatcaaataaa

SEQ ID NO: 335388 - DNA, 201 bp, Homo sapiens
gacttctagaagagtaattagcagagataccactcacttcttgctcaggtcttattcttccaagaactgcttccttggtgctggtgctcagccaagaataycctgagaaaacatccctcctctatgatccttgggatcatagagaatgaaaaactattcagaagagagtttgaagagtgaagctggaatctgaacaccatg

SEQ ID NO: 335389 - DNA, 201 bp, Homo sapiens
aacagcagtagaatgcacattcttctcaagctcacatggaacattcaccaagacagaccatgttctgggccataaaacacaccttaacaaatagaaaaggwtagaaatcatacaatgcctgctgtcagattacaatgggattaaagtagaaatgaataagagaaagataagtggaaaatcccaaaatacatggggactaaa

SEQ ID NO: 335390 - DNA, 201 bp, Homo sapiens
cactggcctcagcccttgaaagtcctgactcgggtttctaatgttctactcacacttagtaacatggtcattcaataataacaacagcttctgaggagacrctgggtgttggtattccgagaagatgccaaagagtgtgttgtctccaggccacaggcctgatttgatcaaatctgcttcatccttttgatttctcttggc

SEQ ID NO: 335391 - DNA, 201 bp, Homo sapiens
aggctagatggactattagacttctagaagagtaattagcagagataccactcacttcttgctcaggtcttattcttccaagaactgcttccttggtgctrgtgctcagccaagaatatcctgagaaaacatccctcctctatgatccttgggatcatagagaatgaaaaactattcagaagagagtttgaagagtgaagc

SEQ ID NO: 335392 - DNA, 201 bp, Homo sapiens
acttccacaaacaccatctaaccacctgccctccctcaccctgctcctttccaggtttcctcaggggctcctgattagctgtggctccctttcaaactttsactgcctccccactgcctgcatactctgtgtggcactgcacaggcactggcctcagcccttgaaagtcctgactcgggtttctaatgttctactcacact

SEQ ID NO: 335393 - DNA, 201 bp, Homo sapiens
gggaggctgaggcaggagaatggcatgaacccaggaggcggagcttgcagtgagccaagatcacaccactgcactccagcctgggtgacacagcaagactrtgtctcaaaaaaaaaaaagtataactgatatgctgaaaaaggagaaaatggaatcgtaaaatgctcagtggaaaataaagatgggtacaaaaaacaaggg

SEQ ID NO: 335394 - DNA, 201 bp, Homo sapiens
cttctcagaaaccaagcaaaaagagagtaccataagacatttcaagtgttgagaaaaagaaaacaccaacctaaaattctgcatcctgtaaaattattttycaaaagcaaaggagaaattatttttcagacaaacaaaaattaagggaattaattgccagtaaacctgcttttcaagaaatgttaaaagatgttcctcaga

SEQ ID NO: 335395 - DNA, 201 bp, Homo sapiens
gatgatttgaacaaagaaacatattcccagagcataatgcaatggaaagagcagtgtgctacgtggaagacccacagccttcctgcttccatggactcaasttttacccagttcacatctgtaaaatgatgacagggccttctaagaactataattacataatattaaactttgctaaaacatacagaagcagcaggaata

SEQ ID NO: 335396 - DNA, 201 bp, Homo sapiens
cagaaggtgtgtacccataatgggaataccaggagaagagggagaaatattagaggaaatgcttgaaacaattactcagaatttccctctaatgtcagacrtgaaaccacagatccaggaagctcaaataacaccaagctggataaatacccaaaaaaagatacctaggaatatcattttcaaagtacagaaaatcagagc

SEQ ID NO: 335397 - DNA, 201 bp, Homo sapiens
ctcacccctaacatccagtccatcaccataatctgtagattttacctccaagttgcccctcattcattgcattcctctgcatttctactattaccagtttyagaccaagctaccatttgttctcaccaagactattgctataggtattcttgaccctcctattcattccccacatggcaaccagagtaatcttttccaaat

SEQ ID NO: 335398 - DNA, 201 bp, Homo sapiens
aacttctgcctcccaggttctagcaattctcccacctcagcctcccaagtagctggaataacaggtgcacaccactactcccagctaacttttttttttttgtagtagtagtagagatggggtttcgccatgtcggccaggctggcttcgaactcctgacctcaggtgatccacccacctcagcctcccaaagtgctggga

SEQ ID NO: 335399 - DNA, 201 bp, Homo sapiens
tttataatatacatttaataaataacaacttaggacagtgatgcaaaatgtataagtcacaaataaatgttgcagtctttttcttttttttttttttttttgagatggagtctgactctgtcgcccaggctggagtgcagtaacccaatctcagctcattgcaacttctgcctcccaggttctagcaattctcccacctca

SEQ ID NO: 335400 - DNA, 201 bp, Homo sapiens
ttaccaaccacttccaacaattactctgtccttttgcagcctctgtacttttgttgtcttcgtcgcatgcattttttttttaatttcagtcttcctgcaasactgtaagttttataaaagcaggtttatacatctgtaactctgaatcttcagtgcctagaatattacctggcacatggtggtgctcaatatttgttgtat

SEQ ID NO: 335401 - DNA, 201 bp, Homo sapiens
cattttttggttaacttctttttttttttttttttttgagacagagtcttgctctgtcacccaggctagagagcagtggcactatcttggctcactgcaasctccacctcccgggttcacgccattctcctgcctcagcctcccatgtagctgggattacaggcgctcaccaccacacccgggtaattttttttattttag

SEQ ID NO: 335402 - DNA, 201 bp, Homo sapiens
atggactcacctcttatctctgaaatttaactttaaagtttttatcctatggaatatccagttgtatgcaaggaattatgtttaattatattttcacaacattatttatagtacttaaaaactggaagccatctaaatatccaataggagattggttaaacaaaaggtttaacctttcattaagatgatgtgcaattattt

SEQ ID NO: 335403 - DNA, 201 bp, Homo sapiens
agggacagggtggaaaaagagagataaaggaagcggaataagtgaggagaagtggagggagaaagatcaggggtctccttactctctttgtgtcctctgamgcatttgcaaatcccgcctctggtccactagttgatgcaggatggctttcctcttgtggttagcagctgcctccagctggtgtttcatgtaattttgttc

SEQ ID NO: 335404 - DNA, 201 bp, Homo sapiens
aatggactcacctcttatctctgaaatttaactttaaagtttttatcctatggaatatccagttgtatgcaaggaattatgtttaattatattttcacaacattatttatagtacttaaaaactggaagccatctaaatatccaataggagattggttaaacaaaaggtttaacctttcattaagatgatgtgcaattatt

SEQ ID NO: 335405 - DNA, 201 bp, Homo sapiens
aaatggactcacctcttatctctgaaatttaactttaaagtttttatcctatggaatatccagttgtatgcaaggaattatgtttaattatattttcacaacattatttatagtacttaaaaactggaagccatctaaatatccaataggagattggttaaacaaaaggtttaacctttcattaagatgatgtgcaattat

SEQ ID NO: 335406 - DNA, 201 bp, Homo sapiens
ttttcttggctagtttgactcactatcagccaattgtccaagtaaaaagctgtttaaagtttttttttaaaaaaagaggtgaagttttaatagcatcaggwacaaaaataccattgtaagccagctctcattttttgacattttttggtatcatctggacaaggtcatttgtcacagggtatgactctatccatgatgcta

SEQ ID NO: 335407 - DNA, 201 bp, Homo sapiens
aaggatgaagctgagctgagctgtgttaccaaaacaccaggggtttggtctaggtgctcacagcacagaaagccaatcactgagacaatgattattgccarggaagaaggatttaattgggtgctgtagccaaggagatgagagatcagtctcaaatccatctccttgaccaactaaaagtaggggtttatatagcaggga

SEQ ID NO: 335408 - DNA, 201 bp, Homo sapiens
gagcaagttagagaaaacgccacactttgagacaaattaagagtcggtttatttagccagtggccaagagacggctaacgctcaaagttctctcagccccraagaaggggctagattttcttttatactttggtttagaaaggggaagggggtctagttaaaacaattttacagaaataaagtaggcaaaaagctaaaagg

SEQ ID NO: 335409 - DNA, 201 bp, Homo sapiens
ccagtcaaaatagacattctgcattcttctttctctggttttgaaagaggtgttgaagattccaatgcagattcctattatactgagttttctttggtaaygttatggagggaagtcaagtaataacagctaatgtttttaggacatgcagtgtgctaggaattgttctaagtagtttatatatgttaacccatttaatac

SEQ ID NO: 335410 - DNA, 201 bp, Homo sapiens
ctgtagagacaaggtcttgttatgttggccaggctggtcttgaactcctggcctcaagtgatcctcccacctcagcctctcagacactgttattgttcttwtatgacagatgagaaaaccgaggcataaggttagctaacttgccctaggtcatacaactcatagtggcagaactgagtcttgaactcaggccacctgatt

SEQ ID NO: 335411 - DNA, 201 bp, Homo sapiens
aaaaagttatgattcctttcacttcccctggaatgggaaattcttcattttggttaatatgctgcaggaggcaccaacttaataccaacactgtgccaagkgaggttttaggagctgtgtgaggaaagtagtggcagccctagcatctagcaaggcacccagaacagaagaggcccccgacatttgttgaatgaacaagtg

SEQ ID NO: 335412 - DNA, 201 bp, Homo sapiens
gggcaattctaattcagtggttagatgtaacgagaggtgcattcatacaagtgctatggaagcacagaagagaggtgcagaaacacttccaatggcagtgytggcaaggctgacacctgtggaagtgtcagaggtggtagatgaagatggtggaggagaagctatttaggtcagataatgagacagaatggcattgtctct

SEQ ID NO: 335413 - DNA, 201 bp, Homo sapiens
cttgtctctaatgtggctgacaaaggtgattgcaaaatgtccaaaatcacaacaaagaatgcaatgcttaaaatttgtgcaaaaaaatgattattttgcayaaatggactgcagtggccagtatggatggcagtggccagcagcacacagacctgtgtttacattccagctctgctacttattaactgtataatcttgggt

SEQ ID NO: 335414 - DNA, 201 bp, Homo sapiens
tgatggacttccctttatgggtaatctgacctttccctctggctgcccttaacattttttccttcatttcaatcttggtgaatctgatgattatgtgtctyggggttactcttctcatggattatcttagttttgttctctgcatttcctgaatttgaatgttggcctgtcttgttaagttggggaagttctcctggataa

SEQ ID NO: 335415 - DNA, 201 bp, Homo sapiens
ccaatcccatctctgccattctctagatatgggatatttctctgaacctccatttccttgtctgtgaaagggatgacaataaaacatatctacttgacaarttgctataatgattaagtgaagtaatgtatgtaaagcagatggtaagtgtccaattagttcttgattaatgcacatcctaaagcttctgttgcattccta

SEQ ID NO: 335416 - DNA, 201 bp, Homo sapiens
gctgttgatgaaacaggagtagagatggttggtgtagagaaaaacctattaatagccatttttagaaacagacttttaaatccacccatcagagctgaaasatttcccctgttctcacactcccagagctggcagcagcttctcctcatgtctgaggagcctagccatgcttgtgggagatgatggcatgggtgccagtgg

SEQ ID NO: 335417 - DNA, 201 bp, Homo sapiens
caagatcaaaacaacattttactagaaatatttcatagtctcctctcattctgtcttcagggccctctgtgttaagttacaccccaaccgtaaacattaayggtaaggcctttttatttgaagacattcaacacatgtgcttctgtacaacatggattttgcatgaactttcaatcagatgtcgatttttcaaaatggagg

SEQ ID NO: 335418 - DNA, 201 bp, Homo sapiens
tttggatcagggaagcagaaccccactccatatggctgctgactggcctccccctcactgtggctcactatagaggagaagtgtcagtagctggagagatkgtaaggctgattccctttctgactccctgggatatccctttctcagaaatacagagaaactgtcaacgaaagagttgacactagaaaataagtagggcat

SEQ ID NO: 335419 - DNA, 201 bp, Homo sapiens
ctgtgactggctcattgtgtttagcataatgtcctcaagattcatccatattgttgtatattgcaggcattccatatttttaaggctgaataatattccaytttatgtatatgcccttttatcctccatttatctgtcaagggacatttagatcctttctacatcttggctattgtgaatagtgctaatacctctttgaga

SEQ ID NO: 335420 - DNA, 201 bp, Homo sapiens
gaccacgaacccaccagaaggaagaaactccgaacacatccgaacatcagaaggaacaaactccggacacgccgcctttaagaactgttaacactcaccgygagggtccgcagcttcattcttgaagtcagtgagaccaagaacccaccaattccggacacaaagcgaagccgcatttgagaatgatatttctccaaatac

SEQ ID NO: 335421 - DNA, 201 bp, Homo sapiens
aactttattcggagggctaaagggtggtttgtgtaaaagaaacggagaattgctcctgagatagcctgtcatctgatggcttatgaggtgaggttctgccytcctcttgcttagaggtggggagagactagaccaaaagctgaatgcctgatctctgcctatggactccaagtgactcaggaatgttcacttgactcttta

SEQ ID NO: 335422 - DNA, 201 bp, Homo sapiens
aaaccaccattttattatttgcttctatgagtaggattattttagatacctcatgtaagtggaatcaggcagtatttgtccttctgtgactggctcattgygtttagcataatgtcctcaagattcatccatattgttgtatattgcaggcattccatatttttaaggctgaataatattccattttatgtatatgccctt

SEQ ID NO: 335423 - DNA, 201 bp, Homo sapiens
caaccggggctgcccccctgtgttcttgggattcaccagaacccagtctgtatgttccgctctctgccctccacacccctcacagtgaccaccactgcttrttgcaattacttcccatgcttcctcagcattcttcataataaaaggaaatcaaatatttgtgttttaccattataaagtgctcctgattggtcatctcat

SEQ ID NO: 335424 - DNA, 201 bp, Homo sapiens
agtggccgtttgtcaaataggaaggatttctagaatgaaagagaagcaattcatttatgctagagtactgaaaaacaaggttaataattcagaagactaarataaatcagaaagtatttcttaatttataatatttgcccagccctcaacacacggaccagctggtgttgaggtaacacatagaatcatatgagtgtgttc

SEQ ID NO: 335425 - DNA, 201 bp, Homo sapiens
cactattattgtgtgggagtctaagtctctttgtaggtctctaagaacttgctttatgaatctgggtgctcctgtactgggtgcatatatatttaggatasttagctcttcttgttgcattgatccttttaccattatgtaatgcccttctttgtcttttttgatctttgttggtttaaagtctttttttatcagagacta

SEQ ID NO: 335426 - DNA, 201 bp, Homo sapiens
tcaagggcaataataattttagaggcaagtataagatgaagaaaaatatttcagtggtttacttcaaaacagctatatgtatagaggttaagaatatgtaycacagaatctgaatttgtgtcagataaaggtgggtttgaatcccagctttcttgcttgcaagatgactgacatcagaccagctgtgtaatcttgcaaagt

SEQ ID NO: 335427 - DNA, 201 bp, Homo sapiens
gctccacttggtgcagagctgagttcaagtcctgaaatatccttgttgattttatgtctcgttgatctgtctaatattgacagtggggtgttaaagtctcycactattattgtgtgggagtctaagtctctttgtaggtctctaagaacttgctttatgaatctgggtgctcctgtactgggtgcatatatatttaggata

SEQ ID NO: 335428 - DNA, 201 bp, Homo sapiens
ttagctccacttggtgcagagctgagttcaagtcctgaaatatccttgttgattttatgtctcgttgatctgtctaatattgacagtggggtgttaaagtytcccactattattgtgtgggagtctaagtctctttgtaggtctctaagaacttgctttatgaatctgggtgctcctgtactgggtgcatatatatttagg

SEQ ID NO: 335429 - DNA, 201 bp, Homo sapiens
ctattcagttatatgagccaggaactcagaagtcatccttgagacttctcttatccctcacccctaacatccagtccatcaccataatctgtagattttayctccaagttgcccctcattcattgcattcctctgcatttctactattaccagttttagaccaagctaccatttgttctcaccaagactattgctataggt

SEQ ID NO: 335430 - DNA, 201 bp, Homo sapiens
gcttaggacatttattccaataaggtgtaagactcaatcactcactggaggagaggccttcctcagactgagaccagggctggaaggaagagctccaggaractgaacacaaagacataacatagcctagatggtcactcaagatggtaccaagcacgtggaaggaggctgggacccaggaagtgagggacccagggatcc

SEQ ID NO: 335431 - DNA, 201 bp, Homo sapiens
agacccagactccttgccaccccctctttgagattctggacccgtttatccaactgcctgcttatatatcacaaaaaggcccttcaacttgcccaaaaccrcaatctttcttctcttaaatcttgtcttttatccaggatttcggtctcagtgaatggcaccactatctattcagttatatgagccaggaactcagaagtc

SEQ ID NO: 335432 - DNA, 201 bp, Homo sapiens
agctggcggcctgtggccagaggttgatctcaggccactctgtttcaggcacagcctccgttgctgtggcagggatcttggctgctctgcgaatcaccaasaacaagctttccaatcacgtgtttgttttccaaggtgcaggcgaggtatgtggcattgagggtttctttggttgctccaggaagagaataagaatgggtg

SEQ ID NO: 335433 - DNA, 201 bp, Homo sapiens
tgatgaaagttaatttatgtgttttgctcagtttgaagtttatcttcatccttgttgcaatagataatttgtgaaaggtaataaatagtagtttgactttsacttcagctcttgctgaagtcaccaatggtctctttgtcaatacattcaataaacgtatttaattctgagccctcagccatgtctgacactattgatcac

SEQ ID NO: 335434 - DNA, 201 bp, Homo sapiens
atcatatgctgcaatgtagtgatcctggctgatgagtagaagcaaatgtttttgcctctcatactgggtttctgtctccctggagatatcattcatcaagractacaaactcaaatgcctacaggagccaaaaaagaaagcaagagagtgaaagtagccagccagggaatgtgatggctatggactgcacaccccgtctaa

SEQ ID NO: 335435 - DNA, 201 bp, Homo sapiens
ccctttcattttttatccccaggacagtaaccttctgggaaaatcctacatatcagaattatttaccaggagtatatactttgttttgtttgagtccatgratctgcactagcttctccaccatgataaacacaggcctctggattaagataaatttgttgtttcccacctcaagcttttgtcttatgaaagtgaaagttc

SEQ ID NO: 335436 - DNA, 201 bp, Homo sapiens
aacacagccaggaatcaggaagtatgcacccaaaggctgctaagtaaccaagggaggtgttacgaagcccacacactaaagctggatggaagcagtctgtkgcagggattatgcctattttgtttaccactatatctcaagcacctggaacaaggtctgacacatagttggctctcaataaatatttgaagaaggaaggaa

SEQ ID NO: 335437 - DNA, 201 bp, Homo sapiens
actctgtctcaaaaaacaaacaaaaaacctataaggtactataaaatgttcagaattctaagagtttccgttactatttatatccctcaattgactttgaytcttaatgttcctttgccttcctgatcttttttgtcaaagagttaatcaagtataaacaagcacttccatgtacttcaggtaactgtcactcaaaatatg

SEQ ID NO: 335438 - DNA, 201 bp, Homo sapiens
tgaattccagttctagttcaccttgggattcccacatagcctctctgagcccctacttttctcaattgtaaaattaggatgataataatgctgcttgtatrctattttgaggctcaaatgaaataatacatgtggaagaagtttttaaaccatacgccaggcatggaggctcatgcctgtaatctcagcactttgggaggt

SEQ ID NO: 335439 - DNA, 201 bp, Homo sapiens
cctaccttgttccccactcctccccacccccacagcccatagattctactacaggctgctaagaactaagaaccagtcctaactgtatactgaattaaaaytttcatcatgaccaaaaatttcattaattcacaaatgcaaaatctcagtatccagatgtacatggagaactttcaaagttattaagtcaaaattgttaaa

SEQ ID NO: 335440 - DNA, 201 bp, Homo sapiens
gccaaaatatgtcaaagggaacagccatgtttgccttccgaaaccatcaaaataaaattcttttcaatccactgatttatttttagtgagtaaggcaatayggtgcaatggaaagaacactggaccaggagccatggttttatttctataagcttggctgcttattagttgcatggccatttcgtgtgcaagatgaggcgg

SEQ ID NO: 335441 - DNA, 201 bp, Homo sapiens
aaagtctagaaaattatatctgtgttaacatcgcccttccagacctaaccatgtgtttatcaaagatactttccagttaagaactctctgcaaatcaagamtgttacgttttaattctcaaaataaaaaatcaagaacagtgacattaacaaacttgccatttagggacatagatgcagctggtgacaaaagcccaatcct

SEQ ID NO: 335442 - DNA, 201 bp, Homo sapiens
ctggctgattctgaaataagcccactttcttcaaggggtgagtgctctgatgtgctaagtacatatcatagattaattttctccaaggctttctggaagcygaccaaggcctttccctctataccatagtctcaaagcagcttgcatatagagaaattgccttaaagtcctttatttaggttattggtttttgtttcaatt

SEQ ID NO: 335443 - DNA, 201 bp, Homo sapiens
atgcatctgtaggcccagctactcaggaggctgatgtgggaggatcagttgagcccaggagtatgaggttacagtgagctatgatcacaccactgcactcyagcctgggtgacagagcaagaccctgtctcaaaacaaaacaaaacaaaacaaaaatcaataaatgggatccaggaatataaaaaaataataacataccat

SEQ ID NO: 335444 - DNA, 201 bp, Homo sapiens
atgagcatagatgcaaaaatcctcaacaaaatactagcaaaccaaatccaacaacacattaataggattattcaccatcatcaagtgggatttatccctgsgttgcaagaatggttgattattctcaaatcaataaatgtgatatatcacatgaacagaatgaaggacaaaaatcatatgaccatctcattaaatgcagaa

SEQ ID NO: 335445 - DNA, 201 bp, Homo sapiens
attaatacaaagtatctcaccaaagaaaagcccaggaacagatggcttcactgctgaattctaccaaacatttaaagaagaactaatatcagttctctacwaactgtctcagaaaaaaacaaacaaacaaaaaaacgaatgggagagaatactttcaaattcttttcaggaccagtattaccctaataccaaagccacaca

SEQ ID NO: 335446 - DNA, 201 bp, Homo sapiens
tgggttgtgtataataagaaatctcatgttcccgtatgtgacttccactggagctgggtgattcattggagccatgttaatttagttaaaaaaaaaaaaaactgatatggttacgaaaaaaattaaaaatttttgaatacagaaatgatgtcaagaaactgaagtctacgccaatatactccacttgaaattcacagagct

SEQ ID NO: 335447 - DNA, 201 bp, Homo sapiens
tgaagccagctgggctcctgactctggtggggacttggagaacctttatgtctagctcaaggtttgtaaacacaccaatcagcaccctatgtctagctcarggtttgtgaatgcaccagttgacactgtatccagctactctggtggggacctggagaacctttatgtctagctaagagattgtaaatacaccaatcggca

SEQ ID NO: 335448 - DNA, 201 bp, Homo sapiens
tgtctgtgactttaggagggttaaggggatggaaactgtggagacactggatctccttgagctgcactacctgtaacccagaggctgggtgacaaactctygtttgcagcttgagctccaccccaaacacccacccaggccagttctgggaaagctcctggatttcccctaatacaccaagcagaaaggtcatcaatgtct

SEQ ID NO: 335449 - DNA, 201 bp, Homo sapiens
acctgcggccccggtgcgggatccactgggtgaagccagctgggctcctgactctggtggggacttggagaacctttatgtctagctcaaggtttgtaaayacaccaatcagcaccctatgtctagctcagggtttgtgaatgcaccagttgacactgtatccagctactctggtggggacctggagaacctttatgtcta

SEQ ID NO: 335450 - DNA, 201 bp, Homo sapiens
aaaacattgctgatagaaattaaagatctaaataaattgagagagattctttgttcatggatttgaagactcaatattgtcaaaattgcaattatattcadatctataaagtgaacactatacctatcaaaaccattgtagggttttttggtggaaacttacaggctgattctaaaatgtttatggtaatgtaaaggatct

SEQ ID NO: 335451 - DNA, 201 bp, Homo sapiens
gtaatactgccttgattcacagatgacctaatcctgcatgtaaaaaacactaaagaacacatacacattcattcattcattcattctctctctcctctctctctctctctgtctactggaactaataaattagttttgaaaggtcaccaaatacaaggtcaacattatttctatatgctggcagcaaatgatctaaaaata

SEQ ID NO: 335452 - DNA, 201 bp, Homo sapiens
attggaaagaaagagtaatactgccttgattcacagatgacctaatcctgcatgtaaaaaacactaaagaacacatacacattcattcattcattcattctctctctcctctctctctctctctgtctactggaactaataaattagttttgaaaggtcaccaaatacaaggtcaacattatttctatatgctggcagcaa

SEQ ID NO: 335453 - DNA, 201 bp, Homo sapiens
cagtaagtctggtagattgactatttcatttgtttaaactctgctgtatccaacttagcatgaaggtcacaccagctacttaatggttgacaataatgatrccaattaggaaatttcttctacaacatggcaaattaaaagctaaagattcaaaaactccatgactcaaattagattttgttatagaactttcattaaaat

SEQ ID NO: 335454 - DNA, 201 bp, Homo sapiens
cttaagcggtggtttgtagttctccttgaaggagtccttcacatccttgtaagttgtattcctaggtattttattcccttcataggaattgtgaatgggarttcactcattatttggctgtttgtctattattggtgtatatgaatgcttgtgatttttgcacattgattttgtatcctgagactttactgaagttgcttg

SEQ ID NO: 335455 - DNA, 201 bp, Homo sapiens
ttggtgtgtgatgttccccttcctgtgtccatgtgttctcactgttcagttcccacctttgagtgagaacatgaagtgtttggttttttgtccttgcgatrgtttgctgagaatgatggttcccagtttgatctatgtccctataaaggacatgaactcatcatttttatggctgcatagtattccatggtgtatatgtgc

SEQ ID NO: 335456 - DNA, 201 bp, Homo sapiens
ggccttggtgtgtgatgttccccttcctgtgtccatgtgttctcactgttcagttcccacctttgagtgagaacatgaagtgtttggttttttgtccttgygatagtttgctgagaatgatggttcccagtttgatctatgtccctataaaggacatgaactcatcatttttatggctgcatagtattccatggtgtatat

SEQ ID NO: 335457 - DNA, 201 bp, Homo sapiens
aacattaggtatatctcctaatgctatctctcccccctccccccaccccaaaacaggccttggtgtgtgatgttccccttcctgtgtccatgtgttctcaytgttcagttcccacctttgagtgagaacatgaagtgtttggttttttgtccttgcgatagtttgctgagaatgatggttcccagtttgatctatgtccct

SEQ ID NO: 335458 - DNA, 201 bp, Homo sapiens
ccaatcagcagggtgtggatggggccagataagagaataaaagcaggctgccccagccagcggtggcaaccagctagggtccccttccacgctgtggaagytttgttcttttgctctttgcaataaatcttgctgctgctcactctttgggaccacactacctttacgagctgtaacactcaccacaaagatctgcagctt

SEQ ID NO: 335459 - DNA, 201 bp, Homo sapiens
ttttttattattatactgaagttctgggatacacgtgcagaatgtgcaggtttattacataggtataaacgtgccatggtggtttcctgcacccatcaacmcatcatttacattagctatttctggtaatgctgtccctccccttgccccccaccccctcctacaggccccaatgtatgatgttcccctccttgtgtccat

SEQ ID NO: 335460 - DNA, 201 bp, Homo sapiens
caataagggcttaacaagcaatctaatgaaagcaccaaacctaaacaatgatttttttctctgaggtaaaaatacgcagtttcacaatcacccccaaacaygtaaaagataaaaactttccccgggaaacgaagagccaaactttgagttttacacaagcaaccgggagccaggcaggaacttgttcaggggccacaggtt

SEQ ID NO: 335461 - DNA, 201 bp, Homo sapiens
aataagaacagttagctttctaaataacactgtagacaagcttttgattttctctaggaaacatataataatcaactgattctcttcctcagagggtttcytaaagttttcatcccccttatcttttaggacatactgcagcaatatttgctgatatggtttggatctgtgtccccacccaaatctcatgttgaattgtat

SEQ ID NO: 335462 - DNA, 201 bp, Homo sapiens
gccaggctggcttcgaactcctgacctcaggtgatccacccacctcagcctcccaaagtgctgggattacaggcgtgagccaccatgcccagccaaatgtygtagtctttaaggatctgatatgttcagaggagagaagccacttcagaattcagtgataagttttcatggagaaagtgagatgtgaaaagggtactaaaa

SEQ ID NO: 335463 - DNA, 201 bp, Homo sapiens
tgtccacaatgatgaatgtgcacttattggccaccaactgtttgctgtaccccctatctcagccactgagccaagtataaatctaggagaaggcccacccyagagctagctaaaaataagccacctggaaaactagaaacagagaatatagaaaattcactcatactcccaccctgcaaccattagtattttgtaagttcc

SEQ ID NO: 335464 - DNA, 201 bp, Homo sapiens
aataaattataggagagcaagaatgcaagcagtgaatctaagggaagtattggagaagttgagcataacaatgtggcttggcaacactttcagtgtggcarcattaaagatgaagacatttggacaggtattggatacattttggaggtaaaggcaactggacttgcaaatgatcggaagtcaggaacagagaaaggaata

SEQ ID NO: 335465 - DNA, 201 bp, Homo sapiens
ttccagctgtcgggggtcaactgccctctctctcacccaccaccaccactacacacactgagtagcagttctaggcctttccttgatctctccccctgccrtgaaacttcccctggtctctttaaccttttctctcctctgttcccaaagccttccttttcactaagtcctgtattctgaggctgttcttcacttccaggg

SEQ ID NO: 335466 - DNA, 201 bp, Homo sapiens
cctaactcttgtatgtcagaaagtctttccagatctctggtctaggttaatgaatctcttcttttgctcatatagtgcccttttttcagagatttatcatygcatttattataccacacagttgtctctttaagtgtctgtctctcccactagagacctcttcagaagagggaaccttgtattcctagacaccagcacagt

SEQ ID NO: 335467 - DNA, 201 bp, Homo sapiens
gaacccaccaggaggaacgaacaactccagacgcaccgccttaagagctgtaacactcaccacgaaggtctgcagcttcactcctgagccagcgagaccaygaacccaccagaaggaagaaactccgaacacatccgaacatcagaaggaacaaactccggacacgccgcctttaagaactgttaacactcaccgcgaggg

SEQ ID NO: 335468 - DNA, 201 bp, Homo sapiens
gatacaaacaaaaaagtgagagctcccatttggaggtcatcttatgtgctaacagtgctaagtgctttataatatacatttaataaataacaacttaggasagtgatgcaaaatgtataagtcacaaataaatgttgcagtctttttcttttttttttttttttttgagatggagtctgactctgtcgcccaggctggagt

SEQ ID NO: 335469 - DNA, 201 bp, Homo sapiens
ttcaagtaatgtttattgagaactaatggagtgctggctatgtttggcaaaactactttccaatttgatgtaaatataacattgtgtcacatcataatatscaagcactcggaaaacatgaaagttttgtagatttgggaagcccaaatctacagaaaaagttggatgatcccaactctgtgctattttgtttccgcctgt

SEQ ID NO: 335470 - DNA, 201 bp, Homo sapiens
ggaaacaaacatttttgagtcaacttctataggaaacctttaccaaccacttccaacaattactctgtccttttgcagcctctgtacttttgttgtcttcrtcgcatgcattttttttttaatttcagtcttcctgcaacactgtaagttttataaaagcaggtttatacatctgtaactctgaatcttcagtgcctagaa

SEQ ID NO: 335471 - DNA, 201 bp, Homo sapiens
aacaagataaaaataaatgcaggccaggtgtggtggctcatgcctgtaatcccagcactttgagagaccgaagtgggaggattgcttgaggccaggagttytagaccagcctacacaacatactaagaccccatctctacaaaaaaaaaaaaaaaaaaaaatcaaaaaattagctggtgtgtggtggtgcacacctatagt

SEQ ID NO: 335472 - DNA, 201 bp, Homo sapiens
tggtaaatcagaaaagatatattttaaacttctgtgcactaaatggtgcagaaacaaaattaaaaagaaaaaaaagaattgggaaaatgtttaaaacatayacatcagaaaactattcatacttatgatatatgaagttctctttataaaaatacaacttttttttaagaaaaagtaaagctcccagttaaaaaaggacac

SEQ ID NO: 335473 - DNA, 201 bp, Homo sapiens
ggctgaggtcgaaggatcatctgagcccaagtaggtcaaggctgcagtgagcagaggttgtgccactgcattccaacctgggtgacagagtgagaccctgygccaataaaaaataataataaattacattatataatcatgttctattgccccatattaaagactaatcgaggtgttggactacctggtgtctgaagagag

SEQ ID NO: 335474 - DNA, 201 bp, Homo sapiens
caaagtaacactacttagtaataaaaaggagtgaactactgacataggtaataacatggatgaacctcagaatcatcatgctggctgataaaaacaagacwcaaagaatacatactgtgtggtttcatttatataaattgtagaaaatgcaaactaatttatagtgagtccagcaaatcagtgattggctggggccaggat

SEQ ID NO: 335475 - DNA, 201 bp, Homo sapiens
ggcaagtcactgcccctgtgtttctgcccctgtaatgtgaatccatctcccagtccttctaccaacagccttgactagctaaggttctggaaggaccacggcaggaacaaatatttgcccacccactggtatttgggctggacagcataagccatgcacaaaattataaggctggaaaaaatgttttgtgggccatttcag

SEQ ID NO: 335476 - DNA, 201 bp, Homo sapiens
taattcttgccttatttttacctcagtgaatgaatggtggtgttgcttaaaggggtgtgtgtgtgtgtgtgtgagagagagagagagagagagagagagaaacagagagagacagacacacagagagagacagaaaacgttcatcacattgttttgttgtctgaccttttcagcattttagctgcaggccagttgtggggc

SEQ ID NO: 335477 - DNA, 201 bp, Homo sapiens
ataattcttgccttatttttacctcagtgaatgaatggtggtgttgcttaaaggggtgtgtgtgtgtgtgtgtgagagagagagagagagagagagagagaaacagagagagacagacacacagagagagacagaaaacgttcatcacattgttttgttgtctgaccttttcagcattttagctgcaggccagttgtgggg

SEQ ID NO: 335478 - DNA, 201 bp, Homo sapiens
tataattcttgccttatttttacctcagtgaatgaatggtggtgttgcttaaaggggtgtgtgtgtgtgtgtgtgagagagagagagagagagagagagagaaacagagagagacagacacacagagagagacagaaaacgttcatcacattgttttgttgtctgaccttttcagcattttagctgcaggccagttgtggg

SEQ ID NO: 335479 - DNA, 201 bp, Homo sapiens
tttataattcttgccttatttttacctcagtgaatgaatggtggtgttgcttaaaggggtgtgtgtgtgtgtgtgtgagagagagagagagagagagagagagaaacagagagagacagacacacagagagagacagaaaacgttcatcacattgttttgttgtctgaccttttcagcattttagctgcaggccagttgtg

SEQ ID NO: 335480 - DNA, 201 bp, Homo sapiens
catacactgaacaaaggtatttatttataattcttgccttatttttacctcagtgaatgaatggtggtgttgcttaaaggggtgtgtgtgtgtgtgtgtgwgagagagagagagagagagagagagaaacagagagagacagacacacagagagagacagaaaacgttcatcacattgttttgttgtctgaccttttcagc

SEQ ID NO: 335481 - DNA, 201 bp, Homo sapiens
aggtattattagcccactattatcagtgaagactgaaatttgtatcaagtacatttcctgaggtcatgcgtttagtaagtgatggagccacacctgctcartctcaaagctgtctatgctctgccacactttgtctttcctccaggctactcttttcacttccttaacatattttacccagcttcttctctgcctacatgt

SEQ ID NO: 335482 - DNA, 201 bp, Homo sapiens
agctccaagcttctcctgttggttttaacacaacatatgcaaagaaaaatccctaggcatatagcatccagactacaaaggaagttaatgaggattttatkttaattttaaaagattgtgaaaagctgttaggtctaagccccgattgcaatgtttcacaggggtgttcacattctgagtccctctcagcatagagggtca

SEQ ID NO: 335483 - DNA, 201 bp, Homo sapiens
ccaggaggtggaggttgcagtgagctgagatggcaccactgcactccagcctgggcgacagagtgagattccatctcaaaaaaaaaaaagaaagaaagaaaaaaagacatcagctgtgtcttcaacaaccttacagtccttccaagaagacatttttgaatagaaaataattagggaagacttcagtacccaactatttgg

SEQ ID NO: 335484 - DNA, 201 bp, Homo sapiens
cacatcatccaggaatagaaagatacttttattctggtagctcttggggaagagaaaataccctttctctgacgcctcagaaagcgaatccttctgccttrttgactctgattagattctctcttcccattcccaaaccaaaaccaatcaccagtaattaaagccggtcagagcccacccctggagttaaaatggggttta

SEQ ID NO: 335485 - DNA, 201 bp, Homo sapiens
acggaccaatcagctctctgtaaaatggaccaatcagcagggtgtggatggggccagataagagaataaaagcaggctgccccagccagcggtggcaaccwgctagggtccccttccacgctgtggaagctttgttcttttgctctttgcaataaatcttgctgctgctcactctttgggaccacactacctttacgagct

SEQ ID NO: 335486 - DNA, 201 bp, Homo sapiens
ttgcattagcttcttcaaactctctacctccccaccaccctgagtttattatctagtagttacaactcaagaaatcaaataggagacacatcgcatgtgckaaactgtgtgacactgactctgagagaagggggagagctgtgtggaatggtggaggcagggaggcctcctggaggttgcaggtagtcgactgtggattgg

SEQ ID NO: 335487 - DNA, 201 bp, Homo sapiens
caagctttttaatgtgctgctggattcggtttgccagtatttaattaagaatttttgcattgatgttcatcagagatattggcctgaaattttctttttttgttgtgtctctgacagattttggtatcaggatgattctggcctcataaaaacagggcagagtccttctttttctgttgcttggaatagttttagaaggaa

SEQ ID NO: 335488 - DNA, 201 bp, Homo sapiens
ccctgtcaaaacggaccaatcagctctctgtaaaatggaccaatcagcagggtgtggatggggccagataagagaataaaagcaggctgccccagccagcrgtggcaaccagctagggtccccttccacgctgtggaagctttgttcttttgctctttgcaataaatcttgctgctgctcactctttgggaccacactacc

SEQ ID NO: 335489 - DNA, 201 bp, Homo sapiens
tccatagagtaatacatacaaccccattatcgtttcaattgccatctttttgctcatcattttcaacttaattctttaccctctaagacccagacttatasatatggaactgtccactaacacctccagataaatgtctcaaaggaaaactcaatgtatataaagtaaaacttgagatgagctcctctccttccactccca

SEQ ID NO: 335490 - DNA, 201 bp, Homo sapiens
cccaggaggtggaggttgcagtgagctgagatggcaccactgcactccagcctgggcgacagagtgagattccatctcaaaaaaaaaaaagaaagaaagaaaaaaagacatcagctgtgtcttcaacaaccttacagtccttccaagaagacatttttgaatagaaaataattagggaagacttcagtacccaactatttg

SEQ ID NO: 335491 - DNA, 201 bp, Homo sapiens
acccaggaggtggaggttgcagtgagctgagatggcaccactgcactccagcctgggcgacagagtgagattccatctcaaaaaaaaaaaagaaagaaagaaaaaaagacatcagctgtgtcttcaacaaccttacagtccttccaagaagacatttttgaatagaaaataattagggaagacttcagtacccaactattt

SEQ ID NO: 335492 - DNA, 201 bp, Homo sapiens
ccacatcctgtcatgtcctgggttggccccaccaggaggtgacaaaaatggtgctgtgaaccccatcacctttcagcagtttcttggctgctagataacasgtgagggctgagctttctggtcaaatgacaaatgtgctttaaatacctgccatgttctcagcacagtgctgggcgtttgggagaggatgaagaagggtcc

SEQ ID NO: 335493 - DNA, 201 bp, Homo sapiens
aacccaggaggtggaggttgcagtgagctgagatggcaccactgcactccagcctgggcgacagagtgagattccatctcaaaaaaaaaaaagaaagaaagaaaaaaagacatcagctgtgtcttcaacaaccttacagtccttccaagaagacatttttgaatagaaaataattagggaagacttcagtacccaactatt

SEQ ID NO: 335494 - DNA, 201 bp, Homo sapiens
aattgcttgaacccaggaggtggaggttgcagtgagctgagatggcaccactgcactccagcctgggcgacagagtgagattccatctcaaaaaaaaaaaagaaagaaagaaaaaaagacatcagctgtgtcttcaacaaccttacagtccttccaagaagacatttttgaatagaaaataattagggaagacttcagtac

SEQ ID NO: 335495 - DNA, 201 bp, Homo sapiens
gaattgcttgaacccaggaggtggaggttgcagtgagctgagatggcaccactgcactccagcctgggcgacagagtgagattccatctcaaaaaaaaaaaagaaagaaagaaaaaaagacatcagctgtgtcttcaacaaccttacagtccttccaagaagacatttttgaatagaaaataattagggaagacttcagta

SEQ ID NO: 335496 - DNA, 201 bp, Homo sapiens
acgagtctcctttcaactctcaaaccactaactgtgtagtttttaccaagggaaattttcatataagatacactctcttatctttaaataatcaccccttrttctattgtggtataaaaaaatgtttttgctgtatattcgcaaagaaagcactgtgctaagcatttagaggacaaaaagaggcaataacataaatgcagg

SEQ ID NO: 335497 - DNA, 201 bp, Homo sapiens
cacctgtcatctcagcattttcggaggccaaggtaggaggattatttgaggccaggagttcaagaccagcccaggcaacatagtgacacccccgtctcccmaaaaaaaaaaaaaaaaaaaatcagctgggtgtggtggcactcgcttttattgccagctacttagaaagctgaagcaagaggatcacttaagcccaggggt

SEQ ID NO: 335498 - DNA, 201 bp, Homo sapiens
aaatgagctaggtgtggtagcacacacctgtaatcccagctactggggaggctgagacaggagaatcccaggagaacctgggaggcagaggttgcagtgakccgagatcacaccactgcactccagcctgggtgacacagcaagactctgtctcaaataaataaataaatagagaaaattcagagaaatgttaaaaataag

SEQ ID NO: 335499 - DNA, 201 bp, Homo sapiens
atcattcttactttatacaaggcaccaggttaaaatgagacatattttatttcatcattacaacaacctgaggagttaagtattattattattattattawtattattattattattatatgcattttatggagaattgaagctcagaatagttatctatttgtctaaaattacacatggcacatcatcaaggatcctata

SEQ ID NO: 335500 - DNA, 201 bp, Homo sapiens
gggaggcggaggttgcagtgaaccttgtgccactgtactccagcctgggcaacagagcaagactctgtctcaaaaacgaaaacaaaaaagggctgggcacrgtggctcaagtctgtaatcccagcatttcgggaggccgaggtgggcagatcacctgaggtcaggagtttgagaccagcctggccaacatggtaaaacccc

SEQ ID NO: 335501 - DNA, 201 bp, Homo sapiens
aaaggaaaaataggttacaaaactcgaacaaactcagtcatttttaagggaaggccatgaaatctaggaggcaatgctagcatggattttaaataaggcayatcaagcatcttaatggccattgtcttcacccacaaggcattgtttctcagggttctctgggctgtcagaatcagaaccatctggggtgcttgttcaaaa

SEQ ID NO: 335502 - DNA, 201 bp, Homo sapiens
ctcccccgtagctgggacgacaggcatgggccactatgcctgggtaattttttgtatttttttgcagagatagggttttgccatgttgccctgactggtcytgaatttctgggcccaagtgatctgtccatcgacgcctcccaaaattctgggattacaggcgtgagccaccgtgcctagtgatgttaatttttatacata

SEQ ID NO: 335503 - DNA, 201 bp, Homo sapiens
aatatatttattaatatttactattgagcatagaaatatgaagatacgcccctagaagactcccctaagcttcagacatagtcctccctgtcctcactgtycctttgattatcaggatgaatcacaacagccagaaaagtaatccccttctttgcccactgatttagtggcatgaagagccccagctggccagggagctgt

SEQ ID NO: 335504 - DNA, 201 bp, Homo sapiens
gcaggcatccccactacccgccttttccctgtaggtgttgctgccatcgcaggagccttcacggagcagattctgagggacatggcctccttccacgagckccctatcatctttgccctgagcaaccccaccagcaaggccgagtgcacggctgagaagtgctaccgggtcaccgaggtcagcggggagtccttccttccc

SEQ ID NO: 335505 - DNA, 201 bp, Homo sapiens
agaggaagcagcacagacatattgtgatcattgcagctgcctaggctctgacaattgggtgtctcaaggcaaggacttaattgggcctcctgggagtcatkgaggtgggggaaagaaaagggggtccttatggcaagacatcagataaatgttcagcagctgtttgccctgtgtctgaacatctaccctatggtaccttcc

SEQ ID NO: 335506 - DNA, 201 bp, Homo sapiens
cccctcctttcagggaggcaaaaggctgtcctgaaacagactccgatgagcagaaaactcccgctagccaatggcaggaaactagtacctcacctagagasgccatctagttcagtgcatctcaaactggaatggcatacaaatcatctggagatctttttaaatacaaattctgactccgtagaactgaaatgaaagaga

SEQ ID NO: 335507 - DNA, 201 bp, Homo sapiens
gccaatggcaggaaactagtacctcacctagagaggccatctagttcagtgcatctcaaactggaatggcatacaaatcatctggagatctttttaaatayaaattctgactccgtagaactgaaatgaaagagagttttatgggcggagagtaagaagtatggagttacttggagggaggcagagaaaatagggagtgcc

SEQ ID NO: 335508 - DNA, 201 bp, Homo sapiens
gatgagtgttcagattgcagtaactcactgcaggatgtttagtgccttgggatccccgggcagcctataatttgctcaaaagctggaaatgtttctgcacstctgcagagcctggcctgcggcttcctgtgttttcccaccttcctgcctcccattgtgcctcagagcaggataataccactttaaacatgtcacattagc

SEQ ID NO: 335509 - DNA, 201 bp, Homo sapiens
cggagcagccgcagccgcagtcgtggcggggcagcggcggcagggcaccaaactctaggaggaccagcggagcgcctccactgaggcaatacgcacacgcscaggtgtcgttgcgtcccaagtcgtctctttcctagactgcgcgcgacgcaggaaccccttcaccaatcgtggttgggcggaccaatgaggacgtcatca

SEQ ID NO: 335510 - DNA, 201 bp, Homo sapiens
ggagtcatcgccggcgggatccggcacatcccagatgagatcttcctcctgacagcagaggtatcactgtccttgctccctcaaatgcttgcagtagggtstgtgggttgacactgggtcctataccagatctctcttatctcttctgcccatctgccccaacattgccagtggattcccaaagtgcttaaacctcaagca

SEQ ID NO: 335511 - DNA, 201 bp, Homo sapiens
agtagctgacatgttatatggaaaataagccaaaggcacaaaagactaacaaggtggaacttgtccagagataaataaagtacacgaaaagaactgagggkgttcttctagaggcaatgacgatttttagcctgaggagattcagggatgacttcctgggggaagtgacagtggagctgggccttgaatttaggggtaggc

SEQ ID NO: 335512 - DNA, 201 bp, Homo sapiens
catgagtcatgggtcttggtggggtcagctggttgccagaatgcaaaaatctgaaaaacatctcaaaagaccaatcttaggtcctacaatagtgatgttawctacaggagcaactagggaagtcaaaaatcttgtgacctcgagccacatggctgttgagcagtaagggattatagaaactatgcctacatttcagcagag

SEQ ID NO: 335513 - DNA, 201 bp, Homo sapiens
ctaccaggaaatggaaggatgggcaaggttctgactggcacctgcaatacatttgcttatcatcataatccctagccccgcacattttacttcctcaatawacttcaaagaaaactattagggaccccaatgtgcatttctgtttggtacaattcccacctctaggtgtctgtcaagaactagatccttgagaaaaccaat

SEQ ID NO: 335514 - DNA, 201 bp, Homo sapiens
atttctcaggtgatcagaatctcatgtgtatcagtccattctcatgctgctataaagaaataacagagactgggtaatttataaagaaaagagatttaatwgacttgcagttccacatggctggggaggcctcaggaaacttatgattatggtggaaggcaaaggggaagcaggcaccttcttcacaaggttgcaggagag

SEQ ID NO: 335515 - DNA, 201 bp, Homo sapiens
aggttgcagtgagcagagatcatgccactgtactccagcctgggtgacagagtgagactccatctctcaaaacatatatatatatatacacacacacacamagagagagagagagagagattttatttactcacaacttttcaggaataaactgtattttatgtaaagcaagacatctatttgtttaaaccctggattcca

SEQ ID NO: 335516 - DNA, 201 bp, Homo sapiens
tctgggaggcagaggttgcagtgagcagagatcatgccactgtactccagcctgggtgacagagtgagactccatctctcaaaacatatatatatatatacacacacacacaaagagagagagagagagagattttatttactcacaacttttcaggaataaactgtattttatgtaaagcaagacatctatttgtttaaa

SEQ ID NO: 335517 - DNA, 201 bp, Homo sapiens
atctgggaggcagaggttgcagtgagcagagatcatgccactgtactccagcctgggtgacagagtgagactccatctctcaaaacatatatatatatatacacacacacacaaagagagagagagagagagattttatttactcacaacttttcaggaataaactgtattttatgtaaagcaagacatctatttgtttaa

SEQ ID NO: 335518 - DNA, 201 bp, Homo sapiens
aatctgggaggcagaggttgcagtgagcagagatcatgccactgtactccagcctgggtgacagagtgagactccatctctcaaaacatatatatatatatacacacacacacaaagagagagagagagagagattttatttactcacaacttttcaggaataaactgtattttatgtaaagcaagacatctatttgttta

SEQ ID NO: 335519 - DNA, 201 bp, Homo sapiens
tttaatgctcacaccagcttagtgagatagatttaatgattacagctccatttttttattattattattattattatttttgttttgttttgttttgttttgtttgtttgtttttgagatggagtctcgctctgtcgcccaggctggagtgcagtggcgcagtctcggctcactgcaagctccgcctcctgggttcacgcc

SEQ ID NO: 335520 - DNA, 201 bp, Homo sapiens
atttaatgctcacaccagcttagtgagatagatttaatgattacagctccatttttttattattattattattattatttttgttttgttttgttttgttttgtttgtttgtttttgagatggagtctcgctctgtcgcccaggctggagtgcagtggcgcagtctcggctcactgcaagctccgcctcctgggttcacgc

SEQ ID NO: 335521 - DNA, 201 bp, Homo sapiens
ccatcgcaggagccttcacggagcagattctgagggacatggcctccttccacgagcgccctatcatctttgccctgagcaaccccaccagcaaggccgartgcacggctgagaagtgctaccgggtcaccgaggtcagcggggagtccttccttcccccggctgagaggacatagtaacaattacaatgagtaacctcat

SEQ ID NO: 335522 - DNA, 201 bp, Homo sapiens
taccatatgatccagcagttgcactccaacatattatccaactgattaaaaaacttatgttctcacaaaaacctgcacaggaatatttacagcaactttayttataatcatcaaaagctggaagcaaccaagctttcttcaataagtggagaaacaaactatggtataaatgtacagtggaatgttattcaatgataaata

SEQ ID NO: 335523 - DNA, 201 bp, Homo sapiens
gagacatgaatgaagctggaagccatcatcctcagcaaactaacacaggaacagcaagccaaacgccgcatgttctcactcataagtgggagttgaacaayggacacatggacacaaggaggggaacaacatacatcggggcctgttgggcagtggaaagcaaagggagggagagcattaggagaaatacctaatgcatcc

SEQ ID NO: 335524 - DNA, 201 bp, Homo sapiens
tgggaagggaaactgcattccaactagtggaatctggaagggcctctgggaagtggtagaagctgagtcagcataagaagcactgataagatttcagcagwcagcaatggggttcagggagaacatttcactgagagggacgaactggagcaaagaggtagagacaggcctgttaaggaagtagtacgtggcttgggttcc

SEQ ID NO: 335525 - DNA, 201 bp, Homo sapiens
tgacatgtcctgggggaaatgggaagggaaactgcattccaactagtggaatctggaagggcctctgggaagtggtagaagctgagtcagcataagaagcwctgataagatttcagcagacagcaatggggttcagggagaacatttcactgagagggacgaactggagcaaagaggtagagacaggcctgttaaggaagt

SEQ ID NO: 335526 - DNA, 201 bp, Homo sapiens
tttatttaatgctcacaccagcttagtgagatagatttaatgattacagctccatttttttattattattattattattatttttgttttgttttgttttkttttgtttgtttgtttttgagatggagtctcgctctgtcgcccaggctggagtgcagtggcgcagtctcggctcactgcaagctccgcctcctgggttca

SEQ ID NO: 335527 - DNA, 201 bp, Homo sapiens
attattttatttaatgctcacaccagcttagtgagatagatttaatgattacagctccatttttttattattattattattattatttttgttttgttttgttttgttttgtttgtttgtttttgagatggagtctcgctctgtcgcccaggctggagtgcagtggcgcagtctcggctcactgcaagctccgcctcctgg

SEQ ID NO: 335528 - DNA, 201 bp, Homo sapiens
catgtattattttatttaatgctcacaccagcttagtgagatagatttaatgattacagctccatttttttattattattattattattatttttgttttgttttgttttgttttgtttgtttgtttttgagatggagtctcgctctgtcgcccaggctggagtgcagtggcgcagtctcggctcactgcaagctccgcct

SEQ ID NO: 335529 - DNA, 201 bp, Homo sapiens
ttgtacatgtattattttatttaatgctcacaccagcttagtgagatagatttaatgattacagctccatttttttattattattattattattatttttgttttgttttgttttgttttgtttgtttgtttttgagatggagtctcgctctgtcgcccaggctggagtgcagtggcgcagtctcggctcactgcaagctc

SEQ ID NO: 335530 - DNA, 201 bp, Homo sapiens
aagagaggctcctttacgactgactttgtacatgtattattttatttaatgctcacaccagcttagtgagatagatttaatgattacagctccatttttttattattattattattattatttttgttttgttttgttttgttttgtttgtttgtttttgagatggagtctcgctctgtcgcccaggctggagtgcagtgg

SEQ ID NO: 335531 - DNA, 201 bp, Homo sapiens
aaagagaggctcctttacgactgactttgtacatgtattattttatttaatgctcacaccagcttagtgagatagatttaatgattacagctccatttttttattattattattattattatttttgttttgttttgttttgttttgtttgtttgtttttgagatggagtctcgctctgtcgcccaggctggagtgcagtg

SEQ ID NO: 335532 - DNA, 201 bp, Homo sapiens
tgagagtgaaaagaaaaataaataattgtgttaataattgtgtcaagacacagggaaactaaagtatgtggttgccctgtccatgaaccatagcatgaaaytctgtgtctcttggagaggcagtgacattcatacctttgacaaacatttcttaaattccacctgaaaatttaaagagaggctcctttacgactgactttg

SEQ ID NO: 335533 - DNA, 201 bp, Homo sapiens
agttgtatatgacattgctaggttaaagaaagattagtttgcagagtaatatataagatctcatagactatttcatttacaaaagtagaaggaaaaatatrtgtgcatattgcttaaaaaggaaaaattgtttaaatttttttataaataattaaggttaatatgtaacctacttttaaattattttttacaaaaaaaatt

SEQ ID NO: 335534 - DNA, 201 bp, Homo sapiens
gctgtgtgctgggagaaccactactatcttcaacgctgtcagacagagacatttaagtctgcagaggtttctgctgccttttgtttggcattgccctgccscgagaggtggagtctacagaggcaggcaggcctccttgggctgcagtgggctccacccagttcgagcttcccggctgctttgtttacctactcaagcctc

SEQ ID NO: 335535 - DNA, 201 bp, Homo sapiens
agttttgtctcacaggggtacccagccatgtgaggtgtcagtctgcccctactggatgttgcctcccagttaggctatttgggggtcagggacccacttgwggaggcagtctggccattctcagatgtaagctgtgtgctgggagaaccactactatcttcaacgctgtcagacagagacatttaagtctgcagaggtttc

SEQ ID NO: 335536 - DNA, 201 bp, Homo sapiens
gtctaatcttttttcaaggtttttaacttctttgccatgggttcgaacttcctcctttagctcagagtagtttgatcatctgaagccttcttctctcaacytgtcaaagtcattctctgtccagctttgttccattgctggtgaggagctgcgttcctttggaggaggagaggcactctgatttttagagttgccagtttt

SEQ ID NO: 335537 - DNA, 201 bp, Homo sapiens
tcaactctctgtattgtctttgctttatttcgttttcctgtctgttatccatttgtttcaggagactccgggaatattcctcttgcttaagagcattaagygcaggactgagtggccgtttgtcaaataggaaggatttctagaatgaaagagaagcaattcatttatgctagagtactgaaaaacaaggttaataattca

SEQ ID NO: 335538 - DNA, 201 bp, Homo sapiens
gtcagtctgcccctacttgggggtgcctcccagttaggctactcaggggtcagggacccacttgaggaggcagtctgtccattctcagatctcaagctgcrtgctgggagaaccactactgtcttcgaagctgtcagacagggacatttaagtctgcagaggtttctgctgccttttgtttggctatgccctgcccctaga

SEQ ID NO: 335539 - DNA, 201 bp, Homo sapiens
tgtcagtctgcccctacttgggggtgcctcccagttaggctactcaggggtcagggacccacttgaggaggcagtctgtccattctcagatctcaagctgyatgctgggagaaccactactgtcttcgaagctgtcagacagggacatttaagtctgcagaggtttctgctgccttttgtttggctatgccctgcccctag

SEQ ID NO: 335540 - DNA, 201 bp, Homo sapiens
ttgagatatgtcccatcaatacctaattcattgagagttttcagcatgaagggttgttgaattttgtcaaaggccttttctgcatctattgagataatcaygtggtttttgtcactggttctgtttatatgctggattacgtttattgatttgcatatgttgaaccaggcttgcatcccaggggtgaagcccacttgatca

SEQ ID NO: 335541 - DNA, 201 bp, Homo sapiens
gggaaggcagagactcagcttattcctctcggttctctccttctccccagcaaattgcccaggaagtctctgagcagcatctgtcccaggggagactctayccaccactcagcaccatccgagacgtgtctttgagaattgccatcaaagtaaggggcatcctacccctgtaatatgggtagtgaggctcaaccactttct

SEQ ID NO: 335542 - DNA, 201 bp, Homo sapiens
tttgtttgagttctttgtagattccggatattagccctttgtcagatgagtaggttgcgaaaattttctcccattttgtaggttgcctgttcactctgatsgtagtttcttttgctgtgcagaagctctttagtttaattagattccatttgtcaattttggcttttgttgccactgcttttggtgttttagacatgaagt

SEQ ID NO: 335543 - DNA, 201 bp, Homo sapiens
agctagtttggctggatatgaaattctggcttgaaaattcttttctttaagaatgttgaatattggcccccactctcttctggcttgtagagtttctgccragagatcagctgttagtctgatgggcttccctttgtgggtaacccaacctttctctctggctgccctcaacattttttccttcatttcaactttggtgaa

SEQ ID NO: 335544 - DNA, 201 bp, Homo sapiens
ccatgtttagtgcttccttcaggagctcttgtagggcaggcctggtggtgacaaaatctctcagcatttgcttgtctatgaagtattttatttctccttcmcttatgaagctagtttggctggatatgaaattctggcttgaaaattcttttctttaagaatgttgaatattggcccccactctcttctggcttgtagagt

SEQ ID NO: 335545 - DNA, 201 bp, Homo sapiens
ctgcctttttttgttttccatttgcttggtagatcttcctccatccctttattttaagcctatatgtgtctatgcacgtgagatgggtttcctgaatacarcacactgatgggtcttgactctttatccaatttgccaatctgtgtcttttaattggagcatttagtccatttacatttaaggttgatattgttatgtgtg

SEQ ID NO: 335546 - DNA, 201 bp, Homo sapiens
tcaatagtcattttctgagttcctgtttagttttaggcagtggagacaccgtggtcaatacaatacaatacaatacaatacaatacaatacaatacaatactctgccttgaaggagcttatagcgtaagaggggtgcaagtgaggaccagttagtaaggggcaattctaattcagtggttagatgtaacgagaggtgcatt

SEQ ID NO: 335547 - DNA, 201 bp, Homo sapiens
tgttttatcagagattaggattgcaacccctgcctttttttgttttccatttgcttggtagatcttcctccatccctttattttaagcctatatgtgtctmtgcacgtgagatgggtttcctgaatacagcacactgatgggtcttgactctttatccaatttgccaatctgtgtcttttaattggagcatttagtccatt

SEQ ID NO: 335548 - DNA, 201 bp, Homo sapiens
caggaagtgctgtccctgattgatggtgccctgctgtttttcaggccgtggtggtgactgatggggagcgcatcctgggcctgggagacctgggctgctayggcatgggcatccctgtgggcaagctggccctgtacacggcatgcggaggggtgaacccgcagcagtgcctccctgtgctgctggacgtcggcaccaaca

SEQ ID NO: 335549 - DNA, 201 bp, Homo sapiens
ttcaatagtcattttctgagttcctgtttagttttaggcagtggagacaccgtggtcaatacaatacaatacaatacaatacaatacaatacaatacaatactctgccttgaaggagcttatagcgtaagaggggtgcaagtgaggaccagttagtaaggggcaattctaattcagtggttagatgtaacgagaggtgcat

SEQ ID NO: 335550 - DNA, 201 bp, Homo sapiens
tgtggtctgagagacagtttgttataatttctgttcttttacatttgctgaggagtgctttacttccaactatgtggtcaattttggagtaggtgtggcayggtgctgaaaagaatgtatattctgttgatttggggtggagagttctgtagatgtctattaggtccacttggtgcagagctgagttcaattcctgggtat

SEQ ID NO: 335551 - DNA, 201 bp, Homo sapiens
attcaatagtcattttctgagttcctgtttagttttaggcagtggagacaccgtggtcaatacaatacaatacaatacaatacaatacaatacaatacaatactctgccttgaaggagcttatagcgtaagaggggtgcaagtgaggaccagttagtaaggggcaattctaattcagtggttagatgtaacgagaggtgca

SEQ ID NO: 335552 - DNA, 201 bp, Homo sapiens
agcctaagctaagtgttatttaaaaagagtcaaagagaaaaaaattaacttaaaagtgtataaagtagaaaagtcacagtaagctaaggttaatttattaytaaagaaattttttttgaaaaaaatttagtgtagcctaagtatacagtgttataaagtctacattagtatacagtaatgtcctgggtcatcacattcact

SEQ ID NO: 335553 - DNA, 201 bp, Homo sapiens
tattcaatagtcattttctgagttcctgtttagttttaggcagtggagacaccgtggtcaatacaatacaatacaatacaatacaatacaatacaatacaatactctgccttgaaggagcttatagcgtaagaggggtgcaagtgaggaccagttagtaaggggcaattctaattcagtggttagatgtaacgagaggtgc

SEQ ID NO: 335554 - DNA, 201 bp, Homo sapiens
gttcctatttctccacatcctctccagcacctgttgtttcctgactttttaatgatggccattctaactggtgtgagatggtatctcattgtggttttgayttgcatttctctgatggccagtgatgatgagcattttttcatgtgttttttggctgcataaatgtcttcttttgagaagtgtctgttcatgtccttcgcc

SEQ ID NO: 335555 - DNA, 201 bp, Homo sapiens
ttattcaatagtcattttctgagttcctgtttagttttaggcagtggagacaccgtggtcaatacaatacaatacaatacaatacaatacaatacaatacaatactctgccttgaaggagcttatagcgtaagaggggtgcaagtgaggaccagttagtaaggggcaattctaattcagtggttagatgtaacgagaggtg

SEQ ID NO: 335556 - DNA, 201 bp, Homo sapiens
taagttttagggtacatgtgcacattgtgcaggttagttacatatgtatacatgtgacatgctggtgtgctgcacccactaactcgtcatctagcattagktgtatctcccaatgctatccctcccccatccccccaccccacaacagtccccagagtgtgatattccccttcctgtgtccatgtgatctcattgttcaat

SEQ ID NO: 335557 - DNA, 201 bp, Homo sapiens
catataccatatttcttggaggcttccttcattccttttcattattttttctctaatcttgtcttcacgctttatttcattaagttgatcttccatctttratacccttctaccgcttaatcaattctgctgttgatacttgtgtattgttcatgaagttctcatgctgtgtgtttcaggtccatcaggtcatttatgttc

SEQ ID NO: 335558 - DNA, 201 bp, Homo sapiens
gctttccatttgcttggtaaatcttcctccatccctttattttgagcctatgtgtgtctttgcatgtgagatggatctcctgaatacagcacaccaatggktcttgactctttatccaatttgccagtctttgtcttttaattggggcatttagcccatttacattgaagattaatatggttatgtgtgaatctgatccta

SEQ ID NO: 335559 - DNA, 201 bp, Homo sapiens
acgaaaaaaattaaaaatttttgaatacagaaatgatgtcaagaaactgaagtctacgccaatatactccacttgaaattcacagagctttgaatatgaasttggtagtgacaggaaatgaaatgaacctaccaacaagaagctgcggttcttcaattcagtaattctgggccaatggaaaggaagtgcaccaagggttac

SEQ ID NO: 335560 - DNA, 201 bp, Homo sapiens
actctctgtattgtctttgctttatttcgttttcctgtctgttatccatttgtttcaggagactccgggaatattcctcttgcttaagagcattaagcgcrggactgagtggccgtttgtcaaataggaaggatttctagaatgaaagagaagcaattcatttatgctagagtactgaaaaacaaggttaataattcagaa

SEQ ID NO: 335561 - DNA, 201 bp, Homo sapiens
ctgaaggcacgcccttccccgaatgttgggagagtgcgaggatatgctgacccctaaacgcaaatccccctctgtgcatttagtcttgccaagatggagagtctcaggcgggcattctgagctgcttcttgtcactggggaaaaccacgtgcacgcagtgctgaggcgccccacgcgcgtcctcaggggaagccaggcact

SEQ ID NO: 335562 - DNA, 201 bp, Homo sapiens
cctgaaggcacgcccttccccgaatgttgggagagtgcgaggatatgctgacccctaaacgcaaatccccctctgtgcatttagtcttgccaagatggagagtctcaggcgggcattctgagctgcttcttgtcactggggaaaaccacgtgcacgcagtgctgaggcgccccacgcgcgtcctcaggggaagccaggcac

SEQ ID NO: 335563 - DNA, 201 bp, Homo sapiens
cctttttggtcttttttgatctttctaggtttaaagtctgttttatcagagactaggattgcaacccctgctttttttgctttccatttgcttggtaaatmttcctccatccctttattttgagcctatgtgtgtctttgcatgtgagatggatctcctgaatacagcacaccaatggttcttgactctttatccaatttg

SEQ ID NO: 335564 - DNA, 201 bp, Homo sapiens
gttttatgaatctgggtgctcctgtattgggtgcatatatatttaggatagttagctcttcttgttgcctcaattccctttaccattatgtaatgcccttyttggtcttttttgatctttctaggtttaaagtctgttttatcagagactaggattgcaacccctgctttttttgctttccatttgcttggtaaatcttcc

SEQ ID NO: 335565 - DNA, 201 bp, Homo sapiens
ttgcccattcagtatgatactggctgtgggtttgtcataaatagctcttattattttgagatactttccattgatagtttcttgagagtttttagcatgargggtgttgaattttatcgaaggccttttctgcatctattgagataatcatgtggtttttgtcattggttctgtttacgtgatggattacgtttattgatt

SEQ ID NO: 335566 - DNA, 201 bp, Homo sapiens
gcatccttgtcttgtgccagttttcaaagggaatgcttccagcttttgcccattcagtatgatactggctgtgggtttgtcataaatagctcttattattytgagatactttccattgatagtttcttgagagtttttagcatgaagggtgttgaattttatcgaaggccttttctgcatctattgagataatcatgtggt

SEQ ID NO: 335567 - DNA, 201 bp, Homo sapiens
tcaagatggttgtagatgtgtggcattatttctgaggcctctgttctgttccattggtctatatgtctgttttagtaccagtaccatgctattttggttaytgaagccttgtagtataatttgaagtcaggtagcatgatgcctccagctttgttctttttgcttaggattgtcttggctatatgggctcttttttgtttc

SEQ ID NO: 335568 - DNA, 201 bp, Homo sapiens
tgtttatttcttgtaaatttgtttaagttctttatagatttttggatattagccctttgtcagatggatagattgcaaaatttttctcccattctgtaggytgcctgttcactctgatgacagtttcttttgctgtgcagaagctttttagtttaattagatcacagttatcaattttggctttgttgccactgcttttgg

SEQ ID NO: 335569 - DNA, 201 bp, Homo sapiens
gtgtctttatagtggaatgatttataatcctttgggtatatacccagtaatgggattgctgggtcaaattgtatttctggttctacatcttcgaggaatcrccacactgtcttccacaatggttgaacaaatttacactctcaccaacagtgtaaaaacgttcctatttctccatatcctctccagcatctgttgtttgct

SEQ ID NO: 335570 - DNA, 201 bp, Homo sapiens
atggctgcatagtattccatggtgcatatgtgccacattttctttttttttttttttttttttgagatggagtcttgctctgtcgcccaggctggagtgtgcagtggcatgatctgggttcactgcaagctctgcctcccggcttcacaccattctcctgcctcagcctcctgagtagctgggactacaggcacccaccac

SEQ ID NO: 335571 - DNA, 201 bp, Homo sapiens
tatggctgcatagtattccatggtgcatatgtgccacattttctttttttttttttttttttttgagatggagtcttgctctgtcgcccaggctggagtgtgcagtggcatgatctgggttcactgcaagctctgcctcccggcttcacaccattctcctgcctcagcctcctgagtagctgggactacaggcacccacca

SEQ ID NO: 335572 - DNA, 201 bp, Homo sapiens
ggacgaactggagcaaagaggtagagacaggcctgttaaggaagtagtacgtggcttgggttcctggaattagggggacgtggtgggggagagggaaatggacaggggacaccttaggatggacctagatgtcatttgttggaggctatgggcaacagttaataaccctgcctcctctgtgagttctcctccaatggggat

SEQ ID NO: 335573 - DNA, 201 bp, Homo sapiens
gtttaatgattcccttgcatgtttttacacttctactacacatggaggcattcttaaagtatagccttttggcatatgtttaaacatgttagacattataygaaatgtatgtagccttcctcaacttcctgacttctaggatgggtctgatgatagtttatacccttgaagggttgtgaggactaaatgggttaacaaatg

SEQ ID NO: 335574 - DNA, 201 bp, Homo sapiens
tggacacataaagtcaccagaaaaatagtttaagaccacattcagttatttgttttcctatttattcatgtattcatccatccatttattaattcctttaytgaatatggcaagaagtcagaagtagactttgctgtcaaggaatttataaactacaagggaaattcccaaataattactgctgggtttgcatagatttaa

SEQ ID NO: 335575 - DNA, 201 bp, Homo sapiens
tagattatggcagaagagatgaaggaatataagggtcttatgggtggcggggagcagggatctgatccctttcaatgaataagtaccaataataacaatawctcttaattatttaattgcttaccataagcagacactgatacaagcacttcacacaatattaacttgtctaattctcacaacaactgtatgagttaggta

SEQ ID NO: 335576 - DNA, 201 bp, Homo sapiens
tgactcatagttccacatgtctggggaggcctcaggaaacttacaatcatagtagaaggtgaaggggaagcaggcacatcttacatggcagcaggacagasagaaaaggaggaagcaccagacacttatcaaacaaccagatctcatgagaactcactcactatcacaagaatagcatggggaaaactgcccctgtgatcc

SEQ ID NO: 335577 - DNA, 201 bp, Homo sapiens
agcctaaggagacatgatgactaaacttaatacaagatcctggatgggtcctggaaatatatatatatatatatatatacacacacacacacacacacacatacacacacacacacacacacatatcattatatacatatatttatctatctatatacagttagataaaaactttaaaaaatctgaataaactaaaggctt

SEQ ID NO: 335578 - DNA, 201 bp, Homo sapiens
gagcctaaggagacatgatgactaaacttaatacaagatcctggatgggtcctggaaatatatatatatatatatatatacacacacacacacacacacacatacacacacacacacacacacatatcattatatacatatatttatctatctatatacagttagataaaaactttaaaaaatctgaataaactaaaggct

SEQ ID NO: 335579 - DNA, 201 bp, Homo sapiens
ggaaactgtcaaagccaagaggagcctaaggagacatgatgactaaacttaatacaagatcctggatgggtcctggaaatatatatatatatatatatatacacacacacacacacacacacatacacacacacacacacacacatatcattatatacatatatttatctatctatatacagttagataaaaactttaaaa

SEQ ID NO: 335580 - DNA, 201 bp, Homo sapiens
gggaaactgtcaaagccaagaggagcctaaggagacatgatgactaaacttaatacaagatcctggatgggtcctggaaatatatatatatatatatatatacacacacacacacacacacacatacacacacacacacacacacatatcattatatacatatatttatctatctatatacagttagataaaaactttaaa

SEQ ID NO: 335581 - DNA, 201 bp, Homo sapiens
gaatcagccatttttcaaaagccgcctgtcttatattgagagttttgttaaaaccagataatataatctgtaactctatttactagacacacggaaactgtaacttctcaatgtggtaagaatgaataagggccccagcatcaactcctctgacttgtacatgttgtacagtccctactcttaccttcagacccctcatat

SEQ ID NO: 335582 - DNA, 201 bp, Homo sapiens
agaatcagccatttttcaaaagccgcctgtcttatattgagagttttgttaaaaccagataatataatctgtaactctatttactagacacacggaaactgtaacttctcaatgtggtaagaatgaataagggccccagcatcaactcctctgacttgtacatgttgtacagtccctactcttaccttcagacccctcata

SEQ ID NO: 335583 - DNA, 201 bp, Homo sapiens
atccacccaccttggcctcccagagtgctgggactacaggcgtgagccactgcacccggcctctgtgtgttcttaaaggtgaactgaatcttttgtaggcmaaatatagtgggtctttttttttttttttaaaccattcagccacgttagccttttgataggagaattaattcatttacattcaaagtaattattgataag

SEQ ID NO: 335584 - DNA, 201 bp, Homo sapiens
gcaaagtctcaggatacaaaatcaatgtgcaaaaatcacaagcattcatatataccaaaaaaaaaaaaaagactaaaatgtaaaacccaaaactataaaamccctagaagaaaacctaggcaataccattcaggacataggcatgggcaaagactttatgactaaaacactaaaagcaattgcaaccaaagtcaaaattga

SEQ ID NO: 335585 - DNA, 201 bp, Homo sapiens
ctgataagcaacttcagcaaagtctcaggatacaaaatcaatgtgcaaaaatcacaagcattcatatataccaaaaaaaaaaaaaagactaaaatgtaaamcccaaaactataaaaaccctagaagaaaacctaggcaataccattcaggacataggcatgggcaaagactttatgactaaaacactaaaagcaattgcaa

SEQ ID NO: 335586 - DNA, 201 bp, Homo sapiens
agtattggaagttctggccagggcaatcagacaagagaaagaaataaagtgtattcagataggaagagaggaagtcaaattgtctctgtttgcagatgacrtgactctatatttagaaaactcccgtctgtcagaccaacaactccttaagctgataagcaacttcagcaaagtctcaggatacaaaatcaatgtgcaaaa

SEQ ID NO: 335587 - DNA, 201 bp, Homo sapiens
atatgggtagtgaggctcaaccactttctctgtctgtgactttaggagggttaaggggatggaaactgtggagacactggatctccttgagctgcactacmtgtaacccagaggctgggtgacaaactcttgtttgcagcttgagctccaccccaaacacccacccaggccagttctgggaaagctcctggatttccccta

SEQ ID NO: 335588 - DNA, 201 bp, Homo sapiens
cttgggaggattcaatgagattccaaatgtaaagggcctggccctagtaggagctcagcagctgtgatctgtttgacccaggaccccaggagttgtcatcyactcagtcaccccacccaagaatacacactgtaaacctgctgaggccaccccagtcctctgaagtaccgccacactctgttgtttgattcagacctgaaa

SEQ ID NO: 335589 - DNA, 201 bp, Homo sapiens
aaactgcagtagacctgcagaagaggggcctcagtgttagaagaaaaataaacaaacagaaagcaaatacaacaacaacaacaacatcaacaaaaaagacmccccccccccccggcaacaaataccccatccaaaggtcatcagcctcaaagatcaaaggtagataaatccgggaagatgaggaaaaacctgtgcaaaaag

SEQ ID NO: 335590 - DNA, 201 bp, Homo sapiens
ttttgatggtacaactgccaggctgggactcttggtctaccaggaagaagcacatgtgagccctgaatgaagaagcacacagcaagaaatgtagctgagggaggacttcaggctgggcccacattgaggagcacccaatggtggtgcagcaaaccagagaggagagaaggggctcttaccagtatctccaggaagggcaca

SEQ ID NO: 335591 - DNA, 201 bp, Homo sapiens
ctaccattgcctcttaactggaccattgcaggaaacttctaatttatcagcacattcttggacccttccaaaaattctcctcactgcagccaaaatgatcytttctaaagaacacagatttaattatgcctcttctgtttaaaactttcagtagtttctcattgccctgaagctgaaaacctaagtcctcagcaaagtcac

SEQ ID NO: 335592 - DNA, 201 bp, Homo sapiens
ctatgctgttctcatgaaagcaaataagtctcacgagatctgatgattttaaaaaaggggagtttccccacagaaactctgtttgcctgttgccatccacrtaaaatgcgacttgctcctccttgccttttgccttgtgaggcctccccagccatgtggaactgtaagtccattaaacctctttattttgtaaattgccca

SEQ ID NO: 335593 - DNA, 201 bp, Homo sapiens
gtggagaagctggactagctggaacaattagaacaaagaatgtggtcccagttcccaggtggtgacttttttctcttagaccagacaggcttggacttcaygtgagattttcttcataggaagtgtattagtttgctcaggctcccataacaaaacactgcagactaggtggcttaaacaatagaaatttattttctcaca

SEQ ID NO: 335594 - DNA, 201 bp, Homo sapiens
gccatcattgtcacagtgcccatgtctgtaatgactaagtaggttagtggagaagctggactagctggaacaattagaacaaagaatgtggtcccagttcycaggtggtgacttttttctcttagaccagacaggcttggacttcatgtgagattttcttcataggaagtgtattagtttgctcaggctcccataacaaaa

SEQ ID NO: 335595 - DNA, 201 bp, Homo sapiens
tttccactcttgccatccctgctttgggactgggattattttctcactgcaggcaggaaaaatcttttgaaatttcacatttggagagcagactttgtttygtttttttgtttttttgtgtttttttgtattgttttttgagaaagggtcttgctgtgtcagtggtgcaatcacagctcactgcagcgttgacctctcggg

SEQ ID NO: 335596 - DNA, 201 bp, Homo sapiens
gcagcagcctggatgttataacccagggacattcttgttcaagtgattgaattcccaacacacctggccatcattgtcacagtgcccatgtctgtaatgaytaagtaggttagtggagaagctggactagctggaacaattagaacaaagaatgtggtcccagttcccaggtggtgacttttttctcttagaccagacagg

SEQ ID NO: 335597 - DNA, 201 bp, Homo sapiens
tgcttccttgaagatggattccatttacattattcttccaagtggtattttgtcaacaaagctcaatagtcatttgagtttaaatagcctatttccccccstcaaggcctaagaaactggctttgagcaagtggtgagagctgagttattgggaactttgtgaagcaactgtctggtgctttagaaaaaaaagcagcagcc

SEQ ID NO: 335598 - DNA, 201 bp, Homo sapiens
taatgctagtatttaccttataagtcaattatggttacatgagtcaaagtgcctggaccagtgactgatacataataagctctctctctctctctctctcmatatatatatatgtatatgtatatatatgtaaaatagagtattctgaaaatttctaacatgtgataaacaatccaaaaatattaaacacatatttttacc

SEQ ID NO: 335599 - DNA, 201 bp, Homo sapiens
gccaggtgcgggatataatctcctggtgtgccatttcctaagcccgtcggaaaagcgcagtattcgggtgcgaatggcccgattttccagatgccattctstcacccctttccttgaccaggaaagggaactccctgaccccttgcacttcccgagtgaggcactgccttgccctgcttcggctggcacatggtgcactgc

SEQ ID NO: 335600 - DNA, 201 bp, Homo sapiens
tttaatgaatatgtaaggcaattgataattaacatttaaattagtgttatggtgaaagctcattacctgtatttggatgtacagggatgaattgagaaacrtttttttatccactaagccatttaaatttccactttgaaattttctcttcttaattggtttttaattagtttaaagagttggcagacaaactccaaacat

SEQ ID NO: 335601 - DNA, 201 bp, Homo sapiens
tttgttagttttccttctaacagtcaggcccctctgctgcaggtctgctagagtttgctggaggtccactccagaccctgtttgcctgggtatcaccagcrgaggctgcagaccagcaaaaattgctgcctgctcctttctctggaagcttcatcccagaggggcaaccaccagatgccagccagagctctcctgtatgag

SEQ ID NO: 335602 - DNA, 201 bp, Homo sapiens
gctgcagaccagcaaaaattgctgcctgctcctttctctggaagcttcatcccagaggggcaaccaccagatgccagccagagctctcctgtatgaggtayctgttgacccctgctgggaggtgtcccccaccctagtcaggaggcatgggggtcagggaaccacttgaggaggcagtcttttccttagcagagctcaagc

SEQ ID NO: 335603 - DNA, 201 bp, Homo sapiens
ggggtcagggaaccacttgaggaggcagtcttttccttagcagagctcaagcactgtgctgggagatccactgctctcttcagacccggcaggcaggaacrtttaagtctgctgaagctatgcccaaagctgccccttccctgaggtgctctgtcccagggagatgggagttttatctgtaagcccctgactggggctgct

SEQ ID NO: 335604 - DNA, 201 bp, Homo sapiens
atttaggaatgactggttttgtttcatagagggatgtgaaggaatagatcaagaaggtcctatctggggtgtgtcataccaaacccctatccactccactrggggtggcaccaggttcaagaggccaaagaagagacccagagccttgggtcaagacatggggcttacatacagggctaacatgtaagagagaatgtccag

SEQ ID NO: 335605 - DNA, 201 bp, Homo sapiens
aatcaggtgtcagcaggtcgtgctccctctgacacctgtgggggacactccttgccgccccttctagcttctgttatttgctggcaatccttggcattccytgcctctggatgcatcagtccaatctctgtttctatcatcccttggctatttcttcctgcatgtccctgtcttctcctcttcttataaggataccagtgc

SEQ ID NO: 335606 - DNA, 201 bp, Homo sapiens
agccaatgtgtgaagtgtggcatgggttgtctagtttactttgcaagtaatgaggtaattcattataggaggaaatccctccattgaattgttggttcttratctaaaccttgagagaaggattttgattcacattgggaagatggcccatcagaatctctggcatacaaagatttactggatgagttccaagcaggagaa

SEQ ID NO: 335607 - DNA, 201 bp, Homo sapiens
atcatagactctcaggattgggagtgtaagggacactgctggttgccccttcctccttattaacaaccccaattttttcagttatccatcttcctccaaakggtcacgcactttgagggagtcttggcccttcccagaatcaaccagtaggtctcaaatccaagccatcatagtgttgtggttccttgtcagtgattactt

SEQ ID NO: 335608 - DNA, 201 bp, Homo sapiens
caaagtgaggagtttggattgggtcagggatcatgatgcactttccagtggggtagactctaatttcaaagcaagttttgaggatgttaattctcaagagsactaaagaggagagcccacagggaactacagtactaaccgaagcatgaggagggaagagcctgatgagttcctagatgtggaaatgagagatggaaatcc

SEQ ID NO: 335609 - DNA, 201 bp, Homo sapiens
gggtgcccctcccccagccttgctgctgccttgcagtttgatcttagactgctgtgctagcaatgagcgagactccgtgggcgtaggaccctccaagccakgtgcgggatataatctcctggtgtgccatttcctaagcccgtcggaaaagcgcagtattcgggtgcgaatggcccgattttccagatgccattctctcac

SEQ ID NO: 335610 - DNA, 201 bp, Homo sapiens
atggcgggtgcccctcccccagccttgctgctgccttgcagtttgatcttagactgctgtgctagcaatgagcgagactccgtgggcgtaggaccctccawgccaggtgcgggatataatctcctggtgtgccatttcctaagcccgtcggaaaagcgcagtattcgggtgcgaatggcccgattttccagatgccattct

SEQ ID NO: 335611 - DNA, 201 bp, Homo sapiens
acctaagcgagtctgggcaatggcgggtgcccctcccccagccttgctgctgccttgcagtttgatcttagactgctgtgctagcaatgagcgagactccrtgggcgtaggaccctccaagccaggtgcgggatataatctcctggtgtgccatttcctaagcccgtcggaaaagcgcagtattcgggtgcgaatggcccg

SEQ ID NO: 335612 - DNA, 201 bp, Homo sapiens
ctgcagtaagactgtttggggcagagggaacagcttatatcacgtagagtctggagaccacaaatagcttggcatggaaggctctgggagctgacaatagrcagtctaataggagtgtgatgagtaaaaggaaattgcataaaatcagggtggaaagagctcaggggtcagattgtcccaggcctgggagtctgtgtatgt

SEQ ID NO: 335613 - DNA, 201 bp, Homo sapiens
tatcagagactaggattgcaacccctgccttttttgttttccatttgcttgatagatcttcctccatccttttattttgagcctatgtgtgtctctgcacktgagatgggtttcctgaatacagcacactgatgggtcttgactctttatccaatttgccagtctgtgtcttttaattggagcatttagtccatttacatt

SEQ ID NO: 335614 - DNA, 201 bp, Homo sapiens
gcatgcctttgtcagatggaggaaacttcacttacacttgccttgatgaaattccaacagactttgagctttaagaaatgtacagggaaggaattgtgatrtcaccactactcatagctactacacaaaaattggatggttggcatatttgcttcctagggctactgtatgtaacaaaatactacaaattggatggcttaa

SEQ ID NO: 335615 - DNA, 201 bp, Homo sapiens
ggagcaggagaagatgggtgctgggatggaggggtcacggagaggcaggagcggtcagattagaaatagagttagaaggtagagcaaccggggctgccccmctgtgttcttgggattcaccagaacccagtctgtatgttccgctctctgccctccacacccctcacagtgaccaccactgcttattgcaattacttccca

SEQ ID NO: 335616 - DNA, 201 bp, Homo sapiens
ctgttttatcagagactaggattgcaacccctgccttttttgttttccatttgcttgatagatcttcctccatccttttattttgagcctatgtgtgtctstgcacgtgagatgggtttcctgaatacagcacactgatgggtcttgactctttatccaatttgccagtctgtgtcttttaattggagcatttagtccatt

SEQ ID NO: 335617 - DNA, 201 bp, Homo sapiens
tcttcataataaaaggaaatcaaatatttgtgttttaccattataaagtgctcctgattggtcatctcatctgatccccacaaaaagcttgtgaggcaggygttattaccttcgttatacaggggaggatgctggagcccagaggactgagttgcccatggtcttccagatagtaaggggcatcagcaagtctcatttcca

SEQ ID NO: 335618 - DNA, 201 bp, Homo sapiens
acaaaaagcttgtgaggcaggcgttattaccttcgttatacaggggaggatgctggagcccagaggactgagttgcccatggtcttccagatagtaagggrcatcagcaagtctcatttccagattccctgagaccgttcactgacttattcaataaacttattgagaacctactgtgttccaggcactgtgctgggttca

SEQ ID NO: 335619 - DNA, 201 bp, Homo sapiens
ggcaggttctccaacatatggccagagaatcagtgtatgcagtactggaggggcctgaggatgatgtccagggccattcctcattttgcagacatagagaytaatgtctgagggaggcagggtcttcagcaatacagtcaggactagaatcctgaggactaattcccaagtccatgttcttttcaggaaaccctgctaaag

SEQ ID NO: 335620 - DNA, 201 bp, Homo sapiens
ccttcttgtcccttgtaagttggattcataagtattttattctctttgaagcaactgtgaatgggagttgactcacgatttggctctctgtttgtctgttrttggtgtataagaatgcttgtgatttttgtacattgattttgtatcctgagactttgcagaagttgcctatcagcttaaggagattttgggctgagacaa

SEQ ID NO: 335621 - DNA, 201 bp, Homo sapiens
gttgcatcaagtgaaaaggaaggttgctgtaacctctttccaagggtgattactttttcttggtgtgtcaaggctaagacctaaaagatagattgggattycctgggaagagaagatgggggaaagatgttctaagcaaatatagcaatagcaaaactgtatggtttgagaggatttgtgggtggttctgaatggaggaca

SEQ ID NO: 335622 - DNA, 201 bp, Homo sapiens
gtgtctttatagcagcatgatttatagtcctttgggtatatacccagtaatgggatggctgggtcaaatggtatttctagttctagatccctgaggaatcrccacactgtcttccacaggggttgaactagtttacagtcccaccgtgtaaaagtgttcctatttctccacatcctctccagcacttgttgtttcctgact

SEQ ID NO: 335623 - DNA, 201 bp, Homo sapiens
actgaagagtgacactataggatttgaactttagacagatcatctggccccaggtaggagacagaaacagagtctgggagactagtcaagaaggaatttaktccctatgagggaaatgaggaccttgtatgacgaatagtgaagcaaacacagacatgagaggcctaaggaagcaaaagactgggctcttttcagaattcc

SEQ ID NO: 335624 - DNA, 201 bp, Homo sapiens
tccgaccaaggacgtataagagagttcactgcgagatcaacttttgctcaatgtaaaatatgtgtatataatatatatatatatatttcttttaaaaaaaacaccgacttccctatctctagatgtgatctattggaagctgaaaaaaaacaacaaaaaccatctatcaaagagattgcagaagggagtgggaagtacctt

SEQ ID NO: 335625 - DNA, 201 bp, Homo sapiens
cgaatagtgaagcaaacacagacatgagaggcctaaggaagcaaaagactgggctcttttcagaattccttgagctccataacagcagtaataggagtccmagagctattgtcaacatgtcaaaaaaaaataatagaaaccttatatttatccatcataaatttacacagcttaaccaagatatcacattcctctgtcttt

SEQ ID NO: 335626 - DNA, 201 bp, Homo sapiens
tggcacccaggggagacatggcatgatctgtgtcccaacatgccagaaagaatgattccagggccccattctgtttctgaaggtcaaaaggcagataagtrcccccccaatatctgaaggtctatcatgtcgaacggggagtaggcgtattctgcatggctccagagtccgaccaaggacgtataagagagttcactgcga

SEQ ID NO: 335627 - DNA, 201 bp, Homo sapiens
acatgagaggcctaaggaagcaaaagactgggctcttttcagaattccttgagctccataacagcagtaataggagtccaagagctattgtcaacatgtcmaaaaaaaataatagaaaccttatatttatccatcataaatttacacagcttaaccaagatatcacattcctctgtctttgcctagaattaaatggaataa

SEQ ID NO: 335628 - DNA, 201 bp, Homo sapiens
acttctgactagtatactagggtttggttaggggtgtgtgtgtgtgcatgcatacatatatgcacacttatgattcatagcagattgtaagctccttgaakacaggcctaattcaatcattcactgattcatttagcaaatattcatttggcacccagtataggcagtgtacaggtctaggtgacaggatgcaaagattaa

SEQ ID NO: 335629 - DNA, 201 bp, Homo sapiens
ggcctaaggaagcaaaagactgggctcttttcagaattccttgagctccataacagcagtaataggagtccaagagctattgtcaacatgtcaaaaaaaamtaatagaaaccttatatttatccatcataaatttacacagcttaaccaagatatcacattcctctgtctttgcctagaattaaatggaataaaactatta

SEQ ID NO: 335630 - DNA, 201 bp, Homo sapiens
gcctaaggaagcaaaagactgggctcttttcagaattccttgagctccataacagcagtaataggagtccaagagctattgtcaacatgtcaaaaaaaaawaatagaaaccttatatttatccatcataaatttacacagcttaaccaagatatcacattcctctgtctttgcctagaattaaatggaataaaactattaa

SEQ ID NO: 335631 - DNA, 201 bp, Homo sapiens
acactggcaatgggctgagatccttgctcttcctgagtatcagtcctctcttgctaaaaacaccttccagagcacagtttttagttttccaccaaaggacyaattcctttggtacagaggaagaggctgagacccaagaagtcacacaagactttcccaagttcacacagctaataaacagcagagctgggattcaaacat

SEQ ID NO: 335632 - DNA, 201 bp, Homo sapiens
ttaccttttactagacaaagatgcaggaagcttgaattcaagtaatagcaggacaaatacaggtaaaatgctggctaaaataattaagataaataggtaartgattttgattattgaactgagagggcagtgtttgagagtaaacctctacctaggccagtggttttaaaccttcgttaagaattcacttatgaaaaatta

SEQ ID NO: 335633 - DNA, 201 bp, Homo sapiens
cacactggcaatgggctgagatccttgctcttcctgagtatcagtcctctcttgctaaaaacaccttccagagcacagtttttagttttccaccaaaggascaattcctttggtacagaggaagaggctgagacccaagaagtcacacaagactttcccaagttcacacagctaataaacagcagagctgggattcaaaca

SEQ ID NO: 335634 - DNA, 201 bp, Homo sapiens
tccagctaaaaaaggctgagagcccaaagagatcccagactcagccctaccttctaaaggattcatggtctccctgagagacaaggcttgttatgactgaracacagctgacatgtcctgggggaaatgggaagggaaactgcattccaactagtggaatctggaagggcctctgggaagtggtagaagctgagtcagcat

SEQ ID NO: 335635 - DNA, 201 bp, Homo sapiens
tttgcacagttgtgcagcgtgtgttttaagctaagtgttattattattattattattattttgagatatagtcttgctctgttgcccaggctggagtgcartggcatgatctcggctcactgcaacctccacctcataggtttaagcagttctcctgcctcagtctcccgagtagctgggattacaggcatgcgccaccct

SEQ ID NO: 335636 - DNA, 201 bp, Homo sapiens
attattattattattattttgagatatagtcttgctctgttgcccaggctggagtgcagtggcatgatctcggctcactgcaacctccacctcataggttyaagcagttctcctgcctcagtctcccgagtagctgggattacaggcatgcgccaccctgccccactaatttttgtatttttagtagaggaggggttttgc

SEQ ID NO: 335637 - DNA, 201 bp, Homo sapiens
taataggctataccacgtagcgtaggtgtgtaataggctatatcatgtagcctaggtgtgtaataggctataccatctaggtttgtgtaagtgcactttayagtgttcacacaatgatgaaattgtctaattatgcattttccaaaacatacatccactgtgactgtattttgttgaagatttttatatctgtgttcatca

SEQ ID NO: 335638 - DNA, 201 bp, Homo sapiens
aataggctataccacgtagcgtaggtgtgtaataggctatatcatgtagcctaggtgtgtaataggctataccatctaggtttgtgtaagtgcactttacrgtgttcacacaatgatgaaattgtctaattatgcattttccaaaacatacatccactgtgactgtattttgttgaagatttttatatctgtgttcatcaa

SEQ ID NO: 335639 - DNA, 201 bp, Homo sapiens
tccaaaacatacatccactgtgactgtattttgttgaagatttttatatctgtgttcatcaaggatattagcctgtagtcttcttttctttgtagtgtccwcgtctggctttagtatcaaagtaatgctggccttgtaaatgagtttggaagtatttcctcctctttttggaagaatttgagaaagattgacattagctct

SEQ ID NO: 335640 - DNA, 201 bp, Homo sapiens
tatctatatacagttagataaaaactttaaaaaatctgaataaactaaaggctttagttaataataatggatcattactggttcattgactctaatgaacrtataatactaatgtcaaatgttaataatcgggacactggctgagggggtatatgggaactctactgtcttctcagtttttctgtaaatactgtttgtatt

SEQ ID NO: 335641 - DNA, 201 bp, Homo sapiens
ccaaaacatacatccactgtgactgtattttgttgaagatttttatatctgtgttcatcaaggatattagcctgtagtcttcttttctttgtagtgtcctmgtctggctttagtatcaaagtaatgctggccttgtaaatgagtttggaagtatttcctcctctttttggaagaatttgagaaagattgacattagctctt

SEQ ID NO: 335642 - DNA, 201 bp, Homo sapiens
cccactgcctctcatgggcaagtttggacctgcacacctgagctctagtaaatgtaccacttgtgctattctgctgagcattgagtctgctgggcacgaarccagcctacataatttgaaattaattctgaaatatgaaagggtataaagaataccggttcaaatgaaaagatcattagactgaaactcagtgaaggcagg

SEQ ID NO: 335643 - DNA, 201 bp, Homo sapiens
gctggccttgtaaatgagtttggaagtatttcctcctctttttggaagaatttgagaaagattgacattagctcttctttaaatatttggtagaattcaasagtgaagctgtctggtcctgggtttttctttgatggttgacttttgatcactgattcaatctccttactcactcttagatctgttcatattttctatttc

SEQ ID NO: 335644 - DNA, 201 bp, Homo sapiens
cttacttctccatgcctatgtcgaagaacatttaagttgttcccaattttttgctattacaattttgtaatcaatattcttgtacatgtctttgtaaacaygggcaagttttctggcttaagagtgcagcattgctgatatatattcttcagtatgttttaactcacttctgactagtatactagggtttggttaggggtg

SEQ ID NO: 335645 - DNA, 201 bp, Homo sapiens
tacctcctttgtaaccctaagcattagtcccattcttcacactcctgactcattctttattttcatctatttctctgacagactttcagatctgcacatcyttgccacttccattctccaccccattttacttggctttcaggaacacgtttcccttatatcttcagttcttttcacaagttctatccaactctgtctatc

SEQ ID NO: 335646 - DNA, 201 bp, Homo sapiens
cctgaagtttaagcatatgttttcccagtgaacttctgtgcactttgaaaactgcattctgttctctcttattaaattccagctttcataactaatatgcratgatagctccagaaatgtttatctggtaaattaaagtgggtggggtcttccacttacaaattacttcaggataggactcagatgcctgcccatagaact

SEQ ID NO: 335647 - DNA, 201 bp, Homo sapiens
ccatcacatcagtaaactgaaacttacttctccatgcctatgtcgaagaacatttaagttgttcccaattttttgctattacaattttgtaatcaatattsttgtacatgtctttgtaaacatgggcaagttttctggcttaagagtgcagcattgctgatatatattcttcagtatgttttaactcacttctgactagta

SEQ ID NO: 335648 - DNA, 201 bp, Homo sapiens
cagcttaacaagcttggagcccatgaaggagctagtgaagctggtgacaggggtcagctggtccaggggatgctgaataggccagatgggcaaatcacacygtagacaaagagctttccccctatcctgctgggccaccaccctgacctccaaacaaacactaagggcacaaatttgttcccccttatcagctgcttagct

SEQ ID NO: 335649 - DNA, 201 bp, Homo sapiens
ttactgtgtttctagagttatccattttatacatttggttttagaccatttatttagcattccatcacatcagtaaactgaaacttacttctccatgcctrtgtcgaagaacatttaagttgttcccaattttttgctattacaattttgtaatcaatattcttgtacatgtctttgtaaacatgggcaagttttctggct

SEQ ID NO: 335650 - DNA, 201 bp, Homo sapiens
ccccctatcctgctgggccaccaccctgacctccaaacaaacactaagggcacaaatttgttcccccttatcagctgcttagctcagcagctgctgccatrgctttctgtttccacatcttgcctttttctaaaagttgcctttttgtctaacttctatgtgaggcaggaggcggccaaggaacccagggcataatgaaga

SEQ ID NO: 335651 - DNA, 201 bp, Homo sapiens
tatcaaaagttctgcttggcagttatgtgtctttaaacattggaaaataaattaactattaataaatgcaggatttttcaaaacatgaaattcatgaaggkgtactttgagactgaggaatatgtgaggaattacatgcttgagccctttttatttgattttattttataagacagggtcttgctctgtcacccaggctgg

SEQ ID NO: 335652 - DNA, 201 bp, Homo sapiens
gggttaacaaatgcagagcgcataaagaaatgcctggtgcataatgtgttgagtaagtgttagctattattatcattatatttatatataattttgcttaytgtgtttctagagttatccattttatacatttggttttagaccatttatttagcattccatcacatcagtaaactgaaacttacttctccatgcctatgt

SEQ ID NO: 335653 - DNA, 201 bp, Homo sapiens
gtttccacatcttgcctttttctaaaagttgcctttttgtctaacttctatgtgaggcaggaggcggccaaggaacccagggcataatgaagaaatggtgyggtagccatcagaggactgagttcttgaatagagtgtttcaggaggggcagaaaatagattttttaaaacaacttctgggaaatgtggaggcccgcaaaa

SEQ ID NO: 335654 - DNA, 201 bp, Homo sapiens
gaaagcaccaatttgctgagtacattgttgcgtgagatggcatttttgtcattttgtggacattgatcagcctcccatgcagtagttggcatcactgcccrcaatcacaaagacatgggtgggactcttattttcacacctgtaagggctcaagagacttccttctttttcttagtcccatggaaaaccgataatttccta

SEQ ID NO: 335655 - DNA, 201 bp, Homo sapiens
tgctgagtacattgttgcgtgagatggcatttttgtcattttgtggacattgatcagcctcccatgcagtagttggcatcactgcccacaatcacaaagayatgggtgggactcttattttcacacctgtaagggctcaagagacttccttctttttcttagtcccatggaaaaccgataatttcctacattaaaaatgga

SEQ ID NO: 335656 - DNA, 201 bp, Homo sapiens
tatgtagccttcctcaacttcctgacttctaggatgggtctgatgatagtttatacccttgaagggttgtgaggactaaatgggttaacaaatgcagagcrcataaagaaatgcctggtgcataatgtgttgagtaagtgttagctattattatcattatatttatatataattttgcttactgtgtttctagagttatcc

SEQ ID NO: 335657 - DNA, 201 bp, Homo sapiens
tcagcagatcagcaaggagtgctagtgcctagaggaacccgtgaagcaaagcactcaccttggaaacgcaagcacactgctgggccacttcctcaaggcckctctgctagacaacaccgagtccacagtgccaggcctctagaggacagcaacagagcaaggttacatctaggctgaggtccaggactcagacaaattaaa

SEQ ID NO: 335658 - DNA, 201 bp, Homo sapiens
cagtaaaaactatacttaatttaaatatatattatgcattcatttttttgagatctactcacatatgcccttcattgacccccccccccagtgaaattgaragcaggttatatgtgtgcttagcttgctccccagttgttgaacatgatgatattggcctctggggagttgggaacaccttcttccccatctttccctctg

SEQ ID NO: 335659 - DNA, 201 bp, Homo sapiens
ggggatgtaaattagttcaaccattgtggaagacagtatggcggttcctcaaggatctagaaccagaaataccatttgacccagcaatcccattactggayatatacccaaaggaatataaatcattctcctataaagacacatgcacacatatgtttattacagcactatttacaatagcaaagacatagaaccaaccca

SEQ ID NO: 335660 - DNA, 201 bp, Homo sapiens
tatatattatgcattcatttttttgagatctactcacatatgcccttcattgacccccccccccagtgaaattgagagcaggttatatgtgtgcttagctkgctccccagttgttgaacatgatgatattggcctctggggagttgggaacaccttcttccccatctttccctctggggagatggggaaagggcaatatcc

SEQ ID NO: 335661 - DNA, 201 bp, Homo sapiens
cattgaatccatgaattactttaggcagtatgaccattttcacgatattgattcttcctacccatgaggatggaacgtttgtccatttgtttgtatcctcycttatttccttgagcagtggtttgtagttctccttgaaaaggtccttcacatcccttgttagctgtattcctaggtattttattctctttgtagcaatgg

SEQ ID NO: 335662 - DNA, 201 bp, Homo sapiens
tactgtgtggagaaagtataaaattaagtttggggctagatggaccccaagatccctgtctggccccaataacccatggcaaactccatggggtcctcagragtcctcttagtaactgtggctcctatgtcaatgatgcttaatagaagtatccgcaaaaacagaaatgttctgtatctgcatacaagtggctcttgaact

SEQ ID NO: 335663 - DNA, 201 bp, Homo sapiens
atctactcacatatgcccttcattgacccccccccccagtgaaattgagagcaggttatatgtgtgcttagcttgctccccagttgttgaacatgatgatwttggcctctggggagttgggaacaccttcttccccatctttccctctggggagatggggaaagggcaatatcctggagatgagatcctgggagctgggct

SEQ ID NO: 335664 - DNA, 201 bp, Homo sapiens
tggtagtttgatgggtatagcattgaatccatgaattactttaggcagtatgaccattttcacgatattgattcttcctacccatgaggatggaacgtttstccatttgtttgtatcctctcttatttccttgagcagtggtttgtagttctccttgaaaaggtccttcacatcccttgttagctgtattcctaggtattt

SEQ ID NO: 335665 - DNA, 201 bp, Homo sapiens
ttcaggtgaggcagtctgtatggaaaagatgtttttgagaagtaggaacaactatataatgtgaagtattgtgactgtttcctacagaactaatagaagcrgctaaggaaaaaaaaatcaaaatcaacctctatcacattggagtcctgctctttccaaaagaaaccttaaattgtttggacgctaccactttccaaagtg

SEQ ID NO: 335666 - DNA, 201 bp, Homo sapiens
gggttatgattttgaggttgatactgaatccttcagagtaaggagagtgggcagacttcacaaatcagcagaaaagctgccaagactgtgcttgccaattkgttgtgtacatgattctcagaatcttggtaattttattgtgtgtctgattgaaaaattatattcacagtcttgggcaaaacaagaataaagaaataatac

SEQ ID NO: 335667 - DNA, 201 bp, Homo sapiens
aaaaaaaatgtccaaaaggacctcaagccaaaggctatagctcttggtttttcatactccgtgatattttttaaaaaaacgatttggttccgccagaatgygtgtattcttatggccaaaaaccctaaaagtcgtctcatggccacatctgacatggtttagtatttagtacattttatcaaaaagctcattaatgtattg

SEQ ID NO: 335668 - DNA, 201 bp, Homo sapiens
cttagtgttcatgtctgtgggtggatttttttctgttagaaggagagcccttccaggccaggtaatgagattcgtccacctgtgtttggcatggggtagtscctgaaagatctagcttaacattaaattcttggaatgtgttcactagatttgcagctcatttcgacagattaggagtggcatttaagtcgcagctgtatg

SEQ ID NO: 335669 - DNA, 201 bp, Homo sapiens
ccctcccacaatccctgtagatatatcactggatatggcagtgtctgtagtatgtaatgcatttttaaatgactcccattgatagggaggcgtaaaatgaraacccacatgcagagcttttgttttagctctggcacaacctatccatgtgactattggcagacaatttctctgcagtctaagattttactgctgtcaagg

SEQ ID NO: 335670 - DNA, 201 bp, Homo sapiens
cctgttttgatttctgaaagtaaaaaaaaatgtccaaaaggacctcaagccaaaggctatagctcttggtttttcatactccgtgatattttttaaaaaaacgatttggttccgccagaatgtgtgtattcttatggccaaaaaccctaaaagtcgtctcatggccacatctgacatggtttagtatttagtacattttat

SEQ ID NO: 335671 - DNA, 201 bp, Homo sapiens
cctgtagatatatcactggatatggcagtgtctgtagtatgtaatgcatttttaaatgactcccattgatagggaggcgtaaaatgagaacccacatgcaragcttttgttttagctctggcacaacctatccatgtgactattggcagacaatttctctgcagtctaagattttactgctgtcaaggttgtaggttagac

SEQ ID NO: 335672 - DNA, 201 bp, Homo sapiens
atatatcactggatatggcagtgtctgtagtatgtaatgcatttttaaatgactcccattgatagggaggcgtaaaatgagaacccacatgcagagctttkgttttagctctggcacaacctatccatgtgactattggcagacaatttctctgcagtctaagattttactgctgtcaaggttgtaggttagactggatcc

SEQ ID NO: 335673 - DNA, 201 bp, Homo sapiens
agaaagaaaatgcaacaaagtttttatgtggcccaccaagtttgaaatatttactatctggccctttacagaaaatgtttgacagtctctgctctaaggtrtcacaggggtagcaactctaggaagtacctaccacctttaggtctacaggaacaaaagttggaattattaaaaggcagaaaattagagacgaggccaaga

SEQ ID NO: 335674 - DNA, 201 bp, Homo sapiens
actttcaggtacaccaatcaaacgtaggtttcatctcttcacatagtcccatatttcttagaggctttgtttgttacttttcattctttgttctctaatcytgtcttcatgctttattttactaagttaatctacagtctctgatatcctttattccacttgattgatttcactattgatacttgtgtatgtttcatgaaa

SEQ ID NO: 335675 - DNA, 201 bp, Homo sapiens
gcatggcacaggaggccatgctttaaaaccttcagtggctccccactgcctccagagtaacgtaattaacaaagctttcaggacccatgtcattctggtcygacctacccctccagcttccctgcctgatgcacagctgtcctatcagcctcacctcccaggtggcacagcacccaaatctcctctgccttgaggtgctct

SEQ ID NO: 335676 - DNA, 201 bp, Homo sapiens
ctccctctgaaatgtaccttgaatctatgttttcacctctactccatttgcactggtagagcattttcttccttcacgtgaactatggcagcagccttatyactgcctcatagtgctagtgggctcatcaaagggaaaattggaacaatccttgcctgcttgatgtcctttgccattgccttcagtaaaattagctgtttc

SEQ ID NO: 335677 - DNA, 201 bp, Homo sapiens
ccctttattgctggacttggtgccaagaagcctaaatgaacatgtctacttgagtgggtgttgttcagggttcttttttcaattctattttaggaaatttscaagaatcactcttctacaggccgagataagggttaagagtctttttctcaagaaataacattctcctaagtgaacattatctttgtttttctttctctc

SEQ ID NO: 335678 - DNA, 201 bp, Homo sapiens
gcccaacacacaagaaggaatagtatcttgctttctctccctctgaaatgtaccttgaatctatgttttcacctctactccatttgcactggtagagcatyttcttccttcacgtgaactatggcagcagccttatcactgcctcatagtgctagtgggctcatcaaagggaaaattggaacaatccttgcctgcttgatg

SEQ ID NO: 335679 - DNA, 201 bp, Homo sapiens
gacactccttgccgccccttctagcttctgttatttgctggcaatccttggcattccttgcctctggatgcatcagtccaatctctgtttctatcatcccwtggctatttcttcctgcatgtccctgtcttctcctcttcttataaggataccagtgcttttagattagggcccacactaacttcatcttgaccacatctg

SEQ ID NO: 335680 - DNA, 201 bp, Homo sapiens
aacaaatatgcctttcagaccaaatgaaataagtatttgaaggaatagatcaggtactccgtgcaatttttgttaaatgaccattcccttccctctctgcstacttaacccaaagctccatgcagcagaagccatgccccttctctggccactcatttggtcagtgggccctgatgaccaagcactagctaagagagaacc

SEQ ID NO: 335681 - DNA, 201 bp, Homo sapiens
atgtcacattagctgtcaaaggggttttgactcattctcaaggagagaagattgaaacagacccagctgtggaatacagagagctccttggcacctaaatsactaccccaatcatccgtaaagagctgccaggaaaccatatcagcgggatctcagggaggctcactttagcacccccttcagacttaccagactggacga

SEQ ID NO: 335682 - DNA, 201 bp, Homo sapiens
gatctgagtcccctcctatttgtcttatcacactgttgccttctggcactgagcacactattacaatggctggttggtttgccttccacactagaccatgrggacagacactctgtcttgtcacatggcattagctctgtctgacttgaaatgctcaataaatatttgttctttaaatgatttcaatcatgtcatggcccc

SEQ ID NO: 335683 - DNA, 201 bp, Homo sapiens
ctggcactgagcacactattacaatggctggttggtttgccttccacactagaccatgaggacagacactctgtcttgtcacatggcattagctctgtctracttgaaatgctcaataaatatttgttctttaaatgatttcaatcatgtcatggcccctttcctctcaacttcattaatctgaatgtcactacttcacag

SEQ ID NO: 335684 - DNA, 201 bp, Homo sapiens
ataagagaagaaatagaaaactttaaaagcaagctgggaaaattaaaagattacatgtctgagaccatttcatgaaggcaaattgcccaaaggacttcacycacccgaaatgatatatagttatttagttaagaataattattatagtcattgataagattgtttcatattcattaactctgtttaagaaaatagggatat

SEQ ID NO: 335685 - DNA, 201 bp, Homo sapiens
gtggacttgatacatttagagcagtaaacctgcaaaggcttgaaggacagtgctgcagtgttggctgtacatctgagactgcacagatttcagctgaatcycttctgtattcaatgatgatttattagacttccacacagctaggatttgcctttgaataaagtatatgattttgttctctgctagcttagaacttgatct

SEQ ID NO: 335686 - DNA, 201 bp, Homo sapiens
ttctgcatttttgtttaagaattctgagaatcatgctaacaaattagccaagactgaggagcaaaaaagtttaaaaactatgatgtagctgaccttaattrttcttaaatcccatgaattctatgccaataaaaacaatgttttcttactggccttaggcctggattgaaattgttgaaaatagtgacttttctcctctta

SEQ ID NO: 335687 - DNA, 201 bp, Homo sapiens
ccatggatgctcaaatccctgatataaaatggtatagtatttgcatataacatacatatcctacaatatactttaaatcatctctagattacttactatayctaatacaatgtaaattctacgtaaatagttgttacaagacttggaaccaacccaaatgcccatcagtgatagactggataaagaaaatgtggcacatat

SEQ ID NO: 335688 - DNA, 201 bp, Homo sapiens
aatcaggagatgttaagtgtgttgtatggataattagaagtttattggtgatgctggaaggcagattacataatatatcttctcgagatctctgcttcagrtatgatgtaaaattgtgcctcctagttgagagaaacagtggattattgtgtaaatattagctccataagtggcaatttactctagatttgagcttgtaca

SEQ ID NO: 335689 - DNA, 201 bp, Homo sapiens
tgagaatcatgctaacaaattagccaagactgaggagcaaaaaagtttaaaaactatgatgtagctgaccttaattgttcttaaatcccatgaattctatrccaataaaaacaatgttttcttactggccttaggcctggattgaaattgttgaaaatagtgacttttctcctcttattacctcaaagaacattgtgtcag

SEQ ID NO: 335690 - DNA, 201 bp, Homo sapiens
agtttattggtgatgctggaaggcagattacataatatatcttctcgagatctctgcttcaggtatgatgtaaaattgtgcctcctagttgagagaaacartggattattgtgtaaatattagctccataagtggcaatttactctagatttgagcttgtacaaagactcagttgcattgaagctcaaatactgttcagat

SEQ ID NO: 335691 - DNA, 201 bp, Homo sapiens
cacagcagttcttaagtgagccttgtttccttctactgcagggcatttatacacctactttcctcttttggaaaacccttctccctctctccacctctaarttctcctgtcatcctttacctacttagttccaactcttccttcggatcccaaggaaaatataccagttagggtctaggcaggagacaaaaaccacaccat

SEQ ID NO: 335692 - DNA, 201 bp, Homo sapiens
gcacgtcttacatggcagaggacaagaaagaatgagaaccaagcaaaaggggtttccccttataaaaccatcagatctcatgagacttattcaccaccackagaacagtatgggggaaacccctcctgtgattcaattatctcccaccaggtgcctcccacaacatgtgggaattatgggagctacaattcaagatgagat

SEQ ID NO: 335693 - DNA, 201 bp, Homo sapiens
gcaagcaatcatgagttgatgtgtggtttgactttgtttctctgccatccagtatgcattttacatttcaaagtccaggatgacaggtcttacctctgctrtgaattccacgcagaagccaattgggaaggggaaatcccttttaagggcacaacttggaagttataaatatcacttctacttacattcagttggccagaa

SEQ ID NO: 335694 - DNA, 201 bp, Homo sapiens
gggaatggtcacactggggacaggggaaggaaggagagccacacaaggggccaggtccagggtgctgctgacccagtttccgtgggtccctggcctccacstgcaagctgaccacacagcatggctggagccaggaaagccccactggctcatcagctctgcagcttcctccacctggccagccttccctggacctgcatt

SEQ ID NO: 335695 - DNA, 201 bp, Homo sapiens
acaaccaggccagatggctaaggcctgtccagtcagtgtgaaaatctgtggccccaggtggggttctgagcatgtgttagtcatggctaaagctgttgttmaaatattgggaccacagccacttacctttacagaccatgatagtcaccctgtgcagctacagcttgaagcacttcagggtcactgaggtccatagaaata

SEQ ID NO: 335696 - DNA, 201 bp, Homo sapiens
catggcacatgtctacctatgtaacaaacctgcatgttctgcacatgtatctcattctttttagaagaaataaaaattaaaaataaaaaaagagtaaaccmaagtgctgagcatagaactaggcacataatgcatatccaataaatggttgatattggtgtattgtctttgttcctctcagcaactttttcagatggtagc

SEQ ID NO: 335697 - DNA, 201 bp, Homo sapiens
taccctgtcttcagactaaatctggaatccagcccctgttcaccatgggtcaccactgattgaagcctccagcatctctctgcttaatgcctgcagcagcytcctggctggtctcctctttccctttagcgcctctcatttattctcaacacaatggccagggtgatttttttttaaaactaagtttcaacatgtcactct

SEQ ID NO: 335698 - DNA, 201 bp, Homo sapiens
cctgcagctagtgtggtgtctgcccaaaaggctgcctggctttgtgcttgaaacctggggccctggtggtgtaggcacccgagggaatctcctggtctgcrggttgcaaagacagtgggaaaagcgtagtatctgggccacatagcttcgtctctcatggcacagtccctcatggcttcccttggctaagggagagagttc

SEQ ID NO: 335699 - DNA, 201 bp, Homo sapiens
cagcccctgttcaccatgggtcaccactgattgaagcctccagcatctctctgcttaatgcctgcagcagcctcctggctggtctcctctttccctttagygcctctcatttattctcaacacaatggccagggtgatttttttttaaaactaagtttcaacatgtcactctttgcttaaaacctggccacatccaagtct

SEQ ID NO: 335700 - DNA, 201 bp, Homo sapiens
gctccctggcttcagccccctttccaggggagtgaatagttctgtcttgctggtgttccagctgccactaggttacaaaaaaaatactcctgcagctagtktggtgtctgcccaaaaggctgcctggctttgtgcttgaaacctggggccctggtggtgtaggcacccgagggaatctcctggtctgcgggttgcaaagac

SEQ ID NO: 335701 - DNA, 201 bp, Homo sapiens
cccccccccccactttattgagttatatttgacaaatagaaattgtatatatttaagatgtacaatgtgatgatttgatatatataatatatatacatacmttgtgagatgatgaccacaatcacgcgaattaacatatctatcacctcacatagttacccacctttttttgtgttgagaacacttaagatctactctctt

SEQ ID NO: 335702 - DNA, 201 bp, Homo sapiens
attgtgttatgtcagtgagattatgggagatttatttcctctttatgtacttttcctttaatgttccattttcttttcaattttaggttacagtttctgtygggaattgtttctagagccaagtaaataatactcagaccaactttgggaagctggcccatctgtaacatataggtggagatccctctgaagtcgtctcct

SEQ ID NO: 335703 - DNA, 201 bp, Homo sapiens
gatatcaccagcagatgctgcagaacagtgaagattgctgcctgttccttcgtctggaagcttcatcccagaggggcacctcccagatgccagctggggcyctcctgtatgaggtgtctgttgacccctgctggaaggtgtctctccttcaggaggcacaggggtcagggacccacttgaggaggcagtctatcccttagc

SEQ ID NO: 335704 - DNA, 201 bp, Homo sapiens
aatcacgcgaattaacatatctatcacctcacatagttacccacctttttttgtgttgagaacacttaagatctactctcttagaaaatttcaagtatacmattcttattaactatagtcaccatactgtacattagatcttcagaacttactcacctttttttctctttttgtttacaagtgtctgctgtaaggagaggc

SEQ ID NO: 335705 - DNA, 201 bp, Homo sapiens
gtttgctggaggtccactccagaccctgtttgcctggatatcaccagcagatgctgcagaacagtgaagattgctgcctgttccttcgtctggaagcttcrtcccagaggggcacctcccagatgccagctggggctctcctgtatgaggtgtctgttgacccctgctggaaggtgtctctccttcaggaggcacaggggt

SEQ ID NO: 335706 - DNA, 201 bp, Homo sapiens
gaggtcagtggttaaaagcatgcattcattttgtatctgaaaggttgccatgcagcccagttgaaacacaattcctaccaaaaggacacagtaaagagtamaatgcacctgtcatttgaggagagggatttttgatagaaagatccacagcttttgagaaacttgaatgagagaaagccaaagctgcattggctttctaaa

SEQ ID NO: 335707 - DNA, 201 bp, Homo sapiens
atctaaatcaataccaatcaaccaaccaaagacaccacatccctccactgaaattcctccacttttctgtactgggagagttataagcaccatggactatyggtcacttcccagtatgcaatgaaggattttcccattatgcccatgtaagaacatgagtcctgatcagcatctggtgaacatcactcactggggttgtca

SEQ ID NO: 335708 - DNA, 201 bp, Homo sapiens
acagaccttaaacctaataagaaacatttacagcctgttctctctgaagtctggaggcttcatctgcatgatgaaactttggtctctacaacttcttatcmcaacccagacactcctatctattgacaactttttttttttaacttttttttttattattatactttaagttttagggtacatgtgcacaatgtgccagtt

SEQ ID NO: 335709 - DNA, 201 bp, Homo sapiens
agaccttaaacctaataagaaacatttacagcctgttctctctgaagtctggaggcttcatctgcatgatgaaactttggtctctacaacttcttatcgcmacccagacactcctatctattgacaactttttttttttaacttttttttttattattatactttaagttttagggtacatgtgcacaatgtgccagttac

SEQ ID NO: 335710 - DNA, 201 bp, Homo sapiens
ttaataccaggacttcacaatctctcactgcagttccatgcctccttgtctccagtctgtcctcccagctgtccatcccatcatccatttctgccagaatraacttcctaaaacacccgccaccttcctgcctaaagccctcagtgggtcccccttgccctccagattgcttaggctgtttacatgggcatgaaaggggtg

SEQ ID NO: 335711 - DNA, 201 bp, Homo sapiens
ttgaggggttctggtatctaagatcattgttacttctggaaacaaaatgggtgtggcaaaaatgcagaacatccactggctgggtggtaagggcattttttggcacctgagctggggaggggttggtgctgaccaagcatagtacaaggaacttccaaggccaatgctcacatcaccctgccttgcctgggaggccatggt

SEQ ID NO: 335712 - DNA, 201 bp, Homo sapiens
aaaagctgtgggaaattaaggaaaacttatccaattatgtgccctccttcatgtaattcatgaaatttcctccaaattttcattcaggctatatttatcaygtgccttccctgtaccccacaatgtggccaatacaaatatattagttccttctcacattgttataaagaaatacctgagactgggtaatttacaaagaaa

SEQ ID NO: 335713 - DNA, 201 bp, Homo sapiens
atgcatttccagtgcttctgaataatgactacatatccaacattctactaggcactgtaatgagattcaaaagaaataaaagacatcagctaggccaggcrcggtggctcatgcctacaatcccagcaatttgggaggccaaggcaggtggatcacttgaggtcaggagttcaagaccagcctggccaacatggcgaaacc

SEQ ID NO: 335714 - DNA, 201 bp, Homo sapiens
ctgccaggaaaccatatcagcgggatctcagggaggctcactttagcacccccttcagacttaccagactggacgaggttagacaaatattaagattcaartgtctacagggttttacagtgtgcagagattttgcaaatttgccttgtttgattctcacagtcattcccgtaatggagaaaccaatgtccccattttaca

SEQ ID NO: 335715 - DNA, 201 bp, Homo sapiens
caacaacaaaaaagttatctgcaaaagagagcatggatttgcaccaaaacttgcatgcctacagggcataagggctaagaaaagttgcctgttcctccacmgtcccagatgtggggaactctgccaagggtcttctcttgggagctggcggcctgtggccagaggttgatctcaggccactctgtttcaggcacagcctcc

SEQ ID NO: 335716 - DNA, 201 bp, Homo sapiens
acccccttcagacttaccagactggacgaggttagacaaatattaagattcaagtgtctacagggttttacagtgtgcagagattttgcaaatttgccttrtttgattctcacagtcattcccgtaatggagaaaccaatgtccccattttacagctgagaaaactaaggcacagagaggtgaagtgactagtcccaagtc

SEQ ID NO: 335717 - DNA, 201 bp, Homo sapiens
aatattaagattcaagtgtctacagggttttacagtgtgcagagattttgcaaatttgccttgtttgattctcacagtcattcccgtaatggagaaaccawtgtccccattttacagctgagaaaactaaggcacagagaggtgaagtgactagtcccaagtcacacacctataggggccatgtttctgggatctaagagc

SEQ ID NO: 335718 - DNA, 201 bp, Homo sapiens
ataatgaaagattttctacctgccatactttatttacaaccgtcttcttatttcagtaacacacataactattcatcatggctcctgacaaacatgcataytaaaatggatgattctagctaaaacactaatttgtaattatttacaaacatttaccaaatacttactatgagccaaatatctctctggacattttgccag

SEQ ID NO: 335719 - DNA, 201 bp, Homo sapiens
atcatcatggaaacagataagaaccaaccccatcactagttactgctggagaaaatggtatcttctgagtgaaaataggctaaatctgtaaatacattgctgaggtcattgaagaggtattcttccctgggggtactatatcttctctgagctgctttagatgcagtactaccaggaaatggaaggatgggcaaggttctg

SEQ ID NO: 335720 - DNA, 201 bp, Homo sapiens
ctctactgatctcccagagggcagggccatgcctggtgcagagcaggagcccagggcacattatttgactgtctcccaaccagtcccactgtaccatgtgmtcagaatcactgaccccaaggggctgggcctctgaagcccgagcacttgaagggaagagagctccccagggcttctcatcatctctgcctcccaccccag

SEQ ID NO: 335721 - DNA, 201 bp, Homo sapiens
tttgcttatcatcataatccctagccccgcacattttacttcctcaatatacttcaaagaaaactattagggaccccaatgtgcatttctgtttggtacamttcccacctctaggtgtctgtcaagaactagatccttgagaaaaccaatattctgcattagtggaaagtgcatcggactcaggatcctggttcaggtgga

SEQ ID NO: 335722 - DNA, 201 bp, Homo sapiens
aaaatagatgcacactttgccctctgaagttcacagtctaatgagggcgatggggattattaatcaaatagccacacaaataaatgtgacaagtttgtttwtgtagggatggagtactttgagagcatacaggagagagcctctactttgaattggaagttatcaagagcatgagtatgaattaactaaagagtgaggaga

SEQ ID NO: 335723 - DNA, 201 bp, Homo sapiens
cagctgagaggagggagtggcttagcctcctgagaactcagaggctagggattttatggataatttggtgggcaggaggctagggaatgggcactgctgaytggggatgaaatgataagagtgtggaaaatggttcttgcgcactgagtccacctccaggtaggggccacaggaccatttgagtcatgagtcatgggtctt

SEQ ID NO: 335724 - DNA, 201 bp, Homo sapiens
aagaaaatggagtcacaaaagccaaatgttgggtaggggagtgatgaaaagtgtcagatgctaccaagaagacaaaggaaatggggactgatgagtgttcrttgcacttaggaatgtgaaggtcattggtagcctttgcaagagcagttttggtaggacgatgttgagacaagacatactgcagtgggttgagaaatgaat

SEQ ID NO: 335725 - DNA, 201 bp, Homo sapiens
gtgtctgaacatcccaacccccatgtccaagtttcagtcacggactcaggcctagggatccagctactgcagtgtggtctgtacttgggaggagggacctsgaaaagaggcccaaacagtccctggaatcagccttggggtcatttggtcagggaattctggcatcttgggtactggtctagaggaaggaaaaaagggcac

SEQ ID NO: 335726 - DNA, 201 bp, Homo sapiens
agggatttttgatagaaagatccacagcttttgagaaacttgaatgagagaaagccaaagctgcattggctttctaaaagtgattcttgaaaactagaggkattttagaagatacagttgaatgatcagcaacttgagattattatattttaaaagcattttgtcttgattctgtgtcatcttttggtagtgagctacatg

SEQ ID NO: 335727 - DNA, 201 bp, Homo sapiens
gggactacaggcgtgagccactgcacccggcctctgtgtgttcttaaaggtgaactgaatcttttgtaggcaaaatatagtgggtcttttttttttttttwaaaccattcagccacgttagccttttgataggagaattaattcatttacattcaaagtaattattgataagtaaggactcactactgccatttttttaat

SEQ ID NO: 335728 - DNA, 201 bp, Homo sapiens
tgatcagcaacttgagattattatattttaaaagcattttgtcttgattctgtgtcatcttttggtagtgagctacatgaagcccattacttaattggtcmtgaaacatcttcctctgtagtgtggaattctggagaaggcagtctctgttgatcactttgttttgttctattttgctttgctctttcagaaaactgaagg

SEQ ID NO: 335729 - DNA, 201 bp, Homo sapiens
cgctgtactaacacttctagtgtgcaggttccctcttatctgggactagtgcatgaagtctgatgtgctgtggcctttccagagaaataactagtgtattycctgttccctgctgtggacttctgattagcttttttcacttccactggctctgttagaattgtagattcttagagctggagagaactttaaagatcactg

SEQ ID NO: 335730 - DNA, 201 bp, Homo sapiens
acttctagtgtgcaggttccctcttatctgggactagtgcatgaagtctgatgtgctgtggcctttccagagaaataactagtgtattccctgttccctgytgtggacttctgattagcttttttcacttccactggctctgttagaattgtagattcttagagctggagagaactttaaagatcactggatgcctttttc

SEQ ID NO: 335731 - DNA, 201 bp, Homo sapiens
catctccagggtcacctctgctatgatgccctcctcgataacgccacatggcagtaattcattcatcctctacatttctttggcatgtagcatttgtagtmgtcatggctctttccacatttggccttagtgtacatttattagcacatgtatcgccatcatgtgcatgtgttttcttcagatccaggagactgtcgtggg

SEQ ID NO: 335732 - DNA, 201 bp, Homo sapiens
cctctacatttctttggcatgtagcatttgtagtagtcatggctctttccacatttggccttagtgtacatttattagcacatgtatcgccatcatgtgcrtgtgttttcttcagatccaggagactgtcgtgggcatctcatagccagcatgcaatgccttcctgatagtgtaacctcagtaaaaattagttacatgaat

SEQ ID NO: 335733 - DNA, 201 bp, Homo sapiens
tggccttagtgtacatttattagcacatgtatcgccatcatgtgcatgtgttttcttcagatccaggagactgtcgtgggcatctcatagccagcatgcartgccttcctgatagtgtaacctcagtaaaaattagttacatgaattgcctctacattcccttctccttgatgtatcagaaactatatggtgaagactgat

SEQ ID NO: 335734 - DNA, 201 bp, Homo sapiens
gtatcagaaactatatggtgaagactgatgatacatcagccccatctgtcagctcttttgaaaagatggtgaaaatcttgacctgaccctcttttagatcwctccatggggactggagaattttgaaagccacaaaaaatcttttatttcatcatacaaattttggaaatacatttctttaagagagttttctgctctgat

SEQ ID NO: 335735 - DNA, 201 bp, Homo sapiens
taaagagctagtagttctggaagttgaagctggtgttgaagatagtggatatcatcagtagtctcaggattttgtcccaacattttggtatattctaaccmaggtttaaaaactaacttaaaaaaaaaatagatccagccaaatttggatctatctatcgattgattggtccatccatccattcagctatcatctatgtct

SEQ ID NO: 335736 - DNA, 201 bp, Homo sapiens
cccggtgccccgcagcgcgcgtgggtcctggctggctggaaggaggccctgaccttgctttctctcccgtgccaggtctgccaaggaccatgggtgccgckctggggacaggcacgcggctggctccctggccgggccgggcctgcggcgccctcccgcgctggacacccaccgcgcccgcccaaggctgccactccaagc

SEQ ID NO: 335737 - DNA, 201 bp, Homo sapiens
gtccatccatccattcagctatcatctatgtctctatctaccttcctgcctgtcaccattataacgctcccagtctcatgagattctgatagtgagacagsaagttaagagaatgtctaccatgggaatttaggataaaagttaaaatgttgtttcatagccagctaaatagggtatggctgggccaacttcacccagcta

SEQ ID NO: 335738 - DNA, 201 bp, Homo sapiens
aggagaaaaacccccttggcctgagctgtttagggttctcagcacaattagggatgttgcaagtgatggaggaaagatgtgtgcccttctgatgaaatggytttggaaggcagcttgtcacatttggttattttccacctctatgtgagaacaaggaagtgttaatgaggcactgtggcagaccacacgggctctgggcct

SEQ ID NO: 335739 - DNA, 201 bp, Homo sapiens
ctcctgaggcaacaggagctttaatcacagtcaaagacaacacccctccaggtttcctgttgaaggaaaacatctgctgtccacagccctgaaactctgcrtcacttttacctgccaataccaaggagatttggaaaaataaatatgtggcgccatgatcccatgaagaagggacatcccatgattaagttccaagtgggt

SEQ ID NO: 335740 - DNA, 201 bp, Homo sapiens
tccaataaggtgtaagactcaatcactcactggaggagaggccttcctcagactgagaccagggctggaaggaagagctccaggagactgaacacaaagayataacatagcctagatggtcactcaagatggtaccaagcacgtggaaggaggctgggacccaggaagtgagggacccagggatccctatgcaacaggctg

SEQ ID NO: 335741 - DNA, 201 bp, Homo sapiens
taagattctgatgggacttatttgtttggaaacactgtacctgtcctgccttgttatgatcctggcaagctggagatgtttggggcttcatctcactgtcktgtttcagacaacttggatatgataagctataaaaacaatgcaacattaattaatgtttaatacaatctgacctcaagggcaataataattttagaggca

SEQ ID NO: 335742 - DNA, 201 bp, Homo sapiens
tgcacatgtatctcattctttttagaagaaataaaaattaaaaataaaaaaagagtaaaccaaagtgctgagcatagaactaggcacataatgcatatccmataaatggttgatattggtgtattgtctttgttcctctcagcaactttttcagatggtagctattaatacccccattttacagatgagaaaactgaggtt

SEQ ID NO: 335743 - DNA, 201 bp, Homo sapiens
tttgactgcaggactggagggtccaagcatccttagccactctcttgttaactgagctattcaatgttctgtgatctactactgtcaactggacagagtcrgctgcctcctctggggctcaaaattactggcacaatcacattaaaaataataacaatcacatataatgcctactgtgccagttactcttacaggtgtgtt

SEQ ID NO: 335744 - DNA, 201 bp, Homo sapiens
aatagagaaaattcagagaaatgttaaaaataagatatcagccacataacaagcactaatcattgtttacatattggtatatttccccagcctttttttttccatgcacttataaaagtggtgttcttattatatatacagtattttatatttctttttcaaatttaattatctgtcatgagttttctttcaggctattaa

SEQ ID NO: 335745 - DNA, 201 bp, Homo sapiens
gtggatagatagaattcaatcctcgggagccccactctactgatctcccagagggcagggccatgcctggtgcagagcaggagcccagggcacattatttractgtctcccaaccagtcccactgtaccatgtgctcagaatcactgaccccaaggggctgggcctctgaagcccgagcacttgaagggaagagagctccc

SEQ ID NO: 335746 - DNA, 201 bp, Homo sapiens
ctggataatagatacatgacagtttatcatactattatttctattagtatgcatgttttacattttctataagttttaaaaataatttcagaaaatgcatygtacaacagcacacacacccatgagttgtctggtacagaatccagaatcaagcctcaagattaacagtccagctcagggtccagcttcaccccgtcagtt

SEQ ID NO: 335747 - DNA, 201 bp, Homo sapiens
cagctcctccgaatcatgagatattacgagcggcagcagagtgacctggacaagtcagtacctagtgtctgttctctctgtctggtccttgggctgagctrtctgtttcctgtgcttcacagagggttttctggaaactctccagctaaaaaaggctgagagcccaaagagatcccagactcagccctaccttctaaagga

SEQ ID NO: 335748 - DNA, 201 bp, Homo sapiens
ggggatccagacataaagagaaaatggggaatcacagggtcaactttatcagctttactaaaggtagtcacttcccaggttgaatggctataaatgggcgyggctagaatttgaacacagagacctggctccagagtctatgcttttcatttctctgctatgccacagctaagatgcagcagggaccagtggctacaagac

SEQ ID NO: 335749 - DNA, 201 bp, Homo sapiens
ggctctgacaattgggtgtctcaaggcaaggacttaattgggcctcctgggagtcattgaggtgggggaaagaaaagggggtccttatggcaagacatcasataaatgttcagcagctgtttgccctgtgtctgaacatctaccctatggtaccttccaggcagctatgggcattgcccacctccttgtcatggccctaga

SEQ ID NO: 335750 - DNA, 201 bp, Homo sapiens
aggtagtatatttgccactttgtcttccttagtctttataacactttatgaggtagttgctattatcattcacatttttacagatgagaaagcagcctcasagcagttaagtaggtttcccaagctgaagctagattggaccagctgcaaaagcacattcttttaaaattaatcctcactgtctttcctgcttatacttgt

SEQ ID NO: 335751 - DNA, 201 bp, Homo sapiens
accctccagaccaccggggtcgtcctcccgtgacgtcaccagaaaccactgcttgtgacgctaaatggcccgccctcttgtgcggtgctacggaagcaaamcggaagtgggcgcacagtggcttccgggcccggacgccatttccagcggttgctggttctgacgggttgtagtctgccaggacaatgagttatgactacc

SEQ ID NO: 335752 - DNA, 201 bp, Homo sapiens
atggcaactgttttacacagtgagtaaccaagttaatccaagtcattttgtactgccttcaaacacacacaaactctgggaactttcttcttgaacatgcyttctcatttttatttctttgctaaggtccttactatctctcctgtgctaatacaatagttcctcttttggtactatgttcttcactcttagggaagcact

SEQ ID NO: 335753 - DNA, 201 bp, Homo sapiens
aaatgtcacagattttagctaaaactagagtttcaaaaaagtgaagatattcaagaatgtttttattttaggtatgttccagaacaaaaagaacacagatsccagtttaagaggggtttcatgcaagggcatgtaaatagacaagaaaaagaagaaaaagaagcaatatataaagaacgttggccagattatgtaagggaa

SEQ ID NO: 335754 - DNA, 201 bp, Homo sapiens
tggccagttttgtgggggttttttaacctatagtaatgctttagctcagaaatagcattttaggtgttggtttttgtttgttttgttttcctaaagaagcrtgggagctgaggtaaattttgtcctttcgcctgtttctggttgggggtagtatttggtaattagttatatccagcctttaaatgttcttgtattctcttg

SEQ ID NO: 335755 - DNA, 201 bp, Homo sapiens
tactttttgagtgtcagatcatctcctgaacacttgatccatattaactttcttaatcctcactacagtactatgaggtaggttattatatccattttacrgataaggaaattaaggtacaaggaaattaaatgacttgtccaaagtcccatagctttctaaattacagagccaggatttgaatccaggcattctgactac

SEQ ID NO: 335756 - DNA, 201 bp, Homo sapiens
ccttgctggccaggctggtctcaaactcctgacctcatgatctgcctgcctcggcttcccaaagtgctgggattacaggcgtgagccaccatacccagccrattttttccatcttaataaagggtgtttattaaagctgactttatttttatgccactgaagttttttttttacattatatgtacctagttgaatgtaaac

SEQ ID NO: 335757 - DNA, 201 bp, Homo sapiens
  misc_feature (1)...(201): n = A,T,C or G
tatatacacaaagtaatgggggatctttctgaaatcaactgcaacaaaacaaggaaaagaaacatggttccagaggataagagcaaggcacagtagggttngatttctgttcctgtccccacattctagttgctattttgatgattcaaactgagaatttttgctaacactactaaaatctgttgaaaagtatcaaatagg

SEQ ID NO: 335758 - DNA, 201 bp, Homo sapiens
tatgctgatagtaggaagaaatgctaagtaggtaatttttctcttcttttttccaccatctgttggaatttgagtagacaggttaatgtggtctgtcagtrtatactagatatacttattggaaagttttacttgtaaagtattatttcttacaaattatgccattttctatttctaataccttattatcactgttctgtc

SEQ ID NO: 335759 - DNA, 201 bp, Homo sapiens
tctgtcgcctagcctagagtgcagtggagctatctccgctcacggcaacctccgccttccaggttgaagtgattctcccacctcagcctcccaagtaactrggattacaggtgtgtgccaccatgcccagctaatttttgtatttttagtagaaactagtttcaccgtgttggccaggctggtctcaaactcctgacctca

SEQ ID NO: 335760 - DNA, 201 bp, Homo sapiens
caaaattaattatttatttattaatttatttttgaaacagcatctcactctcttgcccaggctggagtgcagtggtgcgatctcggctcactgcaacctcyaccttccaggttcatgagattctcctgccctgcctcctgagtagctgggactgcaggcacctgccaccacgcccgcctaattttttgtatttttagtaga

SEQ ID NO: 335761 - DNA, 201 bp, Homo sapiens
ttcttatatttttaacaaaatatgtgtaaaatgtgggtcacttttggaatgtattattattattattattattatttttgagacggagtctcgctctgtcrcctaggctggagtgcagtggcgcgatctcggctcactgcaagctccgcctcccaggttcacgccattctcctgcctcagcctcccaggtagctgggacta

SEQ ID NO: 335762 - DNA, 201 bp, Homo sapiens
ggaactgcgaagaaggtaagtttattttgtctgaaggtgagaaatcagtggctaaataaaacaaaaagccagaggctgggggcatcttcttgaatctgtaygtacttaaaggagagcattgtgagtctcttattcgagctaaatattgtgctgatttgacttttaagcagtaattaccccagtaattctctccgatctgta

SEQ ID NO: 335763 - DNA, 201 bp, Homo sapiens
cctgcctcagcctcccaagtagctgggactacaggcgcccgccactacgcccggctaatttttttgtatttttagtagagacggggtttcaccgttttagycgggatggtctcgatctcctgacctcgtgatccgcccgcctcggcctcccaaagtgctgggattacaggcgtgagccaccgcgcccggcctcaatggagg

SEQ ID NO: 335764 - DNA, 201 bp, Homo sapiens
tgcctcagcctcccaagtagctgggactacaggcgcccgccactacgcccggctaatttttttgtatttttagtagagacggggtttcaccgttttagtcrggatggtctcgatctcctgacctcgtgatccgcccgcctcggcctcccaaagtgctgggattacaggcgtgagccaccgcgcccggcctcaatggaggta

SEQ ID NO: 335765 - DNA, 201 bp, Homo sapiens
taaaggagaagctatcagcaagtcattgagagtaaagtgtttgttggtgtttttttttttttgtttttttttttttttggtgtgtggaagctcttattacsttaagtttactaagacatttttatcttgtatggataatcagttttatcaaatatcttctgcttctgatgagattatggtatgactattttagttggttca

SEQ ID NO: 335766 - DNA, 201 bp, Homo sapiens
cttttttaagtttctgggacccttaatacaatgttgagcagaagtgatatgatagtgtgccttcttgtcttattcttcttaaaggagaagctatcagcaartcattgagagtaaagtgtttgttggtgtttttttttttttgtttttttttttttttggtgtgtggaagctcttattacgttaagtttactaagacatttt

SEQ ID NO: 335767 - DNA, 201 bp, Homo sapiens
aaatacatgattcataaaaaggaaaaaataattacgtacattagctattatgtggcatgtaagaaattgatattggctacttccctgcctagtattttctstgcagttctaaaaagtcattgatgactgtccctctttgtttcattttgttttgttttttttttaagagttcaacctggtcattgctatcatctgtataat

SEQ ID NO: 335768 - DNA, 201 bp, Homo sapiens
tgatccctgccaccctccagaccaccggggtcgtcctcccgtgacgtcaccagaaaccactgcttgtgacgctaaatggcccgccctcttgtgcggtgctmcggaagcaaaacggaagtgggcgcacagtggcttccgggcccggacgccatttccagcggttgctggttctgacgggttgtagtctgccaggacaatgag

SEQ ID NO: 335769 - DNA, 201 bp, Homo sapiens
ttttacttttattatccctggctaacttttaaactttttataatgaaacattttaaatatacaaaaaaactagagactttttttttttttttgaggtggastctcgctctgtttcccaggctggagtgcagtggcacgatctcagctcactgcaacctccgcctcccaggttcaagcagttccctgcctcagcctcccgag

SEQ ID NO: 335770 - DNA, 201 bp, Homo sapiens
agcatctcactctcttgcccaggctggagtgcagtggtgcgatctcggctcactgcaacctccaccttccaggttcatgagattctcctgccctgcctccygagtagctgggactgcaggcacctgccaccacgcccgcctaattttttgtatttttagtagagacagggttttactgtgtaagccaggatggtcttgatc

SEQ ID NO: 335771 - DNA, 201 bp, Homo sapiens
ttaaataacagtaccgaagtgatttttttattagtaattttgaaatagtaacaatctatttgtttaggttttgttttgattacctttctccgctaattccrggtgctacaagtagtaatgcttatctagaattcagtaaaactttgatattctggatattctattatggcaccatctgggttaatgatgaagagaaaatag

SEQ ID NO: 335772 - DNA, 201 bp, Homo sapiens
aataaatgttcttgtcatcagctttttaaaagtcctttaaaatacatcccagttaatactgaaaaccatgtaagattagttggggtaggtgttattattgktatttttaaatgagacttctagaactaacattgagtactttgctcaaatgtgtgcacatcatgggtagagcagtgatacctacttaggtattttgacctc

SEQ ID NO: 335773 - DNA, 201 bp, Homo sapiens
actctgggaggccaaggcaggtggatcacttgaggccaggagttcgagaccagcctggccaatgtggcaaaaccctgtctctactaaaaatacaaaaattygctgggcgtggtgacacaggcctgtaatcccagctacttgggaggccgagcatgagaatcacttgaacccaggaggcagatgctgcagtgatccgagatc

SEQ ID NO: 335774 - DNA, 201 bp, Homo sapiens
acaacaaaaaaataggatcacccaaagtgtacaaacgtattcatgttaaacagaattgttgcctattcattcagtttttattggtgtaatttgaaaagatwactcccaacttttgagcattctttaagaatttggggaaaatacttatcaatatgaaataaactaacagaacaaaatgttagcttgaacttggagcgctca

SEQ ID NO: 335775 - DNA, 201 bp, Homo sapiens
ggagtattttcaaatagtaattcatgtaaaaaaatacttctttgagaacctttgcaaatgagtcttcaggggatgattgctcaaaaacttgaatatcagcrgataacccacaaatcagattagttttgtctacattaggaaaaagtttaaagaattggtttcaccagtaacttcgttgagtttcctgagtaagagaaaaag

SEQ ID NO: 335776 - DNA, 201 bp, Homo sapiens
gtcaatctaggaaattgtttactaaacaaaatacagagtaatgagttaacatggaaaagtgagaactgtaggaatagcagatataggttatattctaactraacagatacatcaaaaaaccttaagaggacttttagtagagacattttatgtcctgacaactgaaattagccactcattttcacttcaaaaaaggaggta

SEQ ID NO: 335777 - DNA, 201 bp, Homo sapiens
tgatgatttgagatttaatttcacaaagctagtatattcacaggtataaaatttctgttttaataatgtattatgaatgtttggctccatcagatacaggygctttcctaattagagtgaacactacattctcagaggcaggataatgttatgatctacagtatttgcaggctcttgcaaaatgaaattgattagaaaacc

SEQ ID NO: 335778 - DNA, 201 bp, Homo sapiens
atttattcacttggcaaggccaaatgagatttatctttgcttcttccccttcatttcagcaaatctctgccttgttaatatatcccaatctaaccacttayctccagaatagttaccatagatcaagccactgtttgttttctgttcttgccttctaactagtcatctagcttccattcttgctctgcattgtctgtgctt

SEQ ID NO: 335779 - DNA, 201 bp, Homo sapiens
agttttgtaaatgaagggataagtttttgctttttgtttgtttgcattatcgccagtggtacttgattacctatcttctttctactttagtgacattgtcrggttgtggggcagtatttgtagaattctccatttaaagaggatttttttttttcactccaatctgatctcaagctagtagacagtggttggtacagctgc

SEQ ID NO: 335780 - DNA, 201 bp, Homo sapiens
gtgagccatggcgcctggctgaaaatgaatgcattctaatgatgcattcttgaacaaatgttctttcaacaaatatttattgaggacattatttttgtgasagtatcttaagcactgtattaattaataaaatagatataggctctacagagattgtggtgtgtttggagcgataaatagaatacagtattaaggtattag

SEQ ID NO: 335781 - DNA, 201 bp, Homo sapiens
attttgtgatgtattttatctgaagggacgagtacagtgttaatgatgactcttttatgcctatctgtaaggatcaggcttgttggaagaaggctcagctrtggacactatgagtttgatattgttatagggcatacaaatgaggatttgcaggagggagagggctgtgtagatctgatgcctagaaaaatctagactgga

SEQ ID NO: 335782 - DNA, 201 bp, Homo sapiens
tgctgggattactggtgtgagccatcgcgcccggcctacatctagtcttatcattgttcaaaaaatgatatcattcatggctctagttacatacataaaasagaaacttttaatatccctctgaaaactcactaaatatatagtacttaaaatgtttttcagtaatatagacaggttagcataatgccaggattcattaca

SEQ ID NO: 335783 - DNA, 201 bp, Homo sapiens
aaatgtttttatttagagtgtaaattacattttcaagggctaatcatacatgctcattgtaaaagattcagctgttcattccttccattgacagacttctytggggcacataccatgtaccagaattatatctggcagagacactgcaaaaagtataggatatggagagtgaataacctcttttcaaattaatagtaataa

SEQ ID NO: 335784 - DNA, 201 bp, Homo sapiens
atgctcattgtaaaagattcagctgttcattccttccattgacagacttctctggggcacataccatgtaccagaattatatctggcagagacactgcaaraagtataggatatggagagtgaataacctcttttcaaattaatagtaataaaaacaagatcctactacacaactgacttatttaatactttggtcatctt

SEQ ID NO: 335785 - DNA, 201 bp, Homo sapiens
aatctcataaaattagaataatcttttgtgctgttacgggcaggaagtgggcaatgtattgtgaaatgtcaatctaggaaattgtttactaaacaaaatayagagtaatgagttaacatggaaaagtgagaactgtaggaatagcagatataggttatattctaactgaacagatacatcaaaaaaccttaagaggacttt

SEQ ID NO: 335786 - DNA, 201 bp, Homo sapiens
tcatgtattcagttaaactgatgtttcaaatattaaacaaatttttctttttagagtaaacctaacttgccagcattcaatttgccattattttgttttgkgattttcatatgtaagtttatttagttttcttcagatgtccttgtaagatttagatatcaagctattctaggttcagaaaacaagttgagggttttacat

SEQ ID NO: 335787 - DNA, 201 bp, Homo sapiens
aaattagtaaacaaaaaaatctaacataccaaatcagaagtgcccagtcattagcaaaatggaaaaaaaggatcaccacaattcggaaggaaaggaaaagaaaaaaaaaagagtggaatgccatgtttcagtagaaaacacctttaaactgtttcataatatggaatagctaataagaatatgaattcagcaaaacatagg

SEQ ID NO: 335788 - DNA, 201 bp, Homo sapiens
agaacaatttttcagcagtcctagattttcatggacattcaggatatttgttctaaaggaaattatattctctttatgttttatttgaattaaaggttgcrgaaagagtagctgcagaaagggcagaatcttgtggcagtggtaatagtactggatatcaaattcgtctccagaggtaagaaatgttcacttcttatatac

SEQ ID NO: 335789 - DNA, 201 bp, Homo sapiens
gataagagttgcactgtacagagtaagggaagtattttgtgaaattacttgtatatgtgtgtactgggtcattagttttactgtggattgctataaaaaawaaacaattgaaatctattgctctagattttacagtattttacacattgctgtctgctttcatcagtctccttaccctagctcctgcttccctcttttttc

SEQ ID NO: 335790 - DNA, 201 bp, Homo sapiens
atatcttctgcttctgatgagattatggtatgactattttagttggttcatgtattcagttaaactgatgtttcaaatattaaacaaatttttctttttaragtaaacctaacttgccagcattcaatttgccattattttgttttgtgattttcatatgtaagtttatttagttttcttcagatgtccttgtaagattta

SEQ ID NO: 335791 - DNA, 201 bp, Homo sapiens
cttattttgtcaaaacagatacggtactgaagtttctactaagaacacaccatgctcagagaacaaacttgacatccaggaaaagaagttgataaatcaaraaaaaaaaatgtttagaatcaggaacagatcatatattgaccgagattctgagtatctcttgcaagaaaatgaaccagatggaactttagaccaaaaatt

SEQ ID NO: 335792 - DNA, 201 bp, Homo sapiens
gaagtgattctcccacctcagcctcccaagtaactgggattacaggtgtgtgccaccatgcccagctaatttttgtatttttagtagaaactagtttcacygtgttggccaggctggtctcaaactcctgacctcaagtgatttgcctgcctcagcatcccaaagtcctggtattacaggtgtgagccaccacgcctggct

SEQ ID NO: 335793 - DNA, 201 bp, Homo sapiens
ttttgtaaatcaagggctgtttatcagtattatgattgtcatagtaaaatgtataaactcttggtatgaatcacttaattattttaggtacttttttgttmtttattcttcagtggtatagtgtgcattaacattaaggaaaagaatattctgccatttttctaaaatgttgagtaattatacctgcaagaagaagattag

SEQ ID NO: 335794 - DNA, 201 bp, Homo sapiens
tttgagtcatcagcccaggtaggactaagttgtaatgctaatatattaatattatatgtatttaataatatttgtctcccccacttagattttaaggctargtggaattgcttattttctgagtagattaatggacccaccatcaaatgaggcagtgttactctccataagacacctgatggagctggtaaatttgttttc

SEQ ID NO: 335795 - DNA, 201 bp, Homo sapiens
ctgccttaggtatttgtccagtgttagtcatatcgtacttgatgaaatccatgaaagaaatctgcagtcagatgttttaatgactgttgttaaagaccttmtcaattttcgatctgacttgaaagtaatattgatgagtgcaacattgaatgcagaaaagttttcagaatattttggtgagtaaaatgtatagttattaca

SEQ ID NO: 335796 - DNA, 201 bp, Homo sapiens
ggaaactattgctgtagatgagtggattgtatttcagtctccagcaagaattgcccatcttgttaaggtgactgactttatgtgattatcttaaatctacrtgtaagtcagcatgtggtcatgtggttttgttctaactgttaaatagattaacatttcttgctctatttcagcagagcaaataattttgaaaaaatgatt

SEQ ID NO: 335797 - DNA, 201 bp, Homo sapiens
tgagtcatcagcccaggtaggactaagttgtaatgctaatatattaatattatatgtatttaataatatttgtctcccccacttagattttaaggctaggkggaattgcttattttctgagtagattaatggacccaccatcaaatgaggcagtgttactctccataagacacctgatggagctggtaaatttgttttctt

SEQ ID NO: 335798 - DNA, 201 bp, Homo sapiens
ttaattgggatagaatacagtgaagagaagataagagttgcactgtacagagtaagggaagtattttgtgaaattacttgtatatgtgtgtactgggtcaktagttttactgtggattgctataaaaaaaaaacaattgaaatctattgctctagattttacagtattttacacattgctgtctgctttcatcagtctcct

SEQ ID NO: 335799 - DNA, 201 bp, Homo sapiens
gtcacttaagctggagcgcagtggtgataacacggctcagtgcagcctcaacctctagggttcaagtgatcctcctgcctccgccccccaagtaggtggtactataggcatgtgctaccatacctggctaatatttgtattttttgtagagatggggttttgccatgttgcccatgctggtctcgaactactgggctcaag

SEQ ID NO: 335800 - DNA, 201 bp, Homo sapiens
tagcatcctattgtgacctccatcaccaccacatgtacacaaaaatgtacagtaacacagagcagcttccttttaatgattcatcttactgctgctctctsaggatccacccttgaatttgaaaacagttctttgattctttcttcctttttgtctctccccaacttccaccaaatagtcattaagtcctgtggtttcttt

SEQ ID NO: 335801 - DNA, 201 bp, Homo sapiens
tcacaagaatgaaatagataaaatatttatagaattgattacaagcttcaaataatctccatcatttgattctttaaattttactacttggtttatttaayttttttttttacttctgtcattttttgagtatgtaaatacactgaatggtggtgaaagtgggaaaccttgtttttttttttaagctgcatttctgtagtc

SEQ ID NO: 335802 - DNA, 201 bp, Homo sapiens
tgtacgaaaattttaacaattaattaggtctaggaaggggggtattgggctagaggacacctgtggataactttcttttatatgtatttgttgaacatatrttacttagcctttattttcttcagtatcaaataatttttgcatatgctttcttatgttgacaaggatgcttttttctttgcacaaactagagagctgtag

SEQ ID NO: 335803 - DNA, 201 bp, Homo sapiens
aagccatgagataataaaaatactttcggattctagccaatttaccctgtgatgtatcctaaataccatgattataatttgattacatatcttctgtgaaratttaaaactttttttaaatttcagcatttcagagaaaagctgccttcgtatggaatgcaaaaggtaaagtgcttttttccactatttaatttgatttgc

SEQ ID NO: 335804 - DNA, 201 bp, Homo sapiens
tttcaccatgttggccaggatggtctcaatctcctgacctcatgatccgcctacctcagcctcccaaagtgctgggattataggcatgagccaccatgccmggcctaagtggggaatttttaaaaggtaggttttcaagttaaattgttttatacatgaaaataacccctaacatccctttgaggtagtaagatgacttcg

SEQ ID NO: 335805 - DNA, 201 bp, Homo sapiens
attcaaactgagaatttttgctaacactactaaaatctgttgaaaagtatcaaataggatagatatctgtaagttttctggtttagtatagtgaaacaccrcaggcaagcatttgtaaaacagaagaaaacagtaaagagggcatatgccatcacatttcagactacactgaactgggtattcgaagccagtgagaataga

SEQ ID NO: 335806 - DNA, 201 bp, Homo sapiens
cttttagttcaggttgactatacgaaatccagaatgctcccaaatccagaactgtttgagtagcaaaatggaaatgctcactagagcatttcacattttgrattttcagatttgggatgtttaacaagggcaagtataatgcaaatattccaaaatagaaaccggaaacacttctggtcctgatcattttggctaaggaat

SEQ ID NO: 335807 - DNA, 201 bp, Homo sapiens
aagtgatatgatagtgtgccttcttgtcttattcttcttaaaggagaagctatcagcaagtcattgagagtaaagtgtttgttggtgtttttttttttttktttttttttttttttggtgtgtggaagctcttattacgttaagtttactaagacatttttatcttgtatggataatcagttttatcaaatatcttctgct

SEQ ID NO: 335808 - DNA, 201 bp, Homo sapiens
ttccggttgtggaatatcttttggaagatgtaattgaaaaaataaggtaagtaaacattaggaaataaaaaacattaaaaagtactaatatatcacttttytcatgtcaaactttagtctcagaaacccatcattgactatttccttgtaaaacatttttctgggaattagccacacttggctgcacattaaaattgcctg

SEQ ID NO: 335809 - DNA, 201 bp, Homo sapiens
aaataaacagctcttaagagaggcacacactgttttagatacctcagattttaatatctatttttttaactcatttagaaatctgaagaacaatttttcarcagtcctagattttcatggacattcaggatatttgttctaaaggaaattatattctctttatgttttatttgaattaaaggttgcggaaagagtagctgc

SEQ ID NO: 335810 - DNA, 201 bp, Homo sapiens
tgcccagtaaacccgaattgcagataccccaggcatgactttgtttttttgtgtaaggatgcaaaatttgggatgtatttatactagaaaagctgcttgtygtttatctgaaattcagagttatcaggtgttctgtattttacctccatcctgggggaggcgtcctcctcctggctctgcagatgagggagccgaggctca

SEQ ID NO: 335811 - DNA, 201 bp, Homo sapiens
gtgaaatgggtgcccacctctcagagtcacccagagggttccctggagagtgctgaagtcatccctgtagggaaaggctagccaaaaatggcagacatgcmtgggctgctcatttggaagtaactggaagtttctggagagaggcggcagagtggcctcttctcagtccttttccactacattggctactcctgatgtcca

SEQ ID NO: 335812 - DNA, 201 bp, Homo sapiens
ggcatccgtgagtctcccagcctttgctggggcgaggtggggagcaccgtcaacacttagctaggccaaggattcttgctgttcttacaaagattcagccrttttgttaaatacatgctccccagatggctgcaaacccttggttagtttcaagagtcctaaaaatgtcaactctgaccatttttgccgatgttcctgttt

SEQ ID NO: 335813 - DNA, 201 bp, Homo sapiens
caggatgcccagtaaacccgaattgcagataccccaggcatgactttgtttttttgtgtaaggatgcaaaatttgggatgtatttatactagaaaagctgsttgttgtttatctgaaattcagagttatcaggtgttctgtattttacctccatcctgggggaggcgtcctcctcctggctctgcagatgagggagccgag

SEQ ID NO: 335814 - DNA, 201 bp, Homo sapiens
gaaggcagggctcggggctcattcatctttatgaaaaggtgggtcaggtagagtagggctgccagaggttgcgaatgaaaacaggatgcccagtaaacccraattgcagataccccaggcatgactttgtttttttgtgtaaggatgcaaaatttgggatgtatttatactagaaaagctgcttgttgtttatctgaaatt

SEQ ID NO: 335815 - DNA, 201 bp, Homo sapiens
cgggaggaagctccctggaaaccagcccccgcctcttccaggggtggttggggggaccctccaggcggccaccatctgtgcctccagccaccagtttctcyccacacactacaacctgcacaacctctacggcctgaccgaagccatcgcctcccacaggtgagggccacgtcccgccccactgggctctgccctcacagc

SEQ ID NO: 335816 - DNA, 201 bp, Homo sapiens
ggctctgctgcagcagcctgaggaccagcctgactctgccctcccagaaatcctgcagtttaacctgctgggggtgcctctggtcggggccgacgtctgcrgcttcctgggcaacacctcagaggagctgtgtgtgcgctggacccagctgggggccttctaccccttcatgcggaaccacaacagcctgctcagtctggt

SEQ ID NO: 335817 - DNA, 201 bp, Homo sapiens
ccttcatgcggaaccacaacagcctgctcagtctggtagggtgggggtggcggcatggcaggtgggcgatcccacccacccaagactctcccctgggaatyccacccctgctggagaagcaccccatgctgggtggctgagaagtgcagctctcccgaggcggggactccaggggaccgcggccccagcacccaagtgctt

SEQ ID NO: 335818 - DNA, 201 bp, Homo sapiens; identical to SEQ ID NO: 70564

SEQ ID NO: 335819 - DNA, 201 bp, Homo sapiens
tggaggtcggggatgaggcagcaggtaggacagtgacctcggtgacgcgaaggaccccggccacctctaggttctcctcgtccgcccgttgttcagcgagsgaggctctgcgcgtgccgcagctgacggggaaactgaggcacggagcgggtgagacacctgacgtctgccccgcgctgccggcggtaacatcccagaagc

SEQ ID NO: 335820 - DNA, 201 bp, Homo sapiens
atgctgtacacacgcatgatgtcatccccagcctcatcctctcactgtctcagttttccccgtggctggcgccagggctctgggccaccctcaccttgacrggtttccctcttcccaggatcctgccatcagcagctcgggccctgccgggagctacaggccctacgacgagggtctgcggaggggggttttcatcaccaa

SEQ ID NO: 335821 - DNA, 201 bp, Homo sapiens
cagatgttgggggcaggggtggcctctctggaagccagctgtgcaggagtggggggtggggaggccactctggaaaccagctgtgcagatgcaggggacasgggtggcctctctgagctgacctctgagtagagagacccaagagaagtttctcaaagcatcttatcaagctaggtatggtggttcatgtctgcaattcca

SEQ ID NO: 335822 - DNA, 201 bp, Homo sapiens
cagctgtgcagatgcaggggacaggggtggcctctctgagctgacctctgagtagagagacccaagagaagtttctcaaagcatcttatcaagctaggtayggtggttcatgtctgcaattccagcactttgggaggccaaggcgagagggtcacttgagcccaggagttcaagaccatcctgggcaacatagcaagaccc

SEQ ID NO: 335823 - DNA, 201 bp, Homo sapiens
tgattttgccactgcacttcagccttgctgaagaccccgtctcaaaaaacaaacaacaaacaggcatcttatcagatctcggtcttgaaagcactcagcgyagtcttgcccaggggagggtgggtgtggtgtgagcccgtcctgcgaaattagctgtgctgtgttaacagaggacgcgtcttcctgtggaccggatttatc

SEQ ID NO: 335824 - DNA, 201 bp, Homo sapiens
gctgaagaccccgtctcaaaaaacaaacaacaaacaggcatcttatcagatctcggtcttgaaagcactcagcgcagtcttgcccaggggagggtgggtgyggtgtgagcccgtcctgcgaaattagctgtgctgtgttaacagaggacgcgtcttcctgtggaccggatttatctgcggctttcatttctcggaggtgct

SEQ ID NO: 335825 - DNA, 201 bp, Homo sapiens
ctaccctggggacttaatcaaatcagagactcccttgtctggcctgggagacttagcaccctcatctctgagaagcagatgggccagcggggaaaggggcgggggggggatccccaggagaaaggctcaggctgggagactcagccaagcagtgcagacagggtgggtgcagaggcacaggccctgccggaggagacgccg

SEQ ID NO: 335826 - DNA, 201 bp, Homo sapiens
ttcgcgcctgctgctctgccccaacgcgaccgctgcccggctgcccagagggctggatgcctgccggtccccgagcaagcctgggaactcaggaaaattcmcaggacttgggagattctaaatcttaagtgcaattatttttaataaaaggggcatttggaatcagcttctgcgggtctctctgggattcagggcagggag

SEQ ID NO: 335827 - DNA, 201 bp, Homo sapiens
ggggcgctacgtgttcctgttccgctccaagcagtccctagtgctggagcgccagcgcctggacaagcgactggctctcatcgccaccatcctggaccgcrtgcgggacgagtacccccagttccaggaggccctgcacaaggtcagccagatgatcgccaacaagctcgagtcaccagggccctcctagggagcagcctg

SEQ ID NO: 335828 - DNA, 201 bp, Homo sapiens; identical to SEQ ID NO: 70569

SEQ ID NO: 335829 - DNA, 201 bp, Homo sapiens
ctgagctcctgcttcgcgcctgctgctctgccccaacgcgaccgctgcccggctgcccagagggctggatgcctgccggtccccgagcaagcctgggaacycaggaaaattcacaggacttgggagattctaaatcttaagtgcaattatttttaataaaaggggcatttggaatcagcttctgcgggtctctctgggatt

SEQ ID NO: 335830 - DNA, 201 bp, Homo sapiens; identical to SEQ ID NO: 70572

SEQ ID NO: 335831 - DNA, 201 bp, Homo sapiens; identical to SEQ ID NO: 70573

SEQ ID NO: 335832 - DNA, 201 bp, Homo sapiens
ccgctgacacccagtggaccaagccgcacctttatgcagaagtggggctcccagccaggcgtggtcactcctgaaatcccagcacttcggaaggccaaggkgggtggatcacttgagctcaggagttcgagaccagcctgggtaacatggcaaaatcccgtctctacaaaaatacagaaaattagctgggtgcggtggtgt

SEQ ID NO: 335833 - DNA, 201 bp, Homo sapiens; identical to SEQ ID NO: 70578

SEQ ID NO: 335834 - DNA, 201 bp, Homo sapiens
gatctcgggctgctccatttgtgctctctcttttccaggtcctggacatctgtgtctcgctgttgatgggagagcagtttctcgtcagctggtgttagccrggcggagtgtgttagtctctccagagggaggctggttccccagggaagcagagcctgtgtgcgggcagcagctgtgtgcgggcctgggggttgcatgtgt

SEQ ID NO: 335835 - DNA, 201 bp, Homo sapiens
agtgagggagctggcctgcagctgcagaaggtgactgtcctgggcgtggccacggcgccccagcaggtcctctccaacggtgtccctgtctccaacttcayctacagccccgacaccaaggcaagagggcccagagtggcacagggatcgcgtcccccagccgtggtgcagggggcagaaggtgctgggcgtcctggtgac

SEQ ID NO: 335836 - DNA, 201 bp, Homo sapiens
ccagatgagcagactgaggcctgcttgcagaacctggccaagtcccacggccatcacaggctgtgcctgtgctgagctggcatacccaggcctctcaggcwctgtccccactcagtagccaggagggtccctacctacagtgagccctgagtctgcgcctgaagtcacagttcagcccgtctgtgccaggcctcctaggcc

SEQ ID NO: 335837 - DNA, 201 bp, Homo sapiens
gatgacatcacgtgtccttccctttccagggccctggcctcacaaccacagagtcccgccagcagcccatggccctggctgtggccctgaccaagggtggrgaggcccgaggggagctgttctgggacgatggagagagcctggaagtgctggagcgaggggcctacacacaggtcatcttcctggccaggaatgtgagtc

SEQ ID NO: 335838 - DNA, 201 bp, Homo sapiens
tcagaggagctgtgtgtgcgctggacccagctgggggccttctaccccttcatgcggaaccacaacagcctgctcagtctggtagggtgggggtggcggcrtggcaggtgggcgatcccacccacccaagactctcccctgggaatcccacccctgctggagaagcaccccatgctgggtggctgagaagtgcagctctcc

SEQ ID NO: 335839 - DNA, 201 bp, Homo sapiens
tgctggccacggccgatacgccggccactggacgggggacgtgtggagctcctgggagcagctcgcctcctccgtgccaggtgagctcctaccaggagggrctgctcagcagagtagagccgggggcctctatgggaggcttgccggggccccccacccacttagcaggtggggctctgggtcacttggcctgagctggct

SEQ ID NO: 335840 - DNA, 201 bp, Homo sapiens
ggtaacgccagccccacagaggcgtggggagcggctgcaggtgcacctccagggccagcctgaagaggcagcgacctgcacaggggctcctgggaggtggrgggcagggagggcaccttggagcctgccgggaggaagctccctggaaaccagcccccgcctcttccaggggtggttggggggaccctccaggcggccacc

SEQ ID NO: 335841 - DNA, 201 bp, Homo sapiens
tgtcctacaaggttggggcctctgcagggcctcagggaggaggaaaagcggaggcccagaccacccggggcccgctggcggcccgagtgctctccccaccygctgcctgcaccccagcctgaagctggagcgctccttcccacttcatgcctggggcttggagaggaaggaccctggatgctgacaggagtctgcatcagc

SEQ ID NO: 335842 - DNA, 201 bp, Homo sapiens
ccagccccatcccattcatcacccgtatgcctgtgtgcccatcccccttgcaggttccccaaggactctagcacctggactgtggaccaccagctcctgtrgggggaggccctgctcatcaccccagtgctccaggccgggaaggccgaagtgactggctacttccccttgggcacatggtacgacctgcagacggtgagt

SEQ ID NO: 335843 - DNA, 201 bp, Homo sapiens
ctgtatgcaaatgccaccatttctttatctgtcctttatggatatcagaattgtttttgatttttttgtttgtttgtttaaagacagggtcttggctgcgygtggtggctcacgcctgtaatcccagcactttgggaggctgaggcaggcagatcacctgaggtcaggagttcacggctagcctggccaacatggggaaac

SEQ ID NO: 335844 - DNA, 201 bp, Homo sapiens
ggctgcagggagcccagatggggcagccctggtgcttcttcccacccagctaccccagctacaagctggagaacctgagctcctctgaaatgggctacacrgccaccctgacccgtaccacccccaccttcttccccaaggacatcctgaccctgcggctggacgtgatgatggagactgagaaccgcctccacttcacgg

SEQ ID NO: 335845 - DNA, 201 bp, Homo sapiens
aggcctgtaggagctgtccaggccatctccaaccatgggagtgaggcacccgccctgctcccaccggctcctggccgtctgcgccctcgtgtccttggcarccgctgcactcctggggcacatcctactccatgatttcctgctggttccccgagagctgagtggctcctccccagtcctggaggagactcacccagctca

SEQ ID NO: 335846 - DNA, 201 bp, Homo sapiens
ccttggcagcctcccacccccacctgcagctccccgtgagccagccatccacagcgaggggcagtgggtgacgctgccggcccccctggacaccatcaacrtccacctccgggctgggtacatcatccccctgcaggtacctgggccaggcggctatggtgggggtgtggacagcacactgcagagctgggggaggcacag

SEQ ID NO: 335847 - DNA, 201 bp, Homo sapiens
acgtggagccccgggagatggagagcgtggttcctgaggacagcatgggggcctcggcacggcccagaatcctcaaagcaacatctccctccaggtgccartagaggcccttggcagcctcccacccccacctgcagctccccgtgagccagccatccacagcgaggggcagtgggtgacgctgccggcccccctggacac

SEQ ID NO: 335848 - DNA, 201 bp, Homo sapiens
cagccccatcccattcatcacccgtatgcctgtgtgcccatcccccttgcaggttccccaaggactctagcacctggactgtggaccaccagctcctgtgsggggaggccctgctcatcaccccagtgctccaggccgggaaggccgaagtgactggctacttccccttgggcacatggtacgacctgcagacggtgagtc

SEQ ID NO: 335849 - DNA, 201 bp, Homo sapiens
acagcttcagcgagccggcccagcaggccatgaggaaggccctcaccctgcgctacgcactcctcccccacctctacacactgttccaccaggcccacgtygcgggggagaccgtggcccggcccctcttcctggagtgagtgacctaggcaggggcggtggcccatgtgtgccctgggggaggggcacgtaactcccagg

SEQ ID NO: 335850 - DNA, 201 bp, Homo sapiens
ccctgcagccccaggagccgtacagcttcagcgagccggcccagcaggccatgaggaaggccctcaccctgcgctacgcactcctcccccacctctacacrctgttccaccaggcccacgtcgcgggggagaccgtggcccggcccctcttcctggagtgagtgacctaggcaggggcggtggcccatgtgtgccctgggg

SEQ ID NO: 335851 - DNA, 201 bp, Homo sapiens
ctctcccgaggcggggactccaggggaccgcggccccagcacccaagtgcttcctttgcccccgcctgccctgcagccccaggagccgtacagcttcagcragccggcccagcaggccatgaggaaggccctcaccctgcgctacgcactcctcccccacctctacacactgttccaccaggcccacgtcgcgggggagac

SEQ ID NO: 335852 - DNA, 201 bp, Homo sapiens
ggctctgggtcacttggcctgagctggctctgctgcagcagcctgaggaccagcctgactctgccctcccagaaatcctgcagtttaacctgctgggggtrcctctggtcggggccgacgtctgcggcttcctgggcaacacctcagaggagctgtgtgtgcgctggacccagctgggggccttctaccccttcatgcgga

SEQ ID NO: 335853 - DNA, 201 bp, Homo sapiens
gcctcttccaggggtggttggggggaccctccaggcggccaccatctgtgcctccagccaccagtttctctccacacactacaacctgcacaacctctacrgcctgaccgaagccatcgcctcccacaggtgagggccacgtcccgccccactgggctctgccctcacagcctgtcctacaaggttggggcctctgcaggg

SEQ ID NO: 335854 - DNA, 201 bp, Homo sapiens
aaggcctctggggactaccacaccctcctcactctgggcagagtcacctaccagcagcgcttctcttgcaggacatgaacgagccttccaacttcatcagrggctctgaggacggctgccccaacaatgagctggagaacccaccctacgtgcctggtcagctcgccccccacctaccctggggacttaatcaaatcagag

SEQ ID NO: 335855 - DNA, 201 bp, Homo sapiens
ggctttcctttccccttttgatcgacgcagtgctcagtcctggccgggacccgagccacctctcctgctcctgcaggacgcacatggctgggtctgaatcyctggggtgaggagcaccgtggcctgagagggggcccctgggccagctctgaaatctgaatgtctcaatcacaaagacccccttaggccaggccaggggtg

SEQ ID NO: 335856 - DNA, 201 bp, Homo sapiens
aggctttcctttccccttttgatcgacgcagtgctcagtcctggccgggacccgagccacctctcctgctcctgcaggacgcacatggctgggtctgaatmcctggggtgaggagcaccgtggcctgagagggggcccctgggccagctctgaaatctgaatgtctcaatcacaaagacccccttaggccaggccaggggt

SEQ ID NO: 335857 - DNA, 201 bp, Homo sapiens
agtcctcccggtctttatctgagttcagcttagagatgaacggggagccgccctcctgtgctgggcttggggctggaggctgcatcttcccgtttctaggstttcctttccccttttgatcgacgcagtgctcagtcctggccgggacccgagccacctctcctgctcctgcaggacgcacatggctgggtctgaatccct

SEQ ID NO: 335858 - DNA, 201 bp, Homo sapiens
tcaccccagtgctccaggccgggaaggccgaagtgactggctacttccccttgggcacatggtacgacctgcagacggtgagtctggggaccctaaacccyggggagacgggagaccagagcagccctcccacctgccccctccacccagttggtgtgaccaggtggcggaaagaggaacgtatgtgttgagtcccggcca

SEQ ID NO: 335859 - DNA, 201 bp, Homo sapiens
cccacccgtggggagaggtcaggcccaactcgaatgcagcacgggcaagtggatttctagccagggagcagggtgggctcagaggcaggaattaccaagargaagcatgggggtcagggggattctggctgaactgacccagcaggattcttgctgaaggcaggccagggtgaccagacatcgcctgaggggtggtggagg

SEQ ID NO: 335860 - DNA, 201 bp, Homo sapiens
gcagcggagacctacccacccgtggggagaggtcaggcccaactcgaatgcagcacgggcaagtggatttctagccagggagcagggtgggctcagaggcrggaattaccaagaagaagcatgggggtcagggggattctggctgaactgacccagcaggattcttgctgaaggcaggccagggtgaccagacatcgcctg

SEQ ID NO: 335861 - DNA, 201 bp, Homo sapiens
tgcagcggagacctacccacccgtggggagaggtcaggcccaactcgaatgcagcacgggcaagtggatttctagccagggagcagggtgggctcagaggyaggaattaccaagaagaagcatgggggtcagggggattctggctgaactgacccagcaggattcttgctgaaggcaggccagggtgaccagacatcgcct

SEQ ID NO: 335862 - DNA, 201 bp, Homo sapiens
agggccacgtcccgccccactgggctctgccctcacagcctgtcctacaaggttggggcctctgcagggcctcagggaggaggaaaagcggaggcccagascacccggggcccgctggcggcccgagtgctctccccacccgctgcctgcaccccagcctgaagctggagcgctccttcccacttcatgcctggggcttgg

SEQ ID NO: 335863 - DNA, 201 bp, Homo sapiens
accatctgtgcctccagccaccagtttctctccacacactacaacctgcacaacctctacggcctgaccgaagccatcgcctcccacaggtgagggccacrtcccgccccactgggctctgccctcacagcctgtcctacaaggttggggcctctgcagggcctcagggaggaggaaaagcggaggcccagaccacccggg

SEQ ID NO: 335864 - DNA, 201 bp, Homo sapiens; identical to SEQ ID NO: 70567

SEQ ID NO: 335865 - DNA, 201 bp, Homo sapiens
ccgggtaacgccagccccacagaggcgtggggagcggctgcaggtgcacctccagggccagcctgaagaggcagcgacctgcacaggggctcctgggaggkggggggcagggagggcaccttggagcctgccgggaggaagctccctggaaaccagcccccgcctcttccaggggtggttggggggaccctccaggcggcc

SEQ ID NO: 335866 - DNA, 201 bp, Homo sapiens
gtcccgcaggctgaacacgacggtggcgcccctgttctttgcggaccagttccttcagctgtccacctcgctgccctcgcagtatatcacaggcctcgccragcacctcagtcccctgatgctcagcaccagctggaccaggatcaccctgtggaaccgggaccttgcgcccacggtacagcagcgggcggcgggcggcgg

SEQ ID NO: 335867 - DNA, 201 bp, Homo sapiens
ctggcgccagggctctgggccaccctcaccttgacaggtttccctcttcccaggatcctgccatcagcagctcgggccctgccgggagctacaggccctaygacgagggtctgcggaggggggttttcatcaccaacgagaccggccagccgctgattgggaaggtagggcgagggtccaggggacgggggttagaaagca

SEQ ID NO: 335868 - DNA, 201 bp, Homo sapiens
cggtgcccagtggctccttctctgtgcagcgtcatcctcgtgcctgtgtggtcgccgaggatgttttctgagggtctttgtgatatcgagggaatatcaaraagtttgcaggcttggccccagctgtccagggaggtcgggtttgagggtccccagaaatggccgggtgctactcagggttctgtcagatgtaggttactt

SEQ ID NO: 335869 - DNA, 201 bp, Homo sapiens
agcgcaggtgctgaagcgccgtctcctgcatgtcccagcccggtgcgaacctctacgggtctcaccctttctacctggcgctggaggacggcgggtcggcwcacggggtgttcctgctaaacagcaatgccatgggtaagctgcccaccgcccagcgcccgggccggggtctcctccgtgctgcctgccctggagactgga

SEQ ID NO: 335870 - DNA, 201 bp, Homo sapiens
tcccagcccggtgcgaacctctacgggtctcaccctttctacctggcgctggaggacggcgggtcggcacacggggtgttcctgctaaacagcaatgccaygggtaagctgcccaccgcccagcgcccgggccggggtctcctccgtgctgcctgccctggagactggaggtccgcatgaggggccctgggcacggtgctg

SEQ ID NO: 335871 - DNA, 201 bp, Homo sapiens
tctagatcaaagatccagctaacaggcgctacgaggtgcccttggagaccccgcatgtccacagccgggcaccgtccccactctacagcgtggagttctcygaggagcccttcggggtgatcgtgcgccggcagctggacggccgcgtgctgtgagttctgggctctgtgccagcatgatggggagggcgacgcgcatttc

SEQ ID NO: 335872 - DNA, 201 bp, Homo sapiens
tggtgagttggggtggtggcaggggaggcaaggggctggccgggacgcgtctcctcaggccccagcagacggtcccgtgttgtggctgcaggacgtccagyggaacgacctggactacatggactcccggagggacttcacgttcaacaaggatggcttccgggacttcccggccatggtgcaggagctgcaccagggcgg

SEQ ID NO: 335873 - DNA, 201 bp, Homo sapiens
tgccatcagcagctcgggccctgccgggagctacaggccctacgacgagggtctgcggaggggggttttcatcaccaacgagaccggccagccgctgattrggaaggtagggcgagggtccaggggacgggggttagaaagcagaggcctccagccagggggagccggcagctgctcaggaagacggtgggatttgaggag

SEQ ID NO: 335874 - DNA, 201 bp, Homo sapiens; identical to SEQ ID NO: 70585

SEQ ID NO: 335875 - DNA, 201 bp, Homo sapiens
gtgaggctgcccctctgctcaggctgaggctcagtggggcttccatgcaggccctgggtggggccgggtctccccactgcagcctctcgttgtccaggtayggcccgggtccactgccttccccgacttcaccaaccccacagccctggcctggtgggaggacatggtggctgagttccatgaccaggtgcccttcgacgg

SEQ ID NO: 335876 - DNA, 201 bp, Homo sapiens
attgatgggtgtgagaaaaaccctacacatttgatgtcagaagtgtgggtaaaatgtttcaccctccagcccagagagccctaatttaccagtggcccacrgtggaacaccacgtccggccgggggcagagcgttcccagccaagccttctgtaacatgacatgacaggtcagactccctcgggccctgagttcacttctt

SEQ ID NO: 335877 - DNA, 201 bp, Homo sapiens
gtgtggccccctcctgagcatccccaaggcctctggggactaccacaccctcctcactctgggcagagtcacctaccagcagcgcttctcttgcaggacaygaacgagccttccaacttcatcagaggctctgaggacggctgccccaacaatgagctggagaacccaccctacgtgcctggtcagctcgccccccaccta

SEQ ID NO: 335878 - DNA, 201 bp, Homo sapiens
agtgtggccccctcctgagcatccccaaggcctctggggactaccacaccctcctcactctgggcagagtcacctaccagcagcgcttctcttgcaggacrtgaacgagccttccaacttcatcagaggctctgaggacggctgccccaacaatgagctggagaacccaccctacgtgcctggtcagctcgccccccacct

SEQ ID NO: 335879 - DNA, 201 bp, Homo sapiens
gccccctcctgagcatccccaaggcctctggggactaccacaccctcctcactctgggcagagtcacctaccagcagcgcttctcttgcaggacatgaacragccttccaacttcatcagaggctctgaggacggctgccccaacaatgagctggagaacccaccctacgtgcctggtcagctcgccccccacctaccctg

SEQ ID NO: 335880 - DNA, 201 bp, Homo sapiens
tcccctgatgctcagcaccagctggaccaggatcaccctgtggaaccgggaccttgcgcccacggtacagcagcgggcggcgggcggcgggcgggggcacygagctggggagcgcaggtgctgaagcgccgtctcctgcatgtcccagcccggtgcgaacctctacgggtctcaccctttctacctggcgctggaggacgg

SEQ ID NO: 335881 - DNA, 201 bp, Homo sapiens
ggccctgtgggccttatgcctgctcttcctgatctggtggaggctcagagaggagctaggacaagggatggtgcccctataccaccccacccccacatacktgcctgcagaaggccacatgaccaggattatggtgggtgagggccagagggaaggcccaggtgagagggtggaatgtgaacaggctggttatttgcgtgc

SEQ ID NO: 335882 - DNA, 201 bp, Homo sapiens; identical to SEQ ID NO: 70600

SEQ ID NO: 335883 - DNA, 201 bp, Homo sapiens
agggttcccgagtgaccccgctccacacagccctcacggtgtcccccaccaccccagggcgctggtgaaggctcgggggacacgcccatttgtgatctccygctcgacctttgctggccacggccgatacgccggccactggacgggggacgtgtggagctcctgggagcagctcgcctcctccgtgccaggtgagctcct

SEQ ID NO: 335884 - DNA, 201 bp, Homo sapiens
tacgtgcctgcagaaggccacatgaccaggattatggtgggtgagggccagagggaaggcccaggtgagagggtggaatgtgaacaggctggttatttgcrtgccagggacaagagagaaaaaagctcagtattagcagagaagacggacttctgcggtggcacctacagctgttcccttggcctcccaaacaacccaggt

SEQ ID NO: 335885 - DNA, 201 bp, Homo sapiens
cacttggcctgagctggctctgctgcagcagcctgaggaccagcctgactctgccctcccagaaatcctgcagtttaacctgctgggggtgcctctggtcrgggccgacgtctgcggcttcctgggcaacacctcagaggagctgtgtgtgcgctggacccagctgggggccttctaccccttcatgcggaaccacaacag

SEQ ID NO: 335886 - DNA, 201 bp, Homo sapiens
tcacgtgtccttccctttccagggccctggcctcacaaccacagagtcccgccagcagcccatggccctggctgtggccctgaccaagggtggggaggccygaggggagctgttctgggacgatggagagagcctggaagtgctggagcgaggggcctacacacaggtcatcttcctggccaggaatgtgagtcctggggc

SEQ ID NO: 335887 - DNA, 201 bp, Homo sapiens
gcagcgcttctcttgcaggacatgaacgagccttccaacttcatcagaggctctgaggacggctgccccaacaatgagctggagaacccaccctacgtgcytggtcagctcgccccccacctaccctggggacttaatcaaatcagagactcccttgtctggcctgggagacttagcaccctcatctctgagaagcagatg

SEQ ID NO: 335888 - DNA, 201 bp, Homo sapiens
ccagcaggccatgaggaaggccctcaccctgcgctacgcactcctcccccacctctacacactgttccaccaggcccacgtcgcgggggagaccgtggccyggcccctcttcctggagtgagtgacctaggcaggggcggtggcccatgtgtgccctgggggaggggcacgtaactcccaggcagccctgtcctgctgtgg

SEQ ID NO: 335889 - DNA, 201 bp, Homo sapiens
gtctcactgctgctgggatctcgggctgctccatttgtgctctctcttttccaggtcctggacatctgtgtctcgctgttgatgggagagcagtttctcgwcagctggtgttagccgggcggagtgtgttagtctctccagagggaggctggttccccagggaagcagagcctgtgtgcgggcagcagctgtgtgcgggcc

SEQ ID NO: 335890 - DNA, 201 bp, Homo sapiens
ggacatggtggctgagttccatgaccaggtgcccttcgacggcatgtggattgtaagtgtggccccctcctgagcatccccaaggcctctggggactaccmcaccctcctcactctgggcagagtcacctaccagcagcgcttctcttgcaggacatgaacgagccttccaacttcatcagaggctctgaggacggctgcc

SEQ ID NO: 335891 - DNA, 201 bp, Homo sapiens
agaggctctgaggacggctgccccaacaatgagctggagaacccaccctacgtgcctggtcagctcgccccccacctaccctggggacttaatcaaatcakagactcccttgtctggcctgggagacttagcaccctcatctctgagaagcagatgggccagcggggaaaggggcgggggggggatccccaggagaaaggc

SEQ ID NO: 335892 - DNA, 201 bp, Homo sapiens
caccagggcccgggggtgctctctgggtgctctcaggctcgtgtggccccttgggtgtgagcaagcctggctggcctctgtcccgcaggctgaacacgacrgtggcgcccctgttctttgcggaccagttccttcagctgtccacctcgctgccctcgcagtatatcacaggcctcgccgagcacctcagtcccctgatgc

SEQ ID NO: 335893 - DNA, 201 bp, Homo sapiens
caggcagcaaacagtagtagcccttaagagcaggagtggaaacacagacttttttctttctcacatttttttaattataaaagaaaagtgattactgtagracacttgggaaactctagaggtttaaagaaaaggtaaaggtaaagcttccattccggcgcgcccctcatcagccagctggtcctgactcgcccggccctg

SEQ ID NO: 335894 - DNA, 201 bp, Homo sapiens
gggttcccgagtgaccccgctccacacagccctcacggtgtcccccaccaccccagggcgctggtgaaggctcgggggacacgcccatttgtgatctcccrctcgacctttgctggccacggccgatacgccggccactggacgggggacgtgtggagctcctgggagcagctcgcctcctccgtgccaggtgagctccta

SEQ ID NO: 335895 - DNA, 201 bp, Homo sapiens
ctgagctggctctgctgcagcagcctgaggaccagcctgactctgccctcccagaaatcctgcagtttaacctgctgggggtgcctctggtcggggccgamgtctgcggcttcctgggcaacacctcagaggagctgtgtgtgcgctggacccagctgggggccttctaccccttcatgcggaaccacaacagcctgctca

SEQ ID NO: 335896 - DNA, 201 bp, Homo sapiens
gcctgagctggctctgctgcagcagcctgaggaccagcctgactctgccctcccagaaatcctgcagtttaacctgctgggggtgcctctggtcggggccvacgtctgcggcttcctgggcaacacctcagaggagctgtgtgtgcgctggacccagctgggggccttctaccccttcatgcggaaccacaacagcctgct

SEQ ID NO: 335897 - DNA, 201 bp, Homo sapiens
tggctctgctgcagcagcctgaggaccagcctgactctgccctcccagaaatcctgcagtttaacctgctgggggtgcctctggtcggggccgacgtctgsggcttcctgggcaacacctcagaggagctgtgtgtgcgctggacccagctgggggccttctaccccttcatgcggaaccacaacagcctgctcagtctgg

SEQ ID NO: 335898 - DNA, 201 bp, Homo sapiens
ggtggggccgggtctccccactgcagcctctcgttgtccaggtatggcccgggtccactgccttccccgacttcaccaaccccacagccctggcctggtgrgaggacatggtggctgagttccatgaccaggtgcccttcgacggcatgtggattgtaagtgtggccccctcctgagcatccccaaggcctctggggacta

SEQ ID NO: 335899 - DNA, 201 bp, Homo sapiens
ggtgggaggacatggtggctgagttccatgaccaggtgcccttcgacggcatgtggattgtaagtgtggccccctcctgagcatccccaaggcctctgggractaccacaccctcctcactctgggcagagtcacctaccagcagcgcttctcttgcaggacatgaacgagccttccaacttcatcagaggctctgaggac

SEQ ID NO: 335900 - DNA, 201 bp, Homo sapiens
attccggcgcgcccctcatcagccagctggtcctgactcgcccggccctggctcctctccaggcaggcgtgtgcaggcatgtgcaggtacacaggcaggcrtgctgtacacacgcatgatgtcatccccagcctcatcctctcactgtctcagttttccccgtggctggcgccagggctctgggccaccctcaccttgaca

SEQ ID NO: 335901 - DNA, 201 bp, Homo sapiens
ggagcctgccgggaggaagctccctggaaaccagcccccgcctcttccaggggtggttggggggaccctccaggcggccaccatctgtgcctccagccacyagtttctctccacacactacaacctgcacaacctctacggcctgaccgaagccatcgcctcccacaggtgagggccacgtcccgccccactgggctctgc

SEQ ID NO: 335902 - DNA, 201 bp, Homo sapiens; identical to SEQ ID NO: 70596

SEQ ID NO: 335903 - DNA, 201 bp, Homo sapiens
cgtggagttctccgaggagcccttcggggtgatcgtgcgccggcagctggacggccgcgtgctgtgagttctgggctctgtgccagcatgatggggagggygacgcgcatttctcacacggcagggagggccacacgcgtttgtttctcacacgatgggcagggcgacacatgtttgtttctcacacggcggggagggcga

SEQ ID NO: 335904 - DNA, 201 bp, Homo sapiens; identical to SEQ ID NO: 70659

SEQ ID NO: 335905 - DNA, 201 bp, Homo sapiens
cctaccctggggacttaatcaaatcagagactcccttgtctggcctgggagacttagcaccctcatctctgagaagcagatgggccagcggggaaaggggygggggggggatccccaggagaaaggctcaggctgggagactcagccaagcagtgcagacagggtgggtgcagaggcacaggccctgccggaggagacgcc

SEQ ID NO: 335906 - DNA, 201 bp, Homo sapiens
agggggccgcccggtgcccagtggctccttctctgtgcagcgtcatcctcgtgcctgtgtggtcgccgaggatgttttctgagggtctttgtgatatcgarggaatatcaagaagtttgcaggcttggccccagctgtccagggaggtcgggtttgagggtccccagaaatggccgggtgctactcagggttctgtcagat

SEQ ID NO: 335907 - DNA, 201 bp, Homo sapiens
gcatttctcacacggcagggagggccacacgcgtttgtttctcacacgatgggcagggcgacacatgtttgtttctcacacggcggggagggcgacgggcrtttctcacagggcgctccctgggtcttttactcacataggtctaaatcccatgtaaacacgtgttcaggactcaccaagcccctgcttgtcatttaactc

SEQ ID NO: 335908 - DNA, 201 bp, Homo sapiens
acctttatgcagaagtggggctcccagccaggcgtggtcactcctgaaatcccagcacttcggaaggccaaggggggtggatcacttgagctcaggagttsgagaccagcctgggtaacatggcaaaatcccgtctctacaaaaatacagaaaattagctgggtgcggtggtgtgtgcctacagtcccagctactcaggag

SEQ ID NO: 335909 - DNA, 201 bp, Homo sapiens
ggccgcctgtcccagggtcagtgtgctgcagggctggccaggccactccgccctcccagggcaccagggcccgggggtgctctctgggtgctctcaggctygtgtggccccttgggtgtgagcaagcctggctggcctctgtcccgcaggctgaacacgacggtggcgcccctgttctttgcggaccagttccttcagctg

SEQ ID NO: 335910 - DNA, 201 bp, Homo sapiens
agggtgccaagggctgcagggctcggcacggccgcctgtcccagggtcagtgtgctgcagggctggccaggccactccgccctcccagggcaccagggccygggggtgctctctgggtgctctcaggctcgtgtggccccttgggtgtgagcaagcctggctggcctctgtcccgcaggctgaacacgacggtggcgcccc

SEQ ID NO: 335911 - DNA, 201 bp, Homo sapiens
ctcatcaccccagtgctccaggccgggaaggccgaagtgactggctacttccccttgggcacatggtacgacctgcagacggtgagtctggggaccctaarccctggggagacgggagaccagagcagccctcccacctgccccctccacccagttggtgtgaccaggtggcggaaagaggaacgtatgtgttgagtcccg

SEQ ID NO: 335912 - DNA, 201 bp, Homo sapiens
tggggtcctagagtgagcagtggggccgtgcactctgccctttcgtgtacacagagggaggtcacctccctgatgccatcatgagtccctgttctcatggstgttcctgccccagctgtctgctgacacctccacattctctgccttttcatctctctctgctcggcccagaacacgatcgtgaatgagctggtacgtgtg

SEQ ID NO: 335913 - DNA, 201 bp, Homo sapiens
cgctacgaggtgcccttggagaccccgcatgtccacagccgggcaccgtccccactctacagcgtggagttctccgaggagcccttcggggtgatcgtgcrccggcagctggacggccgcgtgctgtgagttctgggctctgtgccagcatgatggggagggcgacgcgcatttctcacacggcagggagggccacacgcg

SEQ ID NO: 335914 - DNA, 201 bp, Homo sapiens
attactgtagaacacttgggaaactctagaggtttaaagaaaaggtaaaggtaaagcttccattccggcgcgcccctcatcagccagctggtcctgactcrcccggccctggctcctctccaggcaggcgtgtgcaggcatgtgcaggtacacaggcaggcatgctgtacacacgcatgatgtcatccccagcctcatcct

SEQ ID NO: 335915 - DNA, 201 bp, Homo sapiens; identical to SEQ ID NO: 70561

SEQ ID NO: 335916 - DNA, 201 bp, Homo sapiens
aggaaacagggcgcctgctcctctctctgggattcaaggaacactccaggaaggcgtcttgctgggtccggggtgaggatgcagaggctgcagtgggggcrtgctcagcactgctaacctgctgctgggtgctgggtctggggtgaggatgcagagagaccatccccagttctgctaacctgctgctgggttcggggtcag

SEQ ID NO: 335917 - DNA, 201 bp, Homo sapiens
tcatcgccaccatcctggaccgcgtgcgggacgagtacccccagttccaggaggccctgcacaaggtcagccagatgatcgccaacaagctcgagtcaccrgggccctcctagggagcagcctggactccgccttgcaaggcctccaggaagagatccggaattgtgtttgtcatgagggacttggaatcttttgtgttcc

SEQ ID NO: 335918 - DNA, 201 bp, Homo sapiens
tttgtggggggccagcaggtgtctttcttctggtttgcatagccctatatggagtctcttttcctacccagaacctttcagagatcgtggccctgcagacrcgccttaagcacctgcaggctgtgaaggaggggcgctacgtgttcctgttccgctccaagcagtccctagtgctggagcgccagcgcctggacaagcgac

SEQ ID NO: 335919 - DNA, 201 bp, Homo sapiens
ctgactccaggtagtgtcaagattgaattgaattgtaggacacccagccgtgtccagaaagttgcagaattgatgggtgtgagaaaaaccctacacatttratgtcagaagtgtgggtaaaatgtttcaccctccagcccagagagccctaatttaccagtggcccacggtggaacaccacgtccggccgggggcagagcg

SEQ ID NO: 335920 - DNA, 201 bp, Homo sapiens
tcgcctctccagccctcccattcctctttgggagcctccctggatggagtgtgtggaaggtgcctggcaggtcctcccagcctgactcttccctgtccgcyaagtagccgggctgcaggggcccagcatggtcctgtgattctcctaggccaccgatgagtgcaccaaaaccgtcctggaactggaagaaacacaaagaaa

SEQ ID NO: 335921 - DNA, 201 bp, Homo sapiens
aaccctacacatttgatgtcagaagtgtgggtaaaatgtttcaccctccagcccagagagccctaatttaccagtggcccacggtggaacaccacgtccgkccgggggcagagcgttcccagccaagccttctgtaacatgacatgacaggtcagactccctcgggccctgagttcacttcttcctggtatgtgaccagct

SEQ ID NO: 335922 - DNA, 201 bp, Homo sapiens
ctgcctggaggtgggctggcaccacatatctttccgtcccatgccaggttcctcctgagtcaggcttagcacggcttccccaggccactctgagctcctcrtggggagagagcctcaactctccgcctgtgattggcccatctgtggggtgcagagccctccaagtgaagaatctgtcccccaaccccagagctgcttccc

SEQ ID NO: 335923 - DNA, 201 bp, Homo sapiens
cagccaagccttctgtaacatgacatgacaggtcagactccctcgggccctgagttcacttcttcctggtatgtgaccagctcccagtaccagagaaggtygcacagtcctctgctccaaggagcttcactggccaggggctgctttctgaaatccttgcctgcctctgctccaaggcccgttcctcagagacgcagaccc

SEQ ID NO: 335924 - DNA, 201 bp, Homo sapiens
cttcttcctggtatgtgaccagctcccagtaccagagaaggtcgcacagtcctctgctccaaggagcttcactggccaggggctgctttctgaaatccttscctgcctctgctccaaggcccgttcctcagagacgcagacccctctgatggctgactttggtttgaggacctctctgcatccctcccccatggccttgct

SEQ ID NO: 335925 - DNA, 201 bp, Homo sapiens
aggctgcctggcagggcttgcacggggccgtctccgctgcccttctccctgacgctctctggttctgcagcccagcccctgggtggacgtgttgggggtgrcccctcgttttcccagggttgaggccccttggccccgcatcagtgccttgtggagaaagagctgctcattgacctccagggtgcaggtctctcagatttg

SEQ ID NO: 335926 - DNA, 201 bp, Homo sapiens
ccctgcacgtccgggggcaggaaacaggacagggcagagctgcgtcacagggcaggacagtctccgttagacggagaatcctccgtagagctgcttgcacrtgtacattcatctttttgtcagatgttaattcaagttgcctttggttgtgggactgggaggatcttttctctttgttgatactttttcgtactttccaaa

SEQ ID NO: 335927 - DNA, 201 bp, Homo sapiens
acatatctttccgtcccatgccaggttcctcctgagtcaggcttagcacggcttccccaggccactctgagctcctcgtggggagagagcctcaactctcygcctgtgattggcccatctgtggggtgcagagccctccaagtgaagaatctgtcccccaaccccagagctgcttcccttccagatgtggtcctgcagccg

SEQ ID NO: 335928 - DNA, 201 bp, Homo sapiens
agggccctggcctcacaaccacagagtcccgccagcagcccatggccctggctgtggccctgaccaagggtggggaggcccgaggggagctgttctgggaygatggagagagcctggaagtgctggagcgaggggcctacacacaggtcatcttcctggccaggaatgtgagtcctggggctgctcaggctggtgggcagg

SEQ ID NO: 335929 - DNA, 201 bp, Homo sapiens
tggagagtaaggtggctgtggggaacatcaataaacccccatctcttctagatcaaagatccagctaacaggcgctacgaggtgcccttggagaccccgcrtgtccacagccgggcaccgtccccactctacagcgtggagttctccgaggagcccttcggggtgatcgtgcgccggcagctggacggccgcgtgctgtga

SEQ ID NO: 335930 - DNA, 201 bp, Homo sapiens
cctcccacccccacctgcagctccccgtgagccagccatccacagcgaggggcagtgggtgacgctgccggcccccctggacaccatcaacgtccacctcygggctgggtacatcatccccctgcaggtacctgggccaggcggctatggtgggggtgtggacagcacactgcagagctgggggaggcacagggagatggt

SEQ ID NO: 335931 - DNA, 201 bp, Homo sapiens
ccatgtgtggctgcaccaggacctgacctgtccttggcgtgcgggttgttctctggagagtaaggtggctgtggggaacatcaataaacccccatctcttstagatcaaagatccagctaacaggcgctacgaggtgcccttggagaccccgcatgtccacagccgggcaccgtccccactctacagcgtggagttctccg

SEQ ID NO: 335932 - DNA, 201 bp, Homo sapiens
gaccgtggcccggcccctcttcctggagtgagtgacctaggcaggggcggtggcccatgtgtgccctgggggaggggcacgtaactcccaggcagccctgycctgctgtgggctgtgttccccaggacccagcaggttgccgctgagtgagacaacatttgggcctggcttaagggggaagggcagcaagaaaacccagta

SEQ ID NO: 335933 - DNA, 201 bp, Homo sapiens
cctggagtgagtgacctaggcaggggcggtggcccatgtgtgccctgggggaggggcacgtaactcccaggcagccctgtcctgctgtgggctgtgttccycaggacccagcaggttgccgctgagtgagacaacatttgggcctggcttaagggggaagggcagcaagaaaacccagtaatatcccccagacaggccgta

SEQ ID NO: 335934 - DNA, 201 bp, Homo sapiens
ctcacggtgtcccccaccaccccagggcgctggtgaaggctcgggggacacgcccatttgtgatctcccgctcgacctttgctggccacggccgatacgcyggccactggacgggggacgtgtggagctcctgggagcagctcgcctcctccgtgccaggtgagctcctaccaggaggggctgctcagcagagtagagccg

SEQ ID NO: 335935 - DNA, 201 bp, Homo sapiens
gaacctctacgggtctcaccctttctacctggcgctggaggacggcgggtcggcacacggggtgttcctgctaaacagcaatgccatgggtaagctgcccrccgcccagcgcccgggccggggtctcctccgtgctgcctgccctggagactggaggtccgcatgaggggccctgggcacggtgctgggccttgtgttttc

SEQ ID NO: 335936 - DNA, 201 bp, Homo sapiens
cagagaggctgaatgtgctgcccatggtcccacatccatgtgtggctgcaccaggacctgacctgtccttggcgtgcgggttgttctctggagagtaaggkggctgtggggaacatcaataaacccccatctcttctagatcaaagatccagctaacaggcgctacgaggtgcccttggagaccccgcatgtccacagccg

SEQ ID NO: 335937 - DNA, 201 bp, Homo sapiens
tggctctgcagatgagggagccgaggctcagagaggctgaatgtgctgcccatggtcccacatccatgtgtggctgcaccaggacctgacctgtccttggsgtgcgggttgttctctggagagtaaggtggctgtggggaacatcaataaacccccatctcttctagatcaaagatccagctaacaggcgctacgaggtgc

SEQ ID NO: 335938 - DNA, 201 bp, Homo sapiens
cccagggttgaggccccttggccccgcatcagtgccttgtggagaaagagctgctcattgacctccagggtgcaggtctctcagatttgcaaatgtgggcrtccactaagagtgaggctgcccctctgctcaggctgaggctcagtggggcttccatgcaggccctgggtggggccgggtctccccactgcagcctctcgt

SEQ ID NO: 335939 - DNA, 201 bp, Homo sapiens
caaatgtgggcgtccactaagagtgaggctgcccctctgctcaggctgaggctcagtggggcttccatgcaggccctgggtggggccgggtctccccactscagcctctcgttgtccaggtatggcccgggtccactgccttccccgacttcaccaaccccacagccctggcctggtgggaggacatggtggctgagttcc

SEQ ID NO: 335940 - DNA, 201 bp, Homo sapiens
cgtggtcactcctgaaatcccagcacttcggaaggccaaggggggtggatcacttgagctcaggagttcgagaccagcctgggtaacatggcaaaatcccrtctctacaaaaatacagaaaattagctgggtgcggtggtgtgtgcctacagtcccagctactcaggaggctgaagtgggaggattgcttgagtctgggag

SEQ ID NO: 335941 - DNA, 201 bp, Homo sapiens
ctggtgagttggggtggtggcaggggaggcaaggggctggccgggacgcgtctcctcaggccccagcagacggtcccgtgttgtggctgcaggacgtccartggaacgacctggactacatggactcccggagggacttcacgttcaacaaggatggcttccgggacttcccggccatggtgcaggagctgcaccagggcg

SEQ ID NO: 335942 - DNA, 201 bp, Homo sapiens
gtgggcgatcccacccacccaagactctcccctgggaatcccacccctgctggagaagcaccccatgctgggtggctgagaagtgcagctctcccgaggcrgggactccaggggaccgcggccccagcacccaagtgcttcctttgcccccgcctgccctgcagccccaggagccgtacagcttcagcgagccggcccagc

SEQ ID NO: 335943 - DNA, 201 bp, Homo sapiens
tcatgcggaaccacaacagcctgctcagtctggtagggtgggggtggcggcatggcaggtgggcgatcccacccacccaagactctcccctgggaatcccrcccctgctggagaagcaccccatgctgggtggctgagaagtgcagctctcccgaggcggggactccaggggaccgcggccccagcacccaagtgcttcct

SEQ ID NO: 335944 - DNA, 201 bp, Homo sapiens
aaggtgcctggcaggtcctcccagcctgactcttccctgtccgccaagtagccgggctgcaggggcccagcatggtcctgtgattctcctaggccaccgaygagtgcaccaaaaccgtcctggaactggaagaaacacaaagaaatgtgagcagctccctcctagagaagcaggaaaagctgtcggtgattcaggcagact

SEQ ID NO: 335945 - DNA, 201 bp, Homo sapiens
gccccaacgcgaccgctgcccggctgcccagagggctggatgcctgccggtccccgagcaagcctgggaactcaggaaaattcacaggacttgggagattytaaatcttaagtgcaattatttttaataaaaggggcatttggaatcagcttctgcgggtctctctgggattcagggcagggaggatgtatccaggggccc

SEQ ID NO: 335946 - DNA, 201 bp, Homo sapiens
aacaacagcagcagcaacagcagcagcagcagcagcagcagcagcagcagcagcagcaacagcagccgcagcagcagccgccgcaaccacagacgcagcarcaacagcagccggcccttgttaactacaacagaccatctggtaggttaatacgcaaccaaatgaataatgccatggtccaactcggataacaaagactgc

SEQ ID NO: 335947 - DNA, 201 bp, Homo sapiens; identical to SEQ ID NO: 70681

SEQ ID NO: 335948 - DNA, 201 bp, Homo sapiens
gagctgaccgccactgatgggtacccagggctcgcgacaggaaaggttgggatgtccttgtgcttttccgtgagtgttacttaatcatgttgagagctcaygttatattgcattttattgaagagctttcaggctccctgctccccctgcccacattattgctcttctcatttcccatcatatgctcctccttggcaaaag

SEQ ID NO: 335949 - DNA, 201 bp, Homo sapiens
aggtgttatgtaagtcataattctgacattggacattggtgtcttgtttaatgttttagatatggactaaatctgatggggaacctagagacagataaaamcaatatgatacctggatttcaaaacctgagatgtatttcagttggcttggttaatttcaacccaggtttcttcaactaggaatgacactgaatttttcca

SEQ ID NO: 335950 - DNA, 201 bp, Homo sapiens
atccttttggtctagtctctttttttaactctagaatgggtagtagatgatagtgccacacttttaaagaacttaggaaggggtctgaaaactccaaatakaaatattttaccttatagaggtgtctaactaatgtcctttaaatgtttcagcccatcgatggtatacatgacaaggggattgtagaagacatccattgtg

SEQ ID NO: 335951 - DNA, 201 bp, Homo sapiens
acgagaagaagaatttgacctttttatggtaatgttacagaaaatcatgaacacaaatgctttatacctctgcccctttttctgttaagcagaatgtctgsagcctgcgtgcctggcagaacttcatacgtaaagcctatgcctttccttcagttcagaggctgcaaactggctggagttagcctgcagacatattttgtt

SEQ ID NO: 335952 - DNA, 201 bp, Homo sapiens
ttttaacatttctgcgttaccaatatcgaatttcaaacttccatttcaaaggacttaaaatttacacctggttgtgtgccttgcttgtctgaacagaatgyttgcataaataatgagattgttgcttgggcgttgagtagcagaaaatttctatccaaccaccaaagactcagaaaccattgagaaccctaataataattt

SEQ ID NO: 335953 - DNA, 201 bp, Homo sapiens
catctctcatgaccatcatggaggattattttgcttttcggaacttcctttacctacgccttgatggtaagtgcataaggcattaggctcggaagccatastactgaaaatgaagggataatgggcacttaggtccaatctcagccaaaaagaaggggtaaaattgaagaattgactagaagcattgggagcagtttttct

SEQ ID NO: 335954 - DNA, 201 bp, Homo sapiens; identical to SEQ ID NO: 70685

SEQ ID NO: 335955 - DNA, 201 bp, Homo sapiens
attatataacactgcatgccaaacaaaacacaactgtgggccaaatatgatccacagggtttgcaatctccacctttttagcctagacagaatggaactcyacctgtttggagaggcttatgttattttggggttttgtgtgtgtggcttttttctgggaacattgattgtatataatgatccacaataaaattttctttc

SEQ ID NO: 335956 - DNA, 201 bp, Homo sapiens
ggtggcagccacgtggctcctgcctccctgacactcttcagtctctgctgtcttcccctagctgggaatgtgttcttcttgcccctaaatttaataagccyttgtggtatctctgggaattgtggtaagactcagcttgtcctgaatttttagttctcacattggagaaaatcattcattctttttagaaatatttccttc

SEQ ID NO: 335957 - DNA, 201 bp, Homo sapiens
gaccctcagctgatcactgttaggcaataattcagcactgctaaagccgcagatactctcaagacactggagaggacaagctgcttgccattatacaaatwagattaggcccagaaatggagaattctttcagcagccctgaagtaagggggtgagtgtactttcctgccttacttttgggctatttgtagaaattgaaaa

SEQ ID NO: 335958 - DNA, 201 bp, Homo sapiens
tttctgttcaagatggagtttagttactgagtagataaattgatgaatgggtatagtggccatgtgggtgccttgaattacttcctagcatacagttacgrtgattctgcaagtgatagagatggaatgttaaacattttaatttatcccataatttctttttttttctttacaagaggtataaaataaaaggcaattaac

SEQ ID NO: 335959 - DNA, 201 bp, Homo sapiens
cacaaacaatagcttagagggtgggctttgctttggggtttttcagtaagaaaaacttctcagcttagagactgtcgatgcctctttaatgtgtttctgtyctcccacggaaagagatttggcgagttgtttccaaaatgtcattttttcctactggcctcttgatggtttgttgttatatcttctttttcttgcatgtga

SEQ ID NO: 335960 - DNA, 201 bp, Homo sapiens
accccccagcccccagcgctgagtttgagtcagttgagccagtttagtaaataattttttaaaataaaagaacagtttaaaatctccatgaataattttayttacatgcaggagtaatcttactctactctttatgtgcgaaaagcattgggaagtgtttagtgaattgatttccattagaaaaagacccttagaaatcac

SEQ ID NO: 335961 - DNA, 201 bp, Homo sapiens
tagcattgtgtagcaagttttggggttttttttgtgtgtgaccccccagcccccagcgctgagtttgagtcagttgagccagtttagtaaataattttttwaaataaaagaacagtttaaaatctccatgaataattttacttacatgcaggagtaatcttactctactctttatgtgcgaaaagcattgggaagtgttta

SEQ ID NO: 335962 - DNA, 201 bp, Homo sapiens
tgtaaaaactcaaaggactttttaagtacctaggggtgttatttttcatatttgaaaaattcagtgagcatctattgagccaggccttgtaataggtaccyccctgtgtggtagcatattaaatactgatgtcggcatcgtgagatagatgtcactctcaaataacatgttatggaaatggttaggttatgggtgttttgc

SEQ ID NO: 335963 - DNA, 201 bp, Homo sapiens
aaacagcctttatttgtcagggttgtatgaagaatgctttgattaggtttttattaggggaatgttgagttgtcatttgtattatttttagattgccaacrttagtaattttataaatattcattccaaaatggatttgaagtagatttttaaacgtatgtatatagtgtagcaaactacagaatatcagcagaagtcctt

SEQ ID NO: 335964 - DNA, 201 bp, Homo sapiens
tggctcgagttgctacttaagggaccatgtaaaaactcaaaggactttttaagtacctaggggtgttatttttcatatttgaaaaattcagtgagcatctmttgagccaggccttgtaataggtacctccctgtgtggtagcatattaaatactgatgtcggcatcgtgagatagatgtcactctcaaataacatgttatg

SEQ ID NO: 335965 - DNA, 201 bp, Homo sapiens
aaatgaaaaactaccaaatcaagcttccctttccccctttttaatcttcccacatgctttcttataaatatggttttccccgtagccagttaatattttayatgcatcacagccagcatggtgcctggtacataacagtagattagatggaagaatgagaaaaactgttatgacgtcagagttattggctcgagttgctac

SEQ ID NO: 335966 - DNA, 201 bp, Homo sapiens
caggttgcttgtggagacagtaataatcaaaaacttactgtccaaagccctgagtctgaaattctgcatccaaaagtgctacagtatgcattaaaccgatyaaaataacgtagcatctttgaggacgagctctatgttcaactttgttgttgtttaatatttatattgtaagaaaatctctcatatatgaaaatgtaaatg

SEQ ID NO: 335967 - DNA, 201 bp, Homo sapiens
tacaaagatctccttgtgattactcactggtgtctatttcatttgctttggttttagcaaaatcagtcaaggtgaaaattaagctcaataaaaaagatgasaaaggccgggacaaagggaaaggcaagaaaaggccaaatcgaggaaaagccaaacctgtagtgagcgattttgacagcgatgaggagcaggatgaacgtg

SEQ ID NO: 335968 - DNA, 201 bp, Homo sapiens
atttacattgttgtgcaaccatcaccaacatcccatcttcagaacttttccgttatctcaaactgaaattctgacctcattaagcactaactccccggccrtcttccctcagccgctggtaaccactgttctcttttctcatctctgaaatcatacagtatttgcttttttgcgtctagattatttcactttagggaattt

SEQ ID NO: 335969 - DNA, 201 bp, Homo sapiens
aaatgagtttagagtcacttttgagtacctaaataaaataaaattaaactaaattaaaattttaaaatcttccttgctcttaaaattgttacctatgtgcsaaagatatagaatacattgacacacctttaactttttcagttaaggcatattttaaggggataaaggctatgtcacttttctttgtaacaatacaatcat

SEQ ID NO: 335970 - DNA, 201 bp, Homo sapiens
gaatgttctgggcactctgggatgtttgtgttgtctgtaggttggtgatagtcttaccacctatacaaagatctccttgtgattactcactggtgtctatytcatttgctttggttttagcaaaatcagtcaaggtgaaaattaagctcaataaaaaagatgacaaaggccgggacaaagggaaaggcaagaaaaggccaa

SEQ ID NO: 335971 - DNA, 201 bp, Homo sapiens
agatggggcttctccatgttggttaggctggtctcaaactccctacctcaggtgattgacctgctttggcctcccaaagtgctgggattacaggcatgagmcaccgtacctggcccattgtagccatttcaagtgtacatttcagtaacatgaagtacatttacattgttgtgcaaccatcaccaacatcccatcttcaga

SEQ ID NO: 335972 - DNA, 201 bp, Homo sapiens
ttgtgtgggtttgggtaagtactgtgaattaccttgttatactgggagctctgaaattgaagataatgataaatacattcagcttcctcaaaagaatgccrtgaaaaatattaaaataatgtatttatgacttctaaagagaaagattttctttaaatattttctttgtaaaagacactggctttagtctgttactttgat

SEQ ID NO: 335973 - DNA, 201 bp, Homo sapiens
tggcaagtgaaaggggtcgctgactagacagaaccacacagaacaggcataaaccgggaatgttctgggcactctgggatgtttgtgttgtctgtaggttkgtgatagtcttaccacctatacaaagatctccttgtgattactcactggtgtctatttcatttgctttggttttagcaaaatcagtcaaggtgaaaatta

SEQ ID NO: 335974 - DNA, 201 bp, Homo sapiens
aaaactatatccaaaaaagtccttacccttcagaccaactcatctcttgaatatgggaagcatttgttaacaaaagtataaggtttgtgaatagttatgtsctatacacagttattttcttacatcatggatattcccttaataacctttgaaagaataaatggggattttcgaaaagttctagccattggccagggcaag

SEQ ID NO: 335975 - DNA, 201 bp, Homo sapiens
attggcaccaagcatttgagcatctggaattttataaccaagagtttaaagtggagagaaaatgctataagcagtggctcacttgtgtgggtttgggtaartactgtgaattaccttgttatactgggagctctgaaattgaagataatgataaatacattcagcttcctcaaaagaatgccgtgaaaaatattaaaataa

SEQ ID NO: 335976 - DNA, 201 bp, Homo sapiens
tttacatttatttatatttttaatgtaaaagttctattaaatgattgcccaacacctccacaagtagaaaacacttcccctcattatccttggtcagccaktgggagacaggtgaaggatccagccccactgtcctccatgagacctcggtccctcttgttgcctgtttagcgtgactacatcatttatcttccaaaagaa

SEQ ID NO: 335977 - DNA, 201 bp, Homo sapiens
tgaaggtggaaatgggtgcagtctttctgaaggctaatctgacagagcactgttagaaatttaccatatggacatgtccaccatacctccctcaaattctrccaagatacattgaaataggttcacagcagctttgtttatactagcaaaaaaagcagcaaacttcagccctcatcatatgagactgattaaataaattat

SEQ ID NO: 335978 - DNA, 201 bp, Homo sapiens
taaagccagcaatgacaggtacagtccttctcatgttgtgtctccatgaatctctcttttgcgtcttcctcttccacgtttaaggatgcagatgattagaytgggcccacctggataatccactataatttccccatctcagggtcagacaattaacagtctaaaattccttttgccatgtaatataacatattcagaggt

SEQ ID NO: 335979 - DNA, 201 bp, Homo sapiens
caaaatgttaacaggcatagcacggggaactcacaggaggatgattacccaataacctagtgcaatacagaatcgtacatacccttttcataggggagccrggagatggggggggatgtaggcatttcttttgagggggcagtcaatcattagaggaaatgaatggacagaagttaacttggaaatgatttttttcttgaa

SEQ ID NO: 335980 - DNA, 201 bp, Homo sapiens
cagagagaagataccatttgcattgaaaaagattaattgaagaggtgaaagaaagggcagggaaaacccataagggaggccatttaaatgtgaccctgtgrgagaggagacccgtctgacagcagggagaccagggggaaaagattgcttatgaactatttcagaggtaaactatatgatgacaaataggactgcagggat

SEQ ID NO: 335981 - DNA, 201 bp, Homo sapiens
aaagcctgagcgtatttgaaatgagagaatgaatgatgtgtccctctgtttaagcagagagaagataccatttgcattgaaaaagattaattgaagaggtsaaagaaagggcagggaaaacccataagggaggccatttaaatgtgaccctgtgagagaggagacccgtctgacagcagggagaccagggggaaaagattg

SEQ ID NO: 335982 - DNA, 201 bp, Homo sapiens
ctcctacaatataatttttatgatactttgttgatacatacatatagtaggatactataattcatttaactaattcagtattgttgaatgtttcttttttwaaaaaaaaagccattagagagagtaaattattctgagaaggtacatccttatttctaaatctttgtgcatatctatgattatttgtttaggatacatttc

SEQ ID NO: 335983 - DNA, 201 bp, Homo sapiens
ggaccacaatgaataaaagccacatgccaagaagtttttattacgtagctataaaattaggtaattctgtttcatgggctcatgaaggtttttatttaaamatttcatgaaagcttttttcttattattaatatatgagtaacatttaaagcagaaaaaaagcaaaatgtaagcaaagtgaagaaagtgaaataacaccta

SEQ ID NO: 335984 - DNA, 201 bp, Homo sapiens
gggagacatgtgtaaacaactaattagcatcagctcagataacatcacctggaccacaatgaataaaagccacatgccaagaagtttttattacgtagctrtaaaattaggtaattctgtttcatgggctcatgaaggtttttatttaaaaatttcatgaaagcttttttcttattattaatatatgagtaacatttaaag

SEQ ID NO: 335985 - DNA, 201 bp, Homo sapiens
cctcacccaggcatgggccctccccagagtccaatggatcaacacagccaaggtttgtgtccgctgcacacctgatactggttccccagcatagtctttcmgtctttcctgttggatattttaattatgaattccaaagaatgtgtctaaggaaggttgaacctagtaggtttcttttccttatggaaatctacctccgtc

SEQ ID NO: 335986 - DNA, 201 bp, Homo sapiens
atggctaatatttctgataaccccatccccctttctactgttgttaacaagaaaatcatgcaagatctttgtcttgtatatctcatatattattaaaaacrcatattgtgaggtacttttattgctacagatgttgcatcagttatgaagatcagatgttggctttttaaaatactgacatagactatgcagttctgataa

SEQ ID NO: 335987 - DNA, 201 bp, Homo sapiens
ttcttgggcctagtccaggaccaggaccatccccaggttccgtccacagcatgatggggccaagtcctggacctccaagtgtctcccatcctatgccgacratggggtccacagacttcccacaggaaggcatgcatcaaatgcataaggtaagagtttgttctcccattcaaactcaacttctgataagtggatggctaa

SEQ ID NO: 335988 - DNA, 201 bp, Homo sapiens
gaactcctgacctcaggtgatccgcctgcctcggcctcccaaagtgttgggattacaggcatgagccaccacacccggcctcaaagcatatatttttttttcgagatggagtctcgcccaggctggagtgcagtggcatgatctcggctcactgcaacttccacctccctggttcaagggattttcctgccttagcctcct

SEQ ID NO: 335989 - DNA, 201 bp, Homo sapiens
gccttttgtctgctgccttcttgtgctacaacaggtgaccaggagacttgtctggtcaagaagacgggtttacagctgttgagcatcagctctctgcaaaytatggtgccagggatgtgggatacagaaaacagacttttgccctaaaaatctatacagtctaatgggagacatgtgtaaacaactaattagcatcagctc

SEQ ID NO: 335990 - DNA, 201 bp, Homo sapiens
caattcttgggcctagtccaggaccaggaccatccccaggttccgtccacagcatgatggggccaagtcctggacctccaagtgtctcccatcctatgccracgatggggtccacagacttcccacaggaaggcatgcatcaaatgcataaggtaagagtttgttctcccattcaaactcaacttctgataagtggatggc

SEQ ID NO: 335991 - DNA, 201 bp, Homo sapiens
ggtttcagtttccttggcaagttgtaaccatttacctaattttgattgaagtatgtcgtgcacatgttgactaagggcttttgatgatattttaggccacrtcacttataatactgaggttcctttcattgtgcctatgattcttcttttagagtactccatgttaccatctttactagggcatgccatacccattttctc

SEQ ID NO: 335992 - DNA, 201 bp, Homo sapiens
aagatgaaggggttcctctggcaagtaataataaaggtatgtgtggtttacagtatgtaaaataccctaaaggaataagaccaagaaaatagtcagccagtaggtacgtacgaaggcttttcacttgagtttccagagtatattctaacatattattttgagttactttctaaatacaatgtgaatttgaaaacaaaggag

SEQ ID NO: 335993 - DNA, 201 bp, Homo sapiens
acttaagtagatgttacatttacttcctccctgaattttatgatcttacttcatttgtgaagttcaatactagtttatgtcttttcagaaaatgtcaatcwtagagatttccttgttaaaatataatttcctccctatctttgttccttttccaggatgaggaagaagagtccagtaggcaggaaaccgaagagaaaatac

SEQ ID NO: 335994 - DNA, 201 bp, Homo sapiens
ttttagattttggtaatcttgtacgatctcgaaactaaaactacacagcctttgctgagatggttgaagttgttacttggatttgtcttttatacatagartgtgctattaagtcatgtgtgtctttattgtattgtaatttaaaaaactaagccccctcctcttcctcactctttttccttagttatgaagttgccccta

SEQ ID NO: 335995 - DNA, 201 bp, Homo sapiens
actcactcaaacatctggactagacagggcagctctgtttgatgtttgttacagaaatggcaccatcaaatgctaacaattgttttattctggtcttaacrtcatgtttaaaacatgccttccttttttctgcttttcaacttagcattactctactgactggcagagacaggagaggtagatgtccacgcccacagaccc

SEQ ID NO: 335996 - DNA, 201 bp, Homo sapiens
cactttgaaataatttcaactgcatttggactttctgtatgaatgtgtatgtctgtatttgggcttggcgttttgctactgggttttcatgtgggcataamagctaacggtgacatttctactaaaattcatgtgaattaagctggtgtattgcataaggaagagttcactgccatggtaactcagcttgcagttttaaca

SEQ ID NO: 335997 - DNA, 201 bp, Homo sapiens
tggcagggctttatgctgtgaagacaaagggaaaatcaggctttgttaactaagtaatgatcgctgaattttcctctccctctttttttctccattttctscaaaatttccatcaggaaaggattcgtaatcataagtaccggagcctaggcgacctggagaaggatgtcatgcttctctgtcacaacgctcagacgttca

SEQ ID NO: 335998 - DNA, 201 bp, Homo sapiens
tcggctcactgcagcctccgcctcccgggttcaagcgattctcctgcctcagcctcccgagtagctgggactacaggcacgtgccaccacacctggctaaygtttgtatttttagtagagatggtgtttcaccatattggccaggctggtctcgaactcctgaccttgtgatccacccgccttggcctcccaaagtgctgg

SEQ ID NO: 335999 - DNA, 201 bp, Homo sapiens
gagcatagcatgtgcctaacttgtaagaacaaaggtgtaaatacttcacatttataatttggtagggtcttcagggccagacgttttgtgggccaacctcyactaaatctaaaagtcattctccaaatagagtatattgtgtttaatactgcttaaaaggtatcagtcacatgggttcttagttgaacttatggctaaaat

SEQ ID NO: 336000 - DNA, 201 bp, Homo sapiens
gtggatcacctgaggccacgaatttgagaccagcctggtcaacacagtgaaaccccgtctttactaaaaatacaaaaaaattggctgggcccagtggtgcmtgcctgtaatcccagctattgggaggctgagacatgagaatctcttgaacccaggaggtggaggttgcagtgagccaagattgtaccactgcattccagc

SEQ ID NO: 336001 - DNA, 201 bp, Homo sapiens
atgtgaaaatggcaacaggataacgaagacagtacaagacccaggccagcatgaagctacagtacgaaccagattgaggctgggcacagtggctcatgccygtaatcccaacactttgggaggatgaggcaggtggatcacctgaggccacgaatttgagaccagcctggtcaacacagtgaaaccccgtctttactaaaa

SEQ ID NO: 336002 - DNA, 201 bp, Homo sapiens
ggggctaacttcacaaatcactatgtacatgacacatgtacattttgatcaataactaatcatatcacttctcagaatctggtggtgatttgttagcgagygtctgttcagttcatgcacagacagcaaagtatgtagctgtgttgctgccttctttctcagtgaaaacatgacatttaaaaaaatagttcatcaggagag

SEQ ID NO: 336003 - DNA, 201 bp, Homo sapiens
gtgtgttttgagcctgattgtgctaatcatactaatgctagttaaaaaaaaacaaacaaacaggaaaaaaaaaaaccaaaatagatttaaaacatgttggyggaagttgagatgacatgatctgatagctcgacaagcagaattaacaaacatgagtattctggttatgggttctcattggcaccaagcatttgagcatct

SEQ ID NO: 336004 - DNA, 201 bp, Homo sapiens
tcaaaatacagtcacaatctaaagtcttggggattaggacctcaacgtatgaattttagagggatgcagttcagcccataacactatagtatagcaattcygagtcactgcacataaaacacagactttggggctaacttcacaaatcactatgtacatgacacatgtacattttgatcaataactaatcatatcacttct

SEQ ID NO: 336005 - DNA, 201 bp, Homo sapiens
attcatattgatgtgagagatctgcagtttttctttttagcattatggattcagtatttgttccacaaacatttattgagtgtctgttatgcagcaggcastgagctaggctgggtatctaagggggaggaaggaagacgtgatgtgactcctctcctcctggtgtgctcaatgtgattggatgtttagattatccttgct

SEQ ID NO: 336006 - DNA, 201 bp, Homo sapiens
aactaaaactacacagcctttgctgagatggttgaagttgttacttggatttgtcttttatacatagaatgtgctattaagtcatgtgtgtctttattgtwttgtaatttaaaaaactaagccccctcctcttcctcactctttttccttagttatgaagttgcccctagatctgacagtgaagagagtgattctgattat

SEQ ID NO: 336007 - DNA, 201 bp, Homo sapiens
ctcaaaatacagtcacaatctaaagtcttggggattaggacctcaacgtatgaattttagagggatgcagttcagcccataacactatagtatagcaattscgagtcactgcacataaaacacagactttggggctaacttcacaaatcactatgtacatgacacatgtacattttgatcaataactaatcatatcacttc

SEQ ID NO: 336008 - DNA, 201 bp, Homo sapiens
agagtttttaacagcagtagatgtggggaggaaaaatgaggctagggccagaccctggaggctatgcatgaccaaagaatctgggctttattctatttcayagaaagagttcaaagcctgagcgtatttgaaatgagagaatgaatgatgtgtccctctgtttaagcagagagaagataccatttgcattgaaaaagatta

SEQ ID NO: 336009 - DNA, 201 bp, Homo sapiens
gcctcttcttgaaaaggtgcaggagcgcgtcagatcagcaacaggtggtctagctggcccggggaggacttacgcagaattgaagacagcctcctgggggsaggtgatgagacctgcccgtgaaggctgttaacctggctgctcctacagtaggggccccttagtggacttccttctgccaagcagttaggacctacaggt

SEQ ID NO: 336010 - DNA, 201 bp, Homo sapiens
tccgaggggtgtgttatatgtgcctacgagcagcgttgctttgcaccattccatatgtacacattcccatcactggatatagttaaacaccagtccctcartgacaaattttagttaccctatgtaatagtttgctaggactaccattataaaataccacagattggtggtttaaacaacagagatttattatctcactgt

SEQ ID NO: 336011 - DNA, 201 bp, Homo sapiens
gctttgggtaggaaagagggatcaggagagttccaggccaagggaagtatacgaaggcttggaaatacgtgacccctgcttactgtgactgtgtgtttggracagagtttttaacagcagtagatgtggggaggaaaaatgaggctagggccagaccctggaggctatgcatgaccaaagaatctgggctttattctattt

SEQ ID NO: 336012 - DNA, 201 bp, Homo sapiens
ccctacttggagagcgggatagaggcacagatactcttaaacagctgtcatggcttctgaagttgttggtgctgtattttaatctggctgtgccaattctrtacatgcactccttacaagggtattgggagctcctggaaagcccgccctaactgcagcatcttggagatgggtttctgttgcttccccctcccttccagc

SEQ ID NO: 336013 - DNA, 201 bp, Homo sapiens
ggccccacacaagcttagagacagggtactctgagaacaggggaccattcccatctccatcaggtgagactaggacagatagcagctgcctgatgcagaaratggcagcgcaggcagcagatgctgtgggtggggcagtttcccttagattataggatggcaggaaagataaagcctgccatcgtttactccgaggggtgt

SEQ ID NO: 336014 - DNA, 201 bp, Homo sapiens
gtaggatgttataaaagaaatggtattttagccttttcttaaaagatgaggatgctttgggtaggaaagagggatcaggagagttccaggccaagggaagyatacgaaggcttggaaatacgtgacccctgcttactgtgactgtgtgtttgggacagagtttttaacagcagtagatgtggggaggaaaaatgaggctag

SEQ ID NO: 336015 - DNA, 201 bp, Homo sapiens
acagaccttgtcatcttgactgctgttagcaggtctggtgaagatatgtggagagggacggttgaactaaaagcttaaaaaggaactttagggtgttttaragttctttgtcccctttggatttgaatgatccaccttacattctcctctttagaaaataatctaatatagatgggtcccagctgttttcatggcttagca

SEQ ID NO: 336016 - DNA, 201 bp, Homo sapiens
aacgtgttaattatactctgttaatcaggctgtttcccaataatgctgtcctgagcattttacccatagattattgaaaagatgtaaaatgtatgtgatgyatacacattgccacagagaatggagtttccattcttgccctcaacatacataagcgactctttcccaacatcattttctattatctatattctagttagt

SEQ ID NO: 336017 - DNA, 201 bp, Homo sapiens
tataaattagaaaatggtggggaaaaagagtatcagccttctggtgagaacagttgttcaatttttgcttctgggccagacagcatagaacgtttactatygcgcccattttagagactgttggcctctgttccaggagatagtgaaaagcctcatgacacagaccttgtcatcttgactgctgttagcaggtctggtgaa

SEQ ID NO: 336018 - DNA, 201 bp, Homo sapiens
ccataaagtagtgtccaattgtggattaatttctcttccacctgttctcactatgttgtatcctgccatttctcaagagtagaagttaatggtagtcaccstagggatgttataaatctcactttaagactagtattagagataccacatgtgaccatttaaaaatgtttcacaaagaaaatcacaggatatttgccagtc

SEQ ID NO: 336019 - DNA, 201 bp, Homo sapiens
tacaaaaaattagccgggcgtggtggcacgtgcctgtagtcccagctgcttgggaggctgaggcaggggaatcgcttgaacccgggaggcagaggttacaktgagccgagatcgtgccattgcactcctgcctgggcgacacagcgagactccatctcgaaaaaaggggactagccaaatgaatggaagcacagcatgcag

SEQ ID NO: 336020 - DNA, 201 bp, Homo sapiens
agatcgagaccatcctggctaacacggtgaaaccccatctctactaaaaatacaaaaaattagccgggcgtggtggcacgtgcctgtagtcccagctgctygggaggctgaggcaggggaatcgcttgaacccgggaggcagaggttacattgagccgagatcgtgccattgcactcctgcctgggcgacacagcgagact

SEQ ID NO: 336021 - DNA, 201 bp, Homo sapiens
atgtcatgcttctctgtcacaacgctcagacgttcaacctggagggatcccaggtctgtcttgttaagttgtctaaaagttcttaactgtaaatgtgcccrttgttctttttaagtagaatatttcattttctacctcttgaatcattgctactggcagaagaaaaataactaaaagcctatgttccttgctacctgtgta

SEQ ID NO: 336022 - DNA, 201 bp, Homo sapiens; identical to SEQ ID NO: 70687

SEQ ID NO: 336023 - DNA, 201 bp, Homo sapiens
gactattgttctgtacttaaaaaggaaaaaagcaactttctggccgggggcagggtggtgcatagaaaaccaccacatttcaaaaggtgtattaaaaaaaagccctcgctcagctcaaattagagaaagaaatgacaagaattcagaactgtcaggctgcttcacttccttttttgtttgtttgtttaatttttttttaac

SEQ ID NO: 336024 - DNA, 201 bp, Homo sapiens
gcaagtcagctggacgcctggctggaaatgaatcctgggtaaggcatgaaagcagcgttcatggtgttcttttagctttttagattttggtaatcttgtaygatctcgaaactaaaactacacagcctttgctgagatggttgaagttgttacttggatttgtcttttatacatagaatgtgctattaagtcatgtgtgtc

SEQ ID NO: 336025 - DNA, 201 bp, Homo sapiens
ccccaaactgacaaagcagatgaacgctatcatcgatactgtgataaactacaaagataggtgagtgtttggttccttcaccttgatcatctctcaccaasacgccgagtggcgctccctgaggagcaggagttgttaagttgtgcacttaggttttattaaggttctttctagtttgtgttttatggctttctctctttg

SEQ ID NO: 336026 - DNA, 201 bp, Homo sapiens
ctgagatggttgaagttgttacttggatttgtcttttatacatagaatgtgctattaagtcatgtgtgtctttattgtattgtaatttaaaaaactaagcyccctcctcttcctcactctttttccttagttatgaagttgcccctagatctgacagtgaagagagtgattctgattatgaggaagaggtatgtatgtatc

SEQ ID NO: 336027 - DNA, 201 bp, Homo sapiens
ataaaagaccctcactaattatcgattttcgcctggtcctggaaaaaaaaatcattaaaagacataaccagtattctagaagtagatttctttttttttttgaaactgagtttcgctctcgttgcccaggctggagtgcagtggcgcgatctcagctcaccacaacctccgcctcctgggttcaagcaattctcctgcctc

SEQ ID NO: 336028 - DNA, 201 bp, Homo sapiens
gcattttcagtttctttagtgggaggtagcctctcacctcccaccaacactcattaggtagtgaaatttccaaacacagaataaggtttcacatgctgggsagcaaaaactgctgagaaacgtccagtacaggactgggggaaggtcttaacatgaaaccgtgacatgattttccctcctttgtagcccatagatgagagc

SEQ ID NO: 336029 - DNA, 201 bp, Homo sapiens
acataaaaggcattaacacttaagctgtgttagataataatggggtaacaatgaaatcctattacataccggagagttaccaggaagtcctgtaccccatsatcttggttacttataacattcgacattgttgttttgcagaaggctgaggagaatgcagagggtggggagtctgccctgggaccggatggagaggtaagg

SEQ ID NO: 336030 - DNA, 201 bp, Homo sapiens
agagagcagaagaaggagacagagcggattgaaaaggagagaatgcggcgactgatggtaaggaactccctgcaggagcccaggaaactactcaacccacrtccgtctgcaatgagaccattaaatatggtggtagtagaaggaaaaaatgaaaactgcttatcaaaaattttagtaaatttctttgaaccttagggagat

SEQ ID NO: 336031 - DNA, 201 bp, Homo sapiens
acaggctgctttgactcttggtgactcgatacttatttatggtgctcagccagttatgcccacgtacagcaggtgggcagcccacaaataaacttagtccktctgtttcccgagacacagaatgcttccccttatcttccagcattagcctggccctgaagcccctctttcgagggtctctgcctctcaagctccaggcca

SEQ ID NO: 336032 - DNA, 201 bp, Homo sapiens
gaaggagacagagcggattgaaaaggagagaatgcggcgactgatggtaaggaactccctgcaggagcccaggaaactactcaacccacgtccgtctgcartgagaccattaaatatggtggtagtagaaggaaaaaatgaaaactgcttatcaaaaattttagtaaatttctttgaaccttagggagatgaagtaaaaac

SEQ ID NO: 336033 - DNA, 201 bp, Homo sapiens
atgccaggccccacacaagcttagagacagggtactctgagaacaggggaccattcccatctccatcaggtgagactaggacagatagcagctgcctgatrcagaaaatggcagcgcaggcagcagatgctgtgggtggggcagtttcccttagattataggatggcaggaaagataaagcctgccatcgtttactccgag

SEQ ID NO: 336034 - DNA, 201 bp, Homo sapiens
aaaatgggcaggagacatagagaacatcactgcagggctccagtgtctgcaccaatttattttaaaaaatacatagaaacttctggaaagttaaaacttartcacagtataaaaattgagttggagcactcttcttttcgaatattcttttttgtcccttatttttggcagttgtacatgtcaggtcagagtattcatggc

SEQ ID NO: 336035 - DNA, 201 bp, Homo sapiens
taacatccctagcataatgctaccttatgacctatattcaacttctactgccataccaactggacatgttctttcacacctgcagctcaaattcttaataraagtgaactgactggctcagccaatcactctggctgtgcttgtgcagagaccctcatgccaggccccacacaagcttagagacagggtactctgagaaca

SEQ ID NO: 336036 - DNA, 201 bp, Homo sapiens
gctcaggtctctagaaagctattttgcagggagaggacattttctgccatgttcactccatgtgaataagtttcctaaattgacagtgtttcaccccagtsggcacaattgactggagcaggaatgaaaaggagccacaattgtattccccatttgtcattgctgctgctgaggcaaatggtcctggtggcaattatttgc

SEQ ID NO: 336037 - DNA, 201 bp, Homo sapiens
tgagaattgcacatttgtattattgggattctttattaaataaagaaaaacaatggtaggaaataaggcagattttatgtattaggagtatgataaagtaygcaggtgtgtgataaaccatgagcatgtgaattccccttaactttttaaaattggattttgatggtatttcaactggaagcacaggaggccttgtcctcc

SEQ ID NO: 336038 - DNA, 201 bp, Homo sapiens
ttccttcgaaagcaacaattgaaggaatattcaagttctctgtgacctcttctccctggccctcagagctgcaaataatgtgatcattttacatcagtttrttaaacattagtcagcttgctgatttatttttaatcacattctgcatatttctaggcattaatctgatgtttattatgagaattgcacatttgtattatt

SEQ ID NO: 336039 - DNA, 201 bp, Homo sapiens
agaaaaggaggtttaattggacttacagttccacatggctggggaggcctcagaatcatggcaggaggcaaaaggcacttcttacatggtggcggcaagaraaaatgagagagatgcaaaagtggaaacccctggctgggtgtggtggctcacacctgtaatccaagcactttgggaggctgaggcaggtggatcacctga

SEQ ID NO: 336040 - DNA, 201 bp, Homo sapiens
ggaaagagcccagtaatattagtccttgatgtcattttaccattatacttgttaaagtctaaagttgttcagcgtttttctttacccttatcaaatgtcaytgtgagttaacagctcttgaaaaagtagaagcctggggtaatcatttcacaatgtttatgtatatcaaaatctcacagacgtaccttaaatatacacaat

SEQ ID NO: 336041 - DNA, 201 bp, Homo sapiens
aacggctagtcctggcttggaataccaaaaagctatggaagccatgcagggccagaatatagctaagtgtgtttattagtaaaacctgcctgtattagtcygttttcacactgctgataaagacatacctgagactgggaagaaaaggaggtttaattggacttacagttccacatggctggggaggcctcagaatcatgg

SEQ ID NO: 336042 - DNA, 201 bp, Homo sapiens
tatactttaagttttagggtacatgtgcacaatgtgcaggtttgttacatatctatacatgtgccatgttggtgtgctgcacccattaactcgtcatttarcattaggtataaggagatgttttctttcttttttctgagacacacgcacatgccaccacacccaactaatttttttattttttgtagagacagagttttg

SEQ ID NO: 336043 - DNA, 201 bp, Homo sapiens
aagaaactcacctttttggagtcttgtattgttcatgctctttatagaactaagaacccaatttcttctcacagttacattatattcatttatgtaagtamtatctaattgaattaatgtagctccagtaataagtataactaacatcaacatgtttgggaacacagctgatcattggtatttgagccaaatggcaagagc

SEQ ID NO: 336044 - DNA, 201 bp, Homo sapiens
ttatctgggaagtattagttgaggaatggggattgttagttacaaatgaccaaaatcaagtctgcctgatttaaataaaaagggaatgtattgataggatrctgggcaactcatcagatctccagggtttctgaagaacctgactcagggctatccccaatattatgctctacaactggtctagtgaggacaggctgtggc

SEQ ID NO: 336045 - DNA, 201 bp, Homo sapiens
cagctttattttacatagcccctattcaagatggagttgctctgcttcaaacatctctgacagttccatacaggcaggcttggaattgatagactgaggakaatttaagaaactgagtagtgcagtagctcatgacagaagtgtttaagatctgagcaataggatacagctcataactatttagaaaaagtacagaatcga

SEQ ID NO: 336046 - DNA, 201 bp, Homo sapiens
gaaccactcacagaccaagcatttccaaacaaacattttacttagggatctgttcttagaagtacagatcaccctgcaatcaggagcagtcattcgttackgattatattcaagtgtgattcttgtgttccttggatatagtagtctagtaatgaactttagcttaatttttggtcaatttgccagatttcagaggagcag

SEQ ID NO: 336047 - DNA, 201 bp, Homo sapiens
ttgaggcaaatccatacagtaaagagaaagcaagtttattaggaaagtaaagggataaagaatggctactccataggcagagcagcttcgagggctgctgyttgcccatttttgtggtggttttttgatgatatgctaaataaagagtggatttttcatgcctcccctttttagaccacatagggtaacttcctgatgttg

SEQ ID NO: 336048 - DNA, 201 bp, Homo sapiens
ttgaggggattcatgaataggtttcttaacatgggtatgttgcatgatgctgaggtttggggtgcagttgatcccatcattcagctaatgagcatagtacytaaaagtttttcatcccttcctgcgctccctccctcccccgtctagtagtccccagtgtgtattgttgccatctttatgtccatgaatacccagtgttta

SEQ ID NO: 336049 - DNA, 201 bp, Homo sapiens
tggccacaccctcaaggctaaggaggcttctcttgctaaagcttacaacaaaaggaacccgaagaggctatctttcccaccagccccatggcccacacctyaactgcagagacaccagggcacctatccccaaacagattctagtcttcctatgctgttaaacacacactgagagttttcttggacaacactgatagctca

SEQ ID NO: 336050 - DNA, 201 bp, Homo sapiens
gccagactctgagagaagctcgcatgaccgagaagctggagaagcagcagaagattgagcaggagaggaaacgccgtcagaaacaccaggttcttagaccytgggctttgctcaccctcactttggcagagctgtccaatgaattcatcaaatggggtcagaatgactgaaaaatggacccttgtgggtggtggggacatc

SEQ ID NO: 336051 - DNA, 201 bp, Homo sapiens
ttgacattatctccaaatgaggttatgctcttaatagttgtattttatctgtcttaaaagcattaagttattctttgtgagcattaaaactatattagttkgttaccctcttttggcatttcatttttaatatactgagaacctcgaagtacagaagtggcccaggcccttctgaggagccctgctcaacagacaagcgga

SEQ ID NO: 336052 - DNA, 201 bp, Homo sapiens
tgcattgaaaaagattaattgaagaggtgaaagaaagggcagggaaaacccataagggaggccatttaaatgtgaccctgtgagagaggagacccgtctgwcagcagggagaccagggggaaaagattgcttatgaactatttcagaggtaaactatatgatgacaaataggactgcagggatgtgataagggaaactgat

SEQ ID NO: 336053 - DNA, 201 bp, Homo sapiens
cctcccaccaacactcattaggtagtgaaatttccaaacacagaataaggtttcacatgctgggcagcaaaaactgctgagaaacgtccagtacaggactsggggaaggtcttaacatgaaaccgtgacatgattttccctcctttgtagcccatagatgagagcagccagatgagtgacctccctgtcaaagtgactcac

SEQ ID NO: 336054 - DNA, 201 bp, Homo sapiens
tgattttccctcctttgtagcccatagatgagagcagccagatgagtgacctccctgtcaaagtgactcacacagaaaccggcaaggttctgttcggaccrgaagcacccaaagcaagtcagctggacgcctggctggaaatgaatcctgggtaaggcatgaaagcagcgttcatggtgttcttttagctttttagatttt

SEQ ID NO: 336055 - DNA, 201 bp, Homo sapiens
ataaagaattcaagtatgtacgtgtgtatatatacttacttgaattctttatattctatagagagacttttatagaatatgtagaatcacacacacacacmtacacacagagagagagaaatggatgtacttgcaggtatggacataaacattttttttcctggaaataattagttatagggaaagagactaggaatgggg

SEQ ID NO: 336056 - DNA, 201 bp, Homo sapiens
gccattagcaacggattcggattcattatgaagtatacaaatcaagagaactaggccaggcactgtggctcatgcctgtaatcccagcagtttgggagggygaggcgggtggaacatgaggtcaggagatcgagaccatcctggctaacacggtgaaaccccatctctactaaaaatacaaaaaattagccgggcgtggtg

SEQ ID NO: 336057 - DNA, 201 bp, Homo sapiens
cataaagaattcaagtatgtacgtgtgtatatatacttacttgaattctttatattctatagagagacttttatagaatatgtagaatcacacacacacacatacacacagagagagagaaatggatgtacttgcaggtatggacataaacattttttttcctggaaataattagttatagggaaagagactaggaatggg

SEQ ID NO: 336058 - DNA, 201 bp, Homo sapiens
ctgactacaaattcaggggctcgtgaaccctttaggcttgataatttgctagaacaactcacagaactcaggcaagtgccattagcaacggattcggattsattatgaagtatacaaatcaagagaactaggccaggcactgtggctcatgcctgtaatcccagcagtttgggagggcgaggcgggtggaacatgaggtca

SEQ ID NO: 336059 - DNA, 201 bp, Homo sapiens
gtgcacttaggttttattaaggttctttctagtttgtgttttatggctttctctctttgtacctgtttaaaatggccactgttgctattttgtatgatgtytcatcaggtattatttaagatagttgaaaatttagtttagattacaaaatgtttaaaatatctaaattagaaaaggattcttaaggacctctgaaatacc

SEQ ID NO: 336060 - DNA, 201 bp, Homo sapiens
ggagtgcagtggcatgatctcggctcactgcaacttccacctccctggttcaagggattttcctgccttagcctcctgagtagctgggattacaggcatgygccaccacgccaggcaaatttttgtatttttagtagagacggggtttcaccatgttagccaggctggtcttgaactcctgacctcaggtgatctgcccac

SEQ ID NO: 336061 - DNA, 201 bp, Homo sapiens
tttgactgactacaaattcaggggctcgtgaaccctttaggcttgataatttgctagaacaactcacagaactcaggcaagtgccattagcaacggattcrgattcattatgaagtatacaaatcaagagaactaggccaggcactgtggctcatgcctgtaatcccagcagtttgggagggcgaggcgggtggaacatga

SEQ ID NO: 336062 - DNA, 201 bp, Homo sapiens
gcctttgggtgacagctggggctaaggatttacaaatgctttgatggtgtatgcctagtggtacagtgatctcttggaaggccctggctaatggggaaacytggcacattctaaattcacttgaaaccaagagaagagaagctggcattaacttgggagatggtgaagtggtcttttgggggagaattggagatggattac

SEQ ID NO: 336063 - DNA, 201 bp, Homo sapiens
ttgtacattaaaggcacttagtgctgttaatattagcctactttaacttattacttattattattctttctttgttgaaatctagttcagtacagtttgcctcagatttaggggatgtagttctaaaaatagtcttaaatggcatataattattttgtcagaataggattcaggtgaactctaaaaccagcagtttatata

SEQ ID NO: 336064 - DNA, 201 bp, Homo sapiens
gatatttagggatgagctagaacaagccaaccaggatgagagaggttgaaagggaccctgcagccataggaagtgacttggggaagttgtgtagtgctggraagtctgcaccatacagaagccctgactttcggtgaccctcttattaatgtctccagcggatggacatggaccggcggagggaagatgcccggaacccga

SEQ ID NO: 336065 - DNA, 201 bp, Homo sapiens
gagttactttctaaatacaatgtgaatttgaaaacaaaggagtatggaaatacaatgtttaaatatgtatatttttatatatatgtatgtgtatatatatwcatatatatttaccaattcatttaaaaatgaaatttttagctaacaaggatattttaaatatttctatcaaaataaagagatatatttgctctgaaaggg

SEQ ID NO: 336066 - DNA, 201 bp, Homo sapiens
cctcttattaatgtctccagcggatggacatggaccggcggagggaagatgcccggaacccgaaacggaagccccgtttaatggaggaggatgagctgccytcctggatcattaaggatgacgctgaagtagaaaggctcacctgtgaagaagaggaggagaaaatatttgggagggggtcccgccagcgccgtgacgtgg

SEQ ID NO: 336067 - DNA, 201 bp, Homo sapiens
ggttcacattgagaattaactgccaaaaagttctgaagtccttcagaccttcgagtctatttgcaattctgagtctggaaactttgacaaaaagggcaacrtgggcttggtttaatgagtttattgatcctcttgatttctctccaaatgtgattcttgtttgaattccttagatatacttgttatccaaagagaagcgct

SEQ ID NO: 336068 - DNA, 201 bp, Homo sapiens
aacatattattttgagttactttctaaatacaatgtgaatttgaaaacaaaggagtatggaaatacaatgtttaaatatgtatatttttatatatatgtaygtgtatatatatacatatatatttaccaattcatttaaaaatgaaatttttagctaacaaggatattttaaatatttctatcaaaataaagagatatatt

SEQ ID NO: 336069 - DNA, 201 bp, Homo sapiens
gtctcttggaaggaatacttagtataactagaacctaaaatgggaatcttgggtatttttaatagaaattgagaaataataaaatatttgttaaatcagcyacaaaatgtttaatttaataattacaaatagaaggattaaaagaagatttgctctcctttattagagcattgttaatatattgtcattagatctgatatt

SEQ ID NO: 336070 - DNA, 201 bp, Homo sapiens
ttaagatttctttctcagcactatctattagctattctggtcaacagatcagcttgagcaggtaaaaaagaaaaaccataaaagaccctcactaattatcrattttcgcctggtcctggaaaaaaaaatcattaaaagacataaccagtattctagaagtagatttctttttttttttgaaactgagtttcgctctcgttg

SEQ ID NO: 336071 - DNA, 201 bp, Homo sapiens
aatatttgttaaatcagccacaaaatgtttaatttaataattacaaatagaaggattaaaagaagatttgctctcctttattagagcattgttaatatatwgtcattagatctgatatttttgagagtgccgtagtataggtgccgaggacaaggtaaaacatccttacccataatagcttaccagggtctcaagactatg

SEQ ID NO: 336072 - DNA, 201 bp, Homo sapiens
gtttttcaatgccttttttaaatccttgttgaggttgaagttgtactgcactacaatttgatatcctctgtttttttgggttttttttgtttgtttgtttkttttttgagatgaagtttcgctcttgttgcccaagctggagtgcaaatggcacaatctcggctctctgcaacctccgtctcctgggttcaagcgattctc

SEQ ID NO: 336073 - DNA, 201 bp, Homo sapiens
ggggtcccgaggccccccacacttttgactgactacaaattcaggggctcgtgaaccctttaggcttgataatttgctagaacaactcacagaactcaggmaagtgccattagcaacggattcggattcattatgaagtatacaaatcaagagaactaggccaggcactgtggctcatgcctgtaatcccagcagtttggg

SEQ ID NO: 336074 - DNA, 201 bp, Homo sapiens
gaaaatcatgaacacaaatgctttatacctctgcccctttttctgttaagcagaatgtctgcagcctgcgtgcctggcagaacttcatacgtaaagcctaygcctttccttcagttcagaggctgcaaactggctggagttagcctgcagacatattttgtttggcccacgcagcgttttttaaaatttcccattcattgc

SEQ ID NO: 336075 - DNA, 201 bp, Homo sapiens
attatgatgaattaaccctttcttcagaagagcttttaaaaaatctttgcttcagtggtcaaaagaggctctttgtaagtactgaaaatggaaaaaaaaaatgaattaaatggagttatttaaagcacaattggaaagagctatgtcaacaaataatgcaagtacctggtatgaatgacacatatacacagggtgggatgg

SEQ ID NO: 336076 - DNA, 201 bp, Homo sapiens
caggcttggattctgaagggggagtattgcatttcaacccagctgcaattcagtgctggcacaaactagccagacttagcacagactccataagttaaagkgcatagtccccaacaacactgccctgacttcagacaccagccacactttgggggtcccgaggccccccacacttttgactgactacaaattcaggggctc

SEQ ID NO: 336077 - DNA, 201 bp, Homo sapiens
gaacctcaggcagagctaggaagcctgaaaatctcctcagtcgtcctaacgtggagcttaaaagagtggattctatttcaaatcctaactgtgccattcartagctatatctttgggtctgtagctaaacctctgtggtgctcagattcctaatctataaaatgagaaggctaaatgtggctatcccagtacagctctttt

SEQ ID NO: 336078 - DNA, 201 bp, Homo sapiens
ctttccaataaatccacctttagcagttttagtgcctcattatcttcctttccactcagtctctgcctccaaacaccccaggcttggattctgaagggggwgtattgcatttcaacccagctgcaattcagtgctggcacaaactagccagacttagcacagactccataagttaaagtgcatagtccccaacaacactgc

SEQ ID NO: 336079 - DNA, 201 bp, Homo sapiens
atgtgatttttgatcctgtgtattaaatgccctaattgtgtgaggaaagagactctgccttctaagagcagccatcaggtccttgagagctgcttgcctcyctgctgacttgacctcgttgagaatgcttggcatccctgtctccatggtatcaccatgcatgcctcctgctttccaaactccttcacctccagcccttag

SEQ ID NO: 336080 - DNA, 201 bp, Homo sapiens
ccaagtggcctggagttgtttgagaaggctctgggagcaaacataaaatatagttgtgaagcttatgtgatttttgatcctgtgtattaaatgccctaatkgtgtgaggaaagagactctgccttctaagagcagccatcaggtccttgagagctgcttgcctctctgctgacttgacctcgttgagaatgcttggcatcc

SEQ ID NO: 336081 - DNA, 201 bp, Homo sapiens
tgtaggaaataaatgtaattgttcctaaagtgttatctgtgttgcctttagtctattcaatattgttacaaagatataaagatataaatatagtaaaatastgaatcttttagaccaacagcttacaactaaaaatgatgaagatgaactgcttattattctggttttctcttctgtatatgggaaagagtttttcctcct

SEQ ID NO: 336082 - DNA, 201 bp, Homo sapiens
caggggaagcgtgagagtgggtttccaccactgggagcatctgatagtcctttcatccttgctgcctggttcatttactttctgccaatggtggtgaggcmttatgggtttccccgtgcccagataaggagatttagtatgatctgattttaactaaactaacaaccctggtccccagaagggcttaaaaggattctgcaa

SEQ ID NO: 336083 - DNA, 201 bp, Homo sapiens
aaaatagtgaatcttttagaccaacagcttacaactaaaaatgatgaagatgaactgcttattattctggttttctcttctgtatatgggaaagagttttycctcctgtactatgggttacaaagtcagagttatggcgttttgttaccatggatgaaaaaccttgggaacaagtggggtagctcatgtttgcttttatga

SEQ ID NO: 336084 - DNA, 201 bp, Homo sapiens
tgaactgcttattattctggttttctcttctgtatatgggaaagagtttttcctcctgtactatgggttacaaagtcagagttatggcgttttgttaccayggatgaaaaaccttgggaacaagtggggtagctcatgtttgcttttatgactccaaggaaaaaccagaaggtagtggattggagcttctttgtaagcaca

SEQ ID NO: 336085 - DNA, 201 bp, Homo sapiens
aatgttaaacattttaatttatcccataatttctttttttttctttacaagaggtataaaataaaaggcaattaactgaagcccttcatttattcattccrtaagacttcttaatcttgttcattcacttctaagactggctaatacagatagatttttaaaaatatattgcaagttgaaagtatgttatgttgtaagaaa

SEQ ID NO: 336086 - DNA, 201 bp, Homo sapiens
aggtaattggcatggtttcagtttccttggcaagttgtaaccatttacctaattttgattgaagtatgtcgtgcacatgttgactaagggcttttgatgayattttaggccacatcacttataatactgaggttcctttcattgtgcctatgattcttcttttagagtactccatgttaccatctttactagggcatgcca

SEQ ID NO: 336087 - DNA, 201 bp, Homo sapiens
ttttgtggtagtcagttcaacattcacattctgggctgtttctctcttccccgggggctcccatcccatcctcctctccaagatggcatctggataaagaygtggtgtttaagcatggcattgggggcgagcatcctggttctcttgctccccatgggtctccactgatctcagcatatagctgctggtctgctcctttcc

SEQ ID NO: 336088 - DNA, 201 bp, Homo sapiens
ttgaattacttcctagcatacagttacggtgattctgcaagtgatagagatggaatgttaaacattttaatttatcccataatttctttttttttctttasaagaggtataaaataaaaggcaattaactgaagcccttcatttattcattccataagacttcttaatcttgttcattcacttctaagactggctaataca

SEQ ID NO: 336089 - DNA, 201 bp, Homo sapiens
agaatctgtttagttggtggaatttagaatttttttctgcattcataatgttgtttttaatcaggaggatcacaatttcaaacacagttcagtttttttttaaaggtattttacattgttttgaaattcctatttccactgaggaaacttagatgtccttagtgttagctggtctcaagttaacgtcatctttttgtggta

SEQ ID NO: 336090 - DNA, 201 bp, Homo sapiens
aggtagtaattttgtccaagtggaagacctaattagtagtagaccccatagcaaaatcaaaggcctctgattctttattatttcataagctaaattaggcrggaaagtagatttaggatatttatttaaatatattttttgtctgcttgcctcttttcatgctgttggtaagtctgaggcagttgattgtacagctttaat

SEQ ID NO: 336091 - DNA, 201 bp, Homo sapiens
agcataactcaagggtgtgtttactttctccagcaaccttgacacagagttaactcattgaatatgtgacttcttgaaataacccccactccccaccccaraacacacatacactgctctgatttcacatgaatactgccaaggttagctttcagataagcataatttttttgaacctatgcctactgattgtattcttat

SEQ ID NO: 336092 - DNA, 201 bp, Homo sapiens
ctgtgatttatttcattattgtgctggtaaaaggtttggaagggaattctttttgggggtagtactttagcattgtgtagcaagttttggggttttttttktgtgtgaccccccagcccccagcgctgagtttgagtcagttgagccagtttagtaaataattttttaaaataaaagaacagtttaaaatctccatgaata

SEQ ID NO: 336093 - DNA, 201 bp, Homo sapiens
tctgtgatttatttcattattgtgctggtaaaaggtttggaagggaattctttttgggggtagtactttagcattgtgtagcaagttttggggttttttttgtgtgtgaccccccagcccccagcgctgagtttgagtcagttgagccagtttagtaaataattttttaaaataaaagaacagtttaaaatctccatgaat

SEQ ID NO: 336094 - DNA, 201 bp, Homo sapiens
gggggtttgcttctgtgatttatttcattattgtgctggtaaaaggtttggaagggaattctttttgggggtagtactttagcattgtgtagcaagttttsgggttttttttgtgtgtgaccccccagcccccagcgctgagtttgagtcagttgagccagtttagtaaataattttttaaaataaaagaacagtttaaaa

SEQ ID NO: 336095 - DNA, 201 bp, Homo sapiens
cctcccgagtagctgggactacaggcacgtgccaccacacctggctaatgtttgtatttttagtagagatggtgtttcaccatattggccaggctggtctsgaactcctgaccttgtgatccacccgccttggcctcccaaagtgctgggattacaggcgtgagccactgcgcgggggcattttcgtttttccaaccaaat

SEQ ID NO: 336096 - DNA, 201 bp, Homo sapiens
attgtaccgctgcactccagcctgggcaacagagcgagactccatctcaaaaatttaaaaaataaggtcgggtgcattggctcacacctgtaatcccagcrctttgggaggctgaggtgggcggatcacctgaggtcagaagttcaggaccagcctggccaacatggcaaaaccccatctctactaaaaatataaaaatta

SEQ ID NO: 336097 - DNA, 201 bp, Homo sapiens
ttcaggtggctacccagagaggtcagtgggaacttaccaaaaatcggccctgatgaccactcctgcatcaggttctccagtggccttccattgtaagtgtwattaaatctaaacacttgaacatggtctataaggccacaatcaccaggcctttgcctggtgctggattcccacctccttgccttcatctctgggtggctg

SEQ ID NO: 336098 - DNA, 201 bp, Homo sapiens
aggagcttgtgagtgagaggcctaaagcctaagcttcattagctttccaataaatccacctttagcagttttagtgcctcattatcttcctttccactcartctctgcctccaaacaccccaggcttggattctgaagggggagtattgcatttcaacccagctgcaattcagtgctggcacaaactagccagacttagca

SEQ ID NO: 336099 - DNA, 201 bp, Homo sapiens
tagatgacagagccatacctagcttctctgagttagttacaatctactctgtaaagcgttctaaggtagcacttgttgttttcaggttttcctcccgtcactcgtgcacattcggagatgacatggtctacttaagcttctgtgtctccttggtcagcaccatcattagcccaaggtcctaaaagtgaaataatgaagact

SEQ ID NO: 336100 - DNA, 201 bp, Homo sapiens
cattcttttagagaccttgatgacatgtgctgttgaaatctggagcctggccacaggcactagttagaagctgtcctgcattctcacatctcataagaccsctggcctctttggcctcatggtgctcttagctcttttgtgttctgtttggaagtctgcaaactctccttgactgatttctccacactgtgctagaagatg

SEQ ID NO: 336101 - DNA, 201 bp, Homo sapiens
cactttcctagaaaccatccagaaatacagattggtaggagattatatgccttaaacctcagctaagcattgcacagtggtttagagtacagactcttgtbttgatttaaccacctgcatttgaatcctgactctgacattcaccagctatgggacagtggagtaatttacttaatctccctgagcctcagtttccccatc

SEQ ID NO: 336102 - DNA, 201 bp, Homo sapiens
actttctttgccagtggtgttttggtttcattgaagacaggttttattttgtaatcatggcatgctaaaaattcctacagtgtcctttagagaatctgttyagttggtggaatttagaatttttttctgcattcataatgttgtttttaatcaggaggatcacaatttcaaacacagttcagtttttttttaaaggtattt

SEQ ID NO: 336103 - DNA, 201 bp, Homo sapiens
ggctgtgagcccaggaaaacaaaattttggtgaatatttagccatccctgcctcagcacacttaggttaaatttaagtgttatggtcactttctttgccartggtgttttggtttcattgaagacaggttttattttgtaatcatggcatgctaaaaattcctacagtgtcctttagagaatctgtttagttggtggaatt

SEQ ID NO: 336104 - DNA, 201 bp, Homo sapiens
aacaacatggagtagtgggtatggaagtctaatgggccctgcctaaatggttataattccattggctagaacttggttatgtggccactccagctgcaaargagatggaaatgtggtctggctgtgagcccaggaaaacaaaattttggtgaatatttagccatccctgcctcagcacacttaggttaaatttaagtgtta

SEQ ID NO: 336105 - DNA, 201 bp, Homo sapiens
ctttttgtaatctaatcttttgaaaactgcatgcccgtatttggtatgaaactggcaacttgttattaatcaggacatgcaatggatgcaacatgccccakggcctaagcattcaaagtagatgcttcctgtctttggtgttcaccagcagcaatcctatttaatatcagcctgttaagcttttttgatgatgaaatgata

SEQ ID NO: 336106 - DNA, 201 bp, Homo sapiens
gtaaacttccttttatctacaacatgcacatttaaaaatggaaaattagtttgttttacaaaactgcactgtgaaaattggtttttataattgtaattctraaatgccatgcaacatactaagtcatccaagaaggacgaaactgttctcaaaacagctttattgtaacgtatctttttgtaatctaatcttttgaaaact

SEQ ID NO: 336107 - DNA, 201 bp, Homo sapiens
gagactcagtgaatgtttgtgaaaatgaaagtacagccttaagaggaaagggaaagtgactaacttatcagcagtgttaggagagcatttctctttttagygcatctagtaaacttccttttatctacaacatgcacatttaaaaatggaaaattagtttgttttacaaaactgcactgtgaaaattggtttttataattg

SEQ ID NO: 336108 - DNA, 201 bp, Homo sapiens
aggtaatcacagcatatcatataccaaggatgggttctttggttttccgcaccaccacttgcttgttggaaatagttgtattttcccttgcttactacacrtccgtccttcctcttgtgttatagattcggtggaaatacatgatagtggacgaaggccaccgaatgaagaatcaccactgcaagctgactcaggtcttga

SEQ ID NO: 336109 - DNA, 201 bp, Homo sapiens
aagatatctgttttgttttctctttttcattcagtttctatccctgatgagtagcacagtgcctagcatagagactcagtgaatgtttgtgaaaatgaaastacagccttaagaggaaagggaaagtgactaacttatcagcagtgttaggagagcatttctctttttagcgcatctagtaaacttccttttatctacaac

SEQ ID NO: 336110 - DNA, 201 bp, Homo sapiens
tttactcaggatgttgtatgatgagagggacgtgacctgaattttgaaaagatgggagcctgtgattctgaaaagcactgctcattatttgtggttgaacmgttgtgtataaaatagaacatttgtgtgattagtttgtcgtatccagtcaaatattccagtgacctcagaatatgattctgtgaattttctttgtttcac

SEQ ID NO: 336111 - DNA, 201 bp, Homo sapiens
ttcccaagctttgtgaaacatggattttaggacccaggttttaagtaggtagatgggtagaaaggcagtgggcagaattttgagattagataccaaaggcraacaggtcttgtcaccgcttgagatgtgatttactcaggatgttgtatgatgagagggacgtgacctgaattttgaaaagatgggagcctgtgattctga

SEQ ID NO: 336112 - DNA, 201 bp, Homo sapiens
agaaactgaggcccagagaggtgacatggctatgcaggacacacagctggttagaaagcacagaatcggtgggtgcttatgtgtctacatgctcgatttcsgcttgatctgatctgtccatcacaaacacagattagagcctgggactcgggtcaccgatgcttggaaatgttattcgggagtttgtttatgttgtttttc

SEQ ID NO: 336113 - DNA, 201 bp, Homo sapiens
tagtataagatagcttacctcattgtgaagatgaacgagagatgactcagggcttgtgtttagacattttgttggtgaggaatacctcattttcttgtcartgtagcattatagactgtgcaaaactccagctccaattcctaccttaaaaagatgttttcagagttagtgaggaacatatacgtaaggggggagggaaga

SEQ ID NO: 336114 - DNA, 201 bp, Homo sapiens
aattcagccatgtgttctgcagaggttgtcactgttagtgtttttagtattaaaatttttgtattttacatttctttgtgattaaaagctaatgacccagwtttgagattatggcttacaattaatagatttctgccgtggtgttagatagttgcatcgtcgtaggcagagaaagatacacaattgagtgttgatgattat

SEQ ID NO: 336115 - DNA, 201 bp, Homo sapiens
agtggagtactgaatgtgcatcccttctgcaccattataaagtcgaaaaatcctaagtccagccgttgttaagccagagactgtctgtatattttttttttctaaaatgaatctaaatgtgaagtaaagcttgatatttaaaggtatcctgaaatgaacccatttgcaaattgaagagcacttttgtattatgcctcctaa

SEQ ID NO: 336116 - DNA, 201 bp, Homo sapiens
ggattgctttgagcccaggaatttgagaccagcctgggcaacatggtgaaaccctgtctctacaaaaaaatacaaaaattagctgggcacagtggcacttrtacctgtagtcccaagttcctcagcaggctgaggtgggaggattgtttgagtctgggaggcagaggctatagtgagccatgatcgtaccaccgctctcca

SEQ ID NO: 336117 - DNA, 201 bp, Homo sapiens
gaggattgctttgagcccaggaatttgagaccagcctgggcaacatggtgaaaccctgtctctacaaaaaaatacaaaaattagctgggcacagtggcacktatacctgtagtcccaagttcctcagcaggctgaggtgggaggattgtttgagtctgggaggcagaggctatagtgagccatgatcgtaccaccgctctc

SEQ ID NO: 336118 - DNA, 201 bp, Homo sapiens
catttgacttccccactagatgcagggtgaaccttctttccctagtgttagatagaggttatggaggaagccacattgttaagtaacatatacctgtctgyattaatgcaaaggtagcttttctctgcttaacatcaaaaattctagttgggtgttagagatcaactatcagtatctggaatatgttttgccccggactta

SEQ ID NO: 336119 - DNA, 201 bp, Homo sapiens
aggaggattgctttgagcccaggaatttgagaccagcctgggcaacatggtgaaaccctgtctctacaaaaaaatacaaaaattagctgggcacagtggcmcttatacctgtagtcccaagttcctcagcaggctgaggtgggaggattgtttgagtctgggaggcagaggctatagtgagccatgatcgtaccaccgctc

SEQ ID NO: 336120 - DNA, 201 bp, Homo sapiens
cttaagctttaaataagctgacctcatttgtgcagctgcatagcccacaaataaaccaacacaaatgagtttagagtcacttttgagtacctaaataaaakaaaattaaactaaattaaaattttaaaatcttccttgctcttaaaattgttacctatgtgccaaagatatagaatacattgacacacctttaactttttc

SEQ ID NO: 336121 - DNA, 201 bp, Homo sapiens
gtgccctgaattaaaaatttaaaaagttatatactgaataaggagaaatttacagaaacatggcatatacgtgtgtgtgtacgtgtgtgtgtgtgtgtgtkagagagagagagagagagagagagggcgaggagaaagaataagttgagagaaagattgaaagtattaagaacatgaaagtggttccttttctttctagaa

SEQ ID NO: 336122 - DNA, 201 bp, Homo sapiens
actcacactgaataatagtgtggcaatgcaaggcagcatcatcccaccaatcagaatgaatgatccaggcattcaggtggtttaggacggggtacccagtrtgtacacatgggtgtatgtgttgggaaatgcttattagtaatccattgggtggagaaagatgttagaacaatcatatatattgatctttctcttaaaaag

SEQ ID NO: 336123 - DNA, 201 bp, Homo sapiens
ttcattagcaatggatgttaaagagaatcttgacttgcaacaacaaaaatgaacactgcattaacagaaagtgtgtgtgtgtgtgtgtgtgtgtgtgtgtgtggtgtgttgcaaatttgaaaaatttattattaggatgtagtcatcatttttggatcccaagggcggacagtttcactgggctaagaaccaggaactata

SEQ ID NO: 336124 - DNA, 201 bp, Homo sapiens
aatgtttttcattagcaatggatgttaaagagaatcttgacttgcaacaacaaaaatgaacactgcattaacagaaagtgtgtgtgtgtgtgtgtgtgtgtgtgtgtgtggtgtgttgcaaatttgaaaaatttattattaggatgtagtcatcatttttggatcccaagggcggacagtttcactgggctaagaaccagg

SEQ ID NO: 336125 - DNA, 201 bp, Homo sapiens
tggggtttcattatgttggtcaggctggtctggaactcctgacctcgtgattcgcccgcctcggcctcccaaagtgctgggactgcaggcgtgagccaccrcaccgggccaaattatagaaaattttcataaaaaaaaaaggagaagtactttaaacatataacatgatcagttatctaaaacacaaagcctgtattaaat

SEQ ID NO: 336126 - DNA, 201 bp, Homo sapiens
accaccatgcctggctaatttttgtatttttagtagagctggggtttcattatgttggtcaggctggtctggaactcctgacctcgtgattcgcccgcctyggcctcccaaagtgctgggactgcaggcgtgagccaccacaccgggccaaattatagaaaattttcataaaaaaaaaaggagaagtactttaaacatata

SEQ ID NO: 336127 - DNA, 201 bp, Homo sapiens
gcttggtttgatgaagaaactgaggcccagagaggtgacatggctatgcaggacacacagctggttagaaagcacagaatcggtgggtgcttatgtgtctrcatgctcgatttccgcttgatctgatctgtccatcacaaacacagattagagcctgggactcgggtcaccgatgcttggaaatgttattcgggagtttgt

SEQ ID NO: 336128 - DNA, 201 bp, Homo sapiens
ttggttaggctggtctcaaactccctacctcaggtgattgacctgctttggcctcccaaagtgctgggattacaggcatgagacaccgtacctggcccatygtagccatttcaagtgtacatttcagtaacatgaagtacatttacattgttgtgcaaccatcaccaacatcccatcttcagaacttttccgttatctcaa

SEQ ID NO: 336129 - DNA, 201 bp, Homo sapiens
gcaatcaaagggaaggggctcttgaacacagaagataaagtcattctgctgttgcataaagtcattgtgctgttgcatgaaaagataaaggcgttctgcayttcaaggcggtgcttggaaaaaaatatgcaggattttttgctagagcagaattggccattggaagcacaggattatgagagctgtgagacccactaatgt

SEQ ID NO: 336130 - DNA, 201 bp, Homo sapiens
ctgtgcaatggcttgaacagcccaactcatccagtttgctacactcctaccagtcaaaatgcagactgtcaaggggaggacagagtggagagtggagttgyctgcacgcttatattatgctctcatcctgctcttctttccttaataggctgaagatgaggagggttatagaaaactgattgatcaaaagaaagacaggcg

SEQ ID NO: 336131 - DNA, 201 bp, Homo sapiens
gagggagctttgcatacacacagactaagaaaaggaaattctttaaaagtactttttaaatgtatgaataagtttcaaaaggtgggtacagaaaaagggargggattttacttaatggaatctctccctagatatttagggatgagctagaacaagccaaccaggatgagagaggttgaaagggaccctgcagccatagga

SEQ ID NO: 336132 - DNA, 201 bp, Homo sapiens
catatatatatgtataattgcgcatgcacaagaaatggcccatcttgataatttcttggaaacatatatttgcttctttatatgtaagagcaggcattccrtctacctaaattctgacaagcccagtgggccacggttttccggtttaatgtcagccctgtgtacactggctgtgctgtttctagcaccgtaaggcagtca

SEQ ID NO: 336133 - DNA, 201 bp, Homo sapiens
tttacattttatcagttttagcttttaagaaaacataatattgaatcccaatttcagtatggtagaaccaaaggaagaaggaaaaggtaaataacaatgaytgatggtccatttcattgtggaaatgacacatctcgctagtgtttatacataatgtctgtggatatatagtggcagtttattttttaaaaatccatcgta

SEQ ID NO: 336134 - DNA, 201 bp, Homo sapiens
aatggcccatcttgataatttcttggaaacatatatttgcttctttatatgtaagagcaggcattccatctacctaaattctgacaagcccagtgggccasggttttccggtttaatgtcagccctgtgtacactggctgtgctgtttctagcaccgtaaggcagtcatcattattgagccaggggctgtgcaaaattggg

SEQ ID NO: 336135 - DNA, 201 bp, Homo sapiens
ctgtaaagaaggcaacctctgtgtgccagttatgaaggtttggtggatccatttctcataccaaaacattagaagacaggattaagcatcgtgagctaatyatagcacatgacagagcaaggtggccacatttatcaaccaatgggacttcacctgtctcccaagcctaccagattctggaaatgtaatgacttccaaaaa

SEQ ID NO: 336136 - DNA, 201 bp, Homo sapiens
gcaggcattccatctacctaaattctgacaagcccagtgggccacggttttccggtttaatgtcagccctgtgtacactggctgtgctgtttctagcaccrtaaggcagtcatcattattgagccaggggctgtgcaaaattggggtgattgcagagccaaaaagcgggctggagggtggtttctggaatgcctgttttac

SEQ ID NO: 336137 - DNA, 201 bp, Homo sapiens
ctttagaactgctgtaaagaaggcaacctctgtgtgccagttatgaaggtttggtggatccatttctcataccaaaacattagaagacaggattaagcatygtgagctaattatagcacatgacagagcaaggtggccacatttatcaaccaatgggacttcacctgtctcccaagcctaccagattctggaaatgtaatg

SEQ ID NO: 336138 - DNA, 201 bp, Homo sapiens
gatggtgatgagacttatttctttagatctttaaattgggcgatagataacagcaagttttagaagccatagaatttcaagaggaactttgcagaaagacrgaacaccctccttttccttgaccagtctgtcaccaggtgacagcctgagcttcccatggtgaacgtgcctaaatggggttcccatcatcatgtctgctga

SEQ ID NO: 336139 - DNA, 201 bp, Homo sapiens
atacacaagggagagctaaggccctagaaaatagatttgggttttgccaaattccaagtccttcaatactttagggtggaagtactgaactaattaagagyggtaacagttgtgaattgtttggaaaaatacttgatagtaataaaataattttaagaactttgtataatttttatttttttctgaaatccagtgactaga

SEQ ID NO: 336140 - DNA, 201 bp, Homo sapiens
gaataaatttaatagaatagtcctcagaggtctgacggaaatatactaaaataaataataaaggttgaggagtgagagggaattgttttgatttttaaaastttgatgcttggaatttctggtcttgagttatgtcctctgaaatcaggattcagctctgaaatcaaactcactcatcgaaagtaaccatgggaaactgaa

SEQ ID NO: 336141 - DNA, 201 bp, Homo sapiens
tgaaatcaaactcactcatcgaaagtaaccatgggaaactgaatttggcctacagatactaaggagccccaataatttcacattatcttttaatggagcaractattacagagaaatcagagaaataatattttaggaatttgtattatattttagaaataatattttaggaatatgtctatctgaatcaagatttggttt

SEQ ID NO: 336142 - DNA, 201 bp, Homo sapiens
gatggctctctatatggagaatttaggatagtgattaagagtacatgccttgaaatctgatgaaccaagaggttcagattccggttccatctaattagctstgtgaccttggggaccttgtgtcacctctcatagctttgctttcctctcagggaaaatcatagaacctacttgatagggtattctgagaattaaaggtgt

SEQ ID NO: 336143 - DNA, 201 bp, Homo sapiens
ctgtgtgaccttggggaccttgtgtcacctctcatagctttgctttcctctcagggaaaatcatagaacctacttgatagggtattctgagaattaaaggygtgtaacatagaatctggcatataagaaggactcagaaatacgtattagctattaagaaaaagtttccaattatttcgaagaagacctaatggataatag

SEQ ID NO: 336144 - DNA, 201 bp, Homo sapiens
gtgtgaccttggggaccttgtgtcacctctcatagctttgctttcctctcagggaaaatcatagaacctacttgatagggtattctgagaattaaaggtgkgtaacatagaatctggcatataagaaggactcagaaatacgtattagctattaagaaaaagtttccaattatttcgaagaagacctaatggataatagaa

SEQ ID NO: 336145 - DNA, 201 bp, Homo sapiens
tggagtgcagtggcgtgatctcagctcactgcaacctccgcctcccgggttccagcgattctcctgcctcagcttcctgagtagctgggactacaggcacmcaccaccatgcctggctaatttttgtatttttagtagagctggggtttcattatgttggtcaggctggtctggaactcctgacctcgtgattcgcccgcc

SEQ ID NO: 336146 - DNA, 201 bp, Homo sapiens
tcacccaggctggagtgcagtggcgtgatctcagctcactgcaacctccgcctcccgggttccagcgattctcctgcctcagcttcctgagtagctgggaytacaggcacacaccaccatgcctggctaatttttgtatttttagtagagctggggtttcattatgttggtcaggctggtctggaactcctgacctcgtga

SEQ ID NO: 336147 - DNA, 201 bp, Homo sapiens
agcccccccacatctctctccataaacttttcaagcactttgtgtgtgtatgtggttgttgttgatatggctgggctgatgttcattttctactttttcakccttgttaggattttttttttttagcctggggaaagttggaaatttcattgccatcctagggggtaaagaagtttcttctaccaccactgcttacagcca

SEQ ID NO: 336148 - DNA, 201 bp, Homo sapiens
ctttatttttctaaaattttttcagagtttgatatgttttggtcgtggatttgatttcatgcatgctgtgtgtgtgtgtgtgtgtgtgtgtgtgtgtgtgkgtgtgtgtgtttatgattgatcctggggcggctcttgtctatcccctcagagttgatgagtttacatctcttaaaaaaattcacctggttgcttctgcaa

SEQ ID NO: 336149 - DNA, 201 bp, Homo sapiens
ggggagaaaaatcttgtaccgttcttgaaaatattgcatacatttggcatgattttagttccttcatttaatacaaaccaaaggtgattgagaagcttgtrgagattccccgccccactctattccattaaatgcaaccgcgagaaggccagagttcaggaacctagcttctgttagggaaggctgtctaactgctctctt

SEQ ID NO: 336150 - DNA, 201 bp, Homo sapiens
tcacattccagggcttctctttacttctctagcctgtggtaagttaatatattatcacaaccaaagcctagtccttgcaagatatcccttccactgtttcygacctttttttctttggcttctactttctacccctgcacattgctctggcctggtgaaaactctggtggaaacatggcttgctagatccgtgtcatagct

SEQ ID NO: 336151 - DNA, 201 bp, Homo sapiens
gaaatttaggtggaattaaaaacatccagggaactcataaagttttatattatgtttttatgcccatggagtgggtcatagcttattcttttttttgaggrtgcaatttgatttttattatttcaacttttattttagattcaggggatacatgtgcaagtttattacctgggtatattgcatgatgctgaggtttgtgtt

SEQ ID NO: 336152 - DNA, 201 bp, Homo sapiens
cagatttgtcactgatttgctctgcaacatcttggataaatcactttacgtctcagagcttcagtttccctgtctctacattggagtcatgaaatggggawaggggtagggaagagagcaccatctctcctgctctgtcattctccagctttgcctttggcggccctagaaagaaccatgtgggtttgccttggcctggct

SEQ ID NO: 336153 - DNA, 201 bp, Homo sapiens
tggaattaaaagagaacaatatgtttacttgctgaatatgttacaggaccacaggtttattcatctcaagcactccagcttgtactcattcagccattaastctctttaccctggtttttacctaggtgcacaccaacccaaactcgctcggccattaactctctttaccctggttttctccctagctgtacaccaaccta

SEQ ID NO: 336154 - DNA, 201 bp, Homo sapiens
agctgaacgtggatcagaaagtgatccaggcgggcatgtttgaccaaaagtcttcaagccacgagcggagggcattcctgcaggccatcttggagcatgargaggaaaatgaggtattagagaaaaccccaagtttatgaaatcaaacagtggccttttgtctctgaaggactcagaataatccctttgtttaaaaaactt

SEQ ID NO: 336155 - DNA, 201 bp, Homo sapiens
tgtgatattaggaggtgggccctttggaaggttattatatcatgagagccctcatgaatggaattagtactcttataaaggggaccctagagagccccctrggtctttctacaacaggaggtcagcaatctgcaagctgtaagagggctctcacagaatccaatcatgctataccctatcctcagacttccagcctccgaa

SEQ ID NO: 336156 - DNA, 201 bp, Homo sapiens
tggaatgcaagaatgccccaaaagtgagcaccagactctgaggtttggtactgtctgcttattcactattttggagcctcttcagaccccatggggcaaascacccccaagtatttaacatgctgctctgtttagttggttttgatttagcatgctttgaactcaacagagcaggatgataacgtgagaaacagactaaga

SEQ ID NO: 336157 - DNA, 201 bp, Homo sapiens
cacacaccaccatgcctggctaatttttgtatttttagtagagctggggtttcattatgttggtcaggctggtctggaactcctgacctcgtgattcgccygcctcggcctcccaaagtgctgggactgcaggcgtgagccaccacaccgggccaaattatagaaaattttcataaaaaaaaaaggagaagtactttaaac

SEQ ID NO: 336158 - DNA, 201 bp, Homo sapiens
agtttcagaccaccgaagtgagacttcagaaacatggagtaatccatccaataattacagcacttctttgtcacaatattccccccacattttggcttagrgactcaagctcacatttcgttaaacttctccagtctagaaatattagcttttgtgaccttccaattagatgggtgatctgaaacacacaaacacacatca

SEQ ID NO: 336159 - DNA, 201 bp, Homo sapiens
tttgtttaggatacatttccgaagtaatatttctaagtcggagacatagacagttttaacacttctaataggtagtgacaaatttctgtccccaaaagttyaccagttgactacccaactagcaatccttttgatttcccagattgaagaccgagtctttgataaggttaggttcgaggaaattgactacctgagcagtca

SEQ ID NO: 336160 - DNA, 201 bp, Homo sapiens
agacatagacagttttaacacttctaataggtagtgacaaatttctgtccccaaaagtttaccagttgactacccaactagcaatccttttgatttcccarattgaagaccgagtctttgataaggttaggttcgaggaaattgactacctgagcagtcagtgtgtgtgtatgtgtgtgtgtggtaagatgtatgtatgta

SEQ ID NO: 336161 - DNA, 201 bp, Homo sapiens
aatagaaaaaaaagtaagaaattgaggcaagaaagtagggctgcaaaagttctcatagttgctgtatttgcttcaaagatgacttgagtttcttgacaatsagagccaaaaggagacaaagtcctgtatctaagtctcgccctttggaaggaagttccttaccagtttctcagaaaaagccatttctagcatgagagtata

SEQ ID NO: 336162 - DNA, 201 bp, Homo sapiens
ttcaaaagcaggtatatatttaaatagtgtgtgtgtgtgtgtgtgtgtgtgtttgtatgtgtgcgtgtagagaaaattcatgtagaattggcacttagaarttcaagattattaataggagagaggttattgcatctctctgaggcaaggtgaaactggggagataatagcccttgaagactagggaaagaaaactgccac

SEQ ID NO: 336163 - DNA, 201 bp, Homo sapiens
atggcaaatgcagttcttttaaaaatatggcctctttgagatgaatgaccacgttttttggaatgaataacacattaagtcgtgtcttcaaatctaagaasgtctgtgttttgaagcctctggtgcttatctttcttttttaatggcagaaattattctctaacagtgtaataagtgatttttaagttgattttgaaatgt

SEQ ID NO: 336164 - DNA, 201 bp, Homo sapiens
tgaggagcactgatttaaagactcaactgtgggcccaaaccaccaacactgggccactgcgtgtacttaccattctctgtaggtgaataaattaaagcgamtattaaaattttctgatcttgaaaaggattgggagccaccagcacagaatatattagttctaagtcttcaggaaatatggttacgtatttttataaatac

SEQ ID NO: 336165 - DNA, 201 bp, Homo sapiens
aaatgttagcaaccagtccaaacaaaacaaaacacacttccgggccaagccctaaaggtagtaaccagccaggctaatagaaaagaaggcatggagccaaraatatctcagctgtagaacctgctagggccatcttggaaaaatcagtcattaacctctgcttcaggtgggtacctatattctgtgcctgtcatgagctga

SEQ ID NO: 336166 - DNA, 201 bp, Homo sapiens
agcttttaaacaataacatgtgaagcatcttgtaaactgatgatgtgttatatcagatttaaggtaccaatgaattggtggtgggtgtatgttgggtttasaggagctgggagaaaagtctaatgatgaaactgtctgggattttcttagtctaacctgttacccactgtcccatttcttctgaaaacaattttaagacat

SEQ ID NO: 336167 - DNA, 201 bp, Homo sapiens
cgtctgtttctctgaccagatgggctgtgatgtgtgacaggcattttgttcattacttgctgagtgagtcaagggctgttataacactgagaagggccagsaaagtccttggaggttgagaagctaggcctttcattctaaggtgatggctgtgtctttctctagtgacataaaagaagtcaccaacaggtggatgacata

SEQ ID NO: 336168 - DNA, 201 bp, Homo sapiens
tcagaagcagtccacaggaagaccagccctgctgtctgtaaaagggtttggacatcaggtctagccttgaagatggatgcagcaaagtgatggaggaggcrggagatacctgcctggtcagtgcctggtcagtccaattggtgaacacagctccggggcacagaggggtggcagccacgtggctcctgcctccctgacact

SEQ ID NO: 336169 - DNA, 201 bp, Homo sapiens
aatgaggttccaaacataaccccgtgtaatcttcctaacaaggcaggttggtgaggagactgaggcttggccaggtcacccagcctaggaagaaggagccrggcggggacgagaacccaggtcttctgactctagtgttctttctactctaccgcaggtgtaacgtggagaaggtgcccagtaattctcagttggaaatag

SEQ ID NO: 336170 - DNA, 201 bp, Homo sapiens
ggggacgagaacccaggtcttctgactctagtgttctttctactctaccgcaggtgtaacgtggagaaggtgcccagtaattctcagttggaaatagaagsaaacaggtcaggatctgtcttgtattcccctatctctaaatacaggtatccctcgttacgtgaaacagattgaatcatataatcggcctttggaagcaaa

SEQ ID NO: 336171 - DNA, 201 bp, Homo sapiens
tctcagttggaaatagaaggaaacaggtcaggatctgtcttgtattcccctatctctaaatacaggtatccctcgttacgtgaaacagattgaatcatatmatcggcctttggaagcaaatttcttcggtcacctcctgatcacccctacttggagagcgggatagaggcacagatactcttaaacagctgtcatggcttc

SEQ ID NO: 336172 - DNA, 201 bp, Homo sapiens
agactatttttttgctgtagataatagtagcagtaaaaccaaagattgaaatggcagtattttgtcatctcagtataggacattaacaaaattttttttttcttattagctctctaataactattaggaggttgcctcacgaagcccctctttagaactgctgtaaagaaggcaacctctgtgtgccagttatgaaggttt

SEQ ID NO: 336173 - DNA, 201 bp, Homo sapiens
gcatgtgtctgcaattaaacgatgcagataactacatatgaaaatttctcaggtggcaggagacgctgtagcagctgctgcattcacaccaggacatttcwttaggtgcttagagactgtccgaagtcagctcaaacagtagaccaatcacaaactcttgggtgttaattttgaaccaagaaaaagggacagttgtgtttg

SEQ ID NO: 336174 - DNA, 201 bp, Homo sapiens; identical to SEQ ID NO: 70690

SEQ ID NO: 336175 - DNA, 201 bp, Homo sapiens
tggctgggtgtggtggctcacacctgtaatccaagcactttgggaggctgaggcaggtggatcacctgaggtcaggagttcaagaccagcctggccagcatggtgaaaccccatctctacaaaaatataaaaaaaattagccaggcatgatggtgggtgcccgtaatccaagctactcaggaggctgaggcaggagaattg

SEQ ID NO: 336176 - DNA, 201 bp, Homo sapiens
aactgacaaagcagatgaacgctatcatcgatactgtgataaactacaaagataggtgagtgtttggttccttcaccttgatcatctctcaccaagacgcygagtggcgctccctgaggagcaggagttgttaagttgtgcacttaggttttattaaggttctttctagtttgtgttttatggctttctctctttgtacct

SEQ ID NO: 336177 - DNA, 201 bp, Homo sapiens
actacaacagaccatctggtaggttaatacgcaaccaaatgaataatgccatggtccaactcggataacaaagactgctcaccaaaacaccgggttgttamaagcccggggctgacgtagccttttgttatacctcactggctctctatccttgctccacttagatggccaagattcttggtcttcccctgctgttgagac

SEQ ID NO: 336178 - DNA, 201 bp, Homo sapiens
tccatgaaggttgttttctctaggaagcgttttgttaaagaactggaaaagcagagattgtatgggtctactctaatgaaaactttggattctagggaatraggtacttccttgacgttgataccatttcctctgagtggtttccattcatttaggcaagttctgacatgcaggttgttgcaaacagctagtttgggatat

SEQ ID NO: 336179 - DNA, 201 bp, Homo sapiens
gttcaaagttttttatccagaagtacaaagccctggaaattacctcaccagtgttaggaggagtctgggtatatttcttgaaggaagcaagcctttttgtstcattctgtgccattttcagacaagagttaattggcaaattaatttttctgatcccctcaggcaccaccaagtctgaagatcgtgctgctttgctgaaga

SEQ ID NO: 336180 - DNA, 201 bp, Homo sapiens
aagacttaattgtatctcaccaacatttttgggtcccattggtgagtaaggcatcaatttaagtgcctttggaagcaattttgattaaaatgattttttttaagttcttaaacagatttcgggatgataggagattcggacatattttaaaacaaaagaaacttatacaagcagaattaaacaacctggataaaagtacct

SEQ ID NO: 336181 - DNA, 201 bp, Homo sapiens
ctgttacctgagagtctagagactagaagaaactcacaggatacttttctgatggaacaaaagtctgcatgcaatatactgaatttctggttcattacgtrtgtaagttttttgcttattcattaattattttgttttaactatagaaataggtaggataacctcactaaaagagtaatcattaagttaataattacattt

SEQ ID NO: 336182 - DNA, 201 bp, Homo sapiens
cacagttagccaccttgaagagcttgtcaagagcaggtctccaagtagacacagatggaaattgatagagattaaaataaaccatgagatgctctgacttktaggggtttaagctgttcaggaaatcagagtttaaacaacacatattttacttaatgctagaattttagtgtcattcctctggatgttatttgcaatttt

SEQ ID NO: 336183 - DNA, 201 bp, Homo sapiens
ttcccctgactttctacctagccgcctgccaacctatacccacatggctattaactgtctttactctggttgtctctgtaaccctgcatgcctgcaggaaraacaatggggctagcagtcaggagcctggaatgtgagttctgacgctgctaccagataaatatgtgatcttggacaggtctcctgaccttcctgggttgt

SEQ ID NO: 336184 - DNA, 201 bp, Homo sapiens
actctccccattctatagatgaggacactgagccacagattggttgagtaacttgctcaggctcacacaactagcaggtgataacagctgaggtgaaagarcattttttctgggaagatacagggtgtttaaaggtacctgtttagtgcacagcaagttgcagtacttttaaattggagactggaatatgtaagtagatgt

SEQ ID NO: 336185 - DNA, 201 bp, Homo sapiens
ggttgaacaggtagacactgttatctcactgaatcttcaccgctgccctatgaggtggctattgttactctccccattctatagatgaggacactgagccrcagattggttgagtaacttgctcaggctcacacaactagcaggtgataacagctgaggtgaaagaacattttttctgggaagatacagggtgtttaaagg

SEQ ID NO: 336186 - DNA, 201 bp, Homo sapiens
taggcttctttatctccctgtccttggcaataaaacgacaaaagccgagggttgaacaggtagacactgttatctcactgaatcttcaccgctgccctatkaggtggctattgttactctccccattctatagatgaggacactgagccacagattggttgagtaacttgctcaggctcacacaactagcaggtgataaca

SEQ ID NO: 336187 - DNA, 201 bp, Homo sapiens
gtcgaggcattgcccatggaacacataactctgcagtggtttcccctacaaaatgtcagccactcttacgatggaatgtgcccttgcctgctgtgggcacygctcaaatctaacccatcatttttcttttcattttgattcacttttcctttcagagattcaaacaaaaagaaaaatgggaactgaaaaaatttggggttt

SEQ ID NO: 336188 - DNA, 201 bp, Homo sapiens
cctcatcttattaattgttatagccttaagaatggatgtcttagtaagtctgagctgctgtaatgaaaggtcattgactgggtggcttaaaaacagcaaawttatttcttacagctctgaatgctgggaattccaacctcaaaacaccagcagattcagtgtctggtgagggcctgcttcctgattcatagatggcttcct

SEQ ID NO: 336189 - DNA, 201 bp, Homo sapiens
agggggttaatgtaagccttcttaaagaagaatgtatgctgaagttaagtgtctgttattgatattctctaagtgtttattgttataataacaacatgtcrggatttaaatttctgctagtcttgcaagctttcaagggaattttcttggctaatttatataaccaactaaaactgtaatcactgcatggtgtttgtgctt

SEQ ID NO: 336190 - DNA, 201 bp, Homo sapiens
gaaggaaagccatttccttcaataaatactgaattgtgtaccttatggtcccaatgataacattgtttatttttagtccattggatagaaacccttcaaargcaggtatatatttaaatagtgtgtgtgtgtgtgtgtgtgtgtgtttgtatgtgtgcgtgtagagaaaattcatgtagaattggcacttagaagttcaag

SEQ ID NO: 336191 - DNA, 201 bp, Homo sapiens
atgtaaaaagagacttattatgaggaattggctcacacagttatggaagctgagagttctattatctgcagtcaccaatctggatacccagcagaacctgyggtatagttccggtctgagtctacaggctcagacctgagcctgagaaccaggagttccaggagaactgatgatgtgagttccagtgatgtgagaaccagg

SEQ ID NO: 336192 - DNA, 201 bp, Homo sapiens
ctgcattaacagaaagtgtgtgtgtgtgtgtgtgtgtgtgtgtgtgtggtgtgttgcaaatttgaaaaatttattattaggatgtagtcatcatttttggrtcccaagggcggacagtttcactgggctaagaaccaggaactatagcctatcctgaagcagtgctgctaagctttccctacctctccttgcctctctctt

SEQ ID NO: 336193 - DNA, 201 bp, Homo sapiens
gtggtgggtgtatgttgggtttagaggagctgggagaaaagtctaatgatgaaactgtctgggattttcttagtctaacctgttacccactgtcccatttyttctgaaaacaattttaagacatgtatggtaatctatgggggcctttggggacttaggaattttgaagattaagcatcaatcttacttcgttttggttat

SEQ ID NO: 336194 - DNA, 201 bp, Homo sapiens
aatgtattctcttatataattctggaggcaaagtctgaaatcaaagcatcagcagggccatgctctctctgaaggctttagagaagtatccttccttgctkcttcctagtttctggtggttgccagcaatccttggcattcctggacttgcagatgcatcactgcaatctctgccttagtatccacatgaaatttttcctg

SEQ ID NO: 336195 - DNA, 201 bp, Homo sapiens
caattgttttattctggtcttaacatcatgtttaaaacatgccttccttttttctgcttttcaacttagcattactctactgactggcagagacaggagargtagatgtccacgcccacagaccctggtgcgatgccccacccagggccttcgccggggcctgggccttcccctgggccaattcttgggcctagtccagga

SEQ ID NO: 336196 - DNA, 201 bp, Homo sapiens
tagcctttgcttttttcatgattgggacttctctttcattctcaaattagaagattgtatttttcccggtttaactatcttgaagttttgaatgcccactsacttatgaaaatgagtcttggttggatactttttaaagggttctgtattttaatggctttgtgggggttaatgtcttgtaaggtgtccaaggtagtaagt

SEQ ID NO: 336197 - DNA, 201 bp, Homo sapiens
taattgataatttatgtgtcttaaagaatgtacctgaacatttaatattgtatttataatagcatattgaatacaagtaacaaatggtaaactgcatgggycatgtgatacagagagagagatcagggtgagctttcttgagctgatggggtagataaggtctttgagatgggataaggttgctgtagggggagggcagag

SEQ ID NO: 336198 - DNA, 201 bp, Homo sapiens
gaaggaaagccctctcccatcttcccccctgtgctttgttgaactggacatgtaataaatggctttgcaaatagtcacaattattttgtggcttgctgttktgctatactaaaagaccattaagcagagtccaaaattctgtaaaaaatagatgatctgtaattgataatttatgtgtcttaaagaatgtacctgaacatt

SEQ ID NO: 336199 - DNA, 201 bp, Homo sapiens
cagtttttaaaaccacaatattctatagtatttttaggtggattagtatcaatttaagcatcaatcttatgccagtatgtcatctacatctatgcaagcastaatattttagaaactttttagaaactggcctaatttaaatatgggctggcccttttgtaagttgatgaatgggacccacagaagttgaaataatattta

SEQ ID NO: 336200 - DNA, 201 bp, Homo sapiens
actcagaaaccattgagaaccctaataataatttaaaaagccatacccaatgttatgtgtgtgtatacttacatattcacattcaaatattttcagtagtmttttccatctgttatcaggggggccacaaccagaagcttgttggccagcattggagttttaggcttccaggctacctctagcacactggtgaagtgttaa

SEQ ID NO: 336201 - DNA, 201 bp, Homo sapiens
aatgtatgtgatgcatacacattgccacagagaatggagtttccattcttgccctcaacatacataagcgactctttcccaacatcattttctattatctrtattctagttagtgattctgccttttatttgttatgaatttaaactgtcccaaattcatgtagttattcctttgttctagcatttgaatacatctgcatc

SEQ ID NO: 336202 - DNA, 201 bp, Homo sapiens
tcctgagcattttacccatagattattgaaaagatgtaaaatgtatgtgatgcatacacattgccacagagaatggagtttccattcttgccctcaacatrcataagcgactctttcccaacatcattttctattatctatattctagttagtgattctgccttttatttgttatgaatttaaactgtcccaaattcatgt

SEQ ID NO: 336203 - DNA, 201 bp, Homo sapiens
acagatgatttggaaaatgtaatgatttttgtacttattatgaacactttccatggcaatgagggtttttctacagcaacatatattaatatgtataatayatattaacattcattaatgaatgtgaatgtactgtaacgtgttaattatactctgttaatcaggctgtttcccaataatgctgtcctgagcattttaccc

SEQ ID NO: 336204 - DNA, 201 bp, Homo sapiens
ctgggcaacagaacaaaactctatctaaaaaaaaaattttaaatataattaataaatattttaaaacataaaatttcttctttcctatgtgtgtcttcacygtatacctctcaaagtaaagtactaaaacctatgttttacagtataagccgagcccagtggctcatgcctgtaatcctagcactttgggaagctgaggtg

SEQ ID NO: 336205 - DNA, 201 bp, Homo sapiens
gatgttgggccaaggaccacaccttgagaatcacagctttagaaaataattgtcaaactgagttggaactgtgaattttgcatagaattttttttttgccrggggaagaggggtgatgacagggtactgtctttatttaaaatgttgatagtttgtttatcatggatttggggggcattaatttgggtttttaaaatattt

SEQ ID NO: 336206 - DNA, 201 bp, Homo sapiens
ggcctgagaatccgtatttctggcaaattcccagggggaactgatgatgttgggccaaggaccacaccttgagaatcacagctttagaaaataattgtcaractgagttggaactgtgaattttgcatagaattttttttttgccaggggaagaggggtgatgacagggtactgtctttatttaaaatgttgatagtttgt

SEQ ID NO: 336207 - DNA, 201 bp, Homo sapiens
ggcacaagccgccacatctgacctgcaaacactttctgaatgttgcctttgaatattagcctactacacattttctacaacactgctgctaatgccacctrtcttctcttctttaccacggtggttctcaaacctggagggcttgaagaatatgccagtgtttgatccagtagcctgttgtggggcctgagaatccgtatt

SEQ ID NO: 336208 - DNA, 201 bp, Homo sapiens
agatctttgtcttgtatatctcatatattattaaaaacgcatattgtgaggtacttttattgctacagatgttgcatcagttatgaagatcagatgttggmtttttaaaatactgacatagactatgcagttctgataagtagatcctgtgatttgtgggttgaaggtatttttgtcttggtgaattagtacattagtcta

SEQ ID NO: 336209 - DNA, 201 bp, Homo sapiens
tcctgtatctaagtctcgccctttggaaggaagttccttaccagtttctcagaaaaagccatttctagcatgagagtatagagttgatttcccaggtgagwttattttttaaattattatcatcatcattattgtaagaggcactgcatgacagaaacatcaatagcatttgttcataatagactaacagattcaacatgg

SEQ ID NO: 336210 - DNA, 201 bp, Homo sapiens
tgtcaccatgttggcaaggctggtctcaaactcctggcctcacgtgatccacccgcctcggcctcccaaagtgctgggattataggcacaagccgccacayctgacctgcaaacactttctgaatgttgcctttgaatattagcctactacacattttctacaacactgctgctaatgccacctatcttctcttctttacc

SEQ ID NO: 336211 - DNA, 201 bp, Homo sapiens
ttggagtcgaggcattgcccatggaacacataactctgcagtggtttcccctacaaaatgtcagccactcttacgatggaatgtgcccttgcctgctgtgrgcaccgctcaaatctaacccatcatttttcttttcattttgattcacttttcctttcagagattcaaacaaaaagaaaaatgggaactgaaaaaatttgg

SEQ ID NO: 336212 - DNA, 201 bp, Homo sapiens
gcatttcatgatgcttcccagagtgagttcttccaactctagccttcctactccttcttggagattcccagtacagccagaggccctgggaagtcttgctrtaaagtcagctgtttaactgcttaacccagcatctcccaaacttatttgaccaaagaacccccttttcacgggacactgttactaatccattaagctagt

SEQ ID NO: 336213 - DNA, 201 bp, Homo sapiens
gctgggcaaccggtggccatgtccttatccctgctcatgctcagttttctcatctataaaactgaggtcataaaaatgacctccaagcatgtaaaatgttyagcataggctgggctcctagcaaacactgttttatttcttttatttatttatttttgagacagggtctcactctgtcacccaggccggagtgcagtggca

SEQ ID NO: 336214 - DNA, 201 bp, Homo sapiens
ttgcttattcattaattattttgttttaactatagaaataggtaggataacctcactaaaagagtaatcattaagttaataattacattttttaaaatcawtctttctatctctctcttttaaaggaatcctttgctgaacacctaggctattcaaatggggtcatcaatgggtaaatctcaaatttttttttcttttaaa

SEQ ID NO: 336215 - DNA, 201 bp, Homo sapiens
gtgtacgtgtgtgtgtgtgtgtgtgagagagagagagagagagagagagggcgaggagaaagaataagttgagagaaagattgaaagtattaagaacatgmaagtggttccttttctttctagaacctgtcatcatacctagtatatgcaatgcacttttcatgggttttatatgaatatattttccttttctgctaaata

SEQ ID NO: 336216 - DNA, 201 bp, Homo sapiens
ctctgtattccttgagttcagatccaccctagagggtggatctccagaaataactattggctccgctatgggccagtgggtgctcagtgactgtgtgatgrgtaaagtaaccctgttacctgagagtctagagactagaagaaactcacaggatacttttctgatggaacaaaagtctgcatgcaatatactgaatttctg

SEQ ID NO: 336217 - DNA, 201 bp, Homo sapiens
tgacaggcattttgttcattacttgctgagtgagtcaagggctgttataacactgagaagggccaggaaagtccttggaggttgagaagctaggcctttcmttctaaggtgatggctgtgtctttctctagtgacataaaagaagtcaccaacaggtggatgacatactgccaacagattcgtttggttttatgctttttt

SEQ ID NO: 336218 - DNA, 201 bp, Homo sapiens
gtttctatgaatttgcctattttagatacttcgtatgagtagaatcatagagttacttgtctttttgtgactggcttatgcacttatggacttagcgtaayaatcctccagttacaggatttccttcctttttaagactgaataatattccattaaatgtatagactatagttgcttatccactcatttgtcgatggaccc

SEQ ID NO: 336219 - DNA, 201 bp, Homo sapiens
ttgcgactctgaaactgcgtgcctacgaacaactaactctcatctccttcccccagcccctggcacccaccatggcactttctgtttctatgaatttgccyattttagatacttcgtatgagtagaatcatagagttacttgtctttttgtgactggcttatgcacttatggacttagcgtaataatcctccagttacagg

SEQ ID NO: 336220 - DNA, 201 bp, Homo sapiens
gaaaattgacatcaatacaattcccagatgcatctcttttattcttgcctcctcatctttctcatttgttttcctttctaaaaagcccctcatttctcacygctgaaggaattcttctcacctttaagatccagctcaactctgatgtctctggaaaattctgccctgatggtcccatcctctctctctctctgcgcgggt

SEQ ID NO: 336221 - DNA, 201 bp, Homo sapiens
tgatactatgatcacctgcttccccagttacatttcttttactctttaagatcattctagactcacatgcagttgtaagatacagtacagagagattctgygtaccttttacttctcaagatggaaacatcttgcaaaacataggataatatcttttttttttttttttttgagatggagtctcactctgttgcccaggct

SEQ ID NO: 336222 - DNA, 201 bp, Homo sapiens
atctgctactcctcaacctaaacagcccatagtccattcggactgatactatgatcacctgcttccccagttacatttcttttactctttaagatcattckagactcacatgcagttgtaagatacagtacagagagattctgtgtaccttttacttctcaagatggaaacatcttgcaaaacataggataatatcttttt

SEQ ID NO: 336223 - DNA, 201 bp, Homo sapiens
gcactgtctagaatgaatttcatctctgtagactgcttgctgaggtctaaggtaagtctttagcttcatctgctactcctcaacctaaacagcccatagtscattcggactgatactatgatcacctgcttccccagttacatttcttttactctttaagatcattctagactcacatgcagttgtaagatacagtacaga

SEQ ID NO: 336224 - DNA, 201 bp, Homo sapiens
tagaaagtagaagaatcaacaaagaaggttttgtgaatgacagacagtttgttttagtctctggatagatatttggattctttatgtcaatatggcattaktatgatatacatccagtccttttttctacaaccttcctatctgttttcactctgactgtctcacaactgaaataaggtgtcaagtggcctcttgactggt

SEQ ID NO: 336225 - DNA, 201 bp, Homo sapiens
ccacctttaaattccttaagcctgtttcctgatcatacccttctgcctgcacatcaatttcagtcatcaaacaggagaatagagaaatcttcagaatgtgycttgaacagacttaaacatttccaagttaatagtagtagtatcttgaccaaaacaggaggtcttgaaagcaagccttctgttactcaagacactctccaa

SEQ ID NO: 336226 - DNA, 201 bp, Homo sapiens
ctctttttactccccttctccacagtcaacaattctaagagtatataaatgaactgaatttattaaaataaccaaggtgagggcactttcattttagttasacctcaattactgtcaccttatgtaggacttttttcctgtctgtatctctggcctgatgccttcagacccatgaagaagaaagaaaaagacaaagatgta

SEQ ID NO: 336227 - DNA, 201 bp, Homo sapiens
aattctctttttactccccttctccacagtcaacaattctaagagtatataaatgaactgaatttattaaaataaccaaggtgagggcactttcattttarttacacctcaattactgtcaccttatgtaggacttttttcctgtctgtatctctggcctgatgccttcagacccatgaagaagaaagaaaaagacaaaga

SEQ ID NO: 336228 - DNA, 201 bp, Homo sapiens
  misc_feature (1)...(201): n = A,T,C or G
tgtggaggctggaagtctgagatcaaggtgtcagcaggtttggtttcttctgagacttctccccttggcttgtaaatggctacctccttggtgtatgtatncggggttgttcctctatgtgcatctgtgtcttagcagccttttcttagaaagacagcagtcatataggcctagggccattttaactctttaaaagcccta

SEQ ID NO: 336229 - DNA, 201 bp, Homo sapiens
caacactttgggaggccaaagcaggaagatcgcttgcgcccaggagttcaagacaagtgtaagcaacatagcctgaccctgtgtctacaaaaaagaaaatmgccaggcatggtggtgtgcgcctgtagtcccagctctcaggagggtgaggtgggaggattgcttgagcccacaaggttgaggctgtagtgagctgtgatt

SEQ ID NO: 336230 - DNA, 201 bp, Homo sapiens
tttgctgtcagaacgtgcacgccgctttcataagaactaattgaagagggagctagtttgcatctcgttcttgcacaccctgagtcatgaaaaacattttyttttaagcaaaattgaaagaaagaaaagagagaaagagggccaaaaaaaaaaaaaaaaaaggttgccatccagtggaggaaggagtaattcccagcttca

SEQ ID NO: 336231 - DNA, 201 bp, Homo sapiens
aggaagtaagcaatttccttttattcactaaaaaataaaagggtgtattagtgtgctcatatacatgaaagagcattgtatcttgtagtagccctgaatckacgtcagcttcctaaatttaaaatgctgactgaacctgtgtgaggtggtggaaagcaaaaagaaaaaaaagttccgtctgctttgttcatcacaaagaat

SEQ ID NO: 336232 - DNA, 201 bp, Homo sapiens
tgaaatatgcttaactgttttaacttgactggggatttttaccaccatatgggttttttttcgtgacatccggagccaaacgggtgcagtgtgcctttaaraaaagaggtgcctcactaaacttcgctgtagttgtgtttcaccgtctcggtagggaaggaaagtgttaatttcttatttgtacactttttttccccgact

SEQ ID NO: 336233 - DNA, 201 bp, Homo sapiens
aaaacaaccctccactgtttaaagacttaacatttgacttacagatagtttgctgatccttttggtctagtctctttttttaactctagaatgggtagtaratgatagtgccacacttttaaagaacttaggaaggggtctgaaaactccaaatagaaatattttaccttatagaggtgtctaactaatgtcctttaaatg

SEQ ID NO: 336234 - DNA, 201 bp, Homo sapiens
cataagttagggaaggacgaacgcatttctcgaagagatgtgaggggtaggggtggttgagagggtgagagaacaccttggttcttgctgcagtgatccaraaatccaattcctgagtaaaatgcagtcttcttaaacctcttgcgttcacccctgattttcgtactcatgaggcccatatgtgcattaaaaaaataaaac

SEQ ID NO: 336235 - DNA, 201 bp, Homo sapiens
taccgttcctattttatgcaagagggaactaagacacaagagaaaatgatttgctcaagatcatacagctaagatctcttgcacttaattacagagagctragattgaaacacagtttgtctaattgcagaaccaaatgtcttaaatctaatattactctgtctctcagatttgatacctaatagaactttaaaaaatagt

SEQ ID NO: 336236 - DNA, 201 bp, Homo sapiens
gtttgtgtccgctgcacacctgatactggttccccagcatagtctttcagtctttcctgttggatattttaattatgaattccaaagaatgtgtctaaggmaggttgaacctagtaggtttcttttccttatggaaatctacctccgtcctcaccaatacaacctgatgatttatatgggaaattttatttccgaagtcct

SEQ ID NO: 336237 - DNA, 201 bp, Homo sapiens
tttcctctccctctttttttctccattttctccaaaatttccatcaggaaaggattcgtaatcataagtaccggagcctaggcgacctggagaaggatgtmatgcttctctgtcacaacgctcagacgttcaacctggagggatcccaggtctgtcttgttaagttgtctaaaagttcttaactgtaaatgtgcccgttgt

SEQ ID NO: 336238 - DNA, 201 bp, Homo sapiens
acttaattacagagagctgagattgaaacacagtttgtctaattgcagaaccaaatgtcttaaatctaatattactctgtctctcagatttgatacctaayagaactttaaaaaatagttttggggattttaagtaatggaagggcctgactgtgaggcagtttttagataacaatctagctagtctataggacattcata

SEQ ID NO: 336239 - DNA, 201 bp, Homo sapiens
ggcttgtagaagtgcccaagacgccaggtggtggtttattttcatttcccactaaagatcatgaattcagtgatctctcgaaaaggaatagagctcttggragcagagctgactagttagatggtgttcagacccaaattggctgatgcttggaataccttctttgtgcaggctactgtaagaaagcactttatcctattt

SEQ ID NO: 336240 - DNA, 201 bp, Homo sapiens
ggatcaggagctgaaactactagaatttaagacaaaacaaactataggaaaaaaagaaacactgcctctaattgctttttaatcctttttatcagcccaaytgcaattctctttttactccccttctccacagtcaacaattctaagagtatataaatgaactgaatttattaaaataaccaaggtgagggcactttcatt

SEQ ID NO: 336241 - DNA, 201 bp, Homo sapiens
agtgggagtgggagggtggacttggtgaatggcgccccctggggttatgcagtcccagatccctggcagggctttatgctgtgaagacaaagggaaaatcrggctttgttaactaagtaatgatcgctgaattttcctctccctctttttttctccattttctccaaaatttccatcaggaaaggattcgtaatcataagt

SEQ ID NO: 336242 - DNA, 201 bp, Homo sapiens
aagcatatatttttttttcgagatggagtctcgcccaggctggagtgcagtggcatgatctcggctcactgcaacttccacctccctggttcaagggattytcctgccttagcctcctgagtagctgggattacaggcatgcgccaccacgccaggcaaatttttgtatttttagtagagacggggtttcaccatgttagc

SEQ ID NO: 336243 - DNA, 201 bp, Homo sapiens
tgctactggcagaagaaaaataactaaaagcctatgttccttgctacctgtgtaagaaaatagaggctttggcatctgcagattacctttgtaccacagcygtgctagcgcctactcacacttcttttcaaagcttatagtctttttttttttttttttttttttccttttttgaggcagaatttcactgtctcccaggct

SEQ ID NO: 336244 - DNA, 201 bp, Homo sapiens
ggtgtattagtgtgctcatatacatgaaagagcattgtatcttgtagtagccctgaatcgacgtcagcttcctaaatttaaaatgctgactgaacctgtgygaggtggtggaaagcaaaaagaaaaaaaagttccgtctgctttgttcatcacaaagaataaataataacattgggctctctagtgaattcaaggctgtaa

SEQ ID NO: 336245 - DNA, 201 bp, Homo sapiens; identical to SEQ ID NO: 70708

SEQ ID NO: 336246 - DNA, 201 bp, Homo sapiens
ctttaaccacatctgcttccaacagtaagtgatgttaaaagctcatatgctttgtagcctgtgtttgaaaattacaaaaatgctaagcatttgttgctatwgaacctgctttcaaataaacttaccatgaatttgggggagggtacagcactaatcccagaaatgtgaagcatccacacttaagcttgtgaaacatgttct

SEQ ID NO: 336247 - DNA, 201 bp, Homo sapiens
tcctagaatcaccttctgaaatttttatggcagcgatttatgattaatttttgatatttctggcttcacaaaggaagtagagatggcatcctaaggggagygagacttttgtgaaaaatgactgtatcacacaccacaagctgttattgatctgagtagaccaaatcagatattaggatcttgaacctaaattgtgaatct

SEQ ID NO: 336248 - DNA, 201 bp, Homo sapiens
tttgctaactcctaaatgttcttaatcattttttctggaattttcattgcaggactttcttgtaataagtttattttaggaacttttttggagattacctyagtggatggtcttccaaagtgcacagtattaagtagtactatttggcctattccaatgtgtaaaaagcttttgttctgccctcctatgtcaataaaaaat

SEQ ID NO: 336249 - DNA, 201 bp, Homo sapiens
tactcattgtcaattgatatttcagtgctgataggcagattctgctgggtgaataattgctgtgtgttataaagtcaaatactagcatattcctctattcrtgtgcaatagactaatgtgcagtacattctgtatgttactgttgagtttttaaaaagctaaaagtattggaaaaagtcagtaatagaatagagaaataca

SEQ ID NO: 336250 - DNA, 201 bp, Homo sapiens
aggcagaaaaacaagttcttacaatggatccttcagggcacactatattctatttctcttagctgtgttatctttcgttgtcttgaggttcacttcaagayagacagaaaatgatgaagctaaagttaacaagcaagtagcaagaccttagaaagctatagggtgggtgatcaccaacactcccagccatcatgaaaatgc

SEQ ID NO: 336251 - DNA, 201 bp, Homo sapiens
ttcttatcagactaaaatactaagttaccagcctagagaggtaatctgaaagaaatcagaataacttgccattagatgtgtttatttttttggatgaagartataactttattctcatcactattaataatcatctgttaagagattttatattgctatttccaccatttcatgtattcccagagagctagatactcattg

SEQ ID NO: 336252 - DNA, 201 bp, Homo sapiens
ttcaataaataatacctattattatttcccaaagactttaattttaaggaaaattagagtttaaaaattatagagaatgttggtaaacagtgtctgggctyccttttaaaaggttaccttaatctttattgaaaagcacatcactcatttcttatcagactaaaatactaagttaccagcctagagaggtaatctgaaaga

SEQ ID NO: 336253 - DNA, 201 bp, Homo sapiens
tcttctgtatatgggaaagagtttttcctcctgtactatgggttacaaagtcagagttatggcgttttgttaccatggatgaaaaaccttgggaacaagtkgggtagctcatgtttgcttttatgactccaaggaaaaaccagaaggtagtggattggagcttctttgtaagcacagatgtaaagtgcttgccacgactgt

SEQ ID NO: 336254 - DNA, 201 bp, Homo sapiens
agctatttctcagaaattctcattgattttataacagctgtcttctagcttgagccttctaatttcttcagcaaaaaacaacaacaacaacaaaaaaaaaacagataaatacatctaacttaaaattaagacaaaaagtattaattggatttttagttttgtgtgttttccgtatttaaaatgtgatgctatatgcctttt

SEQ ID NO: 336255 - DNA, 201 bp, Homo sapiens
atgaaaaaccttgggaacaagtggggtagctcatgtttgcttttatgactccaaggaaaaaccagaaggtagtggattggagcttctttgtaagcacagaygtaaagtgcttgccacgactgtgaaaataattttaacaaatatggtagccacgctactgaattagtggttcatcatttatagaaatacataaagcaatgt

SEQ ID NO: 336256 - DNA, 201 bp, Homo sapiens
tatggaggaagccacattgttaagtaacatatacctgtctgcattaatgcaaaggtagcttttctctgcttaacatcaaaaattctagttgggtgttagaratcaactatcagtatctggaatatgttttgccccggacttaaacctaatgtcattgtttatcatttaagattaaattgtaatgtgtttttcccctgcccc

SEQ ID NO: 336257 - DNA, 201 bp, Homo sapiens
ggtgggactggtggtaaacagtccaggtgataattgaggtggcagcagagtgagcatgcactaacaagaagacgggccatcgcgagggctaaggatggggygggccatcccgagcatgtgcctatgcggacctgtttaccacgttgtggcagccttcttgttcagctctagttgctgagcccatcagcgtagttctttcca

SEQ ID NO: 336258 - DNA, 201 bp, Homo sapiens
ggactgtggattaaaacagcatgttgtcactcatgctttgccactgccttctagtattctcacaagctcctagaatcaccttctgaaatttttatggcagygatttatgattaatttttgatatttctggcttcacaaaggaagtagagatggcatcctaaggggagtgagacttttgtgaaaaatgactgtatcacacac

SEQ ID NO: 336259 - DNA, 201 bp, Homo sapiens
atgattactttttaattatacaactgggactgtggattaaaacagcatgttgtcactcatgctttgccactgccttctagtattctcacaagctcctagartcaccttctgaaatttttatggcagcgatttatgattaatttttgatatttctggcttcacaaaggaagtagagatggcatcctaaggggagtgagactt

SEQ ID NO: 336260 - DNA, 201 bp, Homo sapiens
atacacttctgggaaattttaggtgtaggtgaagcaccttttttcattcattctctgtttctgatagtttggacccagaatcaagctgacagtttatcgtrtagagtagcagcctcctgaggtcagcgcctcatgcattgtctggtgcatgagcatttcatgatgcttcccagagtgagttcttccaactctagccttcct

SEQ ID NO: 336261 - DNA, 201 bp, Homo sapiens
attttctaattgaagtaagatagtcacattttaacccttattaatataaacaatttatttcagctatggttaagatttctttctcagcactatctattagstattctggtcaacagatcagcttgagcaggtaaaaaagaaaaaccataaaagaccctcactaattatcgattttcgcctggtcctggaaaaaaaaatcat

SEQ ID NO: 336262 - DNA, 201 bp, Homo sapiens
aacctcaagtgagtattctaaatcatgacatcattttctaattgaagtaagatagtcacattttaacccttattaatataaacaatttatttcagctatgrttaagatttctttctcagcactatctattagctattctggtcaacagatcagcttgagcaggtaaaaaagaaaaaccataaaagaccctcactaattatc

SEQ ID NO: 336263 - DNA, 201 bp, Homo sapiens
aggtttctgcaggctctcttgataagtaggggcactaatgtggtctagtaaattcttcaatgatatatattaaacttcataggaacctgaacctgaaaagmagcagcacacttcacctactgccctgcagtgttgacccaatttttaaagttttcttcccaaacgactttgctatgtttgattcctttaggattgtgatag

SEQ ID NO: 336264 - DNA, 201 bp, Homo sapiens
aagcccctctttcgagggtctctgcctctcaagctccaggccaacaccagcataaaggacccctctctgaaggaagggaaggaggctcagctggaaataasaaaatggattttcttacagggctgacacactgttttccaaaccactctataaatgttttgattaaaaagggattgctctgagagatcgcagttatttgga

SEQ ID NO: 336265 - DNA, 201 bp, Homo sapiens
agcctggccctgaagcccctctttcgagggtctctgcctctcaagctccaggccaacaccagcataaaggacccctctctgaaggaagggaaggaggctcmgctggaaataacaaaatggattttcttacagggctgacacactgttttccaaaccactctataaatgttttgattaaaaagggattgctctgagagatcg

SEQ ID NO: 336266 - DNA, 201 bp, Homo sapiens
atcttcaggtacccactgcagcagctggcttgaaaataccccccctttactggctgccttcccttccttatattaccttttcatacccctattagtgtccycttaccttcccagtaaattactagtactcaatccttaaataagactctgctactagggagaacccaactgtgacagttgagtgcaagtcaactccttgca

SEQ ID NO: 336267 - DNA, 201 bp, Homo sapiens
cccccctttactggctgccttcccttccttatattaccttttcatacccctattagtgtccccttaccttcccagtaaattactagtactcaatccttaawtaagactctgctactagggagaacccaactgtgacagttgagtgcaagtcaactccttgcatagtacctacaacatgtaggcactcaataattgcaagtt

SEQ ID NO: 336268 - DNA, 201 bp, Homo sapiens
atgtggcctgacagattccttcgaaagcaacaattgaaggaatattcaagttctctgtgacctcttctccctggccctcagagctgcaaataatgtgatcmttttacatcagtttattaaacattagtcagcttgctgatttatttttaatcacattctgcatatttctaggcattaatctgatgtttattatgagaattg

SEQ ID NO: 336269 - DNA, 201 bp, Homo sapiens
acatttgtattattgggattctttattaaataaagaaaaacaatggtaggaaataaggcagattttatgtattaggagtatgataaagtacgcaggtgtgkgataaaccatgagcatgtgaattccccttaactttttaaaattggattttgatggtatttcaactggaagcacaggaggccttgtcctcctttagatgac

SEQ ID NO: 336270 - DNA, 201 bp, Homo sapiens
ggtagagacggggttttgccatgttggccaatctggtctcgaactcctgacctcaagtgatctgcccacctcagcctcccaaaatgctgggattacaggcrtgaacactgtgcctggcctattccctgctttctcatcttacataaatgtactgtgagtacatttatggagactgttgaaaagcaaattcaattcaacatc

SEQ ID NO: 336271 - DNA, 201 bp, Homo sapiens
gccacagcacccagcaacttttactttttttttgagacagagttttgctctgtcgcccaggttggagtgcaatggtgcaatcttggctcattgctacctcygcctcccaggttcaagtaattcttctgcctccgtctcccgagtagctgggactacaggcgagtgccaccacgcccggctaatttttgtgtttttagtaga

SEQ ID NO: 336272 - DNA, 201 bp, Homo sapiens
attctctctctgctaagagtgagcaaggacatttgacttccccactagatgcagggtgaaccttctttccctagtgttagatagaggttatggaggaagcyacattgttaagtaacatatacctgtctgcattaatgcaaaggtagcttttctctgcttaacatcaaaaattctagttgggtgttagagatcaactatcag

SEQ ID NO: 336273 - DNA, 201 bp, Homo sapiens
taagctcaataaaaaagatgacaaaggccgggacaaagggaaaggcaagaaaaggccaaatcgaggaaaagccaaacctgtagtgagcgattttgacagcratgaggagcaggatgaacgtgtaagtgtagccgactgggactgaaggcggagacgccctctcccctgcttgctggcctcttgcatttccatgccccttca

SEQ ID NO: 336274 - DNA, 201 bp, Homo sapiens
gtaatggaagggcctgactgtgaggcagtttttagataacaatctagctagtctataggacattcataggaaagtatccttcagaatagttttgattataktaatatatgatgcttcaagctttttaatgtactattcattgaagtggtgatccaattccacttgctagatatttgaaattggcttattcattgtctcatt

SEQ ID NO: 336275 - DNA, 201 bp, Homo sapiens
gggaatgttctgggcactctgggatgtttgtgttgtctgtaggttggtgatagtcttaccacctatacaaagatctccttgtgattactcactggtgtctrtttcatttgctttggttttagcaaaatcagtcaaggtgaaaattaagctcaataaaaaagatgacaaaggccgggacaaagggaaaggcaagaaaaggcc

SEQ ID NO: 336276 - DNA, 201 bp, Homo sapiens
tagaccaatcacaaactcttgggtgttaattttgaaccaagaaaaagggacagttgtgtttgttttgctttgtttttttaagttttgagacacagcatgargttgatgtgagtacatgtgcgcaccaaccagcaatgtcatcaaactgaaggaatccaaagaatgatgggaggagttgatatctcttgtcatagagtagac

SEQ ID NO: 336277 - DNA, 201 bp, Homo sapiens
gcccttgttaactacaacagaccatctggtaggttaatacgcaaccaaatgaataatgccatggtccaactcggataacaaagactgctcaccaaaacacygggttgttaaaagcccggggctgacgtagccttttgttatacctcactggctctctatccttgctccacttagatggccaagattcttggtcttcccctg

SEQ ID NO: 336278 - DNA, 201 bp, Homo sapiens
gttagtactcaaatcagtctcccctaagacttgtaggtttgggtttttcaaggattgtctggtgggcaggggggtagagaatggggaatgctgattggttkgggatgcagttatagaagtgtggaaaatggtcctcatgtgctaagttagcctctgggttggggagccacaagactggtcgagtcaccaacactggtgtga

SEQ ID NO: 336279 - DNA, 201 bp, Homo sapiens
tgtagtcccagctactcgggaagctgaggcgggagaatggcgtgaacccaggaggcggagcttacagtgagccgagatagcaccactgcactccagcctcsgcaacagagtgagactctatccaaaaaaataaataaataaataaaaataaaaatagataaataaaaaaagaggtttgtggccaaatactgtaactaagat

SEQ ID NO: 336280 - DNA, 201 bp, Homo sapiens
ctaagggttccctagcatatctgtagcttagtaactggtcaaatgtgtagagcttttggggactcacctgtagcatctgaagagttgagatgagtcctgtrtgctgacaggatgtgatggacaggacaccaacatggtggagtcagtaaagggagcacctgcttgccacaggggtttactgtaatcacccaacaggtcttc

SEQ ID NO: 336281 - DNA, 201 bp, Homo sapiens
actaagattaccatataaattactatttctaacttgaatacttgtgaacgtgagtcgagggccttattattgataataggcataaccctggactgtccctsaacaacaaccagatacggtcactctggcagtgacccctcttgttaattcacatgcccgtcagcacacttgggactctgcggaaatcaacatgtaaccata

SEQ ID NO: 336282 - DNA, 201 bp, Homo sapiens
ataagatgaattaataaagtgctggataaaatcttactaaatgaatattaaccaagtatattttccggaatatgtttatgttcaaattagcgttgccatgmcggactcttattgatttctgatttttgtttgatattattttaaaaatctgttatttatgaagcttcctaattaaattaactgtaactaatgatatttcag

SEQ ID NO: 336283 - DNA, 201 bp, Homo sapiens
ctgtgggaataactactaaactggaatatgcacttccctttctccctccgtccccgaaatgaaccacccttcccaagtaaagctatttcagagaggaatgrtagtaagaaagacttaacagcatggtcaatgtagggcattcataaattctagatttcttaactcacactggtcagcataatcaaagattacaatattctc

SEQ ID NO: 336284 - DNA, 201 bp, Homo sapiens
cctcttgttaattcacatgcccgtcagcacacttgggactctgcggaaatcaacatgtaaccataaggcacatcagcatcctgcagtaaaatcacttcttyaacattgtttaacttcatatttcccaaatttctttgactaccaaaccctatttttatatcaccaattaacatcctgtaagactagcgtcttctagaatac

SEQ ID NO: 336285 - DNA, 201 bp, Homo sapiens
tcactgatggggagatgaaattgtctggagaggaacattatttaaaatgaagatttctattaacaacaacaacatcaacaaagatataatcttctgtgttmaagaagcccctcctgtacctttgcttcttccccaccatgtgctgaatcaaatgcatataattttactatggagtctacctttcctcttctcctagagttt

SEQ ID NO: 336286 - DNA, 201 bp, Homo sapiens
gggaagtcttgctgtaaagtcagctgtttaactgcttaacccagcatctcccaaacttatttgaccaaagaacccccttttcacgggacactgttactaayccattaagctagtgttctgtggagcacactttgggaaatgctgaattggagcccaaatattacattcagtgcagagagaatctgctcggagatgtggact

SEQ ID NO: 336287 - DNA, 201 bp, Homo sapiens
aaaatacaagctgaacgtggatcagaaagtgatccaggcgggcatgtttgaccaaaagtcttcaagccacgagcggagggcattcctgcaggccatcttgkagcatgaggaggaaaatgaggtattagagaaaaccccaagtttatgaaatcaaacagtggccttttgtctctgaaggactcagaataatccctttgttta

SEQ ID NO: 336288 - DNA, 201 bp, Homo sapiens
gaccaattagatacacttctgggaaattttaggtgtaggtgaagcaccttttttcattcattctctgtttctgatagtttggacccagaatcaagctgacrgtttatcgtgtagagtagcagcctcctgaggtcagcgcctcatgcattgtctggtgcatgagcatttcatgatgcttcccagagtgagttcttccaactc

SEQ ID NO: 336289 - DNA, 201 bp, Homo sapiens
gctgggtgccatggctcatgcctgtaatcccagcactttgggtggccggggcaggtggatcacctgaggtcaagagagtttgagaccagtctggccaacaygatgaaagcccatctttactgaaaatacaagattagccaggtgtggtggctcatggctcatgcctgtaatcccagctacttggaaggctgaagcagaatt

SEQ ID NO: 336290 - DNA, 201 bp, Homo sapiens
tcttgggattgccattgaacaaagtatatttaatgagggataagtcaaaaatgttgcaaaatcatagcagtaagaacaatagcaaccatcattcatgggamccttaatctgtgtcagcctcttgggcattttttcattcagttttacgacaaccctgtcagacggttaatatgatttgaatctttgcagtcaaggaaactg

SEQ ID NO: 336291 - DNA, 201 bp, Homo sapiens
gtgtgcacatgtgcatgtatgtagttacctggccctgcatacaccatcacaggacagctgaactctctacttggccattagcagcccttgatgttgtgatkatgttgttagtattgactgctctttcaggaccagccaacaggctcttgtaggcaaaatttatttttagtaccagacatcttgtattactgtaaatgagag

SEQ ID NO: 336292 - DNA, 201 bp, Homo sapiens
tggtggtatgtgcgggaaggggggatgtagccatggaggcttggaaagcagtccccctctagagactacaccatctcagtgtgaccagctcattggagacraaggaagactgggacagcctggatgaggctggagaagcctgagaacagatcccggagggccttgaacaccaagctgaggaggaattttgatgtactcttc

SEQ ID NO: 336293 - DNA, 201 bp, Homo sapiens
gaaggaagggagatgatgccttctgtcctccagcttcagtttggagggtgggaaaggatagaggaggagggggaatcatgaaggaagcgaagttgaaggtkcatgcccttcagtacctacatattgacattttaagtagcagttggtagaaaggcagactctgatttgcaatttttttccctagaaacaagagatccacag

SEQ ID NO: 336294 - DNA, 201 bp, Homo sapiens
taaactgtaatttccagagacatagcagtgggcttggtgtttgcttcctcagggctctctggagtctgtcttgtcccttgctgtctgtcacacacacttcyttttcccataagcctgagctgacaacatggtgtttggagattgtattatgatgaattaaccctttcttcagaagagcttttaaaaaatctttgcttcagt

SEQ ID NO: 336295 - DNA, 201 bp, Homo sapiens
atatagcgtcacttttggcaggaaatcacattcaggggtacattaaaattctaagggagcttttaaaaaatatgcatgcctgctttctgttccctgccacygcaccccagttttcttattcggtggagctaggtgcttcctttgagcgctcccaggagattctgaaatagattctcatacagatgaggagcactgatttaa

SEQ ID NO: 336296 - DNA, 201 bp, Homo sapiens
aacagggacaggcaggagctcctttccctctttgccctcttccatcaagatggtcatgtgaccacgaaaagtagatcaataactttaaaggctatttattkcaagtccccagtgccatgcccaggctttttgaggggagatgacatgacggtatatggttaggaactagataaattcattttcactaaagacacatttaaa

SEQ ID NO: 336297 - DNA, 201 bp, Homo sapiens
aatgtttgacattaactagtgttgctctgtgcacctgtaagtgtttaacatgaataactacgttgtgtttttagtttttcattatggctttgccgaatacmtcatagcaggaaggaaaaattattataaaaattaagtggtataaaaagcaagaaactttccaccatggggttttgctgttaagcctttcttatctgcaag

SEQ ID NO: 336298 - DNA, 201 bp, Homo sapiens
aaagtgtcactcagctccttgaaggaacaaaatgtaccagtgtcattttctgttcagataactctcctacaggaatcataaacttctcctctggacctgawcaagtatctgttgcatttaatgcaactctttttcttgccagaacagtaacccctcgtgatttactgttcaatctgtatgaaaaacctgtgtgacctaatt

SEQ ID NO: 336299 - DNA, 201 bp, Homo sapiens
ctgacagagcactgttagaaatttaccatatggacatgtccaccatacctccctcaaattctaccaagatacattgaaataggttcacagcagctttgtttatactagcaaaaaaagcagcaaacttcagccctcatcatatgagactgattaaataaattatagtataccatacgatggaaaattttcaggtatttaaaa

SEQ ID NO: 336300 - DNA, 201 bp, Homo sapiens
ataagtttgggcagtttaaataatcaaccaacttgggtaaatatttccacccctaatacctagaaaggaggccttagggctaaatggcatgatgtaagctsaatgccctgcccaggaaacagggacaggcaggagctcctttccctctttgccctcttccatcaagatggtcatgtgaccacgaaaagtagatcaataact

SEQ ID NO: 336301 - DNA, 201 bp, Homo sapiens
accgcaggtgtaacgtggagaaggtgcccagtaattctcagttggaaatagaaggaaacaggtcaggatctgtcttgtattcccctatctctaaatacagstatccctcgttacgtgaaacagattgaatcatataatcggcctttggaagcaaatttcttcggtcacctcctgatcacccctacttggagagcgggatag

SEQ ID NO: 336302 - DNA, 201 bp, Homo sapiens
aattgaggatgtatcgtgtatttcagaatgaacacagatcactggttgtggtattcttctttatataaggagattaaaaactagtggtgatttatacttayacttatccatttttgtgtggagatgaaactgtcgggcaagattgtcaatttttgatatttcttattgcagtccagtaaacaatgactaatcctggaaacc

SEQ ID NO: 336303 - DNA, 201 bp, Homo sapiens
cttccagcgcagcttctgttgtgtgttccttgggcctctttaactctgtgctgtcttggtttagaagcttaatgcgaagcacctgtagtgacttgatctcytgcgagacatgaagaagcgtgcatgttcacgctgtgtctgcattccagagttgatcatggcatgcagagggcaattgctgagttgtctcttgtttgtgtg

SEQ ID NO: 336304 - DNA, 201 bp, Homo sapiens
aaagacctttttccctctaaggctgcttatttatctttaagtataattattcagatgagaaattaggatcatggcccttaattgggagtcaaatgtgtggrttattctggattttgccacagccttatttgagttttgatttcctctataaaacgtgaagaataagtgagtcgtcctgtaattgcaagctgtgtagttgag

SEQ ID NO: 336305 - DNA, 201 bp, Homo sapiens; identical to SEQ ID NO: 70695

SEQ ID NO: 336306 - DNA, 201 bp, Homo sapiens; identical to SEQ ID NO: 70696

SEQ ID NO: 336307 - DNA, 201 bp, Homo sapiens
aaacgctgcagcttgcagtccaggggaaaaggacgttgcctggcttgcagcaacaacagcagcagcaacagcagcagcagcagcagcagcagcagcagcarcagcagcaacagcagccgcagcagcagccgccgcaaccacagacgcagcaacaacagcagccggcccttgttaactacaacagaccatctggtaggttaa

SEQ ID NO: 336308 - DNA, 201 bp, Homo sapiens
ctaccactgtttgttttataataatttcccctctttccctctatcttttgcccattctcttggaggttcttcctgtttctctacttatctcttgttgttgytgtagttctgcagaaacctttaggatgactttggaatcttgcatggtacaaagtatctcaagtggcttatggaagtattgcttcaaaccaatgcggtgtc

SEQ ID NO: 336309 - DNA, 201 bp, Homo sapiens
cttaacgtggggaatctctggtacagtgtttttgtacttcagaaatacgttgagcatgtttccagttgccagcttccagtgtgcagcctttgggtagtacycacattacaaagttcccatgtgctgtctgggaactttctctctgccaggaagagaaatgtcctcctgtggtcccagcagagtgtccctggctccctggtc

SEQ ID NO: 336310 - DNA, 201 bp, Homo sapiens
tacttaatggaatctctccctagatatttagggatgagctagaacaagccaaccaggatgagagaggttgaaagggaccctgcagccataggaagtgactyggggaagttgtgtagtgctgggaagtctgcaccatacagaagccctgactttcggtgaccctcttattaatgtctccagcggatggacatggaccggcgg

SEQ ID NO: 336311 - DNA, 201 bp, Homo sapiens
ctccttagttttaatcccatctcttgggattgccattgaacaaagtatatttaatgagggataagtcaaaaatgttgcaaaatcatagcagtaagaacaayagcaaccatcattcatgggacccttaatctgtgtcagcctcttgggcattttttcattcagttttacgacaaccctgtcagacggttaatatgatttgaa

SEQ ID NO: 336312 - DNA, 201 bp, Homo sapiens
tcattattcacatttacaggacagagcaaatatctaaacgagtgggctgttgctttcttggagccaattcttctggctgttttcttatctcccttagagcrtagatacgaggtcccacatatgcctttgaagagctgaagtttgaggtagaaaaacttagtttctccttagttttaatcccatctcttgggattgccattg

SEQ ID NO: 336313 - DNA, 201 bp, Homo sapiens
atccacccgcctcggcctcccaaagtgctgggattataggcacaagccgccacatctgacctgcaaacactttctgaatgttgcctttgaatattagcctactacacattttctacaacactgctgctaatgccacctatcttctcttctttaccacggtggttctcaaacctggagggcttgaagaatatgccagtgttt

SEQ ID NO: 336314 - DNA, 201 bp, Homo sapiens
ttgttatttttattaaatgtgaaaaacagatcgtccccatgtttgagaacttggccctcatagtaacttgatttcattagctatagtcacttaaatgtttyaatcctctgaaataaattgctggtatgttttcatccttaaaaaatgaacagcatgtaggaataatatttgaagagcagctggtcagagactgtcatgtaa

SEQ ID NO: 336315 - DNA, 201 bp, Homo sapiens
cagaagtacaaagccctggaaattacctcaccagtgttaggaggagtctgggtatatttcttgaaggaagcaagcctttttgtctcattctgtgccatttycagacaagagttaattggcaaattaatttttctgatcccctcaggcaccaccaagtctgaagatcgtgctgctttgctgaagaaattcaatgaacctgga

SEQ ID NO: 336316 - DNA, 201 bp, Homo sapiens
ttggagttcatattcattcattcattcatttcacagttacttattgaatgtttacagtgtacaaaggactatatgaaaagcaaagcaatgctggatttttyaagaagacagaagtaatactgtcttcttgtttttgcatttttttgggttcagggctgaactgtatcgggcctcagggaagtttgagctgcttgatcgtat

SEQ ID NO: 336317 - DNA, 201 bp, Homo sapiens
ttcatggcatttgccactatctaaaagttatcttactgttcctctccactggtataaagctccgagaaagccagggcctttgcctgtcttcttgactgctrtgtcctggtacctgcagcaggactttatgcgtggtaagcactctttaaataggtgtggataagtgaatatactaggcagaaatgagggctaggagggatt

SEQ ID NO: 336318 - DNA, 201 bp, Homo sapiens
agagctggtggcctgggcttaaatcttcaggcagctgatacagtggtcatctttgacagcgactggaatcctcatcaggtctgcatgtcccactcaggtgyccaggcctccctctggagagcaactaaaagatgatcagtttcattattcacatttacaggacagagcaaatatctaaacgagtgggctgttgctttcttg

SEQ ID NO: 336319 - DNA, 201 bp, Homo sapiens
catatggtctccaccatatgaacatttatccaagccgtggcttttgtggtagtcttgtttcaggtttttcctggtgaaataatagactatcattgttggarttacttaaggttgtttctgtgactatttatttgaaactgagaaagaggtgtttctgtgacttacatgtctcctaatttttatgtcctaagttgttcctta

SEQ ID NO: 336320 - DNA, 201 bp, Homo sapiens
ataaagctccgagaaagccagggcctttgcctgtcttcttgactgctatgtcctggtacctgcagcaggactttatgcgtggtaagcactctttaaatagstgtggataagtgaatatactaggcagaaatgagggctaggagggatttggttgcagccccatatccttttggcaaagacagtagaatcatgtttttgtaa

SEQ ID NO: 336321 - DNA, 201 bp, Homo sapiens
gacattccaaagaattctgtgtattttgaagcgagcacatgcgcttccacccctctgttgatttgtttatgggtttatgcttttccctctctgcaacaccscgaccccacactgactctagagcagaatggggcagtgactccgagaagggatttatacatggacaggcacaggctgtgaatcccaaagggtgctgtctac

SEQ ID NO: 336322 - DNA, 201 bp, Homo sapiens
tgaagactttcccaattctgtgccttattgctgacactcagagtcccctcaacctgctcctaattgtccctacaagacacccgttcacctgcctcctcacmccctgtcttcctgaggcccttgcactgctggcctggcctggcaagctgcagggtggactgcgtgccctgcctccagtctcttcctgtcctggcttctttc

SEQ ID NO: 336323 - DNA, 201 bp, Homo sapiens
aggaggacttttgactgccagtaaagactggtttcattgtctcagaagtcaccatgaactgatgaatgttaaatggtctgatgacaccactagtgtaaatmaggatgcttccgtgaaatttcaccccgaatcccaagatggaggcaggtttatgatgatcctggaatatttcatgctgatgagatagatcttttggaagac

SEQ ID NO: 336324 - DNA, 201 bp, Homo sapiens
gaaaatggtaattacatggagactataggaggacttttgactgccagtaaagactggtttcattgtctcagaagtcaccatgaactgatgaatgttaaatrgtctgatgacaccactagtgtaaataaggatgcttccgtgaaatttcaccccgaatcccaagatggaggcaggtttatgatgatcctggaatatttcatg

SEQ ID NO: 336325 - DNA, 201 bp, Homo sapiens
acaactaagggttccctagcatatctgtagcttagtaactggtcaaatgtgtagagcttttggggactcacctgtagcatctgaagagttgagatgagtcytgtgtgctgacaggatgtgatggacaggacaccaacatggtggagtcagtaaagggagcacctgcttgccacaggggtttactgtaatcacccaacaggt

SEQ ID NO: 336326 - DNA, 201 bp, Homo sapiens
acaaaggacaggtctctgtgacatacccctgaaaatcacttcaggttgacatgaatatattaaccagtaatccttaaggttggctacccatcagtgaactyatatagccatgctctcatgtcacccacatttatcctttctcagcattttcaagaaaggctaaaaccatgatacaccatggctagcctttccaatctatca

SEQ ID NO: 336327 - DNA, 201 bp, Homo sapiens
cattattaacgttggaagggatgtttagctctgcctggcccaacttcccacaatacaagtaagtcccctgtaccacctctggcatgtggtcatccacctcyatgtggacactgcagtgtgagctccctgcttcagagcagttcttgacaccaaaggacagttctaaacacatcaccgtttcctacattaaaagggatgcag

SEQ ID NO: 336328 - DNA, 201 bp, Homo sapiens
ttatgtaatatttaacctaagactgttctttgagaagggattcatcctgtttgcatttgtacccttgaaaattgcccctgggatgagatgtagagttagayggtaaagagtagagtctgtggagctattccaactctagagacatggctttcagttacttggataaagaagagagagagattcctagaggcattattaacg

SEQ ID NO: 336329 - DNA, 201 bp, Homo sapiens
atcagtaggcatgaagaagtggccatcctttcattggcagcatcgcgctctaggttgtcacaatccccgtcactctgtatcatctcttcagtatggagtgsgtcgccatttaccgtcatgctttttacgcccgactcacttcattcatttgtattacctgctggctccatagcctttgagtttatgacttcctggtataca

SEQ ID NO: 336330 - DNA, 201 bp, Homo sapiens
catagcatggtctttcagcaaatttaccttttttatgggatttttggatacagactttgagaaagctgtgtgggacactcctcccaggccattttaaacartgaataattatttgaaaaccaaagacactgtagggtgtcagtcagatccatacagtagatgaactagttaggctacgttttggttagttgacttggtttc

SEQ ID NO: 336331 - DNA, 201 bp, Homo sapiens
tgattttgaaagatttcaaaaatattccatcgaaagactggttcaatgaacacctatataccctccacctgagattcaacaatgattaatagttcatcccyaccccgttttattttaccaaaccattggaaaataaggtgccgtcagtcattacgatacttcgcacctagtatttcagcacaaatctaagaataagcgtat

SEQ ID NO: 336332 - DNA, 201 bp, Homo sapiens
gcatctattgagccaggccttgtaataggtacctccctgtgtggtagcatattaaatactgatgtcggcatcgtgagatagatgtcactctcaaataacaygttatggaaatggttaggttatgggtgttttgctacagatcacgtcgcagaggtggaattcggacccgagtagcataactcagtctagtgtgctatgtct

SEQ ID NO: 336333 - DNA, 201 bp, Homo sapiens
atttcatgtttaatatacatcaattatattaaacgtaggaatatcagcctaacttcagtgtttgtatcttcattgttcaaactcgtggtatattactttartacctattgaagctgatttcagtgtaaaccataacaggaagtaagcaatttccttttattcactaaaaaataaaagggtgtattagtgtgctcatataca

SEQ ID NO: 336334 - DNA, 201 bp, Homo sapiens
tggttaactgttttctaaggttttgccctagatcactttctggatatttatcaaattctatgtccagaactttcccctcaagttctaggcccatgttgaarcatactcagtgaggccgggcacggtggctcctgtagcactttgggaggctgaggagggtggatcacgtgaggccaggagtttgagaccagcctggtcaac

SEQ ID NO: 336335 - DNA, 201 bp, Homo sapiens
gcaaaagtttttaggaaaagaaatcaggacatatccatgggattatattaataaataattcaaacaaaatctacaacacacatatattttcctgcaaagcraagaccatgatgttgctatttctcttacttttgcaatgcccataagcattttccacttcaagcaagtctacctggtaccaccacgtgtgatggatgccat

SEQ ID NO: 336336 - DNA, 201 bp, Homo sapiens
agcattttccacttcaagcaagtctacctggtaccaccacgtgtgatggatgccatgacatatttgggcttttctcaactggctaatttttggaaattagyctgataatttcatgaagggaaattcagtcctaaaataagttatccctgagactagtgacttgccatgtttcctttaaaatggtagcaactgactgtattt

SEQ ID NO: 336337 - DNA, 201 bp, Homo sapiens
tatttcaatcagcataataccttcaaggttccttcattttgtaatatgtatcagaatttccttcttcttaaaggctaagattccattgtatgtacatacaygttttgtttatcctttcatccatcaatggatgcttgggttacttccaccttttggctattgtgaatttattctcatttttaaatgggatgttttgttcca

SEQ ID NO: 336338 - DNA, 201 bp, Homo sapiens
aataccttcaaggttccttcattttgtaatatgtatcagaatttccttcttcttaaaggctaagattccattgtatgtacatacatgttttgtttatcctytcatccatcaatggatgcttgggttacttccaccttttggctattgtgaatttattctcatttttaaatgggatgttttgttccatttcagggtaagaag

SEQ ID NO: 336339 - DNA, 201 bp, Homo sapiens
  misc_feature (1)...(201): n = A,T,C or G
ttatcagctaagcctgccctcccttaaagaataaaaatgggtttcaagggagaataataattagaatcaatatatgaaggtttgtctagatctatgtatgngccttattccaatttttttatagtcgtgtcttcagaagaagcttattgttgagtgagcacatattctgagatttgtacttatgaagtggaaacatcaata

SEQ ID NO: 336340 - DNA, 201 bp, Homo sapiens
tgctgtaatataaagaagctacttggctctgtatgtccaaaaggttaccttctccagatacttgtacaaacgaggctatgcacagctatggtataattttraaggatatgtaattttttatatgctcccaaatatcttcctcaccagcttgcatcagtaaattctttccctagtatttggcttaaagttcttattattaga

SEQ ID NO: 336341 - DNA, 201 bp, Homo sapiens
aatcggctttacccaaagcctactgatttaaatgttaatcctatttttaaaatatcttcacagaacatatagactggtgtttgaccaaataactgaacatsatagccaagcctcattgacatgaaaaattaaccattacaatcacattgtaattatggtgagcattttgaatattttaaaagaaaaacagagatatctcct

SEQ ID NO: 336342 - DNA, 201 bp, Homo sapiens
ttgcagccgactgccctttggtcagagagaactgctgcagctttaggcagtatctctaaacacagccctaaacagaggtagtagagtttcttctcacaattttttttttttttttttggagacggagtgatggagtcttgctctgtcgtccaggctggagtgcagtggcacaatctcggctcactgcaacctctgcctcct

SEQ ID NO: 336343 - DNA, 201 bp, Homo sapiens
cagagagaactgctgcagctttaggcagtatctctaaacacagccctaaacagaggtagtagagtttcttctcacaattttttttttttttttttggagayggagtgatggagtcttgctctgtcgtccaggctggagtgcagtggcacaatctcggctcactgcaacctctgcctcctgggttcaagcaattctcctgcc

SEQ ID NO: 336344 - DNA, 201 bp, Homo sapiens
tagtgggcaagtatccgcacatatacttgactgtaaaattccataggtgaggggaagtgtcttttccacacccatcgctagggcatggcagaggcacttawaacaaaagaccgattaacaagagaaaaacatacaaatttatctaataagtttttaataacacagaggagactttataaggcactgaagacccagagagtt

SEQ ID NO: 336345 - DNA, 201 bp, Homo sapiens
aactaggacaagttcacagcattccatagctgcaagtcacttatagaagtctctctcataatccttgaaagagatgagttagagatgggcataaatcatctttttgctttgttggttaaaagttttcgaacctgattgtccacgtttactggcacttgaaagttttcatagtctatgggatccgtattctgaaaatatact

SEQ ID NO: 336346 - DNA, 201 bp, Homo sapiens
tcccgagtagctgggactacaggcgcccgccaccacgcccggctaattttttgtatttttagtagagacggggtttcaccgtgttagctaggatggtctcyatctcctgacctcgtgatcctcccacctcggcctcccaaagtgctgggattacaggcgtgagccaccgcacctggcctagatagtatcttaataatggga

SEQ ID NO: 336347 - DNA, 201 bp, Homo sapiens
gtcatgtcaagtaattggggacttggttaccagtatgaattttcaggaccacacgggatttggagggactgttaaagcattgaatggggcctagaaatgtyccgtgctctttgccagaaaatctgtatagctggaagcttcctcatctgtgaatgtgggataaaaataatacctatctcataaataaatatatatcttatc

SEQ ID NO: 336348 - DNA, 201 bp, Homo sapiens
acggggtttcaccgtgttagctaggatggtctctatctcctgacctcgtgatcctcccacctcggcctcccaaagtgctgggattacaggcgtgagccacygcacctggcctagatagtatcttaataatgggatcacatccttaatttgataaacatgtaactacattaatgaagagaacagatttgggatgttcattat

SEQ ID NO: 336349 - DNA, 201 bp, Homo sapiens
atctcataaataaatatatatcttatccttagaaagctgcctggtacacagtaaatgctcagaaatgttggctaatattaatgttattatgactacaaccyaactaataaggaatggaccatttcagcatgaattagggagtgtaaagtttattttcatatctgtcagcaagggcgtggaggtgggggtaaggatcctaat

SEQ ID NO: 336350 - DNA, 201 bp, Homo sapiens
aaacagtttctagcagcttttaagacaggaagtgataacttgaacactgggttatataattcttaatcttaaatgtattgagtacagatatgcctattttcccacaaagaaatgaatgttaatattttaatacaatggtaatactttctttatactaatactatgatgtattaatattagtttaaatttatactatatatt

SEQ ID NO: 336351 - DNA, 201 bp, Homo sapiens
ttgggaggctgaggcgggtggatcacctgaggtcaggagtttgagacaagcctagccaacatggcgaaacccagtctctactaaaaatacaaaaattagcwggctgtggtggcgaacccctgtaatctcagctacttgggagtctgaggcagggagaattgcttgaacccaggaggtggaggttgtagtgagctgagattg

SEQ ID NO: 336352 - DNA, 201 bp, Homo sapiens
gagactgaggcgggcagatcacctgtggtcgggagttctgaccagcctgaccaacatggagaaacccggtctctactaaaaatacaaaattagccaggtgkggtggcacatgcctataatcccagctattcgggaggctgagacgggagaatgcttgaacgaacccaagaggcggaggttgtggtgagccgagatagcgtc

SEQ ID NO: 336353 - DNA, 201 bp, Homo sapiens
ttgacagtgagggataggggagccattaggtgtgatggcacagagaggaagatgaaacctgcaaaataggatttgaaatattgattttccaaatgagtgcyatatttactgatttgttttgagggtgaatatagttgtattacttttcttaccatataacacatttccatgattggaaatgtttatggagaaagaaagcca

SEQ ID NO: 336354 - DNA, 201 bp, Homo sapiens
attatgacccccaaatttgcagcttctgtgagtctagattgacccctcctgatgattgtgctggcagaaactttagtacaggcttcatgtacttttacctycctttactttgttccatagtttatatgcgtggctaggtgaatgtctgtctttgttcttaaaacttttattcctttataatgcttttgacctctttttctc

SEQ ID NO: 336355 - DNA, 201 bp, Homo sapiens
ttatcagaaactctgttgtattggttgtctgtgcttttgtgggcatctctgatgaccagggtagaatatttggggacatgccttttctagcatgacaggarggtgttcccttctgatgttaagagccaactcttttttcatccttgcatctccttctggacctggaggtctccagggaagtggagtgcctcattaattggg

SEQ ID NO: 336356 - DNA, 201 bp, Homo sapiens
ctcccaaagtgctgggattacagacatgagccatggcacctggccaagtcacaggaaactaatatacttatcttttaaggcttgactcaggtttcttatgytcctggaattgtcccccgattccccaaggctggacaagttgcgcctcctctgtgtgcatatgctacccctctctacttgttcctgcttgtgtaattatcc

SEQ ID NO: 336357 - DNA, 201 bp, Homo sapiens
tggagtgatgtggcatgatcatagctcactgcagcctcaaactcttgggctcatgggatccttccacctcagcctcccaagtagctagggctacaggtgcrtgccaccatgcccagctaattttgtaaatttttgtagagacagggtctcattatgttgcccaggctgatatcaaactcctggactcaagcgatcctccca

SEQ ID NO: 336358 - DNA, 201 bp, Homo sapiens
ccctgccaacacctagacttcatacttttggcctccagacgtgtgagaaaataagtacatttctattgttttaagatatcaggtttgtagcaatttgttawattggtcacaggaaactttattttattattattttttagagacagggcttcgctctgtggctcaggctggagtgatgtggcatgatcatagctcactgca

SEQ ID NO: 336359 - DNA, 201 bp, Homo sapiens
tgtgaatttattctcatttttaaatgggatgttttgttccatttcagggtaagaagttgccttatcaccttggggatgatgcagaggaaggggaagtttcygatgaggacagtgcagatgaaattgaagacgagtgcaaattcaagctccattatgtaagttgcaggcatgaccatattttttatccttgatatgctgtat

SEQ ID NO: 336360 - DNA, 201 bp, Homo sapiens
tccattatgtaagttgcaggcatgaccatattttttatccttgatatgctgtattaaaatggagttccaagttgctactgtgttggaggcctcacaattayggtggctgtggtgtagaaaggatattcattgaaaattactttatttgctggcacatagacattcaaatgtttgttgaatgaatgagtcaaggattcttgt

SEQ ID NO: 336361 - DNA, 201 bp, Homo sapiens
taaatgtgacttttaacaaactttgtaaaatgtaaaggagtatagttgggctgggtgcagtggctcacacctgtaatcccagcactctgggaggccgaggygggaggatcacctaaggtcaggagttcgagaccagcctgaccaacatggagaaaccccgtccctactaaaaataaaaaattagccgggtgtggtggtgca

SEQ ID NO: 336362 - DNA, 201 bp, Homo sapiens
aatttcctattacaaattcaaaaatcaaattgtagttggaaatgttactgtctttgataataaaagctggctttacttttagcattgccttccctacctcrtgctagcagccccccatgctccctgtcaaggctggctggaggaaccccacctgcacgtggacctgcttctctgggatgcccatgccctctttaagaaaat

SEQ ID NO: 336363 - DNA, 201 bp, Homo sapiens
acttgaaagttttcatagtctatgggatccgtattctgaaaatatactgtccagaaagcaggtgtactgtggcactacacagagaaacaattttataagamatatagaagcagttgatttttgtgtcagtgaaggaataaaagagaaataataaattgatgaatagtaaagagaaagctgaagtgaaaaatgagaaaggtt

SEQ ID NO: 336364 - DNA, 201 bp, Homo sapiens
tttttgcattttagtatttgaggtgaattatataccttattaacttatttttcagtagctgtgaaaatatgccatcattcatgcagtaaggtcttgcttcrtgagaagctactgggaatcaatagtgcatggtctaatttgaccctgtcactaactataaggccttgtgtggccttgggcacattattgtctatgaacatc

SEQ ID NO: 336365 - DNA, 201 bp, Homo sapiens
ggacaagttcacagcattccatagctgcaagtcacttatagaagtctctctcataatccttgaaagagatgagttagagatgggcataaatcatctttttkctttgttggttaaaagttttcgaacctgattgtccacgtttactggcacttgaaagttttcatagtctatgggatccgtattctgaaaatatactgtcca

SEQ ID NO: 336366 - DNA, 201 bp, Homo sapiens
agaagaacaagcctgtgagcttgggtgtaggagaaagtaagattgaattgtcagacaggagctagcatggtaattaaggcaacattgtccttttaacaatraaacttcaaatttcctgtgccttaaaacaactgaagtttatttcttgattatgtcaagttcaaaataggtgttcctagtgggtgaatctctcaagcagtt

SEQ ID NO: 336367 - DNA, 201 bp, Homo sapiens
taggattctgccttcaatgactgtctttcagcttccctattgagcctggctctttctcaactccccactcttacgtatgctgttctctctgcctggaacamccttccccgttagtctatctgattaattcttgcttattctacaaggctgtttaagtattgtccctccaacaagttactaataccaccagctgatttaaat

SEQ ID NO: 336368 - DNA, 201 bp, Homo sapiens
ttcaccatgttgcccaggctggccttgaactcgtgacctcaggtgatccaccaatctccctcggcctcccaaagggctggggttacaggtgtgagccaccrtgcccagctggccccaactttttaatcttacaaattcccttctgtaagttgaagaaaatatttgcctaaatcccaattgtttagattcttaatgtagatt

SEQ ID NO: 336369 - DNA, 201 bp, Homo sapiens
tgttgttggcacatttcagttcctttcaggctgttggctactgaggcctctctcacctccctgccatgtgggtctctccatagcacagctcacgacaccagtgtgtgtgtgtgtgtgtgtgtgtgtgtgtgtgtgtgtgtgtgtgtgtgtgtgtatgagagagaaagaagagagaaagagagaagagagagagaaaaagag

SEQ ID NO: 336370 - DNA, 201 bp, Homo sapiens
tgcaagctccgcctcctgggttcacgccattctcctgcctcaggctcctgagtagctgggactacaggtgcccgccaccacgccaggctaattttttgtatttttttttttttttgagatggagtctggctctgtcgcccaggctggagtgcagtggcaggatctcggctcactgcaagctccacctcatctgtttacgcc

SEQ ID NO: 336371 - DNA, 201 bp, Homo sapiens
tatgtatttaaaatatgtaaagaaatactatgtaggctgccacccaagaggaggatctttcaggcagagcagatgatctttaatgaaagaccagctgcctrtaagagcatgcaaagccatggtttatctcaccaattttgaccgttggccccctcatttcttctgctcccagatcagtgtgaacaaggggggtttaatacc

SEQ ID NO: 336372 - DNA, 201 bp, Homo sapiens
gttgttggcacatttcagttcctttcaggctgttggctactgaggcctctctcacctccctgccatgtgggtctctccatagcacagctcacgacaccagtgtgtgtgtgtgtgtgtgtgtgtgtgtgtgtgtgtgtgtgtgtgtgtgtgtgtatgagagagaaagaagagagaaagagagaagagagagagaaaaagaga

SEQ ID NO: 336373 - DNA, 201 bp, Homo sapiens
agctactcaggaaactgaggcacgagagtcccttgagcctgggaggtggaggttgcagtgagccgagaccgtgccactgcatttcaacctgggtgacagartgagactctgtctcaaaaaataaaataataaaataaaataaaatcttatatcattaaaaactgttttaaaaacaaccagagatgataaactaacttgggc

SEQ ID NO: 336374 - DNA, 201 bp, Homo sapiens
ggcattatattttgaaagattgtaaaaaaactgatagggttttctaaataatcttaaaggactatttcaaagttataaaatgtgccagccattagcagcatttttttcaaaccaatttggttgtcaatcacaccctgaatttagacagtgtttaacttttggcttactaccttaactatggcactgactttactgtttttc

SEQ ID NO: 336375 - DNA, 201 bp, Homo sapiens
atagcttttgtgttaagcattctttattttaccagctctggatcggctctggctttgtattttgagcctttccttgctgacagtgaaagtgacttggtgtyatggccacagatcttctccttacttgaagtctctgcctctttgtgaggccctgagtgagagaaggaaatggatgctcatttggagcattctgtgtgatac

SEQ ID NO: 336376 - DNA, 201 bp, Homo sapiens
tgaggctggagaatctcttgaacctgggaggcggaggttgcagtgagccaagatcgtgccattgcactccagcctgggcgacaaagcaagactccatctcaaaaaaaaaaaaataaataaaataaaataaagaaggaaagaaagaaagaaatacccgaggctaggtaatttataaagaagagttttaattggctcacattc

SEQ ID NO: 336377 - DNA, 201 bp, Homo sapiens
gcaggagagagagtggagtggagagagccatatacttttaaacaaacagatctcaggagaactcatgcgctactgcaaagacagcaccaagccttgagggrtccacccccatgatccatacacctcccaccagggcccacctccaacataggggattatatttcaacatgagatttgggtggaacaaatatctaaaccata

SEQ ID NO: 336378 - DNA, 201 bp, Homo sapiens
atataagagggatggctgctgcattgtatggaaaaatagccacagtcttgaatgggaagtcttaggaggttcaagctgcaattcagccattttcataggcmtgtgtgtttggttgagtggctgaacctttctgcctgtgtcattatgagaaaaaattggctagccctagtgtttgccttaaacagggttcagcagctcaaa

SEQ ID NO: 336379 - DNA, 201 bp, Homo sapiens
ggcattgcctcacctgggaagcgcaaggggtcagggagttccctttccgagtcaaagaaaggggtgacggacgcacctggaaaatcgggtcactcccaccygaatattgcgcttttcagaccggcttaagaaacggcgcaccacgagactatatcccacacctggctcagagggtcctacgcccacggaatctcgctgatt

SEQ ID NO: 336380 - DNA, 201 bp, Homo sapiens
caaagaccaaaagtagataaaaccacaaagatggggaaaaaacagaacagaaaaactggaaactctaaaacgcagagcgcctctcctcctccaaaggaacrcagttcctcaccagcaacggaacaaagctggatggagaatgattttgacgagctgagagaagaaggcttcagacgatcaaattactctgagctacgggaa

SEQ ID NO: 336381 - DNA, 201 bp, Homo sapiens
ctacaaaccactgctcaaggaaataaaagaggacacaaacaaatggaagaacattccatgctcatgggtaggaagaatcaatatcgtgaaaatggccatastgcccaaggtaatttacagattcaatgccatccccatcaagctaccaatgactttcttcacagaattggaaaaaactactttaaagttcatatggaacca

SEQ ID NO: 336382 - DNA, 201 bp, Homo sapiens
ttgtgggaagtgaaatacaagcaatttcagaaaataggttgggaatgtttctagcacaaagaaaagacaaatatttaaggtgttagatatcccaggtacastgatttgttctttataaattatatgaatgtactaaattatcatatgtacccccctcccaaaagaagaaaataggttggatgcacagtacttctggctgtc

SEQ ID NO: 336383 - DNA, 201 bp, Homo sapiens
accccaagcgcaaaggccagaagcgggatttgaggctctcccggcaccaccctggagttagatgcagagcaggaggacaagactcctgttacttttaagcwagcggtttaagccatactgttaagtttttttcttatgtaataaatgcttctgttgttgaattaactgaatcttttaagcttctaccacatattattttgt

SEQ ID NO: 336384 - DNA, 201 bp, Homo sapiens
aacacagaattcccttatgttattttatcctcaatcataattttcaaggtgggggttaattatatattttagagtcaatagcttcatttaatgacattcartggtctcttagaagcttttagacttttgaataaataagacaaaattacattatatgagtttactttctttagacttctcatctcttttaaaattttctct

SEQ ID NO: 336385 - DNA, 201 bp, Homo sapiens
tgttattttatcctcaatcataattttcaaggtgggggttaattatatattttagagtcaatagcttcatttaatgacattcaatggtctcttagaagctkttagacttttgaataaataagacaaaattacattatatgagtttactttctttagacttctcatctcttttaaaattttctcttcttttaaaagaaacat

SEQ ID NO: 336386 - DNA, 201 bp, Homo sapiens
aatgcaataaaagacattcattatcagctaagcctgccctcccttaaagaataaaaatgggtttcaagggagaataataattagaatcaatatatgaaggwttgtctagatctatgtatgtgccttattccaatttttttatagtcgtgtcttcagaagaagcttattgttgagtgagcacatattctgagatttgtactt

SEQ ID NO: 336387 - DNA, 201 bp, Homo sapiens
tgcaaagaatagccagaaagacagttctttcagttttcagatcactgactttgtggttttacttatttccagtgaattttgtgtgtttgtactaaaaccamcttgggtggccacatcattttgtgattaaaaatgtaaaggaaagcaatagggtattaaaattcaaactgggttatattttacttaaaagaggtgtgtatg

SEQ ID NO: 336388 - DNA, 201 bp, Homo sapiens
cctcagttctccctgtttcctaagacataacagtatggaaattaagccagttgataaccctacaatggcctccaagtgtccaagtgaaaggcaactcacaygtctcttactttttaaaaaatatttattaatttcagtaggttttgtgggaacaggtagtgtttggttacatggataagttttttagtggtgatttctgag

SEQ ID NO: 336389 - DNA, 201 bp, Homo sapiens
gcttatcctaatgtgatacaactcaactctattaatatactaattgatatgtgcctaattagcaaggtcgtatcaatgatattgtgatgtgcatatttatrtagagagacagacaaaacagtagtagtgattatagtcctattctatctgaattaggcttgtcaaaaagatattttctcctataatgtttaaaacatccct

SEQ ID NO: 336390 - DNA, 201 bp, Homo sapiens
gaagtggtttccctgggtactgggtgtgcccacagggctcttcctgctgtttcttctacctttatattttgctcagctctctaaatttgtttcagctcttsgtaaggccaaatccttctctcattttattagtctgttgtcatactgctataaagaaatacctgacacagagaaattataaaaagaggtttaattgactca

SEQ ID NO: 336391 - DNA, 201 bp, Homo sapiens
aaattataaaaagaggtttaattgactcacagtttcacaggcttaacaggaagcatgtctaggaagcctcatgaaacttacaatcatggcagagggcaaaraggaagcaggcaccttcttcacaaggtggcaggagagagaagggtgaacagtgaagggagaagagcctgttataaaaccatcagatctcataagaactca

SEQ ID NO: 336392 - DNA, 201 bp, Homo sapiens
gcaggcatccttcttgctgggattgactgggcatatagcaaggcctttctggcctcagtttccttatctgtaaagtgagggtataaggctagttgactccyttgattcccttcttcaccttttgaatggccttaaaatacaggtgtctctgtccttgcagggagtagcgctactcccttgccgtcattagaatgtgtgccc

SEQ ID NO: 336393 - DNA, 201 bp, Homo sapiens
aaacaacaaccaaccaaaaatactgaatgttttctggtacaagtatcagaaaccgtactaacagtgccttaaacaataaagaatattaattttctcataarcaagagacctgagatggggcagttccaggggcagctacttcactggttcagtgatgtcatcagagacccaggtcctgccattctcaccgtgttggcttcg

SEQ ID NO: 336394 - DNA, 201 bp, Homo sapiens
  misc_feature (1)...(201): n = A,T,C or G
gggggctgttacgaataacgctgctgtgaacattcatgtacaggtttttgtgtggacatacgttgtcaagtctgttgaatatatatctgagtggaaaagtngggtcacctaatttgatcccttctttcagtctggatctggatattgcaaggactttatgtgaaccaggataaaattctaccacagaaccccagtgaatta

SEQ ID NO: 336395 - DNA, 201 bp, Homo sapiens
ggaaggtttgccatgtttctggtattccgtgtcatctcacttttgccctgctgtgagccccacctcctgtctgttcatttgcacaggagctgatcacagcrttgaagaggtagctgctgattcaatgtaagaggccaatcctaaaggggggggacaaagtctgtacctatacaaatcatgatttcttgggtaattattgaa

SEQ ID NO: 336396 - DNA, 201 bp, Homo sapiens
ttaaagttaaaaggtataaactactgacttcaaattcattcaggctagtggaattaccccagttcatttgaatagcaatactggatgtcacttgctaaggrgcatgtgtttcttctctcattttagttttgttgacattctgccagtaaattttagttagggaaaacagaagccagaattctgtgacatttgttcctggca

SEQ ID NO: 336397 - DNA, 201 bp, Homo sapiens
ggtaggaagaatcaatatcgtgaaaatggccatactgcccaaggtaatttacagattcaatgccatccccatcaagctaccaatgactttcttcacagaaytggaaaaaactactttaaagttcatatggaaccaaaaaagagcccgcatcgccaagtcaatcctaagccaaaagaacaaagctggaggcatcacactacc

SEQ ID NO: 336398 - DNA, 201 bp, Homo sapiens
gttcccaaacctcagttcttgacttctgtgcacctgcaggctcaacaccatgtggaaacttccaaggcttggagcttacaccctctgaagcaatggcctgwgctgaatgttggccccttttagccatggctaggttgtagagtaccaagtcccaaggctgcacagagcagtagcagggccctgggcttggcccatgaaagc

SEQ ID NO: 336399 - DNA, 201 bp, Homo sapiens
caatctaatgaaaacattgtgagcctaagtgaacaataatgaaaactatattattgatttgggaaggacactgtgactttctaaaagaccttcataacctraagaagaagaagaagaagtgaaattgggtaaatgacctttcaagaaatctccctatccttgggcacacttgactggatttagataagttctaatgagttt

SEQ ID NO: 336400 - DNA, 201 bp, Homo sapiens
tcgtgaaaatggccatactgcccaaggtaatttacagattcaatgccatccccatcaagctaccaatgactttcttcacagaattggaaaaaactactttmaagttcatatggaaccaaaaaagagcccgcatcgccaagtcaatcctaagccaaaagaacaaagctggaggcatcacactacctgacttcaaactatact

SEQ ID NO: 336401 - DNA, 201 bp, Homo sapiens
tttcagctcataattatttcattagctcgaggctttttgatagggttaagtggttgatacctccgaaatgcatacatttttaaacacttattttcattttyagaaaggaagaaaaacagaaacttatggagtacttgaatttttaacaacttttatagttattttattggagagaattttaccaagtaaatgtatttttgc

SEQ ID NO: 336402 - DNA, 201 bp, Homo sapiens
ctgagaaattctagtcacatctattcatatccttggctttcctgctagttactcttgtctcctttatcttctatttcatttagttactgaatgcttacagaaaaaaaacctactgtcatgtggcttttcatctaattttaattttagtggaaccgaaatgtaaatcaggacctccaaatttctcaacaagttttagtgaag

SEQ ID NO: 336403 - DNA, 201 bp, Homo sapiens
cgttgcaggctcttttttggttccatatgaactttaaagtagttttttccaattctgtgaagaaagtcattggtagcttgatggggatggcattgaatctrtaaattaccttgggcagtatggccatttttatgatattgattcttcctacccatgagcatggaatgttcttccatttgtttgtattctctttaatttcct

SEQ ID NO: 336404 - DNA, 201 bp, Homo sapiens
actttaaagtagttttttccaattctgtgaagaaagtcattggtagcttgatggggatggcattgaatctataaattaccttgggcagtatggccattttyatgatattgattcttcctacccatgagcatggaatgttcttccatttgtttgtattctctttaatttccttgagcagtggtttgtagttcttcttgaaga

SEQ ID NO: 336405 - DNA, 201 bp, Homo sapiens
aatccactctctagtgctctgctttttgctattggtataatctgacattattataaagtcttctgtgcgtggtgttttctttgctgtagttctcacttccttttttctcgattaaaaactgccaggaaccacaggaaatgtgttatcattcagtgaaacaagagcacatcaggttgttcagcaaaaatcagagcagttcat

SEQ ID NO: 336406 - DNA, 201 bp, Homo sapiens
tttaaagtagttttttccaattctgtgaagaaagtcattggtagcttgatggggatggcattgaatctataaattaccttgggcagtatggccatttttaygatattgattcttcctacccatgagcatggaatgttcttccatttgtttgtattctctttaatttccttgagcagtggtttgtagttcttcttgaagagg

SEQ ID NO: 336407 - DNA, 201 bp, Homo sapiens
atggcattgaatctataaattaccttgggcagtatggccatttttatgatattgattcttcctacccatgagcatggaatgttcttccatttgtttgtatyctctttaatttccttgagcagtggtttgtagttcttcttgaagaggtctttcatgtcccttgtaagttggattcctaggtattttattctctttgaagca

SEQ ID NO: 336408 - DNA, 201 bp, Homo sapiens
tctgtatagctggaagcttcctcatctgtgaatgtgggataaaaataatacctatctcataaataaatatatatcttatccttagaaagctgcctggtacrcagtaaatgctcagaaatgttggctaatattaatgttattatgactacaacccaactaataaggaatggaccatttcagcatgaattagggagtgtaaag

SEQ ID NO: 336409 - DNA, 201 bp, Homo sapiens
gcttgttattaatgctgaagcaagctgcaatatttggtcattttctccctccaagttatgtttgtgcacatgtgcattttaaagcccagctcattctctgsatgttgtaaatatacttgatacaatgagtttgttaagtttgttttgatttttctggcagaaaactacaaaatcacggtctaaatcttacagtactgatga

SEQ ID NO: 336410 - DNA, 201 bp, Homo sapiens
tcagagcctatggattgcaggggctcctcaaaataatttcttctcaagttctgtgttactgataaatgtctttgcgagtattctgtgagagagcagttttwaattttgatgagagcacaggtgttttctttgacctttctgcacatgggtgaagcagacctttgaggaagctgataagaatggtgacggcttgctgaatat

SEQ ID NO: 336411 - DNA, 201 bp, Homo sapiens
ttttaatcttaatattatataggctgaattatggtcagcaaagctaacttctcagtctgctttttaaatatctcctcaaagtctgtttctcactaaagtasaggaataaatgaatgttttattcaaattttttaaccttttatattagacttcttgagaggaggctttggttttgtgcagttgatgaggtttacttttaat

SEQ ID NO: 336412 - DNA, 201 bp, Homo sapiens
  misc_feature (1)...(201): n = A,T,C or G
ggatctggatattgcaaggactttatgtgaaccaggataaaattctaccacagaaccccagtgaattaaacattggattaatatctgaatatcagagaganaaatttccactagctcttaagaagtatagctgaccaaagatgtgctggatgactttgacaattgtgttttcttccttgaaggtgttaacaaggatttgag

SEQ ID NO: 336413 - DNA, 201 bp, Homo sapiens
aaaagagagaaatagtgaatttccttaatgtggcaagtactttcctagaccattgaggaaaaaaaaaacaatggaaaaatgagtaaaacacttgaaacctwtacaaaatcatacaaagtcaataaacctatgaaaatgttcaccctttattagtaattcaaaaatctgaaataaaaccaagttatttattttttagagaca

SEQ ID NO: 336414 - DNA, 201 bp, Homo sapiens
gtggctcatttctccttgctcatatgattactggttcttttgatactttttgttttctccatgcttttcctcacattgaaatgctgtccccctactctttgccagatgatcagctgttagtcattacagtgggttcatttgtggccactgaaagataggttcaagtcttaatccgtggtacttatgtatgtgagcttattt

SEQ ID NO: 336415 - DNA, 201 bp, Homo sapiens
tagatagctgttattattttgagatatgtcccatcaatacctactttattgagagtttttagcatgaagcttgttgaattttgtcaaaggccttttctgcrtctattgagataatcatgtggtttttgtctttggttctgtttatatgctggattacatttattgatttgcatatattgaaccagccttgcatcccaggga

SEQ ID NO: 336416 - DNA, 201 bp, Homo sapiens
aaaggccttttctgcgtctattgagataatcatgtggtttttgtctttggttctgtttatatgctggattacatttattgatttgcatatattgaaccagycttgcatcccagggatgaagcccacttgatcatggtggataagctttttgatgtgctgctggattcggtttgccagtattttattgagaatttttgcatt

SEQ ID NO: 336417 - DNA, 201 bp, Homo sapiens
cagattttctctgaggaatgactgtttctctttttaaaattattatggtgtggctataaattattaattcagggctttattggacactcatatcttaattrtgaagaacatctttaagatatcaggacatttttacctggagttgtatactatgtggaccgttactggaaagaatggttttttcatttatggaatcttaga

SEQ ID NO: 336418 - DNA, 201 bp, Homo sapiens
tcaaattgtagttggaaatgttactgtctttgataataaaagctggctttacttttagcattgccttccctacctcgtgctagcagccccccatgctccctgtcaaggctggctggaggaaccccacctgcacgtggacctgcttctctgggatgcccatgccctctttaagaaaatgtaccttggaccagagggatttcc

SEQ ID NO: 336419 - DNA, 201 bp, Homo sapiens
tccatgtttaaggaagtctccatccctttgttttaagagatccccttagaggagctcaaagtttgcttttgcagcctttcttagaactgggatatgggccscccatctagaagccaccaatcaagtgaacctgtcccagacattgaagcagaaactacagtaggaaagtgggaccaagttgaacccatcctggtgggtgga

SEQ ID NO: 336420 - DNA, 201 bp, Homo sapiens
gaagcccctgataagctcaaaaattgatgttagttacatgatattcctgaaaagaggaaaagaggggttgaaaacaagcattggttgaaagtctgtttaaratatggttagggcttcagattttctcctccaacccttgtagcagggcaactgtcccttctctaccctggcataaaactgtatgtaagaggtaaggggggc

SEQ ID NO: 336421 - DNA, 201 bp, Homo sapiens
gtctctgcccggctttggtatcaggatgatgctggcctcataaaatgagttagggaggattccctctttttctattgattggaatagtttcagaaggaatrgtaccagttcctccttgtacctctggtagaattcggctttgaatccatctggtcctggactctttttggttggtaagctattgattattgacacaatttc

SEQ ID NO: 336422 - DNA, 201 bp, Homo sapiens; identical to SEQ ID NO: 70806

SEQ ID NO: 336423 - DNA, 201 bp, Homo sapiens
gagagtcaacttcttcctggtttagtcttgggagggtgtatgtgtcgaggaatttatccatttcttctagattttctagtttatttgcgtagaggtgtttrtagtattctctgatggtagtttgtatttctgtgggatcagtggtgatatcccctttatcattttttattgcgtctatttgattcttctctcttttcttct

SEQ ID NO: 336424 - DNA, 201 bp, Homo sapiens
cttttccttcagggaaccaagcaactctattttagtactgacatgcattattttcactgtgaattcacttttttattgcatgttcagatgtccctctttgttttttttttttgtaacattaactgcaatgatgttcttcctggaattcatgaaaatataattaaaacacatttttaaacacttggtgaactttttttacaa

SEQ ID NO: 336425 - DNA, 201 bp, Homo sapiens
tcttttaattgtgatgttagggtgtcaattttggatctttcctgctttctcttatgggcatttagtgctataaatttccctctacacactgctttgaatgygtcccagagattctggtatgttgtgtctttattctcgttggtttcaaagaacatctttatttctgccttcatatcgttatatacccagtagtcattcagg

SEQ ID NO: 336426 - DNA, 201 bp, Homo sapiens
tgatgcagtttcttcctagcctcgatggtctttacaatttggcatgattttgcagtggctggtactggttgttcctttccatgtttagcgcttccttcagkagctcttttagggcaggcctggtggtgacaaaatctctcagcatttgcttgtctgtaaagtattttatttctccttcacttatgaagcttagtttggctg

SEQ ID NO: 336427 - DNA, 201 bp, Homo sapiens
ctaaatttttttcaaagttttcaacttctttgcctttggtttgaatttcctcctgtagcttggagtagtttgatcatctgaagccttgttctctcaactcsgcaaagtcattgtccatccagctttgttccgttgctggtgaggagctgcgttcctttggaggaggaaaggtgctctgctttttagagtttccagtttttc

SEQ ID NO: 336428 - DNA, 201 bp, Homo sapiens
tttcgtgaaccgcaaatgctgctgtctggttgtttctctggaagttttgtctcagaggagtacccggctgtgtgaggtgtcagtctgcccctactgggggrtgcctcccagttaggctgcttgggggtcaggggtcagggacccacttgaggagacagtctgcccgttctcagatctccagctgcatgctgggagaaccac

SEQ ID NO: 336429 - DNA, 201 bp, Homo sapiens
cggctgtgtgaggtgtcagtctgcccctactgggggatgcctcccagttaggctgcttgggggtcaggggtcagggacccacttgaggagacagtctgccygttctcagatctccagctgcatgctgggagaaccactgctctcttcaaagctgtcagacggggacatttaagtctgcagaggttactgctgtctttttgt

SEQ ID NO: 336430 - DNA, 201 bp, Homo sapiens
tggagcctacagaggcaggcaggccttcttaagctgtggtgggctccacccagttcgagcttcccggctgctttgtttacctaagcaagcctgggcaatgrcgggctcccctcccccagcctcgctgctgccttgcagtttgatctcagactgctgtgctagcaatcggcgagactccatgggcgtaggaccctccgagcc

SEQ ID NO: 336431 - DNA, 201 bp, Homo sapiens
gggtgaccctgtcctttaatcagtctgtcgagtctagtataaagaatggagacctaaaacacactctcacactaattagtactacttttctgctcattgtwaagtcaatcttaactcataattctctctggctccttattgttcaattgggagaaagagatctgtgttagcagttgtgaagcataccgttagttgctgaga

SEQ ID NO: 336432 - DNA, 201 bp, Homo sapiens
cccctcctgactctcactccaaataaatgaacgcatgaaatgtatggacacttaagcttgtatgaactcaggagcaaaattctttaaagagaccgaatctrgctccacaatcagaggtctccaaatacagcctcaagtttcctaagagagggaaagtgcccattaagtatcattgcctcttttaaatcataggcatattca

SEQ ID NO: 336433 - DNA, 201 bp, Homo sapiens
gattttcagagatttcctgtttccctgctacagggccatctccttattgtaatctgatatagatctatacattacccgtgtagtagctctgaaaattgcayctttagcccctttattctttctggtaaaatgtttctttgatcattctgatccaattataggaatcatatgtgccctctcccttccttacccttcattgaa

SEQ ID NO: 336434 - DNA, 201 bp, Homo sapiens
aacaactatgaatcatccatttgaaaaaatcctttgctaaaagttaactgggaattttcaattcctgtgttaccatttcatctgcattctcactatgtaamgcaacccaaggctcctcccactgaggatcttttaaaatttcagttcacatgatgtaaaccttttgtatctaaactcagcttctaattctcagtcacttaa

SEQ ID NO: 336435 - DNA, 201 bp, Homo sapiens
ggcggtcatagcccgtattgtggaacttgtgcttgtcatgaaagcctggaaaaagtttttctgcacattgatatattaggtgatttaaatattggtatatrttgatatattaggtgatttaaatatattgcctattatgtctgaagacatgtaacggaaaactagaaaaaagtcaatgaacctgaatttgaaataatttct

SEQ ID NO: 336436 - DNA, 201 bp, Homo sapiens
acagtgacagagtggaatagttgcagctgagagcaaatgtcctgcaaaacttaaaatattcactatcaggccctttacagaaaagtttgccctcccctgtrctagataggatcattcaatgctttgcatgctcctacagtctcttgatagaaaatcctagatcattacttcacattcagtctcacccagattttctctgag

SEQ ID NO: 336437 - DNA, 201 bp, Homo sapiens
attattacttccagaaggctttaggccacctgttatgtatgttataaatccagaccttattcttcccccgtcaaactgctgggcaaatctggcccactccsaatccaggaggatttttgcgtggactcctgagctaagaatgggttttaaatggttaaaaaaaatcaaaagaaaaacattttgtgacctgtgaaaattact

SEQ ID NO: 336438 - DNA, 201 bp, Homo sapiens
gaacccatcctggtgggtggagggagtagggtggacatgctggcagctacctttagggcccatgacagcacttctggcagtagttcctgatgtccattgcrtggatgatggagtgaaagccactatctctgtgcttagttgtgttggaaatggtatcttcagtggatttgttctgccccatgattttggttggtgcttacg

SEQ ID NO: 336439 - DNA, 201 bp, Homo sapiens
ggccttttatctgttaaaagcatcaaatagcataagcatagggggaagggctttggagtcctgagtttgaatcctgcttcagttatttgctagctatgtamccaggaacaacttacttgatttctctctaagcatcagattctatatcactgaaatggaaatgataataatacttataaggttcctgaggactgaatgcag

SEQ ID NO: 336440 - DNA, 201 bp, Homo sapiens
ggactccacccaatctcttcctacccctacttgcatctttgattagcatctatgggcatatacagatccccttcccaaccttttggctttaactgtttttkctcacccacatttattccatttatgtggttacctgcttcttctctgtttagctggagtcttggtcaggtagggcctactggtctctccttataccatgtt

SEQ ID NO: 336441 - DNA, 201 bp, Homo sapiens
cccagctttgaaattgtcactagtgataaggactcaaggtcaagagctttgggtatcaaggaaggtgtaggaaaactgagaaagacatttctccgaaaatmtgactaagctggtagccctatggagggaggaagcgggtaaggggggatccagaattctgaaaggggtaatagtgctgtgcagagcaggaatacttaaagt

SEQ ID NO: 336442 - DNA, 201 bp, Homo sapiens
ctgggatatgggccgcccatctagaagccaccaatcaagtgaacctgtcccagacattgaagcagaaactacagtaggaaagtgggaccaagttgaacccrtcctggtgggtggagggagtagggtggacatgctggcagctacctttagggcccatgacagcacttctggcagtagttcctgatgtccattgcatggatg

SEQ ID NO: 336443 - DNA, 201 bp, Homo sapiens
ggctcgcgcgtggtgcactgcacccactgtcctgcgcccactgtctggcactccctagtgagatgaacccggtacctcagatggaagtgcagaaatcaccrgtcttctgcgttgctcatgctgggagctgtagacccggagctgttcctattcggccatcttggctcccccaccagcaaagttcattttattgtattttat

SEQ ID NO: 336444 - DNA, 201 bp, Homo sapiens
agtcttctgcgttgctcatgctgggagctgtagacccggagctgttcctattcggccatcttggctcccccaccagcaaagttcattttattgtattttaytttattgcatttcacagacactgcattttgtgtgtgtgtgtgtgtgtgtgtgacaaattgaaggtttgtggcaactctatgtcaagcaagtctttcggca

SEQ ID NO: 336445 - DNA, 201 bp, Homo sapiens
ccggagctgttcctattcggccatcttggctcccccaccagcaaagttcattttattgtattttattttattgcatttcacagacactgcattttgtgtgwgtgtgtgtgtgtgtgtgacaaattgaaggtttgtggcaactctatgtcaagcaagtctttcggcactgtttttccaaaagtatgggctcactttgtgtct

SEQ ID NO: 336446 - DNA, 201 bp, Homo sapiens
  misc_feature (1)...(201): n = A,T,C or G
ttgttcaattgggagaaagagatctgtgttagcagttgtgaagcataccgttagttgctgagaaattatgatgaaaattaaagtcttcctagaaagatatntttaattatacaattgcaaaaatagttcaggagagctctttgtttttattttttaattttttaattttttattttttttgagatggagtctcgctctgtc

SEQ ID NO: 336447 - DNA, 201 bp, Homo sapiens
cggccatcttggctcccccaccagcaaagttcattttattgtattttattttattgcatttcacagacactgcattttgtgtgtgtgtgtgtgtgtgtgtracaaattgaaggtttgtggcaactctatgtcaagcaagtctttcggcactgtttttccaaaagtatgggctcactttgtgtctctgtgtcacattttggt

SEQ ID NO: 336448 - DNA, 201 bp, Homo sapiens
gagtttagagatcagcctgggatgatatttagaaatttatcattattttggctgtcaggcatgtgaacatccttccatgtttaaggaagtctccatccctwtgttttaagagatccccttagaggagctcaaagtttgcttttgcagcctttcttagaactgggatatgggccgcccatctagaagccaccaatcaagtga

SEQ ID NO: 336449 - DNA, 201 bp, Homo sapiens
tgtgcctttgtgccctcatagcttagctcccacttataagtgagaacatatgttttgttttccattcctgagttacttcacttagaataatggtctccagytccatctaggttgctgcaaatgccatatttcattctttttatggctgagtagtattccacggtgtatatatgtataccacattttctttatccactcgtt

SEQ ID NO: 336450 - DNA, 201 bp, Homo sapiens
ttccctgttcagtataatgttggctgtgggtttgtcatagatggcttttattaccttaaggtatgtcccttctatgccgattttgctgagggttttaatcrtaaagagatgctggattttgttaaatgctttttctgcatctattgagatgatcatgtgatttttgtttttgattctgtttatgtggtatatcacatttat

SEQ ID NO: 336451 - DNA, 201 bp, Homo sapiens
aagatttcttggctgataattattttaaggaggctgaagataggaccccattcctttctagcttgtaggattttggctgagaaatctgcttttaatcttayaggtttttctttatagactacctaatgcttttgcctcacagctgttaagattctttccttcatcttgactttagataacctgatgactatgtgtctaggt

SEQ ID NO: 336452 - DNA, 201 bp, Homo sapiens
atccacatcgaaacaagaccctccgccagcaaaatgattacaatttgccaaaggttcagatgatcattagctttttatagcattaaatattttaaattaaygtatgtactttttttagacgtaatactattgcacacttaataggctacagtatagcacaattgtaacttttatattcactgggagaccaaaaaatccgtg

SEQ ID NO: 336453 - DNA, 201 bp, Homo sapiens
tattgtgatcttttgagggtgttaaagaaacttgctttttcatattgccagaattgtttttctggttccttttcatttgggtagactacgtcagagggaakatctggtattcaaaggctgctgttcagattcttttgtcccacagggtggtcttcttatgtggtgccctcccacttcctctaggcatgggacttcctgata

SEQ ID NO: 336454 - DNA, 201 bp, Homo sapiens
gattatgattcaagatgatatttgggtgggaacacagccaaaccatatcattctgctcctggctgctcccacatctcatgtcctcacatttcaaaacacartcatgtctttccaacagtcccccaaagtcttaactctttccaggcttaacccaaaagtccaagtccaaagtctcatctgagacgagggaagtcccttctg

SEQ ID NO: 336455 - DNA, 201 bp, Homo sapiens
cagatttcaaattcttgttcctccagttaccaactttaacatgcgacaagtttggctcctcattgtatctgtctcttagagtcattgtaaggattaaaggmattaaactaattagccctgtaagccctggcctgattaaataagtattcaaaaaaagttcttttttgtttgtttgtttgctttattgccagtagtatttat

SEQ ID NO: 336456 - DNA, 201 bp, Homo sapiens
gacacatacatcatggatatgctggacaaagggatgactcatgtccagagtgggacggagcaggacctcacaagatttcatcatgctactaagaatggcayacaatttaaaactcatggccaggtgctgtggcttgcgtctgtaatcctagcattttgggaggccaatgcaggtggatcacttgaggtcaggagtttgaga

SEQ ID NO: 336457 - DNA, 201 bp, Homo sapiens
ttaacccaaaagtccaagtccaaagtctcatctgagacgagggaagtcccttctgcctaggagcctgtaaaatcaaaagcaagttcgttacttcaaagatmcaatgggggtacaggcattggataaatgctcccattccaaaaaggagacatcggccaaaacaaaggaggtacaggctccatgcaagtccaaaatccaaca

SEQ ID NO: 336458 - DNA, 201 bp, Homo sapiens
ctacacactgctttgaatgcgtcccagagattctggtatgttgtgtctttattctcgttggtttcaaagaacatctttatttctgccttcatatcgttatrtacccagtagtcattcaggagcaggttgttcagtttccatgtagttgagtggttttgagtgagtttcttaatcctgagttctagtttgattgcactgtgg

SEQ ID NO: 336459 - DNA, 201 bp, Homo sapiens
agtctgaggcagggagaattgcttgaacccaggaggtggaggttgtagtgagctgagattgagcccctgcactccagcctgggcggcagagcgagactccmcctcaaaaaaaaaaaaaaaaaaaaaaagaaagaaaagaaaaagaaaaaaaaaaagggctgggcacggtggcttacacctgtaatcccagcactttgggag

SEQ ID NO: 336460 - DNA, 201 bp, Homo sapiens
cataccagcaatagtgattaacaattgagtagcttaaacaactgaataatgaagatgctataaaatattaagaggaagaaaatcctttcaagcagtaagakgtctcaaggtgacattctgctctcagccattattcagccctttgtttgcttagcactcaacaagttttcatgtctggcatgcatagagatgccctgagca

SEQ ID NO: 336461 - DNA, 201 bp, Homo sapiens
taaagaagctacttggctctgtatgtccaaaaggttaccttctccagatacttgtacaaacgaggctatgcacagctatggtataattttaaaggatatgyaattttttatatgctcccaaatatcttcctcaccagcttgcatcagtaaattctttccctagtatttggcttaaagttcttattattagaataatctata

SEQ ID NO: 336462 - DNA, 201 bp, Homo sapiens
ttaatattttactttaccttagtatcataatcacatatgttttagaaataacagattcacttttatgaattttgttgttgctttcttaagaattaaacagwtagtgttattagcaaaatgctttgtcaaaattagttattttaagtagtttgatagtttggcaaaggcagagattctttattaacaatgttagccgtaaga

SEQ ID NO: 336463 - DNA, 201 bp, Homo sapiens
cagatccagaagatcttattattatgttaaagatctaacttaatatctaacacagtaagaagtcaataatttttaaagtgtacaatatagcattataaatmcaataattaggaatagaaagatggccgggtgcggtggctcacacctgtaatcccagtactttgggaggccgaggtgggcagatcacctgaggtcaggagt

SEQ ID NO: 336464 - DNA, 201 bp, Homo sapiens
aaatcaaaagcaagttcgttacttcaaagatacaatgggggtacaggcattggataaatgctcccattccaaaaaggagacatcggccaaaacaaaggagrtacaggctccatgcaagtccaaaatccaacagggcactcattaaatcttaaagctccaatataatctcctttgattctatgtctcagatccaggtcatgc

SEQ ID NO: 336465 - DNA, 201 bp, Homo sapiens
gcccagactggtcttgaactcctgatgtcaggtgatctgtcctccttggcctcccaaagttctgggattacaggcaggagccactgtgcctggccccaacwttttttttttttttttgaaacggagtgtcactctgtcacccagactggagtgcagtgggacgatcttggctcactgcaacttctgcctcccaggttcaag

SEQ ID NO: 336466 - DNA, 201 bp, Homo sapiens
tacttgaccctctccttgtcatttgacagtgttgaatatttcctccccactacttgccttttttggtttccattatatcattctcccctccattgctctcrttgcttctcaatctcttttttttgtactgcagtcttctgttaatctatttcctcattcctctaatggttaactgttttctaaggttttgccctagatcac

SEQ ID NO: 336467 - DNA, 201 bp, Homo sapiens
tgcaagctgtcagtggatctatcattctggggtctggaggacggtggccctcttttcacagctttactacacagtggtccagtggggattttgtatggggsctccaactccacatttctcttccatactgccttgagggctccacccctgtagcatacttctgcctaggcatccaggtgtttccatacatcctttgaaatc

SEQ ID NO: 336468 - DNA, 201 bp, Homo sapiens
cttggcctcccaaagttctgggattacaggcaggagccactgtgcctggccccaactttttttttttttttttgaaacggagtgtcactctgtcacccagrctggagtgcagtgggacgatcttggctcactgcaacttctgcctcccaggttcaagcgattctcctgcctcagcctcccgagtagctgggattacaagtg

SEQ ID NO: 336469 - DNA, 201 bp, Homo sapiens
agtctgaggcactcatgggaaagggtggcaacaatgtgaactgcaagtatttcaagagcatctgagatccatttgctagtagtaatgttgtttagacattraggagctgcctggatctgcggaccagcgcaaccccatttaaagcaaaaacaaggcaactgatttattgtgttcctttactatcagagcaatctctgattg

SEQ ID NO: 336470 - DNA, 201 bp, Homo sapiens
atctcttcttaagagattcaactcatagttaaataaatggcttaagttcccgaggttaggaagcttggaagctgggatttgaactcaggttggtctgactsttgaattgcactgttctccagaaagtctgtgtgtttttggaggagcaagcattgaatgacatgaccagccctaaggaattgaatgaggctgtcatgtcat

SEQ ID NO: 336471 - DNA, 201 bp, Homo sapiens
cgcctcctgagttcaagcaattctcctgcctcagcctcccaagtagctgggattacaggcatgtgccaccatgcctggctaattttgtacttttagtagaracggggtttcaccatgttggtcaggctggtctcaaactcctgaccccaggtgacccacctgccttggcctcccaaagtgctgggattacaggcatgagcc

SEQ ID NO: 336472 - DNA, 201 bp, Homo sapiens
gtgggacgatcttggctcactgcaacttctgcctcccaggttcaagcgattctcctgcctcagcctcccgagtagctgggattacaagtgcttaccaccaygcctggctaatttttgtatttttagtagagacggggtttcaccatgttgcccaggctggccttgaactcgtgacctcaggtgatccaccaatctccctcg

SEQ ID NO: 336473 - DNA, 201 bp, Homo sapiens
ttatcttttgactccattgcctcctgttcatttttatttcccctttggttcatcctcaacactggtgctataattttctttctgaaatatgagcatggtgwttcaattcttgtcttaaagcctgtcagaagctctctcaatacacaggcatgtcttcatatcccttaaggtctggcatctcccttgtcttccactatcatc

SEQ ID NO: 336474 - DNA, 201 bp, Homo sapiens
gtgctaaaggaaaaaagtgtgtgtgtgtctgtgtgcatgtgtgcacacttatgcatgtgtatatgtaagggatctattgaaattttagatgggatgtcaaygaaaggcctcacagggaagatgcatttgaacaaaggcctgaaagaagtgaagagttagccatgctgatacctgaggaggaatgttccaggcagaaagaac

SEQ ID NO: 336475 - DNA, 201 bp, Homo sapiens
actctgtcacccaggttggagtgcagtggcgccatcttgggtcactacaacttctacctcctgggttcaagtgattctcctgcctcagcttcccaagtagstgggattacaggcacgtgccaccatgcccagctaatttttgtatttttagtagacatggggtttcatcatgttggccaggctggtctcgaactcctggcc

SEQ ID NO: 336476 - DNA, 201 bp, Homo sapiens
gtggcgccatcttgggtcactacaacttctacctcctgggttcaagtgattctcctgcctcagcttcccaagtaggtgggattacaggcacgtgccaccaygcccagctaatttttgtatttttagtagacatggggtttcatcatgttggccaggctggtctcgaactcctggcctcaggtgatttgcctgccttggcct

SEQ ID NO: 336477 - DNA, 201 bp, Homo sapiens
cttcccaagtaggtgggattacaggcacgtgccaccatgcccagctaatttttgtatttttagtagacatggggtttcatcatgttggccaggctggtctygaactcctggcctcaggtgatttgcctgccttggcctcccaaagtgctgggattacaggcgtgagccactgtgcccagcctaaacaacagattttcaatg

SEQ ID NO: 336478 - DNA, 201 bp, Homo sapiens
cgtgtgcctctctttattgtgatattcattttattgcagtgatctgaaaccacactcataataattctaaggtatgcctgtaaataaaacgttgcttatgaaaaaaaaaacaaatagtaattttcgatagactctttttgctgaaataactttagctgtgtggttcaaggttcctgcttttacagatgtgaatcgcggagt

SEQ ID NO: 336479 - DNA, 201 bp, Homo sapiens
aatgatacacaaattagatcccaacttttttttttttttttttggtggggagacggagtctcgctctgtcgcccaggctggagtacaatggtgcaacctcractcactgcaacctccgcctcctgggttcaagcaattctcctgcctcagcctcctgaatagctgggattacaggtgcctgccaccatgcctggctaattt

SEQ ID NO: 336480 - DNA, 201 bp, Homo sapiens
cacagatgatcaagctgaaacgtggaaccaaagggcttgtccgcctcttttacctggatgagcaccggacacgcctccgatggcgaccctctaggaagagygagaaggcaaaaagtaaaacaaatctttgaattctttgcttggctggacatagtaacacacgggttatactgagtgggctcttgaagcttcagatctgtg

SEQ ID NO: 336481 - DNA, 201 bp, Homo sapiens
aggtgatttgaacgcaagcagtctagctccagagttgttatgctagctacctcacctagcttttcatttttatttcctcttgctaacctttgtgttcctgwattaccatggcagactgctctgctcagtggatggttgtatggatacaaacacacacacacacacacacacacacacagaggtacatttacttagaaacat

SEQ ID NO: 336482 - DNA, 201 bp, Homo sapiens; identical to SEQ ID NO: 70804

SEQ ID NO: 336483 - DNA, 201 bp, Homo sapiens
tttcagatgaacgtaataacctatcaattgctggttgttcagggtacctcttggtatcactatggttttaacatggcatcagtcacactgcataagcatarcttgagttcagtcatcactaaacagcttggcccctcctctacctagtcaaaattcttaaaaagtcaacatatatatacacacatatatatatgtgtgtat

SEQ ID NO: 336484 - DNA, 201 bp, Homo sapiens
tgactcttgaattgcactgttctccagaaagtctgtgtgtttttggaggagcaagcattgaatgacatgaccagccctaaggaattgaatgaggctgtcakgtcatataaggatggccagagaaagtgaggagcacaacatagaggagaggttggcattaaaaggaggaatttgcttcatttgtgattaggcctaccacct

SEQ ID NO: 336485 - DNA, 201 bp, Homo sapiens
aggagcaagcattgaatgacatgaccagccctaaggaattgaatgaggctgtcatgtcatataaggatggccagagaaagtgaggagcacaacatagaggrgaggttggcattaaaaggaggaatttgcttcatttgtgattaggcctaccacctaaatatttagatgttcctgaaggcttagcatttggtgacatgatct

SEQ ID NO: 336486 - DNA, 201 bp, Homo sapiens
ttttcatcccctaggctcttaagaattatgctaaatctactctgcctgcactgtgtaaatggaataacaaagcctggatgacagcacatatttttacagcrtggtttactgaatattttaagcccactattgagacctactgctcaggaaaaaagattcctttcaaaatattactgctcattgacaatgcacctggtcacc

SEQ ID NO: 336487 - DNA, 201 bp, Homo sapiens
ttttatccttaaacattgtttttagcattcctgtggtatcaactgtgaatgttttttcttcttttattttttctatttttttcccatagggatatttgaayagccagtgtttagtggattaatatagatagctgtattagtcggggttctgcagagaaacagaaccaataagatatgtagagaaagcaagagattgagatt

SEQ ID NO: 336488 - DNA, 201 bp, Homo sapiens
ccacatttcactggccacatcctcctgcaaaggaaggctaggaaatagagtccagctgtgttccctcgataaaagaagaaacagggttagtgaatgattarccaggctctagcacaagagacaggggcgttggaggtaagcacgcaagagctattgtatgaggtaagatatttattaatccatttagcatatatttacaga

SEQ ID NO: 336489 - DNA, 201 bp, Homo sapiens
cttttgagcaaaggagcaatgaggtgaaagtagtgttttgaggaattagcctgggggcaaaatataaaaacaagagaaagcaaattcttagtcagaggggsatggtgaaaaacctactgtctttctccagctgagagctaatgagattgtgtgggtagagagcaatattaatagtatcaataacaatcatagttactatat

SEQ ID NO: 336490 - DNA, 201 bp, Homo sapiens
catatcagttgaggattattattattcttttcttggtgatgttatttttcatatttatttctattctgtagaacatttaaaaacatatgttggtttttatkctattttatgctgtttcaaaagagggaattgctatcactacattttaaatgtcttgtgtacagtttcatcttgctgtctgccatggtacctaaaacaaag

SEQ ID NO: 336491 - DNA, 201 bp, Homo sapiens
atcaggacatatccatgggattatattaataaataattcaaacaaaatctacaacacacatatattttcctgcaaagcaaagaccatgatgttgctatttstcttacttttgcaatgcccataagcattttccacttcaagcaagtctacctggtaccaccacgtgtgatggatgccatgacatatttgggcttttctcaa

SEQ ID NO: 336492 - DNA, 201 bp, Homo sapiens
tccctatccttgggcacacttgactggatttagataagttctaatgagtttttggtgaattctgagctgtttaagaatatgacatctttttaaccacactyaaaaccaaatcattgtgtcttgaggaaaagcaattctttaattccttgttctgataaatatgccagaacaccgatttctgtgtctgtgtcacgtctttgt

SEQ ID NO: 336493 - DNA, 201 bp, Homo sapiens
tgccttcaatgactgtctttcagcttccctattgagcctggctctttctcaactccccactcttacgtatgctgttctctctgcctggaacacccttcccygttagtctatctgattaattcttgcttattctacaaggctgtttaagtattgtccctccaacaagttactaataccaccagctgatttaaatcttctttt

SEQ ID NO: 336494 - DNA, 201 bp, Homo sapiens
tattgagccattggataaaatattttcatggcttttgaaacatatctccataatgctatataaaagatttgtttcagtttataattaacaaaacagtgaayaaatgattagttattaaatggatcacttttagtgctaatatggtagctatagaatgataagttaatgttggtttgattaacattttttgatagcagggat

SEQ ID NO: 336495 - DNA, 201 bp, Homo sapiens
ccgcctcctgggttcaagcaattctcctgcctcagcctcctgaatagctgggattacaggtgcctgccaccatgcctggctaatttttgtatttttagtayagatgaggtttcaccatgttgcccagactggtcttgaactcctgatgtcaggtgatctgtcctccttggcctcccaaagttctgggattacaggcaggag

SEQ ID NO: 336496 - DNA, 201 bp, Homo sapiens
gtctaaaaactatttgacattcataatttgagctagtaaatgctgcttatagattcataaatggcaaaaagtctcactgattcaaaatctacccttatttrtattaacattttatagcatttaaatgccatatttgaattttttaaatgtgagattaatttggtgatcagagtcttcaatgttttgctttagcaagaatga

SEQ ID NO: 336497 - DNA, 201 bp, Homo sapiens
aaaaatgcttttctaataagacacacttgctgtatagcagatttagtttatgatgcctcccacgtggaagaatcttgaacactgcattctaatgggtcttyacaaccctgatttctacaggtcctagccaaatgggtgaagtaattttgcctttatttcccaatgtatgaagtagggtgttgagaaggcctgccacctatg

SEQ ID NO: 336498 - DNA, 201 bp, Homo sapiens
agcttccctattgagcctggctctttctcaactccccactcttacgtatgctgttctctctgcctggaacacccttccccgttagtctatctgattaattsttgcttattctacaaggctgtttaagtattgtccctccaacaagttactaataccaccagctgatttaaatcttctttttctccatattttctctgtatt

SEQ ID NO: 336499 - DNA, 201 bp, Homo sapiens
gctctttctcaactccccactcttacgtatgctgttctctctgcctggaacacccttccccgttagtctatctgattaattcttgcttattctacaaggcygtttaagtattgtccctccaacaagttactaataccaccagctgatttaaatcttctttttctccatattttctctgtatttagcaccctgcacatattt

SEQ ID NO: 336500 - DNA, 201 bp, Homo sapiens
gtgacaatttccagattgtgtcatgggtgagcatcatggaaacagagtgaagcaagggattattggcctggaggaggtcagtgctaagggattaaatagawggctacatggtgttttaatttacaaagtatgcagacaggagcagattggagattaaaactataaaccagacacttaagtataaaaacaatgtggccaggc

SEQ ID NO: 336501 - DNA, 201 bp, Homo sapiens
gaggcagaataatgaccatctttggggaatttaaatccataaaagttttcttgtccatgaatgctgtaaatgctaatacttcccctgtgttggagacatgatatatatatatatatatttagttggaatatatggttttacagcctgagatgttttacattcctataaaaggtgagggacattataaagctaatgggcttt

SEQ ID NO: 336502 - DNA, 201 bp, Homo sapiens
aggcagaataatgaccatctttggggaatttaaatccataaaagttttcttgtccatgaatgctgtaaatgctaatacttcccctgtgttggagacatgatatatatatatatatatttagttggaatatatggttttacagcctgagatgttttacattcctataaaaggtgagggacattataaagctaatgggcttta

SEQ ID NO: 336503 - DNA, 201 bp, Homo sapiens
ccactaatagattttttgtaaatgaattgacaatgtgaaaattccttgttaaaactccctgatgtgactgcaggacaactcagggttgtcagtttgttgtygctgttgcttttccctcttctagcactttagggtaaaacctatgtgaagaaatgaatagcaaacagattgtagtcgagtaaggaaacctacctcagccac

SEQ ID NO: 336504 - DNA, 201 bp, Homo sapiens
gtgttcctgtattaccatggcagactgctctgctcagtggatggttgtatggatacaaacacacacacacacacacacacacacacagaggtacatttacytagaaacattctgttttggtagggaatcattctttttctacatatatttatgatcagcaaactttagtgcttgtgtaggaaacgttaatttttgcagata

SEQ ID NO: 336505 - DNA, 201 bp, Homo sapiens
cttgcagccgactgccctttggtcagagagaactgctgcagctttaggcagtatctctaaacacagccctaaacagaggtagtagagtttcttctcacaattttttttttttttttttggagacggagtgatggagtcttgctctgtcgtccaggctggagtgcagtggcacaatctcggctcactgcaacctctgcctcc

SEQ ID NO: 336506 - DNA, 201 bp, Homo sapiens
gaagaaaagtcagacaaatgtttcaggtaagttttcacaatttcactggccttatataaaatacacagaggttattaacatacttaggtatattaaaaagstattttgttttgttggaagctaatatatgtgctctgtactgttttatttttctttgatgaagaaatgattttgtttcaagtaaaaagactttataaattt

SEQ ID NO: 336507 - DNA, 201 bp, Homo sapiens
tctaaatgagaacagcagaataaccatccaactgaacccagtctgacttgccaccctacacaattgttatcaaataaacagtcgttgttttaagtttctargttatggggtggtttgtttcacagaagtagagaatgaatgcaagggttagtgaccatctatgcattgagatgtgaaaaccatagccctcttccaatactc

SEQ ID NO: 336508 - DNA, 201 bp, Homo sapiens
caaaaattctcttcagagatgttgtggagaccatcaacaagcatgcctttgtgaagaatgagtaagtaaagcagcacctgtgagctaagcggtagcctccygcatggagcattgcctgatgtaacgtagctacaaaaccacatcctcttccttggactctacactgccctctttgctagactagttttctccctccttctc

SEQ ID NO: 336509 - DNA, 201 bp, Homo sapiens
ctgaaaatatcctctacttaattttagaagacataataccttacctttctagttgtttttactttctgaggtataatcttctacagtcataatttgaatcrcatagaaatggaaatatgctgtaccctctcctctgatatacattcattctcccatttcttggtttttaaaactatacctttagcttactttgattctctg

SEQ ID NO: 336510 - DNA, 201 bp, Homo sapiens
cctccagaggctctgggttagggtccttcctgcttccttcagcctgagcactccacgcagcccttggctggtggctgcaccagggggcatgaggtggtcaygtctttgggggctacctttcagcccagccagcctgcggggtctggagctctgtccccggctgctgttccagggcctggaatctcctcctacacttctaat

SEQ ID NO: 336511 - DNA, 201 bp, Homo sapiens
tctcctcctacacttctaatgctgcacaggctggtgagagcctgcagggctgcttggaggaggcgctggtgctgatcccagaggcccagcatcggaaaacrcccacgttcctgggggccacggctggcatgaggttgctcaggtgaggcaggcatggccttggcacccacggggagtggctgcagaagccatggtctcagc

SEQ ID NO: 336512 - DNA, 201 bp, Homo sapiens
tttctcagcattctagaagtctgaaaacaaggtgtggacagggccgcaccccctccagaggctctgggttagggtccttcctgcttccttcagcctgagcrctccacgcagcccttggctggtggctgcaccagggggcatgaggtggtcacgtctttgggggctacctttcagcccagccagcctgcggggtctggagct

SEQ ID NO: 336513 - DNA, 201 bp, Homo sapiens
cttcagcctgagcactccacgcagcccttggctggtggctgcaccagggggcatgaggtggtcacgtctttgggggctacctttcagcccagccagcctgyggggtctggagctctgtccccggctgctgttccagggcctggaatctcctcctacacttctaatgctgcacaggctggtgagagcctgcagggctgcttg

SEQ ID NO: 336514 - DNA, 201 bp, Homo sapiens
gccccgaatttgtttcctgggggctctggtaacaaattaccacaaattgggggcttaaaacagtagcagcttatttctcagcattctagaagtctgaaaasaaggtgtggacagggccgcaccccctccagaggctctgggttagggtccttcctgcttccttcagcctgagcactccacgcagcccttggctggtggctg

SEQ ID NO: 336515 - DNA, 201 bp, Homo sapiens
gagcctcattctgggcagcacggccagcagggccgggggaggcaagggcagaggacagctccaggccgtgccactccaggtaggaggctgtggccacggcygcagctgggcccagcctctggcccgccaagaaggggccgcaacccgcaccacgtaactggtcggtggggccagggaggggctctctaccactgcccggca

SEQ ID NO: 336516 - DNA, 201 bp, Homo sapiens
gtccacaggtgttgcctcccactcatcccactgtctccccagtttgggatcgtgtttgatgcgggctcctcccacacgtccctcttcctgtatcagtggcyggcgaacaaggagaatggcacgggtgtggtcagccaggccctggcctgccaggtggaaggttagtgggctgttctgcagcccggtgctgggacctgcctg

SEQ ID NO: 336517 - DNA, 201 bp, Homo sapiens
tgggtgggccctgggctccctggctgcagcgagggtccctgagggtacagggctgcctcgggcaggatgctggagcctcattctgggcagcacggccagcrgggccgggggaggcaagggcagaggacagctccaggccgtgccactccaggtaggaggctgtggccacggccgcagctgggcccagcctctggcccgcca

SEQ ID NO: 336518 - DNA, 201 bp, Homo sapiens
tcctcctacacttctaatgctgcacaggctggtgagagcctgcagggctgcttggaggaggcgctggtgctgatcccagaggcccagcatcggaaaacacmcacgttcctgggggccacggctggcatgaggttgctcaggtgaggcaggcatggccttggcacccacggggagtggctgcagaagccatggtctcagcca

SEQ ID NO: 336519 - DNA, 201 bp, Homo sapiens
cgccggcaggggaggccgggccgggtccacaggtgttgcctcccactcatcccactgtctccccagtttgggatcgtgtttgatgcgggctcctcccacaygtccctcttcctgtatcagtggccggcgaacaaggagaatggcacgggtgtggtcagccaggccctggcctgccaggtggaaggttagtgggctgttctg

SEQ ID NO: 336520 - DNA, 201 bp, Homo sapiens
acgttcctgggggccacggctggcatgaggttgctcaggtgaggcaggcatggccttggcacccacggggagtggctgcagaagccatggtctcagccagygtggcaggcagggtggggccgggcccaggcttccagccagctccagcccctggtcctctgtgcccagccggaagaacagctctcaggccagggacatctt

SEQ ID NO: 336521 - DNA, 201 bp, Homo sapiens
ctctgggggccaaaggggcattgggaccctttgggctcccaggcctggcacacaatggcctctcaagccattgcaagggacacaaagctataggcgacggyaaggtcagggcggccgctgcttgggagcgagagggaaggagcaaaagtgagtcctaaaaagctcggccatctgggaccttcagggatggggctgtcggga

SEQ ID NO: 336522 - DNA, 201 bp, Homo sapiens
gcaggagcatttgctcctctctggggcagcgtcccccctgcctgcatttcccggctgctagggaagccagaggaagccaggtgactttgcctttccgtgcrctggcaaggttaatttgcacaacaaattcctacgaaagcaaatgtcagccttattattcctccctaagcaatatgttcaactaatatcttcttgatttcc

SEQ ID NO: 336523 - DNA, 201 bp, Homo sapiens
gttgccccagggacaggactcgagttgcagggaggtgttgctggtgcccactgggctccctgcccgtcagctgctccccagcctggctgttccttgtcccsaccaggttcaacaacgaggatgtctgcacctgccctcaggcgtccgtgtctcagcagttcacctctgttccctggaactccttcaaccgcgacgtactga

SEQ ID NO: 336524 - DNA, 201 bp, Homo sapiens
gtctcagaaactgaaaaaaatacttccctctctctgttgcaccagcatctttcaccatatatagacacacacgcacacaatgcacacacacacgcacacayacatgcacacatgtacacatatgcacgcagaagcacacacatgcacacactttttctctctctctgaatggtgcttcttcttttcatttgtgcaaggtgc

SEQ ID NO: 336525 - DNA, 201 bp, Homo sapiens
agttttatttctgaagtcaggaggtgcctgctttatctgggagtgccgagctggagcgggggagctgtgtctgtgcggagcggccggctccagctctgcaycttggtctcaccatgggctggtggggcggagagtccctctctgcctttttgggtgttgtgaattcatgagggcagatggtggctgctgtttctggagctg

SEQ ID NO: 336526 - DNA, 201 bp, Homo sapiens
gaaacacacaaaggagtgacaaaaaagttttatttctgaagtcaggaggtgcctgctttatctgggagtgccgagctggagcgggggagctgtgtctgtgyggagcggccggctccagctctgcatcttggtctcaccatgggctggtggggcggagagtccctctctgcctttttgggtgttgtgaattcatgagggcag

SEQ ID NO: 336527 - DNA, 201 bp, Homo sapiens
agcacgctgttgaccaagcaggacctggcctgtgcatgaacgggggctagacctgcaacgctggccctcctcctggggggccacattctcactcaaattgytcctgagatgtcagcttggtaggtgggttccttgggtctgcaggacataaatcaaagtagtaaaagtgggggctgctgggaggatgtgctccttgaatgc

SEQ ID NO: 336528 - DNA, 201 bp, Homo sapiens
tgcaggacataaatcaaagtagtaaaagtgggggctgctgggaggatgtgctccttgaatgcttcttgttaacctcaacacagagatacactcacacttgyccagctttgacgcagggccagggctcttctgtgccatcggcagatgggagttccatgccctcttctttgcccagaccacaccctgcaggttgtcaccgtc

SEQ ID NO: 336529 - DNA, 201 bp, Homo sapiens
ggtcgtggcccacgaagggtggcaggcacagctttggtttcccctgaccctgaatccccctgcggtcctccctcttttctgtatgcaagggaaccctgctrctgagaggccatttgtgtgtgtatgcacctccctctccagcaataaccatggctcccactagtccacacccacgtgccaggcttccacgagctgcatttt

SEQ ID NO: 336530 - DNA, 201 bp, Homo sapiens
gcagccacgtgatgcatcacgcagcggggctgcttccgggagccaaaggggatgctgttcacaattacctgggtcccaggcacaagccagggctgtcctgscaaatgggccaccttgccagtggatccgtgccagctgcttcggtaaccatggtggtctccaataattatcctgtgaattgtgtggctcaagtggagcaga

SEQ ID NO: 336531 - DNA, 201 bp, Homo sapiens
ttgccccagggacaggactcgagttgcagggaggtgttgctggtgcccactgggctccctgcccgtcagctgctccccagcctggctgttccttgtccccrccaggttcaacaacgaggatgtctgcacctgccctcaggcgtccgtgtctcagcagttcacctctgttccctggaactccttcaaccgcgacgtactgaa

SEQ ID NO: 336532 - DNA, 201 bp, Homo sapiens
tgatgcatcacgcagcggggctgcttccgggagccaaaggggatgctgttcacaattacctgggtcccaggcacaagccagggctgtcctggcaaatgggmcaccttgccagtggatccgtgccagctgcttcggtaaccatggtggtctccaataattatcctgtgaattgtgtggctcaagtggagcagacctgggtta

SEQ ID NO: 336533 - DNA, 201 bp, Homo sapiens
gtacctttcctgtccctgataagtctggggcctgggcctggccagctatgacagagagaaagccaaggaggatggccagaggcagtggtggggccaaagcmcttaggatggtccagctctgctattgcccctgagccctcaaagacgcagctctttgccaacacgtagctgacatggtttctagatgcggggcttgtgctg

SEQ ID NO: 336534 - DNA, 201 bp, Homo sapiens
aggactaccagctgctgcaggtgcagaggaccccagaaggcctgaccctgcttttcaagaggccctttggcacctgcgaccccaaggattacctcattgargtaaggggtggccgcgagtacccaggagggcgtgggctgcgtgtatcatgctgccatcctgtgccaatgtcatagtacctttcctgtccctgataagtct

SEQ ID NO: 336535 - DNA, 201 bp, Homo sapiens
tgcctcatccgctgtccatcttccatggctgtggtgggctcccagggacaggacctcgaggggctcactcctcacagcttcgccagggcccagcagtggcsccacacctccctcctcgtccctataatacgggctgccatcggcgcagcactgtgcatcccaggggaaaggacaaggagaattttcataagggaagctgcc

SEQ ID NO: 336536 - DNA, 201 bp, Homo sapiens
aaaaaaaaaatccaaaattacatgtatttataaagtaataaagcagtgcttgttctcagggttgtgccagtgcagggtgggcacctgctatcaatcaccaycttagatgtggcaccctggtttctctctcctttcctgttcatgtcccaccctgttcccaactctcccctttctgaggctccgcaactctcctgcctgcat

SEQ ID NO: 336537 - DNA, 201 bp, Homo sapiens
cctgttgccagctcgctgtgaggctcgggacaactgcccccctcctctggacctcactttgcccatctgtaaaatggagatgggaactagatgatctgtayggcctgaccaactctgggagttcatgggagccataaaacattgcaaaagccataggcttcttatgctgctctaagagccccccaacctcttagggaaagc

SEQ ID NO: 336538 - DNA, 201 bp, Homo sapiens
aaccctctggaagcacctcacagggggaggccaatgcctgtgtgtgctcagcccagtggccccaggccaggtataggggcctttgcctggagttctgggcrtcccctgcacagggcggcccatcggctttccgcaaactcaaagagcaaattagccacccacacgggtctgcactgtggagtgcccagaaagctatgaaag

SEQ ID NO: 336539 - DNA, 201 bp, Homo sapiens
gggttggtggagggaacaaatgttccggccacactggctcacggcgggcccagtagtcactggttgaatggatgttaagtgaatgtaggtggaatgtgttkagaagagaaaagtatttgatggccggtgcaaataggggatcctgggggtcgtcagcccgggatttggccccagccagggccatgcaagcctcaagggtcc

SEQ ID NO: 336540 - DNA, 201 bp, Homo sapiens
aaaagtttcccttcaaactggaggggactttaggcccttccacaagctgcagggggtccccgaagtgggcgagcccaccgcctacaatgggtcctgctccmgccttcctttccacatgggactggccaccagggcttctttgtggatgaaacccaactctctccacagaaacacacaaaggagtgacaaaaaagttttatt

SEQ ID NO: 336541 - DNA, 201 bp, Homo sapiens
ctcaactactgccgccacgtgctggccgcctgggccctgggtgccaaggtgcgtgccctgcgaccccagcatggtgtctcctgcctgggcccctggcatcyccacacctctgtttccccagcttcaccgtctcagaggcttcaagaaggggctcccaagggggctcacgaggccaccagaagggccaggcctgaggtggcc

SEQ ID NO: 336542 - DNA, 201 bp, Homo sapiens
catgaggcctgcacacccatgggatccagcctgacctactgtgcttgtacccgtggaccgactgagcaggtgcagacaccctgcccctacccataggtgtygaacaagccccacagggctcagccaaaactgttaggatgggctcttgactcctttccgtccaaatttacctccactcttgtttcacagggtggagaaagg

SEQ ID NO: 336543 - DNA, 201 bp, Homo sapiens
ccactgatgtgggccaggtggtggcgcgtggctgggcacagcatgaggcctgcacacccatgggatccagcctgacctactgtgcttgtacccgtggaccractgagcaggtgcagacaccctgcccctacccataggtgttgaacaagccccacagggctcagccaaaactgttaggatgggctcttgactcctttccgt

SEQ ID NO: 336544 - DNA, 201 bp, Homo sapiens
cacatgcccactgatgtgggccaggtggtggcgcgtggctgggcacagcatgaggcctgcacacccatgggatccagcctgacctactgtgcttgtacccrtggaccgactgagcaggtgcagacaccctgcccctacccataggtgttgaacaagccccacagggctcagccaaaactgttaggatgggctcttgactcc

SEQ ID NO: 336545 - DNA, 201 bp, Homo sapiens
ctcctccctgccagctctccaaacccttcctgacccggcaccccatctggccgtctttctgcactcaccctccttaacccagaaagttcttctgtcacctstcagtgtttgagttgactctgctctgagccaagtctgcaccccgagcttgggcatcatggggatctcagtttgaggacaaaataggaaagacatgctttc

SEQ ID NO: 336546 - DNA, 201 bp, Homo sapiens
cacccgcacctgattccatggaggctttaagtggctcacgttgatcacatctttccatagcattcaactagttttcatagaaacagcagctctttcttccyagtgagtgtagcctgtttgcgttaattgatcttgcgagctgcctggcatccacaggtgtggaaacaaagacagccagctcttggtctgcctagcaggtgg

SEQ ID NO: 336547 - DNA, 201 bp, Homo sapiens
tgagtctctcctccctgccagctctccaaacccttcctgacccggcaccccatctggccgtctttctgcactcaccctccttaacccagaaagttcttctstcacctctcagtgtttgagttgactctgctctgagccaagtctgcaccccgagcttgggcatcatggggatctcagtttgaggacaaaataggaaagaca

SEQ ID NO: 336548 - DNA, 201 bp, Homo sapiens
caacccagcctgcagcagccattacccacccgccaaggtgacaggagaggtgaggccgttgccggtgaaggcagcatctggggtggcctggcggaggcagyggggctggggaggaggtggcaggacggttgccccagggacaggactcgagttgcagggaggtgttgctggtgcccactgggctccctgcccgtcagctgc

SEQ ID NO: 336549 - DNA, 201 bp, Homo sapiens; identical to SEQ ID NO: 70834

SEQ ID NO: 336550 - DNA, 201 bp, Homo sapiens
ggggagcagagtgagttcagtttgagacaagctgagtttgagggcaagaatccaagaggtggctgggaagtggctggggaagcagccacccatcttgcccytccagcctcagtttacctcctgcccccttccttgcagggtgaatggaacctgcagcccctgcccaaggtcatctccacactggaagagcccaccccacag

SEQ ID NO: 336551 - DNA, 201 bp, Homo sapiens
catttccagctcctggtgcggaggctcaaggctggcgtcctgtttgggatgtccgaccgtggcgagcttgagaacgcagatctcgtggtgctctggaccgmtggggacactgcctattttgcggtgagtctctcctccctgccagctctccaaacccttcctgacccggcaccccatctggccgtctttctgcactcaccc

SEQ ID NO: 336552 - DNA, 201 bp, Homo sapiens
atccaagaggtggctgggaagtggctggggaagcagccacccatcttgcccctccagcctcagtttacctcctgcccccttccttgcagggtgaatggaayctgcagcccctgcccaaggtcatctccacactggaagagcccaccccacagtgccccaccagccagggccgaagccctgctggccccaccgttgtcagca

SEQ ID NO: 336553 - DNA, 201 bp, Homo sapiens
ccagaaggcctgaccctgcttttcaagaggccctttggcacctgcgaccccaaggattacctcattgaagtaaggggtggccgcgagtacccaggagggcrtgggctgcgtgtatcatgctgccatcctgtgccaatgtcatagtacctttcctgtccctgataagtctggggcctgggcctggccagctatgacagagag

SEQ ID NO: 336554 - DNA, 201 bp, Homo sapiens
cagaggcaagaggagttgttttggcctcatcttaaaggaaacaagtagggagatggttgggccccctggaagtgccctgcaccccagtccacagccctggstttgaacctcagcttggccacttcccagccctgtggtcttgtgtggagtcttcagttcaggctccatcctcagtttcttaatctgtgaaatagggctgat

SEQ ID NO: 336555 - DNA, 201 bp, Homo sapiens
cgaacaggaggcagggctggtatgggtgcaggtgccaaccccgactgtgccgcctctcggctaagcacctgtgcagtgactgagtgggctcgcaaacagakggctctgcaggtggagcaccccaggcaagtccccaccatcagccccattctgcaggcgcggccccggggccagggatgggagggtcttgccgggcatcca

SEQ ID NO: 336556 - DNA, 201 bp, Homo sapiens
ctgcgaccccaaggattacctcattgaagtaaggggtggccgcgagtacccaggagggcgtgggctgcgtgtatcatgctgccatcctgtgccaatgtcayagtacctttcctgtccctgataagtctggggcctgggcctggccagctatgacagagagaaagccaaggaggatggccagaggcagtggtggggccaaag

SEQ ID NO: 336557 - DNA, 201 bp, Homo sapiens
catgtgaccactgggaggctggcccagggagcttcagggactctccaattagcaaacggcaaggagaactaacaggtgtggccacaccataatcaggagasacagtctccgtgactcgaagaagcaccatgttattcctttggaagaggcccttgagtgtgggctgaggctcataaagggacagcaagtcatctgagagca

SEQ ID NO: 336558 - DNA, 201 bp, Homo sapiens
gctaagcacctgtgcagtgactgagtgggctcgcaaacagagggctctgcaggtggagcaccccaggcaagtccccaccatcagccccattctgcaggcgyggccccggggccagggatgggagggtcttgccgggcatccagcgaggagactgcatattccctgcccaatctggcttcacggcggcggaactgacgccac

SEQ ID NO: 336559 - DNA, 201 bp, Homo sapiens
tgaatctaatgccctccctggccagaagccacacttagcgggctctggcttccactgtagaggctggggcaaaatggacacccccagaggtcagggaggcytgagggaggacacagtggccgggggtctggtctgcagctctctgaggtctcctctcccccacccctcggctctgcctgccccaggagatccgcatgttga

SEQ ID NO: 336560 - DNA, 201 bp, Homo sapiens
acaggcctggagcacctgctgctaacaacaagcaaaattacaaaacaaaactttaaaaaccaggttgaggaggcagaggtgcggggacctgggagggcctygtcagaaatgtggctgtcacatggagcccaggggagaggggaggaggtgaaggaaggctctgtgcaggggctgcgtgcgggaaggcccagaggaccaaga

SEQ ID NO: 336561 - DNA, 201 bp, Homo sapiens
accctcagatccacagggactgaggcccagcatccccagatcagctggcaatgaatgcggagctctgccggggaatgccctcttcccctgtggattggccyggcttggctccttcatgcctggagcccagtgcttgtctctgcaggacgcctggagtgaccagaaggggcagatccacctggatccccagcaggactacca

SEQ ID NO: 336562 - DNA, 201 bp, Homo sapiens
gctgcaggtgcagaggaccccagaaggcctgaccctgcttttcaagaggccctttggcacctgcgaccccaaggattacctcattgaagtaaggggtggcygcgagtacccaggagggcgtgggctgcgtgtatcatgctgccatcctgtgccaatgtcatagtacctttcctgtccctgataagtctggggcctgggcct

SEQ ID NO: 336563 - DNA, 201 bp, Homo sapiens
agggcgtgggctgcgtgtatcatgctgccatcctgtgccaatgtcatagtacctttcctgtccctgataagtctggggcctgggcctggccagctatgacrgagagaaagccaaggaggatggccagaggcagtggtggggccaaagcacttaggatggtccagctctgctattgcccctgagccctcaaagacgcagctc

SEQ ID NO: 336564 - DNA, 201 bp, Homo sapiens
tattcacagagatgagagtgaggtgtgtcacctggtaggtgtgggtgggcagggatgtggcatcctctcaggagcccaactctgggggctctgagagggcraccagctgaaccctgtctcggctgcaggacggcactgtccacttggtctacgggatcctggaggagccgttccggtcactggaggccatcaacggctcgg

SEQ ID NO: 336565 - DNA, 201 bp, Homo sapiens
ggcagggactcggttccccagagcatgcctggcacggtgcagtgaacagacgagtggacgcagtgtacacgtgggtgcggcgaaagctgctggatggcagygtctgcgtggcatggcccggggctgacgggtctcctccaacttgcaggggggcttcgggatcctggaggagatgtgtgtcaactacgtgcactactaccc

SEQ ID NO: 336566 - DNA, 201 bp, Homo sapiens
gcaatgaatgcggagctctgccggggaatgccctcttcccctgtggattggcccggcttggctccttcatgcctggagcccagtgcttgtctctgcaggamgcctggagtgaccagaaggggcagatccacctggatccccagcaggactaccagctgctgcaggtgcagaggaccccagaaggcctgaccctgcttttca

SEQ ID NO: 336567 - DNA, 201 bp, Homo sapiens
tgaatggatgttaagtgaatgtaggtggaatgtgtttagaagagaaaagtatttgatggccggtgcaaataggggatcctgggggtcgtcagcccgggatktggccccagccagggccatgcaagcctcaagggtcccttattcacagagatgagagtgaggtgtgtcacctggtaggtgtgggtgggcagggatgtggca

SEQ ID NO: 336568 - DNA, 201 bp, Homo sapiens
tccaagaggtggctgggaagtggctggggaagcagccacccatcttgcccctccagcctcagtttacctcctgcccccttccttgcagggtgaatggaacytgcagcccctgcccaaggtcatctccacactggaagagcccaccccacagtgccccaccagccagggccgaagccctgctggccccaccgttgtcagcat

SEQ ID NO: 336569 - DNA, 201 bp, Homo sapiens
  misc_feature (1)...(201): n = A,T,C or G
gtagagacagggtttcgccatgttggtcaggctggtctcgaactcccaacctcaggtgatccacacacctcggcctcccaaagtgctgggattacaaggcntgagccaccgtgcccggccccctggacctctgaccatcagtttcatgtgaccactgggaggctggcccagggagcttcagggactctccaattagcaaac

SEQ ID NO: 336570 - DNA, 201 bp, Homo sapiens
agggactgaggcccagcatccccagatcagctggcaatgaatgcggagctctgccggggaatgccctcttcccctgtggattggcccggcttggctccttmatgcctggagcccagtgcttgtctctgcaggacgcctggagtgaccagaaggggcagatccacctggatccccagcaggactaccagctgctgcaggtgc

SEQ ID NO: 336571 - DNA, 201 bp, Homo sapiens
tgagtgtagcctgtttgcgttaattgatcttgcgagctgcctggcatccacaggtgtggaaacaaagacagccagctcttggtctgcctagcaggtgggarcagatggggggtgaccggccctgcctcctggctgagggtggctggggtcatagggataatctgtccgcagggggaagtgagagggcctccacttaccgct

SEQ ID NO: 336572 - DNA, 201 bp, Homo sapiens
tgggctccttgtagtggacgacagggactgtaccccagaggtgccgtggcatgcacagtggcgtggtcctatgggggcgaggcctccagcacctgccaacrccaggtggcaggtgctgatggtcacattggcttttcctcagggagatgtgctcatcacctcctgcacgtacaacacggaagaccgggagctggccacagt

SEQ ID NO: 336573 - DNA, 201 bp, Homo sapiens
ctacctcatggggagactcactcaggagttcatggagagacgttggaaagagtggagcagacaggacactcccaggggacgcgtgtcctcagtctgatggrccgaccacaaacccgagagtgtttgggggagatgagggcactaaggcaggcagtggagccctgatcccacagagggccaagcccaggcctcggtggggac

SEQ ID NO: 336574 - DNA, 201 bp, Homo sapiens
ccagctttgacgcagggccagggctcttctgtgccatcggcagatgggagttccatgccctcttctttgcccagaccacaccctgcaggttgtcaccgtcytgcaggctgatttccagcttaggttcctttgaacgtggaagaagaacatcaaagcacttatgaaacaatctgagcacagaactcaagttgtttacgagtt

SEQ ID NO: 336575 - DNA, 201 bp, Homo sapiens
gggaacactcagcctgtgaccttcgcacatgaatctgctgggctccttgtagtggacgacagggactgtaccccagaggtgccgtggcatgcacagtggcrtggtcctatgggggcgaggcctccagcacctgccaacgccaggtggcaggtgctgatggtcacattggcttttcctcagggagatgtgctcatcacctcc

SEQ ID NO: 336576 - DNA, 201 bp, Homo sapiens
atgccgtgcgggctaatgagccaataaagctcacacttgggctggcacccactggaggtgggtatgtttgcactccgggccgtcgctccaggagagagaascttgctcctgagcctcctccctgtgccaggcgtggtaccaagtgcttccccctgagcgtcctgaagctgcctcagctggcctgggtgggtctccccttcc

SEQ ID NO: 336577 - DNA, 201 bp, Homo sapiens
ccagcggatgttgacccctgctcaaggttgagaagcactcacaccaagaagcttctcagcacccggggctggtgtggggagaagctgtaggacaagaggtygacctttgccccgtggagctcaaggtgcaccagggagacaggcctggagcacctgctgctaacaacaagcaaaattacaaaacaaaactttaaaaaccag

SEQ ID NO: 336578 - DNA, 201 bp, Homo sapiens
gccgacacctggcatctctgggccagggtcggcctctgggggccaaaggggcattgggaccctttgggctcccaggcctggcacacaatggcctctcaagycattgcaagggacacaaagctataggcgacggcaaggtcagggcggccgctgcttgggagcgagagggaaggagcaaaagtgagtcctaaaaagctcggc

SEQ ID NO: 336579 - DNA, 201 bp, Homo sapiens
agagtcacacagcaggaagaggcatggccttgaaggtgcgctttgggcccgggctctaacctcagggctgccctgcctcccactggggctgcaggagctgkcccggccacagccccatatgcatgaggacggctgcgtcctgtccctgccttggcaggaaatggcctgtacgaacctcatttccttcactctggagctgcc

SEQ ID NO: 336580 - DNA, 201 bp, Homo sapiens
ctcagggctgccctgcctcccactggggctgcaggagctggcccggccacagccccatatgcatgaggacggctgcgtcctgtccctgccttggcaggaartggcctgtacgaacctcatttccttcactctggagctgcctacgggatttctttctgggctgatggctccaccctcaaggctgtgaaccccagaagtgcc

SEQ ID NO: 336581 - DNA, 201 bp, Homo sapiens
cagcctcagtttacctcctgcccccttccttgcagggtgaatggaacctgcagcccctgcccaaggtcatctccacactggaagagcccaccccacagtgycccaccagccagggccgaagccctgctggccccaccgttgtcagcattggtgggggcaaaggctgaggggggacctactcctccccctcctccatgctgt

SEQ ID NO: 336582 - DNA, 201 bp, Homo sapiens
gttggagggaagggcaggtgtaaacaactctggccatctgtttgagcctgcaatccattaatagatgccaaatagacaaatacggaatctaagaaaacagmacagctggctgtttgccagatgaggaaactaaggcccggagacggggagtggatgtacccaggggttcggggtgtgctggggcagacctggtgccagaag

SEQ ID NO: 336583 - DNA, 201 bp, Homo sapiens
ccagatgccaagttccaaatacagggagaggtgtgtgcataaacagggaggtggtagtaaagcagggcatattccaggacacaggcgctccggcctggccrgagtgcagggacgggaaggggagctggggcagctgctgttggatcacccatacctgagggtggagtgagcagggtcagcttttagcatggcaaggccagg

SEQ ID NO: 336584 - DNA, 201 bp, Homo sapiens
agggttttgtgtacaggtggtcccagggctggctggcggtggggccagtgttgaggcctccacaggctgagacgatgggggtctccccagctcttacaccygtctagagaaggggttttgggggaaggctcagccctaggcaccagctcctctccccaactccctgacccgagtctcacaggatgttcctggggcgtgtaa

SEQ ID NO: 336585 - DNA, 201 bp, Homo sapiens
ggcgtgtaatgagctgcctgtcaggaggaagcatcgctctaatcctgctgcgccccctccaccacccctgaggctcaggccccaacagttgactgggtttkcccctgcccagacctggggccctctcaggacacacccgtctgtctgacaccttgccccacacaggcattttactacccagaggaagccggccttgccttc

SEQ ID NO: 336586 - DNA, 201 bp, Homo sapiens
ctacccagaggaagccggccttgccttcgggggtccagggtcctccagatatctccgcctggaagttcactaccacaacccactggtgatagaaggtaggsggctctgctgccatcctcctcagaagccctaggactcagctgtgttgagccagtgagcaaatcccgcccttcgtctgcccagcatggtgcccccgctgta

SEQ ID NO: 336587 - DNA, 201 bp, Homo sapiens
cccagaggaagccggccttgccttcgggggtccagggtcctccagatatctccgcctggaagttcactaccacaacccactggtgatagaaggtaggcggytctgctgccatcctcctcagaagccctaggactcagctgtgttgagccagtgagcaaatcccgcccttcgtctgcccagcatggtgcccccgctgtacag

SEQ ID NO: 336588 - DNA, 201 bp, Homo sapiens
tcactaccacaacccactggtgatagaaggtaggcggctctgctgccatcctcctcagaagccctaggactcagctgtgttgagccagtgagcaaatcccrcccttcgtctgcccagcatggtgcccccgctgtacagctcctcttggcacgaggcccttgcgtctgcctcatccgctgtccatcttccatggctgtggtg

SEQ ID NO: 336589 - DNA, 201 bp, Homo sapiens
ttttcattgttgtttgtttttttacttaaacttcatcagaagcctcttccctgtgaattaaaaccccttgtcaatttcacactccttgccgcctgacatcsctttcctgtacataacccagggggcagagcctcctgctgcacagcccctccagaccaccccgccatgtccgccatgtccaccatgtccaccatgcatccg

SEQ ID NO: 336590 - DNA, 201 bp, Homo sapiens
aaggccaggcagggcagggaagcagcttcgtttggacaattctggtgggctctgggtggctggggtggtctctagttgcctggttcctggccctagggtgwtttagggttggggcaatattggcctggggtgtgagagtcaggtggaggaggtagctagggatatgggcttggtgtgggtcggaatgttaggaatatgatt

SEQ ID NO: 336591 - DNA, 201 bp, Homo sapiens
tggggcaatattggcctggggtgtgagagtcaggtggaggaggtagctagggatatgggcttggtgtgggtcggaatgttaggaatatgattctcacacamgcgtgaatgttggagggcaggacaggtgtaaacaactctgaccatctgtttgagccttcaatcaattaatagatgccaaatagacaaatatggaatctaa

SEQ ID NO: 336592 - DNA, 201 bp, Homo sapiens
gggcaatattggcctggggtgtgagagtcaggtggaggaggtagctagggatatgggcttggtgtgggtcggaatgttaggaatatgattctcacacacgygtgaatgttggagggcaggacaggtgtaaacaactctgaccatctgtttgagccttcaatcaattaatagatgccaaatagacaaatatggaatctaaga

SEQ ID NO: 336593 - DNA, 201 bp, Homo sapiens
cagaaactgaaaaaaatacttccctctctctgttgcaccagcatctttcaccatatatagacacacacgcacacaatgcacacacacacgcacacacacatgcacacatgtacacatatgcacgcagaagcacacacatgcacacactttttctctctctctgaatggtgcttcttcttttcatttgtgcaaggtgcagaa

SEQ ID NO: 336594 - DNA, 201 bp, Homo sapiens
agaaactgaaaaaaatacttccctctctctgttgcaccagcatctttcaccatatatagacacacacgcacacaatgcacacacacacgcacacacacatgcacacatgtacacatatgcacgcagaagcacacacatgcacacactttttctctctctctgaatggtgcttcttcttttcatttgtgcaaggtgcagaag

SEQ ID NO: 336595 - DNA, 201 bp, Homo sapiens
ctgttctcccacctcccacagctattgtgaagctgggaaaggctcacgcacagaacttgctgtgggcacggggctgtgctcagctaacagtcgcctgtggttttttttttttttcctggctgcataagtaataccttccgccactgttggagttatctccacatgcacagagaagggtataagtcagcttgggccttagca

SEQ ID NO: 336596 - DNA, 201 bp, Homo sapiens
tgttctcccacctcccacagctattgtgaagctgggaaaggctcacgcacagaacttgctgtgggcacggggctgtgctcagctaacagtcgcctgtggttttttttttttttcctggctgcataagtaataccttccgccactgttggagttatctccacatgcacagagaagggtataagtcagcttgggccttagcat

SEQ ID NO: 336597 - DNA, 201 bp, Homo sapiens
aggggcttaaagctggcagtggggactcagagggtgcctgccctgcccctcccatgcgatggcaggccgtagggttgccgtgagaggctggaggttgtcgyggcctctagtcacggtcctgtcttatagagtccctgctcccctcagagccacgttggagaaatgactggtggacggtgcggggctgcagtggaaagggcc

SEQ ID NO: 336598 - DNA, 201 bp, Homo sapiens
tgccccagggacaggactcgagttgcagggaggtgttgctggtgcccactgggctccctgcccgtcagctgctccccagcctggctgttccttgtccccascaggttcaacaacgaggatgtctgcacctgccctcaggcgtccgtgtctcagcagttcacctctgttccctggaactccttcaaccgcgacgtactgaag

SEQ ID NO: 336599 - DNA, 201 bp, Homo sapiens
tccccagcctggctgttccttgtccccaccaggttcaacaacgaggatgtctgcacctgccctcaggcgtccgtgtctcagcagttcacctctgttccctsgaactccttcaaccgcgacgtactgaaggccctgtacagcttcgcgcccatctccatgcactgcaacaagtcctcagccgtccgcttccaggtgcgctgc

SEQ ID NO: 336600 - DNA, 201 bp, Homo sapiens
taaaaccccttgtcaatttcacactccttgccgcctgacatccctttcctgtacataacccagggggcagagcctcctgctgcacagcccctccagaccaccccgccatgtccgccatgtccaccatgtccaccatgcatccgggggcatggggccaggcctttagatcctccgccaaccatgagcccagccggtactcag

SEQ ID NO: 336601 - DNA, 201 bp, Homo sapiens
agactcggccaggaggcacttgcctgtgtcgctagtgaggcttagggccacccaggtagggtgagtggagctgcctgggaagggccctgctctgacccatrgggctgcacagattcctgtgcacaaagacactctgtggctcaggttccagccaagaaagacctgggacagccctgattctgagccgtcagccgtctggag

SEQ ID NO: 336602 - DNA, 201 bp, Homo sapiens
cacgtgctggccgcctgggccctgggtgccaaggtgcgtgccctgcgaccccagcatggtgtctcctgcctgggcccctggcatccccacacctctgtttycccagcttcaccgtctcagaggcttcaagaaggggctcccaagggggctcacgaggccaccagaagggccaggcctgaggtggccccctcgcctctgtga

SEQ ID NO: 336603 - DNA, 201 bp, Homo sapiens
ctgtgatgtctgaaatgcttcaagccttttttttattttccacagaaacgcaagtgccccaggaccttatgccctcagtgggtcctgattctgtttcccamctggagtcagggttttgtgtacaggtggtcccagggctggctggcggtggggccagtgttgaggcctccacaggctgagacgatgggggtctccccagct

SEQ ID NO: 336604 - DNA, 201 bp, Homo sapiens
actccttgccgcctgacatccctttcctgtacataacccagggggcagagcctcctgctgcacagcccctccagaccaccccgccatgtccgccatgtccrccatgtccaccatgcatccgggggcatggggccaggcctttagatcctccgccaaccatgagcccagccggtactcagagcctggctgctgattcactag

SEQ ID NO: 336605 - DNA, 201 bp, Homo sapiens
aggccccaacagttgactgggtttgcccctgcccagacctggggccctctcaggacacacccgtctgtctgacaccttgccccacacaggcattttactayccagaggaagccggccttgccttcgggggtccagggtcctccagatatctccgcctggaagttcactaccacaacccactggtgatagaaggtaggcggc

SEQ ID NO: 336606 - DNA, 201 bp, Homo sapiens
aagacatgtcagtgttgtttaacttgaattttctatttgtggacttgaggatcttttcctctgcctcttggccatttgttcctgttttctgttcattcctrtgctcggtttttccagtaggtggtttgtttttcttactgttggtttctaggagttcttcttatatgatggatgttatttcatagtttgtgtatatgttac

SEQ ID NO: 336607 - DNA, 201 bp, Homo sapiens
ccggaggggtccctggagctctcatggaatgtcagctacacccaggaggccatccatttccagctcctggtgcggaggctcaaggctggcgtcctgtttgsgatgtccgaccgtggcgagcttgagaacgcagatctcgtggtgctctggaccgatggggacactgcctattttgcggtgagtctctcctccctgccagct

SEQ ID NO: 336608 - DNA, 201 bp, Homo sapiens
actgcctattttgcggtgagtctctcctccctgccagctctccaaacccttcctgacccggcaccccatctggccgtctttctgcactcaccctccttaayccagaaagttcttctgtcacctctcagtgtttgagttgactctgctctgagccaagtctgcaccccgagcttgggcatcatggggatctcagtttgagga

SEQ ID NO: 336609 - DNA, 201 bp, Homo sapiens
ctcctgctgcacagcccctccagaccaccccgccatgtccgccatgtccaccatgtccaccatgcatccgggggcatggggccaggcctttagatcctccrccaaccatgagcccagccggtactcagagcctggctgctgattcactaggcatggagtttcaggaacggtggggctacctggatgacacctggttgtgag

SEQ ID NO: 336610 - DNA, 201 bp, Homo sapiens
ggagaccgccttcatcctcactggctactgcacggacaagtgcacccagctggtgagtggggctgggcccggcactgcaccctccctcctcccgcgtcccycagtggaggcctggcaggtcgtggcccacgaagggtggcaggcacagctttggtttcccctgaccctgaatccccctgcggtcctccctcttttctgtat

SEQ ID NO: 336611 - DNA, 201 bp, Homo sapiens
ctggctactgcacggacaagtgcacccagctggtgagtggggctgggcccggcactgcaccctccctcctcccgcgtccctcagtggaggcctggcaggtsgtggcccacgaagggtggcaggcacagctttggtttcccctgaccctgaatccccctgcggtcctccctcttttctgtatgcaagggaaccctgctgctg

SEQ ID NO: 336612 - DNA, 201 bp, Homo sapiens
aaaaccccttgtcaatttcacactccttgccgcctgacatccctttcctgtacataacccagggggcagagcctcctgctgcacagcccctccagaccaccccgccatgtccgccatgtccaccatgtccaccatgcatccgggggcatggggccaggcctttagatcctccgccaaccatgagcccagccggtactcaga

SEQ ID NO: 336613 - DNA, 201 bp, Homo sapiens
aaaccccttgtcaatttcacactccttgccgcctgacatccctttcctgtacataacccagggggcagagcctcctgctgcacagcccctccagaccaccccgccatgtccgccatgtccaccatgtccaccatgcatccgggggcatggggccaggcctttagatcctccgccaaccatgagcccagccggtactcagag

SEQ ID NO: 336614 - DNA, 201 bp, Homo sapiens
aaccccttgtcaatttcacactccttgccgcctgacatccctttcctgtacataacccagggggcagagcctcctgctgcacagcccctccagaccaccccgccatgtccgccatgtccaccatgtccaccatgcatccgggggcatggggccaggcctttagatcctccgccaaccatgagcccagccggtactcagagc

SEQ ID NO: 336615 - DNA, 201 bp, Homo sapiens
accccttgtcaatttcacactccttgccgcctgacatccctttcctgtacataacccagggggcagagcctcctgctgcacagcccctccagaccaccccgccatgtccgccatgtccaccatgtccaccatgcatccgggggcatggggccaggcctttagatcctccgccaaccatgagcccagccggtactcagagcc

SEQ ID NO: 336616 - DNA, 201 bp, Homo sapiens
ccttgtcaatttcacactccttgccgcctgacatccctttcctgtacataacccagggggcagagcctcctgctgcacagcccctccagaccaccccgccatgtccgccatgtccaccatgtccaccatgcatccgggggcatggggccaggcctttagatcctccgccaaccatgagcccagccggtactcagagcctgg

SEQ ID NO: 336617 - DNA, 201 bp, Homo sapiens
cttgtcaatttcacactccttgccgcctgacatccctttcctgtacataacccagggggcagagcctcctgctgcacagcccctccagaccaccccgccatgtccgccatgtccaccatgtccaccatgcatccgggggcatggggccaggcctttagatcctccgccaaccatgagcccagccggtactcagagcctggc

SEQ ID NO: 336618 - DNA, 201 bp, Homo sapiens
acaagtcctcagccgtccgcttccaggtgcgctgccatgggcccgggtggggcatgcagtcaggcaggcctcatggggggccccagtgaggggtgatgggyctgcactccaaactgctggcaaaagcactcgcacaagacaatgagagcaagtgccaggtggtgacacataggcctagacagccagccagccagcagagag

SEQ ID NO: 336619 - DNA, 201 bp, Homo sapiens
ttgtcaatttcacactccttgccgcctgacatccctttcctgtacataacccagggggcagagcctcctgctgcacagcccctccagaccaccccgccatgtccgccatgtccaccatgtccaccatgcatccgggggcatggggccaggcctttagatcctccgccaaccatgagcccagccggtactcagagcctggct

SEQ ID NO: 336620 - DNA, 201 bp, Homo sapiens
ggagggcaggcaccctctctggtgacacctccacactgtaccgaatgccaaatgcaggtggtgtgagcagggcgcactaacctgcctaaaaataaagcacyaggggaggggaaggtaagaaacgaaccagtctgaagctgcgagctggttttttcctccttatctgagacccactggtattcgaaggcatctaatttatcc

SEQ ID NO: 336621 - DNA, 201 bp, Homo sapiens
tgtcaatttcacactccttgccgcctgacatccctttcctgtacataacccagggggcagagcctcctgctgcacagcccctccagaccaccccgccatgtccgccatgtccaccatgtccaccatgcatccgggggcatggggccaggcctttagatcctccgccaaccatgagcccagccggtactcagagcctggctg

SEQ ID NO: 336622 - DNA, 201 bp, Homo sapiens
atcttccatggctgtggtgggctcccagggacaggacctcgaggggctcactcctcacagcttcgccagggcccagcagtggccccacacctccctcctcrtccctataatacgggctgccatcggcgcagcactgtgcatcccaggggaaaggacaaggagaattttcataagggaagctgccagatgccaagttccaaa

SEQ ID NO: 336623 - DNA, 201 bp, Homo sapiens
ctgagaatagtgtggggtggacgtctgatggggttgaaaacttggcatttggtgtagccttgaggggaagagatagctaaaaaatatcagagcctgcagcmaggggctctggttgctacactagggtgaatgattaaattgggtggggacagaggcggggagaggcctggatgactcccaggttcctgactaggtgaatgg

SEQ ID NO: 336624 - DNA, 201 bp, Homo sapiens
tgctcggcccaccacgtaggggacctgccaagtaccaccttctgccacttgcttttccctggacagcaagctcttcagcacagaggccacgcgctgctcarcttggtggctttgccacaccctgtccacgggaggctcgccttaaaggcctgttgactgagtgaagatgaacctgtcaggcttcaggggctcaggagagga

SEQ ID NO: 336625 - DNA, 201 bp, Homo sapiens
aaggtcgtgtcggtccatccggtgagtgcccagcgggaaggctgtcccactcactgccaccagctggggtggctgagagggctgggggtgccaccagaagragagggacacagaaagtgatagggggagggagagccatccagggcagggggagggtgcctgtgggtggctctgggctgggctacctcatggggagactca

SEQ ID NO: 336626 - DNA, 201 bp, Homo sapiens; identical to SEQ ID NO: 70823

SEQ ID NO: 336627 - DNA, 201 bp, Homo sapiens
tctcagaaactgaaaaaaatacttccctctctctgttgcaccagcatctttcaccatatatagacacacacgcacacaatgcacacacacacgcacacacrcatgcacacatgtacacatatgcacgcagaagcacacacatgcacacactttttctctctctctgaatggtgcttcttcttttcatttgtgcaaggtgca

SEQ ID NO: 336628 - DNA, 201 bp, Homo sapiens
tcctccttatctgagacccactggtattcgaaggcatctaatttatcctgggcccactgggctgtggtcaggaggccagggcctatgcagagttagtcgcrtaaggtgccgcagcctggagatccaggaagatccttcccagaagcatttgggagccagattaactgctaagtcaaacatcctcagcaccaagggaaggaa

SEQ ID NO: 336629 - DNA, 201 bp, Homo sapiens
tctaatcctgctgcgccccctccaccacccctgaggctcaggccccaacagttgactgggtttgcccctgcccagacctggggccctctcaggacacaccygtctgtctgacaccttgccccacacaggcattttactacccagaggaagccggccttgccttcgggggtccagggtcctccagatatctccgcctggaag

SEQ ID NO: 336630 - DNA, 201 bp, Homo sapiens
ctgtgttgagccagtgagcaaatcccgcccttcgtctgcccagcatggtgcccccgctgtacagctcctcttggcacgaggcccttgcgtctgcctcatcygctgtccatcttccatggctgtggtgggctcccagggacaggacctcgaggggctcactcctcacagcttcgccagggcccagcagtggccccacacctc

SEQ ID NO: 336631 - DNA, 201 bp, Homo sapiens
atgagaaaagctgggaaaggaggaatccggcccagagaacaatgctggcaaaaacgcgtcctggccaacaggtgccaggtttcgtctctgggcagaactgycccatgctctttgtctgcacgggaggagggggcggcagctggtgtaagtgccacgccaagctttgcccagtccctttgttctgccatagagtaaagattg

SEQ ID NO: 336632 - DNA, 201 bp, Homo sapiens
gtctgcccagcatggtgcccccgctgtacagctcctcttggcacgaggcccttgcgtctgcctcatccgctgtccatcttccatggctgtggtgggctccyagggacaggacctcgaggggctcactcctcacagcttcgccagggcccagcagtggccccacacctccctcctcgtccctataatacgggctgccatcgg

SEQ ID NO: 336633 - DNA, 201 bp, Homo sapiens
cagggtcttgtgcctcacagctgttaccccacccttcctgtctcccttggatttcaggtgacaagtgtcctaggttcctgatcacaaactcagggtggagrcaggacagctttgtcagtcctttattctctctagaggaggtgctcagtatatcacagcagtggctgatgtcgggtgcttgccacagctcagcactgctct

SEQ ID NO: 336634 - DNA, 201 bp, Homo sapiens
ggtgcccccgctgtacagctcctcttggcacgaggcccttgcgtctgcctcatccgctgtccatcttccatggctgtggtgggctcccagggacaggaccycgaggggctcactcctcacagcttcgccagggcccagcagtggccccacacctccctcctcgtccctataatacgggctgccatcggcgcagcactgtgc

SEQ ID NO: 336635 - DNA, 201 bp, Homo sapiens
cccagggtcttgtgcctcacagctgttaccccacccttcctgtctcccttggatttcaggtgacaagtgtcctaggttcctgatcacaaactcagggtggrgacaggacagctttgtcagtcctttattctctctagaggaggtgctcagtatatcacagcagtggctgatgtcgggtgcttgccacagctcagcactgct

SEQ ID NO: 336636 - DNA, 201 bp, Homo sapiens
cctggacccaccccattcaggaccagggcataaatggccaggtgggaccagagagctcaccccagccatgcccgccctcagtcgctgggccagcctgcccrgccccagcatgcgggaggcagccttcatgtacagcacagcagtggccatcttcctggtcatcctggtggccgcactgcagggctcggctccccgtgagag

SEQ ID NO: 336637 - DNA, 201 bp, Homo sapiens
cacatgggactggccaccagggcttctttgtggatgaaacccaactctctccacagaaacacacaaaggagtgacaaaaaagttttatttctgaagtcagraggtgcctgctttatctgggagtgccgagctggagcgggggagctgtgtctgtgcggagcggccggctccagctctgcatcttggtctcaccatgggctg

SEQ ID NO: 336638 - DNA, 201 bp, Homo sapiens
gctcctcgctgtctctcagtgggtctccctggtggtcttccatgtgacctggcctcgggccaccgtgtccctgccccttagggcccagtgcaaggggagcrgccggagatggggagggcagaggtcactgatccagatcccaggaagcatcctcggagaatgcagcaggtccaatgcctccctgggcctcagtttaccttc

SEQ ID NO: 336639 - DNA, 201 bp, Homo sapiens; identical to SEQ ID NO: 70838

SEQ ID NO: 336640 - DNA, 201 bp, Homo sapiens
ttgagatgtgtcatggcccaccagctgcacccccactggcctgggccctggccctgttgtgacccactgggtcacaggagctgatggtttataacttgctygggaacactcagcctgtgaccttcgcacatgaatctgctgggctccttgtagtggacgacagggactgtaccccagaggtgccgtggcatgcacagtggc

SEQ ID NO: 336641 - DNA, 201 bp, Homo sapiens
gcagtgactgagtgggctcgcaaacagagggctctgcaggtggagcaccccaggcaagtccccaccatcagccccattctgcaggcgcggccccggggccrgggatgggagggtcttgccgggcatccagcgaggagactgcatattccctgcccaatctggcttcacggcggcggaactgacgccacgtcccagggcgtt

SEQ ID NO: 336642 - DNA, 201 bp, Homo sapiens
tgcagtgactgagtgggctcgcaaacagagggctctgcaggtggagcaccccaggcaagtccccaccatcagccccattctgcaggcgcggccccggggcmagggatgggagggtcttgccgggcatccagcgaggagactgcatattccctgcccaatctggcttcacggcggcggaactgacgccacgtcccagggcgt

SEQ ID NO: 336643 - DNA, 201 bp, Homo sapiens
ggagatgtgctcatcacctcctgcacgtacaacacggaagaccgggagctggccacagtggtaagtcacccccgcttccccctgcacctgcccagggcgartgttcagcctgagccatctgaggaaggatgacaggtcttgactcctcacttagggcatgggctcgtcccctcaataagccagtcgttctcagctccctga

SEQ ID NO: 336644 - DNA, 201 bp, Homo sapiens
cgaggcctccagcacctgccaacgccaggtggcaggtgctgatggtcacattggcttttcctcagggagatgtgctcatcacctcctgcacgtacaacacrgaagaccgggagctggccacagtggtaagtcacccccgcttccccctgcacctgcccagggcgagtgttcagcctgagccatctgaggaaggatgacagg

SEQ ID NO: 336645 - DNA, 201 bp, Homo sapiens
acgtctgatggggttgaaaacttggcatttggtgtagccttgaggggaagagatagctaaaaaatatcagagcctgcagccaggggctctggttgctacaytagggtgaatgattaaattgggtggggacagaggcggggagaggcctggatgactcccaggttcctgactaggtgaatgggaagccaggggagggggcat

SEQ ID NO: 336646 - DNA, 201 bp, Homo sapiens
tgggggctctgagagggcgaccagctgaaccctgtctcggctgcaggacggcactgtccacttggtctacgggatcctggaggagccgttccggtcactgsaggccatcaacggctcgggcctgcagatggggctgcagagggtgcagctcctgaagcccaatatccccgaaccggagttgccctcagacgcgtgcaccat

SEQ ID NO: 336647 - DNA, 201 bp, Homo sapiens; identical to SEQ ID NO: 70821

SEQ ID NO: 336648 - DNA, 201 bp, Homo sapiens
ggctgcttccgggagccaaaggggatgctgttcacaattacctgggtcccaggcacaagccagggctgtcctggcaaatgggccaccttgccagtggatcygtgccagctgcttcggtaaccatggtggtctccaataattatcctgtgaattgtgtggctcaagtggagcagacctgggttacagctaccctgacatccc

SEQ ID NO: 336649 - DNA, 201 bp, Homo sapiens
agttgccctcagacgcgtgcaccatggaggtccaagctcccaatatccagatccccagccaggagaccacgtactggtgctacattaaggagcttccaaasggcttctctcggcaccacattatcaaggtacgtgcgggtccagggccgaggtcctcgcccagccctgccttcctcccgggcctgggttgtccctgaccct

SEQ ID NO: 336650 - DNA, 201 bp, Homo sapiens
ctggcgccaacagcaggtcctgtccttggcttctggtgagttcagagagtgactactaaaatctcctcctttgcttgccctatcttggtccaagcctgtgmtgaactgtctccctatcaatcagtgtctaggctgttctcaacttttcaccaatagaaagaagcttctgggaaatccttgtccatgtaggaaaccattttc

SEQ ID NO: 336651 - DNA, 201 bp, Homo sapiens
gcaccatggaggtccaagctcccaatatccagatccccagccaggagaccacgtactggtgctacattaaggagcttccaaagggcttctctcggcaccayattatcaaggtacgtgcgggtccagggccgaggtcctcgcccagccctgccttcctcccgggcctgggttgtccctgaccctggagagctgtccacagtc

SEQ ID NO: 336652 - DNA, 201 bp, Homo sapiens
aatatgccttcattatgtaagcaacacacacatgcacttgccactcacaagcgcaggcactgcagctaaagagaacgctcccctcatccgctgccgcctcyccctgagatagccacttcttggctctttgtgtccttccagacctttttcctgtatatttcaggaagctcttgcaggtgttagaaaccttttgtgttttta

SEQ ID NO: 336653 - DNA, 201 bp, Homo sapiens
ttttacagatgggcattcggaagcccatggaggagggctgctggggaggggagggtgggcggccggttcccgggctcagagggctgcctcctcacagtacsagcccatcgtcaccaagggcaatgaggcccttgtccaccacatggaagtcttccagtgcgcccccgagatggacagcgtcccccacttcagcgggccctg

SEQ ID NO: 336654 - DNA, 201 bp, Homo sapiens
cactagtccacacccacgtgccaggcttccacgagctgcattttaaaatatgccttcattatgtaagcaacacacacatgcacttgccactcacaagcgcwggcactgcagctaaagagaacgctcccctcatccgctgccgcctccccctgagatagccacttcttggctctttgtgtccttccagacctttttcctgta

SEQ ID NO: 336655 - DNA, 201 bp, Homo sapiens
caatgaggcccttgtccaccacatggaagtcttccagtgcgcccccgagatggacagcgtcccccacttcagcgggccctgcgactccaagatgaaacccraccgcctcaactactgccgccacgtgctggccgcctgggccctgggtgccaaggtgcgtgccctgcgaccccagcatggtgtctcctgcctgggcccctg

SEQ ID NO: 336656 - DNA, 201 bp, Homo sapiens
acagccagctcttggtctgcctagcaggtgggagcagatggggggtgaccggccctgcctcctggctgagggtggctggggtcatagggataatctgtccrcagggggaagtgagagggcctccacttaccgctcacctccatccatcccaccttctcccaggacgaaacgactcctcaggcatccgcttgtactacacag

SEQ ID NO: 336657 - DNA, 201 bp, Homo sapiens
ttggggacgctgggtggatgacctcacccgctgcctgttctcccacctcccacagctattgtgaagctgggaaaggctcacgcacagaacttgctgtgggyacggggctgtgctcagctaacagtcgcctgtggttttttttttttttcctggctgcataagtaataccttccgccactgttggagttatctccacatgca

SEQ ID NO: 336658 - DNA, 201 bp, Homo sapiens
tgggtttgcccctgcccagacctggggccctctcaggacacacccgtctgtctgacaccttgccccacacaggcattttactacccagaggaagccggccytgccttcgggggtccagggtcctccagatatctccgcctggaagttcactaccacaacccactggtgatagaaggtaggcggctctgctgccatcctcct

SEQ ID NO: 336659 - DNA, 201 bp, Homo sapiens
taacagtcgcctgtggttttttttttttttcctggctgcataagtaataccttccgccactgttggagttatctccacatgcacagagaagggtataagtmagcttgggccttagcatgacacgggatttattgctcatttaaaccctgaaagcaaatggatttttgaaaactcctgaagcatcagggaagtctgtctctt

SEQ ID NO: 336660 - DNA, 201 bp, Homo sapiens
tgtctctcagtgggtctccctggtggtcttccatgtgacctggcctcgggccaccgtgtccctgccccttagggcccagtgcaaggggagcagccggagayggggagggcagaggtcactgatccagatcccaggaagcatcctcggagaatgcagcaggtccaatgcctccctgggcctcagtttaccttctccaagcag

SEQ ID NO: 336661 - DNA, 201 bp, Homo sapiens
ggtttgcccctgcccagacctggggccctctcaggacacacccgtctgtctgacaccttgccccacacaggcattttactacccagaggaagccggccttkccttcgggggtccagggtcctccagatatctccgcctggaagttcactaccacaacccactggtgatagaaggtaggcggctctgctgccatcctcctca

SEQ ID NO: 336662 - DNA, 201 bp, Homo sapiens
tctctctcctttcctgttcatgtcccaccctgttcccaactctcccctttctgaggctccgcaactctcctgcctgcatgaatgtgggcagcattggtctraggcattgttcccagtcttgaggaggccttgggagcctcaggcatcttcttaagaagctcagtgtcccgcccgccaggcccgggaatgcccatggctaac

SEQ ID NO: 336663 - DNA, 201 bp, Homo sapiens
catgtcccaccctgttcccaactctcccctttctgaggctccgcaactctcctgcctgcatgaatgtgggcagcattggtctgaggcattgttcccagtcytgaggaggccttgggagcctcaggcatcttcttaagaagctcagtgtcccgcccgccaggcccgggaatgcccatggctaacagaacctgtgacctgctg

SEQ ID NO: 336664 - DNA, 201 bp, Homo sapiens
acatgaatctgctgggctccttgtagtggacgacagggactgtaccccagaggtgccgtggcatgcacagtggcgtggtcctatgggggcgaggcctccarcacctgccaacgccaggtggcaggtgctgatggtcacattggcttttcctcagggagatgtgctcatcacctcctgcacgtacaacacggaagaccggga

SEQ ID NO: 336665 - DNA, 201 bp, Homo sapiens
cccactggcctgggccctggccctgttgtgacccactgggtcacaggagctgatggtttataacttgctcgggaacactcagcctgtgaccttcgcacatkaatctgctgggctccttgtagtggacgacagggactgtaccccagaggtgccgtggcatgcacagtggcgtggtcctatgggggcgaggcctccagcacc

SEQ ID NO: 336666 - DNA, 201 bp, Homo sapiens
ggggacgcgtgtcctcagtctgatgggccgaccacaaacccgagagtgtttgggggagatgagggcactaaggcaggcagtggagccctgatcccacagarggccaagcccaggcctcggtggggacttgcccaagtcctttgagatgtgtcatggcccaccagctgcacccccactggcctgggccctggccctgttgtg

SEQ ID NO: 336667 - DNA, 201 bp, Homo sapiens
aggcttcaggggctcaggagaggatgaaggactcggaaagaaagtcgctcctgagtgggactaggggctgcttctttgggagctgggggctgttgcggccmcctcgctcttccccgtgaggtttctgatggtggctctaacctggccggggagaaagacctagaaaatgcaagtgttccagggaagcaaactgcccagggt

SEQ ID NO: 336668 - DNA, 201 bp, Homo sapiens
gggagatgagggcactaaggcaggcagtggagccctgatcccacagagggccaagcccaggcctcggtggggacttgcccaagtcctttgagatgtgtcawggcccaccagctgcacccccactggcctgggccctggccctgttgtgacccactgggtcacaggagctgatggtttataacttgctcgggaacactcagc

SEQ ID NO: 336669 - DNA, 201 bp, Homo sapiens
ctggtgagcaccgcggacatctcagatggccgttctgcaggttgaggccctcggtgccagcgtccccgtgggcagttctgtggcttccctggcccatgtcstcctcttggcagtggccacatcacagcaccaggtgggatcaaaggggagggcagctccccaggtggacctgagcttctcacactctgacaagccctcgcc

SEQ ID NO: 336670 - DNA, 201 bp, Homo sapiens
aaggggtaggttatgcttagagcatttttggcacccagggaagatgttagtatctgtaccaccctcttggtttgatcagaaagggcaatgcatgtacactrgtgagaagatggacagcagaaaagcatgaagaagatgaaaccaccccccagctcccggctccaagttttgaagtgagcactggtcacccagctatgtgtc

SEQ ID NO: 336671 - DNA, 201 bp, Homo sapiens
gttccttgtccccaccaggttcaacaacgaggatgtctgcacctgccctcaggcgtccgtgtctcagcagttcacctctgttccctggaactccttcaacygcgacgtactgaaggccctgtacagcttcgcgcccatctccatgcactgcaacaagtcctcagccgtccgcttccaggtgcgctgccatgggcccgggtg

SEQ ID NO: 336672 - DNA, 201 bp, Homo sapiens
ttcatgatttaatccccatctgaattttaaccaattgcaacaccctttttattattatcctctgatgtaatcagcctggagatacaggagccgtttgagtytggatggtgtaggggtgtcgagggaagaaggcagaggcaagaggagttgttttggcctcatcttaaaggaaacaagtagggagatggttgggccccctgg

SEQ ID NO: 336673 - DNA, 201 bp, Homo sapiens
tttagcatggcaaggccaggtgatgctgtctcagaaactgaaaaaaatacttccctctctctgttgcaccagcatctttcaccatatatagacacacacgmacacaatgcacacacacacgcacacacacatgcacacatgtacacatatgcacgcagaagcacacacatgcacacactttttctctctctctgaatggtg

SEQ ID NO: 336674 - DNA, 201 bp, Homo sapiens
ttttagcatggcaaggccaggtgatgctgtctcagaaactgaaaaaaatacttccctctctctgttgcaccagcatctttcaccatatatagacacacacrcacacaatgcacacacacacgcacacacacatgcacacatgtacacatatgcacgcagaagcacacacatgcacacactttttctctctctctgaatggt

SEQ ID NO: 336675 - DNA, 201 bp, Homo sapiens
gaggccaccagaagggccaggcctgaggtggccccctcgcctctgtgatgtctgaaatgcttcaagccttttttttattttccacagaaacgcaagtgccscaggaccttatgccctcagtgggtcctgattctgtttcccaactggagtcagggttttgtgtacaggtggtcccagggctggctggcggtggggccagtg

SEQ ID NO: 336676 - DNA, 201 bp, Homo sapiens
attttacagatgggcattcggaagcccatggaggagggctgctggggaggggagggtgggcggccggttcccgggctcagagggctgcctcctcacagtaygagcccatcgtcaccaagggcaatgaggcccttgtccaccacatggaagtcttccagtgcgcccccgagatggacagcgtcccccacttcagcgggccct

SEQ ID NO: 336677 - DNA, 201 bp, Homo sapiens
tgggttgtccctgaccctggagagctgtccacagtcctggttggaccaggtgtcctcttatcactggaacctcaggcacctgcctgagcaggggagcagcragtggtcttggcttccccatcactctgctcactcccctaccctcaaagggccttggagctcccacttccctgcctggaccaaagtgaccaacatcttgac

SEQ ID NO: 336678 - DNA, 201 bp, Homo sapiens
acactctctcccacttccctaaagcgcccactggtgaagcgtgggcccatgtaaaaggcaccttggccagggctcatggggaagagcggcttccggccagrcagcactcactgccccttgcagggccttggggccttcgaccccgctgaccgctgactgtgagaacgcctctctccagcctcaggaatacagacccgcctc

SEQ ID NO: 336679 - DNA, 201 bp, Homo sapiens
  misc_feature (1)...(201): n = A,T,C or G
tgctacattaaggagcttccaaagggcttctctcggcaccacattatcaaggtacgtgcgggtccagggccgaggtcctcgcccagccctgccttcctccngggcctgggttgtccctgaccctggagagctgtccacagtcctggttggaccaggtgtcctcttatcactggaacctcaggcacctgcctgagcagggga

SEQ ID NO: 336680 - DNA, 201 bp, Homo sapiens
ccagccctgtggtcttgtgtggagtcttcagttcaggctccatcctcagtttcttaatctgtgaaatagggctgatgattctcactgtgcaaaacttccaygaaaggggtaggttatgcttagagcatttttggcacccagggaagatgttagtatctgtaccaccctcttggtttgatcagaaagggcaatgcatgtaca

SEQ ID NO: 336681 - DNA, 201 bp, Homo sapiens
ttggagggttgggaatatgattctcacacaagcgtgaatgttggagggaagggcaggtgtaaacaactctggccatctgtttgagcctgcaatccattaayagatgccaaatagacaaatacggaatctaagaaaacagaacagctggctgtttgccagatgaggaaactaaggcccggagacggggagtggatgtaccca

SEQ ID NO: 336682 - DNA, 201 bp, Homo sapiens
tcctcagtttcttaatctgtgaaatagggctgatgattctcactgtgcaaaacttccatgaaaggggtaggttatgcttagagcatttttggcacccaggkaagatgttagtatctgtaccaccctcttggtttgatcagaaagggcaatgcatgtacactggtgagaagatggacagcagaaaagcatgaagaagatgaa

SEQ ID NO: 336683 - DNA, 201 bp, Homo sapiens
ctctggacctcactttgcccatctgtaaaatggagatgggaactagatgatctgtatggcctgaccaactctgggagttcatgggagccataaaacattgyaaaagccataggcttcttatgctgctctaagagccccccaacctcttagggaaagcaacccaccttgcccttgaagacaaaactcttttaactctagcac

SEQ ID NO: 336684 - DNA, 201 bp, Homo sapiens
tatatctttttttttcattgttgtttgtttttttacttaaacttcatcagaagcctcttccctgtgaattaaaaccccttgtcaatttcacactccttgcygcctgacatccctttcctgtacataacccagggggcagagcctcctgctgcacagcccctccagaccaccccgccatgtccgccatgtccaccatgtcca

SEQ ID NO: 336685 - DNA, 201 bp, Homo sapiens
ccaccctgttcccaactctcccctttctgaggctccgcaactctcctgcctgcatgaatgtgggcagcattggtctgaggcattgttcccagtcttgaggwggccttgggagcctcaggcatcttcttaagaagctcagtgtcccgcccgccaggcccgggaatgcccatggctaacagaacctgtgacctgctggcaagt

SEQ ID NO: 336686 - DNA, 201 bp, Homo sapiens
ctgcatgaatgtgggcagcattggtctgaggcattgttcccagtcttgaggaggccttgggagcctcaggcatcttcttaagaagctcagtgtcccgcccrccaggcccgggaatgcccatggctaacagaacctgtgacctgctggcaagtgacagccctggttcctggctgcagaggaggaaccaactccactgtcggg

SEQ ID NO: 336687 - DNA, 201 bp, Homo sapiens
ctgaccctgcttttcaagaggccctttggcacctgcgaccccaaggattacctcattgaagtaaggggtggccgcgagtacccaggagggcgtgggctgcktgtatcatgctgccatcctgtgccaatgtcatagtacctttcctgtccctgataagtctggggcctgggcctggccagctatgacagagagaaagccaag

SEQ ID NO: 336688 - DNA, 201 bp, Homo sapiens
ggtcttgtgttccttggctcaagctgttttcctgcctcagcctcccaagtagctgggattataggtatgcaccacagcgcctgatttatgttattgttttytgtgtttttaaatagtctagtggtcttttttttcttaacaacttttttttttttttgagacagagtcttgcccaggctggagtgcagtggtgtgatctca

SEQ ID NO: 336689 - DNA, 201 bp, Homo sapiens
tccaattccctggttcaagcgattctcctgcctcagcctcccaagtagctggaattacaggcatgcgccaccacgcccagctaatttttgtatttttggtrgagacagggtttcaccatgttggccaggatggtcttgatctcctgacctcatgatccacctgcctcaacctcccaaagtgctgggattacagatgtgagc

SEQ ID NO: 336690 - DNA, 201 bp, Homo sapiens
cccacaggtagtttttcaatccttccctcctttctctcctctctagtagtccccagtatctgttgttgctatctttatgttcatgggtacccaatgtttarccctcacttgtaagtgagaacatgcagtatttggttttctgttcctatgttaactcacttaggataatggcttccagctgcatccatgctgcaaaggaca

SEQ ID NO: 336691 - DNA, 201 bp, Homo sapiens
ccatgcccgactaattttgtttattttttgtagagatggggcctcgctgtgttgttcaggctggtcttgaacttgtgaactcaagcagtcttcccacctcrgactcccaaagtgctgggattacaggcatgacccaccacatccagccattgatgtgttttacttttttacgttaacaatctttagtaatattctccatac

SEQ ID NO: 336692 - DNA, 201 bp, Homo sapiens
cgtaggttctcccctcacatttgtaaacatggttgcagtagttccagacttcacagcagcatcccacactgttcaaggaaagacattgttcaggctactcytgaagaataaggaagcatctgtttcccagaagacatctactggtttcttgttggctctgattgtttaatgtgcccattagcttgaacaagttaagaacca

SEQ ID NO: 336693 - DNA, 201 bp, Homo sapiens
tggtcatggagaagctgtgaaaccctgcccagagcaaagagtgctgggtgagaagaaggagtctagattgaggtgagggctttggaaaagcttctgctaaygggaacccatgctggtcttgtgtctgaacttagaatggctttcatttttgctggcaggaagactgtaagtggatgtgccagctaccttgatggaaaggga

SEQ ID NO: 336694 - DNA, 201 bp, Homo sapiens
tgtctatgctttctcataaattgtatatgtttttttctagtcagaagttaaaaccactctctagaattaacattgtgtatatatgtgtggtcatgatatayaatgagcatttaaaaaaattaaagccaattaaaggcctgggctcctagggagcacacatgcatatttctaagcgcctgtgtggggcattctttgcattag

SEQ ID NO: 336695 - DNA, 201 bp, Homo sapiens
aagccacccttcagaaatttgagcatctagggaagaggttaggcaatccaccagtcacctgtctttattggatgggagttgcaaaggtggaaagaatgccygtctatgctttctcataaattgtatatgtttttttctagtcagaagttaaaaccactctctagaattaacattgtgtatatatgtgtggtcatgatatat

SEQ ID NO: 336696 - DNA, 201 bp, Homo sapiens
tgccccttttgagccacttctgagtcatctcttttgcagcaaaaagccacccttcagaaatttgagcatctagggaagaggttaggcaatccaccagtcayctgtctttattggatgggagttgcaaaggtggaaagaatgcctgtctatgctttctcataaattgtatatgtttttttctagtcagaagttaaaaccact

SEQ ID NO: 336697 - DNA, 201 bp, Homo sapiens
caagctcctgggtctcactctgtcacccaggctggagtgcaatggtgcaatctcagcactgcaatctccgcctcccatgtttaagtaattctcttgcctcmgcctctccagtagctgggattacaggcgcgtgcccctatacccagctaatttttgcatttttagtagagactggtttttaccacgttgcccaggctggtc

SEQ ID NO: 336698 - DNA, 201 bp, Homo sapiens
ctcttggcctcaagcgatccacccacctcagcctccccaagtgctgggattattacaggcatgagcatggcgcccagccttcatcgggagattaatgcaawagaatcagaaaatgctttgttggagggggtggagtctccaggtgggagaggaataatgtagcaggtggatttttttaataaatcttcaccacttgtggac

SEQ ID NO: 336699 - DNA, 201 bp, Homo sapiens
tttttagtagagactggtttttaccacgttgcccaggctggtctcgaactcctggcctcaagcaatctgcccaccttggcttcccaaagtgctggattacmggcatgagccaccacgcctggcctggctttatttataatactgcacatccctgcacttagtctgaagtctgaaacatcttaagccctcagtattgattag

SEQ ID NO: 336700 - DNA, 201 bp, Homo sapiens
tcttcatggtctgtgaaagtgaccagagcatcaatgtcacatctaccttccaagcagcgaggttaaaaaaagaagaaagaaagaaagaaaaaaaaaaaaagacagacaaagagcacgtggcagctatctttcaaggaaggttctggaaaatcaaccttgtcacttggcttcatctcagtgggtacactaggtgtgaccata

SEQ ID NO: 336701 - DNA, 201 bp, Homo sapiens
catcagccacagtgcctggcccaaagtttctttcttttaaccagcaccttgggaagatcacccagacaaagtgcaaaataaagttctagagttaaaacctsagggctgtatttacagccaaacccttgtgataggaagcatatgtccagaaacacatcctaaatctcctttggaggcagggtagtgcagtggtataagaaa

SEQ ID NO: 336702 - DNA, 201 bp, Homo sapiens
ttcatggtctgtgaaagtgaccagagcatcaatgtcacatctaccttccaagcagcgaggttaaaaaaagaagaaagaaagaaagaaaaaaaaaaaaagacagacaaagagcacgtggcagctatctttcaaggaaggttctggaaaatcaaccttgtcacttggcttcatctcagtgggtacactaggtgtgaccataac

SEQ ID NO: 336703 - DNA, 201 bp, Homo sapiens
tttcactataaaacttggttttattaaaatacacttattttaactcatttcccaaactaagttcatgttttaaaatctcccacggctctctgtacagtcaccaggtattactggaattgctagtgtggttagacagttggatatttgctttttggggggcattgagtgttcttggtgaaggagctggaaaagtggaagggg

SEQ ID NO: 336704 - DNA, 201 bp, Homo sapiens
taattggctactatggagaatattactaaagatgattaatgttaaaaaagtgaaactcatcaatggctggacgtcgtgggtcatccttgtaatcccagcastttgggaggccgaggtgggaagactgcttgagtccacgagttcaagaccagcctggacaacacagtgagaccccccgcatctctacaaaaaataaacaaa

SEQ ID NO: 336705 - DNA, 201 bp, Homo sapiens
ttttgcatttttagtagagactggtttttaccacgttgcccaggctggtctcgaactcctggcctcaagcaatctgcccaccttggcttcccaaagtgctggattacaggcatgagccaccacgcctggcctggctttatttataatactgcacatccctgcacttagtctgaagtctgaaacatcttaagccctcagtat

SEQ ID NO: 336706 - DNA, 201 bp, Homo sapiens
gctggggttacatgcgtgagccatcacacccagcctatttttcacacctattatgcatgaattcatagagaataagtcccagcagctcaggctccttcccrctggttcccacaaagtgcgcttctctgggtggagcaggctggtacttcagtctaatccaggtacctttctctttggcttccttctttttctgatcatttt

SEQ ID NO: 336707 - DNA, 201 bp, Homo sapiens
acatcttaagccctcagtattgattagtgggatagctggctgactggtttgtcctttttttttttttttttttttttttgagacagagtcttgctctgtcrcccaggctggagtgcagtggcacgatcttggctcactgcaacctccacctcccaggttcacaccattcttctgcctcagcctcctgagtagctgggacta

SEQ ID NO: 336708 - DNA, 201 bp, Homo sapiens
tttgtcctttttttttttttttttttttttttgagacagagtcttgctctgtcgcccaggctggagtgcagtggcacgatcttggctcactgcaacctccrcctcccaggttcacaccattcttctgcctcagcctcctgagtagctgggactacaggcgcccgccaccacgcccagctaagtttttgtatttttagtaga

SEQ ID NO: 336709 - DNA, 201 bp, Homo sapiens
gtggcacgatcttggctcactgcaacctccacctcccaggttcacaccattcttctgcctcagcctcctgagtagctgggactacaggcgcccgccaccamgcccagctaagtttttgtatttttagtagagacggggtttcactgtgttagccaagatggtctcgatctcctgacctcgtgatccacctgcctcaacctc

SEQ ID NO: 336710 - DNA, 201 bp, Homo sapiens
ggcagggtagtgcagtggtataagaaagagcttgggaatctgactgcctacgtttctgcctgggtctcccacttggcagctctgaggccttgggaaaagcrcttctctctaagaatcatgtattgatacctgctgtctgggattatggttaggattaaatgaaatgatctggggagagtgcatggtgactagcactcagta

SEQ ID NO: 336711 - DNA, 201 bp, Homo sapiens
gaaacttgcccagagttagtaggctgtagagtcagagttgattaggtctacctgactccaaaaaaataaaacattccacaaaaaagtagcaaaacattccrtaccttaaaaaaactacaatgaagaaacaaccctacaacgatagactctcataaagacatgtgatctattagtactatttgttcttcttaaaaattatca

SEQ ID NO: 336712 - DNA, 201 bp, Homo sapiens
taggccgatttcttaaaagttaaggatttgcaagacacgggtagatttttctgatgaatacgctttcatttgttaaggtctttgtagtttcaaaacattgycactcatattacttaattggaaagggttctgtgaggtagccagatcggaaaggtaatttttatctctattttacatatggagtgactgaggtcgatgaag

SEQ ID NO: 336713 - DNA, 201 bp, Homo sapiens
gctgggattacaggtgtgagtcatcgtgtctggccaaaaaaaactttagattcacattcggtcagttaaaaatgtatgtcaaattgtaaatgatcacctckattggaaacgggatatttttactttatttctgctcctatgtgttttctaaatatcctatcatgaacatgttacttttatagtaagtagaaacttatttta

SEQ ID NO: 336714 - DNA, 201 bp, Homo sapiens
atgtccccagtccctcaccctccagcctcaggtagccacctaaaagtacagtttttaatcattgtttttctttccaattcaagcaggagaggtttgttgcrtttccgtcaacacaagctcactgtttatgctgtcatttgatgtgctgacttcagactgagccttttctgtgtgagaccctcaaactgctgccaacgtgac

SEQ ID NO: 336715 - DNA, 201 bp, Homo sapiens
ctgaagtctgaaacatcttaagccctcagtattgattagtgggatagctggctgactggtttgtcctttttttttttttttttttttttttgagacagagwcttgctctgtcgcccaggctggagtgcagtggcacgatcttggctcactgcaacctccacctcccaggttcacaccattcttctgcctcagcctcctgag

SEQ ID NO: 336716 - DNA, 201 bp, Homo sapiens
cggtcttcctctgtttccttctccctcccttctcttctccattgctatagaaaaaatagcaggagggcagcattcaaggctgccctgtggcttattagccmtgtggccttgggcaagtcacgtatttagctgttctgtgccccggtgttcttatccacaaaattaagatggaagaccagatgaacaccatggtccctacca

SEQ ID NO: 336717 - DNA, 201 bp, Homo sapiens
ggattggacgtggcagcacccttctcctgggctggagtgtagaatcccctgggactcctccccattccttgtaccacctgcctcccaaaggcagaggcctrttgtgctccctttgcaccacctcttactttgattcctttttcctttttcattctgaccaccactactccggtcttcctctgtttccttctccctcccttc

SEQ ID NO: 336718 - DNA, 201 bp, Homo sapiens
cacagctggtcagttgcagatgtgcaacccagaccttcaaacctatattttttctctttggttctggtgttttttccacttcaccatgttgaaaatgcccyaaagggggaaagggaggaatgtgtatgtgttagaggtggatggggaagaggagaaacagtaggtccagaggaataggttttaattaaaagtcaggcggcc

SEQ ID NO: 336719 - DNA, 201 bp, Homo sapiens
cagcacccctcctccttttacccagaacaaattaatcagccatggagttctgtactgaaagttaaaaatgagggtggatggagcatttgtcttaccttttwaatttgcactttatttttctgaaatggcttttaaaaccagccatgcagagatggaagttcacaaacaggctgccaaaggaggagaactacctttaaattg

SEQ ID NO: 336720 - DNA, 201 bp, Homo sapiens
tctgtcagtttaggtgtctgctggtcccagtcatgcatctttacctccccctgcacccagcacccctcctccttttacccagaacaaattaatcagccatrgagttctgtactgaaagttaaaaatgagggtggatggagcatttgtcttaccttttaaatttgcactttatttttctgaaatggcttttaaaaccagcca

SEQ ID NO: 336721 - DNA, 201 bp, Homo sapiens
cctcctccccgggtaaggcccactaagcctcagagctccgccctggctaggctttctttatatatatatttctctctatatatatttctctctatatatatttctctctatatatatttctctctatatatatttctctctatatatatttctatgtatatatttctatatatatatttctatgtatatatttctatatat

SEQ ID NO: 336722 - DNA, 201 bp, Homo sapiens
cctccccgggtaaggcccactaagcctcagagctccgccctggctaggctttctttatatatatatttctctctatatatatttctctctatatatatttctctctatatatatttctctctatatatatttctctctatatatatttctatgtatatatttctatatatatatttctatgtatatatttctatatatata

SEQ ID NO: 336723 - DNA, 201 bp, Homo sapiens
ccttaactctcccgtaatactctctaggggaggggaggtcttgttgcctaggactgaagggagctgggcagctggaatgacatgctgattgtggctaattyagagcatgagcttctctccaagctgggaggagggtcgtggatgttgttgctattatctctggttgcagctcctttatcctggttctgtcagtttaggtgt

SEQ ID NO: 336724 - DNA, 201 bp, Homo sapiens
tgaggccactctccagccctacctgctccacagcactttctcttgccgatttactgagcatgattgtggaggaccataatcatgatgccaactacaccacygcataaatgcttatgcagcatattgcatgtatccttaactctcccgtaatactctctaggggaggggaggtcttgttgcctaggactgaagggagctggg

SEQ ID NO: 336725 - DNA, 201 bp, Homo sapiens
tttgttcttcttaaaaattatcattataaggttctgtccagctaattttcaggattgcctttcaagactctattgattctgccaagctcactttgagctatgtgtgtgtgtgtatttaaaagcctgggccggcgcggtggctcacgcctgtaatcccagcactttgggaggccgaggtgggtggatcatgaggttaggagt

SEQ ID NO: 336726 - DNA, 201 bp, Homo sapiens
ttgttcttcttaaaaattatcattataaggttctgtccagctaattttcaggattgcctttcaagactctattgattctgccaagctcactttgagctatgtgtgtgtgtgtatttaaaagcctgggccggcgcggtggctcacgcctgtaatcccagcactttgggaggccgaggtgggtggatcatgaggttaggagtt

SEQ ID NO: 336727 - DNA, 201 bp, Homo sapiens
cctgtaaatttgatttggaaaaacaacaaaagcttctcaggttctttcaaagatgaaacagtttcttttttctttttttgtttttgttgttgttgagacaragtcagctctgttacccaggctagagtgcaatggcaccatcttggctcactgcaacctccatctgctgggttctagcgattctcatgcctcagccttctg

SEQ ID NO: 336728 - DNA, 201 bp, Homo sapiens
atcccatgcctctttgatttggcggtttgttctctcctaacttcttggcatccttgtagggcatagacgagggccccgaggggctgaagctcatttctgayatcatccgtgagaagatgggtattgacatcagtgtgctgatgggagccaacattgccaatgaggtggctgcagagaagttctgtgagaccaccatcggta

SEQ ID NO: 336729 - DNA, 201 bp, Homo sapiens
gagacctttgttcacttgtttatctgctgaccttccctccactattgtcctgtgaccctgccaaatccccctctgcgagaaacacccaagaatgatcaatwaaaaaaaaaaaaaatgtaagggaaattcctagaatcctgaaacaaataggggactgattgccagagtcgaaagaattgagttgtgaagcttatgctacac

SEQ ID NO: 336730 - DNA, 201 bp, Homo sapiens
aatcaaacgctttttctctcccgcccaagtgagtttatgtttttcttttccacgatttcttttgtaggggttcagctgttgcaaaaataattggtaataaygtcaagaaacttcagaaatttgcctccacagtcaagatgtgggtctttgaagaaacagtgaatggcagaaaactgacagacatcataaataatgaccatg

SEQ ID NO: 336731 - DNA, 201 bp, Homo sapiens
agagatggggcctcgctgtgttgttcaggctggtcttgaacttgtgaactcaagcagtcttcccacctcagactcccaaagtgctgggattacaggcatgwcccaccacatccagccattgatgtgttttacttttttacgttaacaatctttagtaatattctccatactagccaatttacaaaatgtacattatctttt

SEQ ID NO: 336732 - DNA, 201 bp, Homo sapiens
agatggtaaccacttaatggcactgcagcgagacattctgcactcgctcaggaccatgagagttgaaaagggcatgagtgattcagtgtcatttggtttcrtgtgtatccctagtacccatttctcactttgggaagcactggattcgatcatagacctggaaggaaccttaaagattacctgacccccccatcattttgt

SEQ ID NO: 336733 - DNA, 201 bp, Homo sapiens
agtggttgaagttctctgccttcctgcccacttgaaatgtggctattcggactacatttaaatgttaactaattaaaatgtaaatactatgtgtagctacrtatgcagtggagctctacatacttattttctccttgctttttcatgtaactgtgtcttgaagccctttccatatctatacataaagaacatcttcattct

SEQ ID NO: 336734 - DNA, 201 bp, Homo sapiens
gcccactaagcctcagagctccgccctggctaggctttctttatatatatatttctctctatatatatttctctctatatatatttctctctatatatatwtctctctatatatatttctctctatatatatttctatgtatatatttctatatatatatttctatgtatatatttctatatatatatttctatatatata

SEQ ID NO: 336735 - DNA, 201 bp, Homo sapiens
ccactaagcctcagagctccgccctggctaggctttctttatatatatatttctctctatatatatttctctctatatatatttctctctatatatatttctctctatatatatttctctctatatatatttctatgtatatatttctatatatatatttctatgtatatatttctatatatatatttctatatatatatt

SEQ ID NO: 336736 - DNA, 201 bp, Homo sapiens
actaagcctcagagctccgccctggctaggctttctttatatatatatttctctctatatatatttctctctatatatatttctctctatatatatttctctctatatatatttctctctatatatatttctatgtatatatttctatatatatatttctatgtatatatttctatatatatatttctatatatatatttc

SEQ ID NO: 336737 - DNA, 201 bp, Homo sapiens
caaacacacttgccttccttgtctatctgtgcaatgctctgcacatagtaggcatctgataaatggtcagtgagtgaaaccttgtggacaggcaaggtttsatataagaggagaaacggtcttctctgccttttggttgcaggttgccatgtcaaatcttagcgaggctgtgcaggatgcagacctgctggtgtttgtcat

SEQ ID NO: 336738 - DNA, 201 bp, Homo sapiens
tatatatttctatgtatatatttctatatatatatttctatatatatatttctatatatatttctatatatattatatatatttctatatatataatatawatatttctatatatatttctatgtgtatatttctatatatatatttatatatatatttctacatatatttctatatatatatttctatatatatatttct

SEQ ID NO: 336739 - DNA, 201 bp, Homo sapiens
tttaattatggaggtattttacatgattattatggaagatagagataatcaaaagaaagccattttaaatttttgataattttgttatatatccttttttwctatttgtatgaactattatgtttgtagtgaatcatatgctgtttaataattgctttattcgctgaatatgtaacaaaaacctttcagagtctgttaaca

SEQ ID NO: 336740 - DNA, 201 bp, Homo sapiens
acaggtgaatggcacaactctctttatagacttgaaaccccagggataatgacgtataacattgtctagggaccatccgatgtggtaaaatagtcaagaaragcaagggagcaatgcatacagcattcaggacagtggttcaccctggggagcaggggtagaaggaggatgaacttgagaggagacacacaggggacttca

SEQ ID NO: 336741 - DNA, 201 bp, Homo sapiens
aaggtatcatttatactcatcactacttggaaattgtggtaattgttagacctgccatgatatctttttctaattgcattaataaaacagtgcatatattmctttatcataaatttgttttttaaacaaatttcaacataattggattcctgggttattttaggtgttttgttttatgcatatgaaattctgagaatgagt

SEQ ID NO: 336742 - DNA, 201 bp, Homo sapiens
gcagagttttgctcttttgccgaggctggagtgcagtggtgtgatttcagctcaccgcaacctctgcctcccagtttcaagtgagtctctgtcctcagccycctgaggagctgggattacaggcacgcgccaccacgcccggctaatttttgtatttttagcagagacggtgttttaccatgttggtcaggctggtcttga

SEQ ID NO: 336743 - DNA, 201 bp, Homo sapiens
ccattagtgcccattcttggatatataccctaaagcatgtgtttttaaccagaactccatgaaccacctctgaaggtccacaggttgaatacaggaagttsatgcatttaaatgtggtggaaaaaaatccttgcattctaactcattttaacctctaagtgaaatgagcattctcttcatttatgaatgcagctcacagcc

SEQ ID NO: 336744 - DNA, 201 bp, Homo sapiens
aggaaaccaagactcaaagaggctaatgaacttgtccagggtcacacagctgagggctacggttcagattgattcctggtggacgcatccctgagcatgcygaatctgttgccttctagacagtgatgactttctgctctggacttgggtgagccagcatttccctacagttattcttggtgtagttggtgggggaagaag

SEQ ID NO: 336745 - DNA, 201 bp, Homo sapiens
gtcagtaggagaattagattaatgggtatttttctaataacctgtcctgctggcatagaataagaatttcacaggtacagctgcatagccttgatatctayagctattcttttgtgagggaggagggcatcagaattctaatcattgtgcagagcagtggctctcagccctggctgcacatcaagtcatcagggagcttta

SEQ ID NO: 336746 - DNA, 201 bp, Homo sapiens
aattgccaagtggaatggagtaactgctctgttacactttaaatcgtgtttctttttttgtttgtttgtttttgtttttcttgagacggagtctcgctctrtcgcccaggctagagtgcagtggcgcaatctcagctcaccgcaagcttcgcctcgcgggttcacgccattctcctgcctcagcctcccaggtagctggga

SEQ ID NO: 336747 - DNA, 201 bp, Homo sapiens
aatggtaccaatgtttgtttaaattttcctaactctaggcaggtgtggtggcatgtgcctgtagtcccagccactcaggaggctgagttggaaggatcacytgagcccaggaggtcgaggctgcagtgaattgtgactgtgccactgcactccagcctgggtgacagagtgagatcctgtatcaataaattaaataaataa

SEQ ID NO: 336748 - DNA, 201 bp, Homo sapiens
gtaaagaaggaagtaaaaatcaaatcactgacaatcctacatcctgaaataacctcagttaatgtttgttgtatacccttccaatgtttttagtgtgtacmtatgtgtatgggtcctttttaaaacaaaaactagatattagtgttcaagtagtttgattttgtgtgtgtgtgttttgtttgtttttgagacaaggtctcg

SEQ ID NO: 336749 - DNA, 201 bp, Homo sapiens
tgcatagcattacaggacttgtgaaatagtgtatactttaaggcctaagacttaagacaattcattatttcatgggtaatagaattttatacatctatgtraagacccaggactggccatcagcagacctgagtcctccaagttctgccttagctagtttttgacctttgctccgggggccttccttctgcctggaaggct

SEQ ID NO: 336750 - DNA, 201 bp, Homo sapiens
gttctgtccagctaattttcaggattgcctttcaagactctattgattctgccaagctcactttgagctatgtgtgtgtgtgtatttaaaagcctgggccrgcgcggtggctcacgcctgtaatcccagcactttgggaggccgaggtgggtggatcatgaggttaggagtttgagaccagcctgaccaacatggtaaaac

SEQ ID NO: 336751 - DNA, 201 bp, Homo sapiens
gacctctgtagtgagtgttacagctcataaaggtagtacagacccaaagagtgagcagcagcaagatttattgtgaagagcgaaagaacaaagcatccacrgagtagaaggagacctgagccggttgccaccactggctggggtggccagcttctattcctttatttggccctgcccacaacctgctgattggtccgtttt

SEQ ID NO: 336752 - DNA, 201 bp, Homo sapiens
gaagccgcggaccctcacggtgagtgttacagttcttaaagatggtgtgttcagagtttgttccttcagatgttcagatgtgttcggagtttcttccttcyagtgggttcgtggtctcgctgacttcaggagtgaagccacagaccttcccagtgagtgttacagctcttaaaggtggcgcgttcagagttgtttgttcct

SEQ ID NO: 336753 - DNA, 201 bp, Homo sapiens
attttatattatgatggaggatacttcatatccaaccagaaacaaatgtttcacagtaacaaatgttactatgggtgattaactgtgatctcttctccttrtatttattttgtgcctgcataaccttcagtttgagaaacactgtcctagatagtaaaacagtttctcattcttattgtttccggacttggttccttccgg

SEQ ID NO: 336754 - DNA, 201 bp, Homo sapiens
tctgccttggaagttggagtgagagttgataggatggactggagatgaactgggaagagacttagagttcccttgtgggctaagatgagaaagtttgtacrgctttttaaaaagtaatatttaatcacctgtttccttcatctcccccacctgtttggtatacaaatcatgagtggggctgggtgcagtggctcatgccta

SEQ ID NO: 336755 - DNA, 201 bp, Homo sapiens
aaatctgtggctttaaattttttgacttgcaactagctgacatacaattttatattatgatggaggatacttcatatccaaccagaaacaaatgtttcacrgtaacaaatgttactatgggtgattaactgtgatctcttctccttatatttattttgtgcctgcataaccttcagtttgagaaacactgtcctagatagt

SEQ ID NO: 336756 - DNA, 201 bp, Homo sapiens
  misc_feature (1)...(201): n = A,T,C or G
gtcttgagaataattgtgagaaaaagtagcaactgccctaacacatgaatttgcaagatgctctttactgcgttctctcatttgctcctcacgccaggaangtcatctaagaaacaaactgtttctcagttgaaagtccagaggggaaagctgacaggctcagctaggatcaagtgcccaccatggccccatcagcagctt

SEQ ID NO: 336757 - DNA, 201 bp, Homo sapiens
atcaatttgtcttgagaataattgtgagaaaaagtagcaactgccctaacacatgaatttgcaagatgctctttactgcgttctctcatttgctcctcacrccaggaaggtcatctaagaaacaaactgtttctcagttgaaagtccagaggggaaagctgacaggctcagctaggatcaagtgcccaccatggccccatc

SEQ ID NO: 336758 - DNA, 201 bp, Homo sapiens
tctcttatgggctgtaataaagattttttaaatgaaatcttatatgaagtacccatctactcaagttccttttaaattttatttgcatagcattacaggayttgtgaaatagtgtatactttaaggcctaagacttaagacaattcattatttcatgggtaatagaattttatacatctatgtaaagacccaggactggcc

SEQ ID NO: 336759 - DNA, 201 bp, Homo sapiens
aaggccggttgcggtggctcacacctgtaatcccagcactttgggaccgagcgcagtggctcatgcctgtaatcccagcactttgggaggctgaggggggyggatcacttgaggtcaggagctcgagaccaccctggccaacatggcaaaacctcatctctactaaaaaaagaaaaattagccgggtgtagtggtgcacac

SEQ ID NO: 336760 - DNA, 201 bp, Homo sapiens
tatatatatatttctatatatatatttctatatatatatatttctatatatatatatattttttttaggcagagttttgctcttttgccgaggctggagtkcagtggtgtgatttcagctcaccgcaacctctgcctcccagtttcaagtgagtctctgtcctcagcctcctgaggagctgggattacaggcacgcgccac

SEQ ID NO: 336761 - DNA, 201 bp, Homo sapiens
ctggagcagcaaggcacaggggacagagcgggctgcaaagccaggcaccaggggcacatccagactccatcttttaccagtgaggtgttctcagtgggccrctaaacctctctgagcctcagttgtgccagttgggaaataggaggataggtacatacttctgagtcatgggaatgatgatgaggcagtgtgtaactagcc

SEQ ID NO: 336762 - DNA, 201 bp, Homo sapiens
atggttcatgttgtgatggagggggaaatagggacacagtccagggggcatcagagagcaatttcaggaatctgaccagttggccaacagcctaagcctcrccacattgcatggcaacttcaataaaaccacttggccagctcacccaagggctggcctctgggcttcggcagtcagacccgctgcatgtccccaggtgtc

SEQ ID NO: 336763 - DNA, 201 bp, Homo sapiens
catatagaaaaagttcagggaaatttaataggatttcagcatgtttctatgtaaggcttaatgcatagttacaatgatctgattagtcaaggtggtctttytgagtggtgggggaggtatatttaacattccacacagcagatgtaaccatcattgggtcttggactgacgctatctggtgcgagttaggtacaggacaat

SEQ ID NO: 336764 - DNA, 201 bp, Homo sapiens
ggcccaacttgatagtgtcaacctaaaataatcaaaaaggtcagaatctagtttaaagagagtttaattaagtgcgaaggttaaaagtgagcctgccggcyggacacagtggctcacaactgtaatcccagcactttgggaggccgaggcaggcggatcacaaagagatcaagaccatgccagccaacatggtgaaaccct

SEQ ID NO: 336765 - DNA, 201 bp, Homo sapiens
ttttttgaaaaataatatttgttggagaggagaagtatcacaaataatacaaagaagaaaagaatagcctatgataccacctgcccaggttgtcatttacraaagtgatacagacacaggtttaaaaaaaaattcaagcaccatgagaaggtggaaaagtagaactaagattgtaatttcccacccatttccctcttccca

SEQ ID NO: 336766 - DNA, 201 bp, Homo sapiens
ctccatagtaaaaagaaggatggactgtagggtcctttctggcctcaaagaaattcatcaggtttttaggcccaacttgatagtgtcaacctaaaataatyaaaaaggtcagaatctagtttaaagagagtttaattaagtgcgaaggttaaaagtgagcctgccggccggacacagtggctcacaactgtaatcccagca

SEQ ID NO: 336767 - DNA, 201 bp, Homo sapiens
tgtaagtgagaacatgcagtatttggttttctgttcctatgttaactcacttaggataatggcttccagctgcatccatgctgcaaaggacatgattttctttttttttttttgagatggagtctcaccctgtcgccaggcttgagcgcagtggtgctatcttggctcactgcaacctccaattccctggttcaagcgatt

SEQ ID NO: 336768 - DNA, 201 bp, Homo sapiens
aatagtggttctccctgggtggtgagattattcataatttttttcatgtattgctcttatgagtgaaaaagtacatgttatttaaaccacaaaggaccacscttttgcccatggaaccagcccgggtcagctctggaagagatgggggcatggaatgtggagaatctagctgatggtgtattcttcctggacctccgcttc

SEQ ID NO: 336769 - DNA, 201 bp, Homo sapiens
tcgtgatctgcctgcctcggcctcccaaagtgctgggattacaggcgtaagccactgcgcccggcctaaatcgtgtttcttaaattgtggtcccaagaccacttgtgtcagaattaccactgaaactagacttgcttaatcatatcccctgagaatgagatttttttttctgaaggaactttagccttttgccaattttaa

SEQ ID NO: 336770 - DNA, 201 bp, Homo sapiens
aaggacttggtggaggctcgagcattcttactgcagtttcggtgttgaggaaaccgaggcggagagggctaaagggctcttgctgcccaggtcacgggcgkggcatgctctgcccttcaaggtgcccgtctcgcccccgcttctgataggtccactatcttaggcgcgtcgtatcaggaagaaaatccaagtttcaacagg

SEQ ID NO: 336771 - DNA, 201 bp, Homo sapiens
taacagattcatccagggatgaaaataaatgtctccaacatgttctgcatccacttggccgcccccgccttttgttgtcaccccctactccatctcatcartttgtcttgagaataattgtgagaaaaagtagcaactgccctaacacatgaatttgcaagatgctctttactgcgttctctcatttgctcctcacgccag

SEQ ID NO: 336772 - DNA, 201 bp, Homo sapiens
ctttctgctgagcattaacagttatttgtacacgttttatttttcctgtaaggtcagggctggtaaacgttttccatcagggccagacagaagaggccttrtggaccatatggtctctgttgcaattactcaaatctgcaaccatagacgatgtgtaaatgaatgggtatggctgggttcccgtaaaacattatttacaaa

SEQ ID NO: 336773 - DNA, 201 bp, Homo sapiens
gaaagacagacagacagatagatagatagatagatatgcaggagttgaaaaataggcaggcaggtagatagacagagagatagatatgcaggaattgaaadatagatagatagatagatagatagatagatagatagatagatagatagatagatagatagacagacagataagacccatgcctgactatgcttgtgtagt

SEQ ID NO: 336774 - DNA, 201 bp, Homo sapiens
agcattaacagttatttgtacacgttttatttttcctgtaaggtcagggctggtaaacgttttccatcagggccagacagaagaggccttgtggaccatayggtctctgttgcaattactcaaatctgcaaccatagacgatgtgtaaatgaatgggtatggctgggttcccgtaaaacattatttacaaaacaggcagtt

SEQ ID NO: 336775 - DNA, 201 bp, Homo sapiens
aagacagacagacagatagatagatagatagatatgcaggagttgaaaaataggcaggcaggtagatagacagagagatagatatgcaggaattgaaagatagatagatagatagatagatagatagatagatagatagatagatagatagatagatagacagacagataagacccatgcctgactatgcttgtgtagtgt

SEQ ID NO: 336776 - DNA, 201 bp, Homo sapiens
ccagacagaagaggccttgtggaccatatggtctctgttgcaattactcaaatctgcaaccatagacgatgtgtaaatgaatgggtatggctgggttcccrtaaaacattatttacaaaacaggcagttggcctagattgccagcccccttagcagattttcagcttctgaaaaggcaggctctgtgtctcatttgccttg

SEQ ID NO: 336777 - DNA, 201 bp, Homo sapiens
gagaatcacttgagcccaggaggcaaaggttgcagtgagccaagatggcaccattgcactccagcctgggtgacaggagggaaaccctatctcaaaaaaawatatataatataataatgactactattctaggaatgagtcgagagctcccagtgtcttaccttaacctttcatttcttaacctttacctcttgcttcatt

SEQ ID NO: 336778 - DNA, 201 bp, Homo sapiens
ggcaggtagatagacagagagatagatatgcaggaattgaaagatagatagatagatagatagatagatagatagatagatagatagatagatagatagayagacagacagataagacccatgcctgactatgcttgtgtagtgttacagaaagcagctgagacatggagagtgccagcagtgtggccgcaggtccccaac

SEQ ID NO: 336779 - DNA, 201 bp, Homo sapiens
actgctgaccccaaatatgggctctttgtcctagaaaggggaatatggaagccctgtctctcctttcgtcatctctttcacccaggtgtacaagagcagarcccggcattgagtattttgaagatggagccaatgtccctggtctgcccctgcctcggcatcccccaccacctctggcatccatacccgtggtgggtgctg

SEQ ID NO: 336780 - DNA, 201 bp, Homo sapiens
tagggttaagaatgttcacattgttcgtattgaaaacaatgaaaatattgaaaagaattagatctccagaattcttttcatcttgcaaatctgaaactctrtattcattaaacgacagttcctcaatccactctttccccagtccctggaaaccacgcttctactttctgtctctatgaatttgactactctaagtacctc

SEQ ID NO: 336781 - DNA, 201 bp, Homo sapiens
gcaggtagatagacagagagatagatatgcaggaattgaaagatagatagatagatagatagatagatagatagatagatagatagatagatagatagatagacagacagataagacccatgcctgactatgcttgtgtagtgttacagaaagcagctgagacatggagagtgccagcagtgtggccgcaggtccccaact

SEQ ID NO: 336782 - DNA, 201 bp, Homo sapiens
gtgtttgtcattccccaccagttcattcacagaatctgtgatgagatcactgggagagtgcccaagaaagcgctgggaatcaccctcatcaaggtaactcragtgcatgctgcccagggctagacattggttatcaggaaatttcatttcctcacactttcatctgcttgagatttggagctgaaggggaagttgtggcgg

SEQ ID NO: 336783 - DNA, 201 bp, Homo sapiens
acaagagcagagcccggcattgagtattttgaagatggagccaatgtccctggtctgcccctgcctcggcatcccccaccacctctggcatccatacccgyggtgggtgctgtaacggcatctgggctttgtcatctcctttgcagaacatcgtagctgtgggagctgggttctgcgacggcctccgctgtggagacaaca

SEQ ID NO: 336784 - DNA, 201 bp, Homo sapiens
tgggaaaatttggaaaagataggcaagtatgaagaacacaataacatttgcttgtaaacttaccaacaagaaaggatgtattcatgcaacaaatgtttgtkgtgcatctactatgtcaacacttcaatgtgcatgtgaatctcttggggattgtgttacagagcagattctgattcagcaggtctggggtagggcctgagg

SEQ ID NO: 336785 - DNA, 201 bp, Homo sapiens
caggtagatagacagagagatagatatgcaggaattgaaagatagatagatagatagatagatagatagatagatagatagatagatagatagatagatagacagacagataagacccatgcctgactatgcttgtgtagtgttacagaaagcagctgagacatggagagtgccagcagtgtggccgcaggtccccaacta

SEQ ID NO: 336786 - DNA, 201 bp, Homo sapiens
ttctcctaagctacttttttttttttgagacaggctcactctgtcacccaggctggagtgcagtggcatgatctcggctcacggcaacctccgcctccccrgctcaagtgatccttccacctcagcctcccaagtaggtgggacgaaaggtgcatgccaccatgcccagctaattttttgtatttttggtagaaacagggt

SEQ ID NO: 336787 - DNA, 201 bp, Homo sapiens
gtcatcccttctcctatagatatgacagatgattatagtttactattttcaaggcaattgatcttaaaattaattagaggattaattgttgaaaaaatcttatctttttttttctttgtatgtgaagaaaaatcttaggaaaatctaagctaaaaatctatcacctctaacttttacctgttaatcccagagcaacactta

SEQ ID NO: 336788 - DNA, 201 bp, Homo sapiens
catggctgaccaggtcatggatagccatttttgtacaggctgacagaggtgtggtccatcccaaactgctcctacttggctgctctgaaaacatattgaartaagtatcaactaaaatgagacttagggggcatctgtggatttcagttaaacctccatagcttctattttctggttggctaacaggccttgggacttgct

SEQ ID NO: 336789 - DNA, 201 bp, Homo sapiens
aggtagatagacagagagatagatatgcaggaattgaaagatagatagatagatagatagatagatagatagatagatagatagatagatagatagatagacagacagataagacccatgcctgactatgcttgtgtagtgttacagaaagcagctgagacatggagagtgccagcagtgtggccgcaggtccccaactat

SEQ ID NO: 336790 - DNA, 201 bp, Homo sapiens
attttttattaccttttcttctcctaagctacttttttttttttgagacaggctcactctgtcacccaggctggagtgcagtggcatgatctcggctcackgcaacctccgcctccccggctcaagtgatccttccacctcagcctcccaagtaggtgggacgaaaggtgcatgccaccatgcccagctaattttttgtat

SEQ ID NO: 336791 - DNA, 201 bp, Homo sapiens
catcccttctcctatagatatgacagatgattatagtttactattttcaaggcaattgatcttaaaattaattagaggattaattgttgaaaaaatcttatctttttttttctttgtatgtgaagaaaaatcttaggaaaatctaagctaaaaatctatcacctctaacttttacctgttaatcccagagcaacacttagg

SEQ ID NO: 336792 - DNA, 201 bp, Homo sapiens
ctttcagttgttatgtcaacagagaccaagtgccaggtggctgttagaatttgcactgcatggttctttccattatcaatagatgggcttgcagaatgtayttatctaaaaagtttgtgctaggatgtagaatatgcttgtttgaagcaccatggacagtttggttctctgccatccttgcttaagactggtggtccttaa

SEQ ID NO: 336793 - DNA, 201 bp, Homo sapiens
ggtagatagacagagagatagatatgcaggaattgaaagatagatagatagatagatagatagatagatagatagatagatagatagatagatagatagayagacagataagacccatgcctgactatgcttgtgtagtgttacagaaagcagctgagacatggagagtgccagcagtgtggccgcaggtccccaactatg

SEQ ID NO: 336794 - DNA, 201 bp, Homo sapiens
ttatggtaacctgcttaaaaggaactcttgtgagtttgagtaacatgattctgatcctcacaaccaggaccagcaatgatggcagataaatttcatctcargcactgactctagttgattaatggtggctgcagagagttttgtgttgagaaggattctggggaagagagtagctttgccaggaaagggtgctgtgaccta

SEQ ID NO: 336795 - DNA, 201 bp, Homo sapiens
aaacaacaaatcttatggtaacctgcttaaaaggaactcttgtgagtttgagtaacatgattctgatcctcacaaccaggaccagcaatgatggcagataratttcatctcaggcactgactctagttgattaatggtggctgcagagagttttgtgttgagaaggattctggggaagagagtagctttgccaggaaaggg

SEQ ID NO: 336796 - DNA, 201 bp, Homo sapiens
attctgcatgtgcaaacactttgacaactgtaatatgttatataaatgttagaaatgattatggataaatttgcattatcacatataattaagtgaccatscattcacatttgtcttcaactgtggtttatacttgtcccagtctaatttcagagcattctcaaaaggatcttgttttaaacaacaaatcttatggtaacc

SEQ ID NO: 336797 - DNA, 201 bp, Homo sapiens
gcctcggcctctcaaagtgctgggtttacagatgtgagccaccgtgcccggccaggttgaactttttaagttgggtttcttgagtggatccacccagtgasaggaagtgccttttgtagactgtactccatggttctccattgtgtgggtcgtctgttgaaattctgcatgtgcaaacactttgacaactgtaatatgtta

SEQ ID NO: 336798 - DNA, 201 bp, Homo sapiens
ggccggggccaggcgtgcgcagtggttcttgggagtggcgaagcgggtcctgccccgctgtcagctgcggcccccggcgccgggcgggggtggccgcgacyattggcggagaggcgaaaggggcggggccgccgccagccgctgcgggcaaggctgaacaggcggaggtgggcagccggccagggaagcacggtccaggcg

SEQ ID NO: 336799 - DNA, 201 bp, Homo sapiens
ggggtttcaccgtgttagccaggatggtctcgatctcctgacctcgtgatgtgcccgcctcggcctctcaaagtgctgggtttacagatgtgagccaccgygcccggccaggttgaactttttaagttgggtttcttgagtggatccacccagtgagaggaagtgccttttgtagactgtactccatggttctccattgtg

SEQ ID NO: 336800 - DNA, 201 bp, Homo sapiens
ggatgtattatatttgggttagaataacagattcatccagggatgaaaataaatgtctccaacatgttctgcatccacttggccgcccccgccttttgttrtcaccccctactccatctcatcaatttgtcttgagaataattgtgagaaaaagtagcaactgccctaacacatgaatttgcaagatgctctttactgcgt

SEQ ID NO: 336801 - DNA, 201 bp, Homo sapiens
ctcgctctgttgcccaggatggagtgcagtggtgagatctcagctcactacagcctccacctcctgggttcaagcgatgctcctgcctcaacctcctgagkagctgggaccacaggtacgtgccaccacgcccagctaattttttgtatttttagtagagatggggtttcaccatgttagccaggatggcttcaatctctt

SEQ ID NO: 336802 - DNA, 201 bp, Homo sapiens
ttttctctttggttctggtgttttttccacttcaccatgttgaaaatgccccaaagggggaaagggaggaatgtgtatgtgttagaggtggatggggaagrggagaaacagtaggtccagaggaataggttttaattaaaagtcaggcggccaggctccatatgaaccagggagtagggtgcataaatgcccatctgagca

SEQ ID NO: 336803 - DNA, 201 bp, Homo sapiens
gggacatctactatcccatgcctctttgatttggcggtttgttctctcctaacttcttggcatccttgtagggcatagacgagggccccgaggggctgaarctcatttctgacatcatccgtgagaagatgggtattgacatcagtgtgctgatgggagccaacattgccaatgaggtggctgcagagaagttctgtgaga

SEQ ID NO: 336804 - DNA, 201 bp, Homo sapiens; identical to SEQ ID NO: 70852

SEQ ID NO: 336805 - DNA, 201 bp, Homo sapiens
aacagagagagtatgccaaagggggttaaaacaaaataaaatatagtgttttaagtcctggtcctcctcctccatgccctgcctccccgccacccttgccaaaaaaattactgtataaattatatatagagaacaaaactaggccttaaggtactaggatcattttgttcctctccatatgtgaatttaattccacagtcc

SEQ ID NO: 336806 - DNA, 201 bp, Homo sapiens; identical to SEQ ID NO: 70853

SEQ ID NO: 336807 - DNA, 201 bp, Homo sapiens; identical to SEQ ID NO: 70854

SEQ ID NO: 336808 - DNA, 201 bp, Homo sapiens
cctagatgacctccttcatgtctggcagtgggcaggcttcagccagcgtgacaggggtgaccagcccacatgtctttcatccttcagcaggctagcttagkcttctccatatggtggttgggttctaacaagagtaagagaaggcaaaccttcatgaacttaataggcacttttcaagctgtagcacgaattgggccagat

SEQ ID NO: 336809 - DNA, 201 bp, Homo sapiens; identical to SEQ ID NO: 70855

SEQ ID NO: 336810 - DNA, 201 bp, Homo sapiens
acccagcctggctgggactcttggtcctagatgacctccttcatgtctggcagtgggcaggcttcagccagcgtgacaggggtgaccagcccacatgtctytcatccttcagcaggctagcttaggcttctccatatggtggttgggttctaacaagagtaagagaaggcaaaccttcatgaacttaataggcacttttca

SEQ ID NO: 336811 - DNA, 201 bp, Homo sapiens
aacaatgtgggctgactaacctggcagattttctgctgatctagcctaggctcactcatatggctgtggttggctggtgacttggttggacactctcaccyaccttttttttgttgttattttttgggagtctcactctgtcacccaggctggagtacagtggcatgatcacaatgcattgcagcctcaacctccaaggct

SEQ ID NO: 336812 - DNA, 201 bp, Homo sapiens; identical to SEQ ID NO: 70844

SEQ ID NO: 336813 - DNA, 201 bp, Homo sapiens
ggttgcaggtggacagtagtttctgggatcctcaccatctgtgtcaccattctcctttccctttcctcctccccaactgggtgatgtcaggaactaagctyactgtgccagaagtgtcctgggctcccataaggttatactggtgacactttgtagttattctgctttgaggctcagtctcttccacaattggaagaggag

SEQ ID NO: 336814 - DNA, 201 bp, Homo sapiens; identical to SEQ ID NO: 70845

SEQ ID NO: 336815 - DNA, 201 bp, Homo sapiens
atcccttctcctatagatatgacagatgattatagtttactattttcaaggcaattgatcttaaaattaattagaggattaattgttgaaaaaatcttatctttttttttctttgtatgtgaagaaaaatcttaggaaaatctaagctaaaaatctatcacctctaacttttacctgttaatcccagagcaacacttaggt

SEQ ID NO: 336816 - DNA, 201 bp, Homo sapiens; identical to SEQ ID NO: 70847

SEQ ID NO: 336817 - DNA, 201 bp, Homo sapiens
ttgcttttgccaggatcttctgcaaaggccaagtgtctacagccaccttcctagagagctgcggggtggccgacctgatcaccacctgttacggagggcgkaaccgcagggtggccgaggccttcgccagaactgggaaggtagcccctcacctgctctcccgcaccccctccttcctcacttgagactcctggcttgggg

SEQ ID NO: 336818 - DNA, 201 bp, Homo sapiens
tcctatccccatcctttattctctagccctcttcattccacatcaccccgtgggagagggcaagagagggctctgttctgtgggtctgtggggagtagacrgaaacttcaggaggcccaattggatgttttttttcatgtgaagtatctttgcgcctcggtcttctggtaagcaatagctgtatctaaatgaccaagtctg

SEQ ID NO: 336819 - DNA, 201 bp, Homo sapiens
aaatcttcctcgagaaaccttcagcagatatattatgtcttgctgcctaggactgtgttacttgaccaattctaggtgaaaggctaggaaggtgagtagtstcttccaaccttggggaaagggagaagcaggttggaaatggctttggatggccagtcatctgctaccacactgctttggggacatatacattgttcttgt

SEQ ID NO: 336820 - DNA, 201 bp, Homo sapiens
agtagctctcgtgaggctaaagccgaggatcttctgaggccaagagtttgaaatcaccctgggaaatgtagctgggagtttccaaaaaagaaaaaaaaaawttttttaattagcctggtatggtagtacatacctgtagtcccagctactcaggagactgctgtgggaggatcaccttgaggctaggagattgagcgaggc

SEQ ID NO: 336821 - DNA, 201 bp, Homo sapiens
gagtagctctcgtgaggctaaagccgaggatcttctgaggccaagagtttgaaatcaccctgggaaatgtagctgggagtttccaaaaaagaaaaaaaaawattttttaattagcctggtatggtagtacatacctgtagtcccagctactcaggagactgctgtgggaggatcaccttgaggctaggagattgagcgagg

SEQ ID NO: 336822 - DNA, 201 bp, Homo sapiens
ggtggaggctgcaatgagcagtgatcgcaccatggcactccagcctgggtgacagagcaagaccttgtctctaaaaatcaaaaaggagacatgagcactawgtgcagtgtggggtcctggattaggcagggagggttgctgtggaagacaatgcagaggtgattggtgaggtttgaatgtggattatatgttagataataa

SEQ ID NO: 336823 - DNA, 201 bp, Homo sapiens
gagccaatgtccctggtctgcccctgcctcggcatcccccaccacctctggcatccatacccgtggtgggtgctgtaacggcatctgggctttgtcatctsctttgcagaacatcgtagctgtgggagctgggttctgcgacggcctccgctgtggagacaacaccaaagcggccgtcatccgcctgggactcatggaaat

SEQ ID NO: 336824 - DNA, 201 bp, Homo sapiens
agttaaaaatgtatgtcaaattgtaaatgatcacctcgattggaaacgggatatttttactttatttctgctcctatgtgttttctaaatatcctatcatraacatgttacttttatagtaagtagaaacttattttaaagtgtattaggtgtgaaaattaagattagaggctgttattaatatccttgttgtctaacctt

SEQ ID NO: 336825 - DNA, 201 bp, Homo sapiens
atgttagccaggatggcttcaatctcttgacctcgtgatctgcccgcctcagcctcccaaagtgctgggattacaggtgtgagtcatcgtgtctggccaaraaaaactttagattcacattcggtcagttaaaaatgtatgtcaaattgtaaatgatcacctcgattggaaacgggatatttttactttatttctgctcct

SEQ ID NO: 336826 - DNA, 201 bp, Homo sapiens
attatgctactctactagtttggctggttgttcttattaagggaaaaaataatctgctgctggtagaggtttttctaagaatagttttgtctttgccctcaagagagagaagatgtgattaaagaaatgcactccactggccagtggcttgctggatttttgtaagtggaactgtacagtatgcactcttttgtgtccggc

SEQ ID NO: 336827 - DNA, 201 bp, Homo sapiens
ttatgctactctactagtttggctggttgttcttattaagggaaaaaataatctgctgctggtagaggtttttctaagaatagttttgtctttgccctcaagagagagaagatgtgattaaagaaatgcactccactggccagtggcttgctggatttttgtaagtggaactgtacagtatgcactcttttgtgtccggct

SEQ ID NO: 336828 - DNA, 201 bp, Homo sapiens
tttaatatagcctgtgaaattgttatgtaattacttatattttcccaaaaagattaactagtttgttccaactcaatcctatttgccaataatcctttccyagttcattctggaagactaaatcttaatctgcaatcccaatccctgatccaatcctggctaggactctagccctgtttgttgtaggaaagtttctagttg

SEQ ID NO: 336829 - DNA, 201 bp, Homo sapiens
tcatcccttctcctatagatatgacagatgattatagtttactattttcaaggcaattgatcttaaaattaattagaggattaattgttgaaaaaatcttatctttttttttctttgtatgtgaagaaaaatcttaggaaaatctaagctaaaaatctatcacctctaacttttacctgttaatcccagagcaacacttag

SEQ ID NO: 336830 - DNA, 201 bp, Homo sapiens
caaaatccaattttatattctccttctgagaaataaaatggaagcaaggccttaaaaatcatctcattcagtttcccaccaatgtagtcatcccttctcctatagatatgacagatgattatagtttactattttcaaggcaattgatcttaaaattaattagaggattaattgttgaaaaaatcttatctttttttttct

SEQ ID NO: 336831 - DNA, 201 bp, Homo sapiens
taagtcaacagttagtaggtggacttgaaacccagatccttttaaccccaaagaccatgtttccataaattcttaccattttcagtgtgaagcatactttyacatgaggataaatatcattttcataaaaatgttgagtatcctcccaacaaaatccaattttatattctccttctgagaaataaaatggaagcaaggcct

SEQ ID NO: 336832 - DNA, 201 bp, Homo sapiens
cttccttaagaggcataaatataataatttatcattttctgtgtgtcatgtacatgatgttatttcgtttaaacatgtgacaggcctgtggggtactattrttataaccctatgttagatgacataactaagatttagagaaaacttgcttaagtcaacagttagtaggtggacttgaaacccagatccttttaaccccaa

SEQ ID NO: 336833 - DNA, 201 bp, Homo sapiens
cagttcctaggaccaattcctcatcagctctgcctgcatcatttttagagaatttttccactttttcctttctatgttgactgcaatgagaggcataagcrgcaaccgcagtaagctctcacattattgctcaggaagagaagacactagggggccttcctatccccatcctttattctctagccctcttcattccacatc

SEQ ID NO: 336834 - DNA, 201 bp, Homo sapiens
ttctcttccacacacttcatatctcttgttaacatcccttccacagaatgcactttggaaatgatagttttaaaagttgggagtgctttcagctgcaagascaacacacagttataacagggaatatggaggtgaacattattaaagtgttggcccagtggctctggctctggattagaatctcagtgatcctgttggctt

SEQ ID NO: 336835 - DNA, 201 bp, Homo sapiens
tgtacataggcagtatagatgcttttactcttgtaagtaggagacatttttcaagttgtgtagccatgggacatctactatcccatgcctctttgatttgrcggtttgttctctcctaacttcttggcatccttgtagggcatagacgagggccccgaggggctgaagctcatttctgacatcatccgtgagaagatgggt

SEQ ID NO: 336836 - DNA, 201 bp, Homo sapiens
cctcttgcttcattcttccattctatctccttctcttccttaagaggcataaatataataatttatcattttctgtgtgtcatgtacatgatgttatttcrtttaaacatgtgacaggcctgtggggtactattattataaccctatgttagatgacataactaagatttagagaaaacttgcttaagtcaacagttagta

SEQ ID NO: 336837 - DNA, 201 bp, Homo sapiens
gtcatttttttaaatgaaatgttgtctttttcttcctttcacctctaactttatttagagagtcttccaaactgatctaattgtccttttagcattttatrtaatagaaaataatatttagatgggcagtgtagcctaatggttgatcattggcttcagagtccaaaactgtggttcaatttactcatatatagaatgggg

SEQ ID NO: 336838 - DNA, 201 bp, Homo sapiens
ttgagacagagtcagctctgttacccaggctagagtgcaatggcaccatcttggctcactgcaacctccatctgctgggttctagcgattctcatgcctcmgccttctgagtagctgggattacaggtgggcaccaccatgcccggctaagttttatatttttagtacagacagggttttgccgtgttggccaggttggtc

SEQ ID NO: 336839 - DNA, 201 bp, Homo sapiens
ggtctagactcccatgccctgcagtgaaggggccacagaggagctgtgagggagcacccaggcaccctcatgtggcttttctgagtacagcaacatagaarcactgctttggagctcagggcctgtccatacagtcctgcttggatggttctggttgcagagagctcctgctaaatctttcctgttgggtgaggtcagctc

SEQ ID NO: 336840 - DNA, 201 bp, Homo sapiens
gaggctagaggaggggccgtcatgcatccagctgagccctgctgtgttgcccactgccgcaggtgcagggagggacttcctaacctgcatgacttttcctraccctgtaaatttgatttggaaaaacaacaaaagcttctcaggttctttcaaagatgaaacagtttcttttttctttttttgtttttgttgttgttgaga

SEQ ID NO: 336841 - DNA, 201 bp, Homo sapiens
cccatccaacccacccctattcagaactggaaagagtacactcaagagtggatgattgcctctgagtattccgtcactcaggagatggggaagagctacayacgtctgttttctgaaaattatggtatttttagctccaaaagagtttaaagcagatttaaatgcacagtggataatgataactttcacatctgagcgatc

SEQ ID NO: 336842 - DNA, 201 bp, Homo sapiens
attgtggtcccaagaccacttgtgtcagaattaccactgaaactagacttgcttaatcatatcccctgagaatgagatttttttttctgaaggaactttarccttttgccaattttaatacagatcaccaagagatagacctacccttccagatctggttcttacctcaggaatgtcaagttgcttaagcaatgtttatac

SEQ ID NO: 336843 - DNA, 201 bp, Homo sapiens
cctcagccttccttgacatctcagccaggctgccttagacaggggccagcagcaaacaatatgtggcaccttgcctttagtaatcccaaaccctgcagacmgtctcctcttggcagctagcctcaggaggagtcggatggattgttggactgagagaaaacagtgagtactgacttgggttttggggaggcagttcttgct

SEQ ID NO: 336844 - DNA, 201 bp, Homo sapiens
tggctactgtattcgatagagcaaatataaaacatttctatcattgcagaaacttctattggacaacgctcttccagctaaggcagcttcatattggtgcsaccgactaggtgggccaagtgtgggcctgcctcagccttccttgacatctcagccaggctgccttagacaggggccagcagcaaacaatatgtggcacct

SEQ ID NO: 336845 - DNA, 201 bp, Homo sapiens
aaaattccatttcggagtcacagtaactacattttgaagactcagtggctgactaatggctactgtattcgatagagcaaatataaaacatttctatcatygcagaaacttctattggacaacgctcttccagctaaggcagcttcatattggtgcgaccgactaggtgggccaagtgtgggcctgcctcagccttccttg

SEQ ID NO: 336846 - DNA, 201 bp, Homo sapiens
ggatggggaagaggagaaacagtaggtccagaggaataggttttaattaaaagtcaggcggccaggctccatatgaaccagggagtagggtgcataaatgyccatctgagcaaggccagtgttgaaggggaaggagtgatcggagttcttgtgaaggccgtgggaagatgggtgggacacaggcaaacacatgagaacaaa

SEQ ID NO: 336847 - DNA, 201 bp, Homo sapiens
gccccaaagggggaaagggaggaatgtgtatgtgttagaggtggatggggaagaggagaaacagtaggtccagaggaataggttttaattaaaagtcaggyggccaggctccatatgaaccagggagtagggtgcataaatgcccatctgagcaaggccagtgttgaaggggaaggagtgatcggagttcttgtgaaggcc

SEQ ID NO: 336848 - DNA, 201 bp, Homo sapiens
cgggcacctgtctgcgcccccgttactgagcgcacagaagccacctgcttgccacgcctgggtgttttgcacaatatcctaagggcgtattccgttctccrcggcggatctcctgggtcaaggacttggtggaggctcgagcattcttactgcagtttcggtgttgaggaaaccgaggcggagagggctaaagggctcttg

SEQ ID NO: 336849 - DNA, 201 bp, Homo sapiens
gcattttgaccttaagccaaattctggtgctttcccagtcacaggcggtggtattccatgtgaaaacaactaagtttcaaatggcttggggctgatacacrtcacatcttgagtaggctcagtgtttgaatcagaatcaaaacacaagtcttctgaattttaatcaaacgctttttctctcccgcccaagtgagtttatgt

SEQ ID NO: 336850 - DNA, 201 bp, Homo sapiens
ttttaaatagtctagtggtcttttttttcttaacaacttttttttttttttgagacagagtcttgcccaggctggagtgcagtggtgtgatctcagcttaytgcaacctctgccttccaggttcaaggaattctcatgcctcagcctcccaagtagctgggattacaggtgcattccaccacacccagttaatttttgtat

SEQ ID NO: 336851 - DNA, 201 bp, Homo sapiens; identical to SEQ ID NO: 70850

SEQ ID NO: 336852 - DNA, 201 bp, Homo sapiens
aagccgcggaccctcacggtgagtgttacagttcttaaagatggtgtgttcagagtttgttccttcagatgttcagatgtgttcggagtttcttccttccrgtgggttcgtggtctcgctgacttcaggagtgaagccacagaccttcccagtgagtgttacagctcttaaaggtggcgcgttcagagttgtttgttcctc

SEQ ID NO: 336853 - DNA, 201 bp, Homo sapiens
cccattttcaggtgaatgataagactcagagaataaattacctgccccaagatcacacactaatgtagaagccaggaacaaatttgagtcttctgtttcckgaactagtaagccttttctactcttacacattatacattagatacattattctcacattgacgttatgaaaattttcatttcttttgaaaggggctttga

SEQ ID NO: 336854 - DNA, 201 bp, Homo sapiens
gggttttgccatgttggccaggctgtagctggccaacagatgtattacatctgtaatgtacgttttgtaattggctactatggagaatattactaaagatsattaatgttaaaaaagtgaaactcatcaatggctggacgtcgtgggtcatccttgtaatcccagcactttgggaggccgaggtgggaagactgcttgagt

SEQ ID NO: 336855 - DNA, 201 bp, Homo sapiens
tatgatgtaggggccaggggctggtttacccaacccagatgatgcaacagtgttgcacagagtcacctagacagcctggtggactgtttaaaaaggaagakaacagtttgcacaaactgacatagttctaacatttggaaaaggggaactcagctaaatgaaagaacagtaatgctacagagtagactgtgtttctaagta

SEQ ID NO: 336856 - DNA, 201 bp, Homo sapiens
tggcaagccaagagtgtgccttcccctgcccattcctcagtttgttcaccagcaacccaagtttccagctgcagatggctggattaaagtgacttgagggrggggctggtctgcaatgttcaggagcatgcttcatgttggaggcactgagcagtgggaggagacacgatgaggctgtaatatgatgtaggggccaggggc

SEQ ID NO: 336857 - DNA, 201 bp, Homo sapiens
caactctgtctcataaataaataaataaagttactacctattatccatgatttaaggtaataaattttaaaaggtacctttgagaaaatatgagattgctrtaaatcaagcccacctcttggatgggcattgcgttatttgcagccacaaaggaacccatagaccctaccttgtatctatggcaagccaagagtgtgcctt

SEQ ID NO: 336858 - DNA, 201 bp, Homo sapiens
tcactctgctcttgaaataattgatgctaggccgggcgtggtggctcatgcctgtaatcccaccactttgggaggccaaggtgggaggattgctttaggcygcaagttcgaggccagcctgcacagcatagcaagacccattctctaaaaaaaaaaaaaaagaaaaaaaacacttaaaaattaaacaaataaatgattctt

SEQ ID NO: 336859 - DNA, 201 bp, Homo sapiens
cactctgctcttgaaataattgatgctaggccgggcgtggtggctcatgcctgtaatcccaccactttgggaggccaaggtgggaggattgctttaggccrcaagttcgaggccagcctgcacagcatagcaagacccattctctaaaaaaaaaaaaaaagaaaaaaaacacttaaaaattaaacaaataaatgattcttt

SEQ ID NO: 336860 - DNA, 201 bp, Homo sapiens
tttaaagtgtattaggtgtgaaaattaagattagaggctgttattaatatccttgttgtctaacctttcaacaggcagcaaagtaatggagaacggccttytcttcaaagaacttctgcagactccaaattttcgaattaccgtggttgatgatgcagacactgttgaactctgtggtgcgcttaaggtaaagtcagcctc

SEQ ID NO: 336861 - DNA, 201 bp, Homo sapiens
taggtttgctccagggctttggctgtggtaaaccatgccgggatgcccagctttgggtctcatctgtagtcagggccactgctcgcccaaaagcacctttrtgtgagtgagagcaaggcctacataatctgacatgctagccactagacatatgtactatttatatttacattcaaattaattaaaattcttaaaaactaa

SEQ ID NO: 336862 - DNA, 201 bp, Homo sapiens
ccttcccagcctctggtaatcatcattctgctctctatctccatgagttcaattgtgttaatttttagctctcacatatgagatataacatgtaaaattcktccttccatgcctggcttattttacttaacataatgacctctccagttccatccatgttgttgtaaatgactgagtctcattcttttctttatggctaaa

SEQ ID NO: 336863 - DNA, 201 bp, Homo sapiens
tatttgcattaattgttttgcctttactgtttattgtaccttcaaggtaggtgagccaagagcagacaggcaaacgggactacaataactacactcctccrcccctattttttccataggttttcatttaaaattagaagtttcagtgttgattacataaagtgagttttcaagatgagtgttgtaacaggcactgaagct

SEQ ID NO: 336864 - DNA, 201 bp, Homo sapiens
gaaaccctttgccacctcaaaatttgttttgaagatataaaagccttaggttaattttaaggctgagatataatttttaattttttataattatgggtacrtaatagatttatctatttatgggttatatgtgatgttttggtacaggcatacaatgtgtagaagtcaaatccaggtaattggcatagtcatcacctcacg

SEQ ID NO: 336865 - DNA, 201 bp, Homo sapiens
tagccctctaccacctggaccccaagcaatggctaaatgttattttgaacattactagttttgtaggtgtgggtttgaagttgggggcgtttttatttatrtagaggtataagcatgttcttttgatatcttcagattatgttatataagtttgatgaaaacgctctgaaagatacatttatgtagccacagagtttaata

SEQ ID NO: 336866 - DNA, 201 bp, Homo sapiens
actgtcccagcttatgcccccagacaccagttgaaagtctgggcctctagaacttctgatagcccagcttaaattagggattcccatcaccccctcaaggtttttttttttttggatggagtctcgctctgtccacaggctggaatgcagtggtgtgacctcaggtcactgcaacctccacctcccgggttcaagtgattc

SEQ ID NO: 336867 - DNA, 201 bp, Homo sapiens
gatgatcaaatccaactgaatattgttcttatttagatttattttgtctataaaaagttcataataatgagattggaagtcttaagccatgccagttaagrgaattgggagatggagagctgaactttcagagtagactcagaattctataacccacaggatttttagtgtatgtgttggccccctgtttctattttctaa

SEQ ID NO: 336868 - DNA, 201 bp, Homo sapiens
ttctcattgagaaatgtgtgtttcatagtccagaagaattaactcctgcatagaagtagttatggattcttcatggtatcagttaaatgaatttaggagcytactacagtagtagtcgacaataagaaaaggatgtgttggccaggtgcagtggctcacgcctgtaatcccagcactttgggaggctgagttgggtggatc

SEQ ID NO: 336869 - DNA, 201 bp, Homo sapiens
cagtcaagttatttaggggtatccatcttgagtatttattatttctacgtgttgggaacatttcaagttctctcttttagctactttgaaatacatagtarattgttgctagctatggtcaccctactctgctatacaacattagaatttatgccttgtatctaacagtatttttgtacccattgaccaatctctcttcat

SEQ ID NO: 336870 - DNA, 201 bp, Homo sapiens
gagctgccgtgcctgttttttaactttttaatgacttaaatttaaatattatttttctattcttcctagctttattcattttatttcattattattattattttttttttttttgagacagagtctggctctgttgcctaggctggagtgcagtggtacgatctcggctcacggcaacctcggcctcctgggttcaagcta

SEQ ID NO: 336871 - DNA, 201 bp, Homo sapiens
aagtttaaaattcaagcagtgtccaactcccctttaaccttagcaccaagatttcaaaggattagaatttgagaaaggcctttgtatttggtagctgggattttttttttttttttttttttggtcactctagaaaaatatgaaattcatactactttggttgattcttgagagtattttaagaagaaagaataataaaat

SEQ ID NO: 336872 - DNA, 201 bp, Homo sapiens
cttgaattgtagctcccataattcccatgtgttgtgggaggaacccagtgggagataattgaatcatgggggtggtttatctcatactgttctcatggtgdtaagtctcacaagatctgatggttttataaggggaaatccttttctcttggttttcatttccctcttgcctgctgccatgtaagatgtgcctttcacctt

SEQ ID NO: 336873 - DNA, 201 bp, Homo sapiens
atcatgaggtcaggagttcaagactagcctggccaacatggtgaaaccctgtctctactaaactacaaaaattagctgggcatggtggtaggcacctgtawtcccagctgctcgagaggctggggcaggagaattgtttgagcccgggtggcagaggttgcagtgagccgagattgcgccactgcactccagactgggcaa

SEQ ID NO: 336874 - DNA, 201 bp, Homo sapiens
aaagctaatgttcataatgttcaaattctccactctacccaacttgtttcttttacttataattatccaggagtattttgatgatttctagtctgctttcwtagggtttacttctaaatgtatggaaagtagtatgatagagcaagtgttgctcttccttcatccagagtgtgtcaggatttaagttcaatttctcttaac

SEQ ID NO: 336875 - DNA, 201 bp, Homo sapiens
gaggctggggcaggagaattgtttgagcccgggtggcagaggttgcagtgagccgagattgcgccactgcactccagactgggcaacagagtgagactccrtctcacaaaaaaaaaaaaaaaaaaaaagagaaagaaataaattccaggcctacttctctcagaaatcacaattgatcatctgtgtcttacgtgagaggtc

SEQ ID NO: 336876 - DNA, 201 bp, Homo sapiens
cccatcactactctcttgaatttcattgttctctctcaggtgatcttttttactcgctattgtggttcctctccatagatgagacaagtaccagatacatytagtcaactatcttcagcattgatttttattggttttgattgcttatctaaactagtagagcaaattattttagtatgcatggtgagtgcctttaacatt

SEQ ID NO: 336877 - DNA, 201 bp, Homo sapiens
gctgaacccctcggcccgacccacgcgccgagggctaggataatgcgcctgcgcggccgtcacgtggtgagggctccgcgcaaagcgggttaaaagtcacraccgcggagagcccgcgagcgtcctgctggtcggtgcggcgctttccgcgtcctttaagacgagtttgaccgaggccgctccgcagttcccgcccctcgg

SEQ ID NO: 336878 - DNA, 201 bp, Homo sapiens
taagcctacttagtgaattttttattccatttattatgcttttcagctctaaaatttctagttcattcttatttctcacatgtataggagaatatgtatattctgtttctttatggaaattttgtgttatatcattatatttttctttaattttcttaatatagtattctttaattccttgaacatataacagctgtttta

SEQ ID NO: 336879 - DNA, 201 bp, Homo sapiens
gctggagtgcagtggcacgatctcagctcactgcagcttctgcctcctgggttcaagcaattctcctgcctcagccttctgagtagctgggattacaggcrcccgccaccacgcctggctaatttttgtatttttagtagagacggggtttcaccatgttggccaggctggtcttgtacacctgacctcatgatctgctgg

SEQ ID NO: 336880 - DNA, 201 bp, Homo sapiens
agatcgagaccatcctggccaacatggtgaaaccccatctctactaaaaatacaaaaattagctgggcttggtggcatgcacctgtagtcccagctactcwggaggccgaggcaggagagttgcttgaacctgggaggcggaggtcgcagtgagccgagatcatgccactgcactccagcctggcgacagaaaaagactct

SEQ ID NO: 336881 - DNA, 201 bp, Homo sapiens
ttaagcctacttagtgaattttttattccatttattatgcttttcagctctaaaatttctagttcattcttatttctcacatgtataggagaatatgtatmttctgtttctttatggaaattttgtgttatatcattatatttttctttaattttcttaatatagtattctttaattccttgaacatataacagctgtttt

SEQ ID NO: 336882 - DNA, 201 bp, Homo sapiens; identical to SEQ ID NO: 70870

SEQ ID NO: 336883 - DNA, 201 bp, Homo sapiens
caaaggtgatcacttctgtctgctcttctatgacaaaaagcagcaatcagtgatcagagtgcagaacctcagtacttggaggacaagcttcctcacatcarattgattctgcccgtgcaattattgtctaggtggggagctgatttctgttgcttcttctttcagtatcttcccagaatcctcacctgccttcctttttga

SEQ ID NO: 336884 - DNA, 201 bp, Homo sapiens
aataccttatgttgttttcattagtttctagaaactcttgaaatcaggtagcatgagtaatctaatgttatttctctttttcagaattaatttggcttttyttagctgtttgcatcatgtaaattttagaatcacattattaacttctttaacggaaaagccttctgggatgttgattggaagtgcattgaatgtataggt

SEQ ID NO: 336885 - DNA, 201 bp, Homo sapiens
attttaagttagcctcttcacatttgtgacatctcatttaaaagagtattgtgattcttttcagcaccaggaatatcttagatgattttagagaagcttayttttggctaaggcaaaatacagatgaacatgcacgagtaatgtcttggtgggattatggctatcagatagctggaatggctaatagaactacgttggtgg

SEQ ID NO: 336886 - DNA, 201 bp, Homo sapiens
aaagagtctacataggtaagtaatttgatttttgacatctgtcaactaagagatgttttgtattcattcattttattgaagagatatttctatttggtcawtattatgcatgaaaaggtaaaaataattttgtgttcattttgctgtttatattgataaggtcaggcatttttatataagtgctttgtcatcaacttttcc

SEQ ID NO: 336887 - DNA, 201 bp, Homo sapiens
caatccaagtacctttttttaaaaagtgataaaaacagattttattcaggaactaatgcaatagggaagagacatctaagtatggaactgggctcaattcygaatacaacgaaaatggaagatttgtagtcaaggagcagggatagggtcagtgggtggaaaacacggatgtaaggaaaggagtagggggattctggctaa

SEQ ID NO: 336888 - DNA, 201 bp, Homo sapiens; identical to SEQ ID NO: 70871

SEQ ID NO: 336889 - DNA, 201 bp, Homo sapiens
ttaatttcatccatgtttttccttccaaggttacattgcaccatggagtggcaggttttattcattgtgggatactgggtaagtacagttacattatttgrcatcatatttattgaaatactgcttttcctttgtttttatctgttttgtcagtgtttcactcagttcttgggcaacacttctaagtaccaaagatgctag

SEQ ID NO: 336890 - DNA, 201 bp, Homo sapiens
tcaaattctccactctacccaacttgtttcttttacttataattatccaggagtattttgatgatttctagtctgctttcatagggtttacttctaaatgkatggaaagtagtatgatagagcaagtgttgctcttccttcatccagagtgtgtcaggatttaagttcaatttctcttaacttaatggtcctaaaaactat

SEQ ID NO: 336891 - DNA, 201 bp, Homo sapiens
taacttaaggtgtgttggtttgtatgaaaaagaatttctggaaattgcaataaatttccatctgccagatttataaagactatggcttctatattaatacraagtaaatatcagcctagcctgctaggagcattcctttcaaactgagcacttcagatatcccaagctgagatttttccagaggccttctggctttggttt

SEQ ID NO: 336892 - DNA, 201 bp, Homo sapiens
ggggaaagagatgggattttccttagatcggtttacaatatttatggatcttctttgcagctttgccagtggatattttagaggttattggggttgggggaaactgaaagttcaaacacaaagggaagatggtattgcttgcaccacctatgctgctaatatgactcattgtgtagttcacaaggattagtcctccagtat

SEQ ID NO: 336893 - DNA, 201 bp, Homo sapiens
ccctcagattagttccttaccctggctttactatttattaaagatagtagaggcatttcctatattaaaactttttgaagtcaaaatggaactaatatacyattcttccctatgaagcagtcccttgccaagacttcttacttttacgtctcttcacagcctctcatgtcatccctttctttccatttccattgcttccac

SEQ ID NO: 336894 - DNA, 201 bp, Homo sapiens
ttctattaaatctaatttaatttgaacatttctccagtgcgtttggaaaagcatattggatttgtgggatcgtgttattttaatgatcaataaaaatgagraatacgttcttcataggttagtaagttcttatttaagcatttctcaaaattgctaaaatcttaatgtttatatttgctcattgtatgtttagattcctaa

SEQ ID NO: 336895 - DNA, 201 bp, Homo sapiens
tacggatggctagtggggcgccggggccatctgggttgagagagcggcgattgcggccgctgctgaggcggagactccccgccgccgcttcctccaccccsagtccgccggcctcgcggcgctgagggcgggagcgcgcagagctcttccctcctcctttttcttcctcctcctcctcctcctccgggtccccgcccagca

SEQ ID NO: 336896 - DNA, 201 bp, Homo sapiens
cacctgtagggtgtgaatattgtctatacaaacaatataagaaaaatagccaaagtttctaaaatctgaataacagcatgactacaaagtgatttttttctttttttttttttttttgaatagtatatcttaattttgtggcatcaagctctgataaatctacttttaagcgtccttctcttgctggatgaatagtcccaa

SEQ ID NO: 336897 - DNA, 201 bp, Homo sapiens
ctgtggatgtgtaggttttatttagtgaacactagttataatttctaaatgtggctaattaatcagttgttcagtagtatcaatttagaaacaattagatygtttgtgagacatttatataattccaggttggttttatagtgtggttttaagtatctagttcagtttcctgggaactttttccctccaacatattgtaag

SEQ ID NO: 336898 - DNA, 201 bp, Homo sapiens
actagcccttctgtacctaatcaatttttatactctctataagttttgagtgtttgagaaaatgttaacatttatctttattgttatatcttagtattcgkctgtgcacacgtgctctccgaaatgaaggatggaaaggttaatattattctcaagtgaccaaatcatgtttttcccctcaatttgtttacttttaaaact

SEQ ID NO: 336899 - DNA, 201 bp, Homo sapiens
tgagttttaatttattcatcaagtagatggctttttattgtgatttatgttggaggtcttctaaaaaataattttgaaattctgcaaaacttttatgcacwcttttctggtaagagaatccatattttcatcagattcttacagaccctcacccagaaagattaaaaaccctgcctttacctctattttctctaagatttt

SEQ ID NO: 336900 - DNA, 201 bp, Homo sapiens
tgtccaggcagaagtttgctggagaggtggggccctcaaagagaacctttgctagggcagtgtggaagggaaatgtgggcttgaagcccccatacaaagtycccactggggcactgccaagtggagctgtgagaagagagctaccgtcttccagacctcagaatggtagattcactgacagcttgcaccatgcgcctagaa

SEQ ID NO: 336901 - DNA, 201 bp, Homo sapiens
gttaccatgggctggaaataggacagaatgtggagtagtaagagcttagtgagtgtagggttttgttttggggtaatgaaaattctttaggactatagagkggtagtggttgcacaaccttatgcgtgtactcaatatccctgaatttgttctctttaaaatggttatgtcatgtgactttcacctcaatttttttaagaa

SEQ ID NO: 336902 - DNA, 201 bp, Homo sapiens
tcttcctaagagcagaaaattttgatttttatggaatgtatcagcttttttttcaatagatcttgctcttggtatcttctctaagagatctttgcctaccytaaatcacaaagattgtctcatgtatttacttatagaaattaaatagttttaggtttaacagtcaggtctgtcatctattttaagttgattatggtctgg

SEQ ID NO: 336903 - DNA, 201 bp, Homo sapiens
gttattttatttgtaacatctgtacactgatactatatagatagcaatatataactttcagaggtggtgtttctatagagtttattatcagattctcagtrgagtctgacttaatctccatcttcccagaatagttaagaatcactatcttactgttatatagcactttaaaatttatgaaatgcttttacttagatttct

SEQ ID NO: 336904 - DNA, 201 bp, Homo sapiens
gaatggatgttgtcactttaccaagtagtaatttgagacgcagagagatgtatatttagtgttgtgtacacaataatgaatagaatgtctatgtaattacrcagtcacctgtctttacacgtatgcattacaacatttcctaaactctaaatctttgataatacttacttaaccattgtaaaatggacttttaaaaacaac

SEQ ID NO: 336905 - DNA, 201 bp, Homo sapiens; identical to SEQ ID NO: 70874

SEQ ID NO: 336906 - DNA, 201 bp, Homo sapiens
tattggaattcagagccaacattctcatgtctggatctagataattctctgaattttacagagggcatattagttttagttttaccagtgtagaccaaacrgaaactatccagtataactggttaccttggaaggtatatttaaataagaaggggtagggagtaggtaccatttctacaaccaaacaagatttcttcatct

SEQ ID NO: 336907 - DNA, 201 bp, Homo sapiens
tctgcagtgagttgagtaaggagagtaacagttgtttttcatattatatctaaaatgtattttttggatgatatttgctgggaaccgtcattaaagttttwtgaacatactacctactttagttctgtacaaattattatgggcattatatattttgtgaataaagaaaagataatccaattattgagtacattaaaagta

SEQ ID NO: 336908 - DNA, 201 bp, Homo sapiens
tcactgaactattcaaggaatccagtcacaagaagagcagagagcttactaagtcatcatagtgcagtaaaccatgtgtgtgtttatagattttttaatcrgtaagaaacctgcattaatactatgtgttttgtttttttatagactaccaaaaggaagcgtggctacattaaaaataagctggtttttaagaaaggcaag

SEQ ID NO: 336909 - DNA, 201 bp, Homo sapiens
aacaaacttcatacctggcgagcacaaagaaattattattttgccaaagtatgttctgcagaccacatattccagaaattacacttctaagcaaaataatstttgataatttgaatttgggaaaaaaactgcttactacattctttgatactgatatgcaatacacattaccatgttacagtcttaagaagttgttcagtt

SEQ ID NO: 336910 - DNA, 201 bp, Homo sapiens
actagaacagcttgtttatggcattgtctatgttttctgcagtgagttgagtaaggagagtaacagttgtttttcatattatatctaaaatgtattttttrgatgatatttgctgggaaccgtcattaaagttttatgaacatactacctactttagttctgtacaaattattatgggcattatatattttgtgaataaag

SEQ ID NO: 336911 - DNA, 201 bp, Homo sapiens
tgatattttgattgtgctgaagagaaatgtgcttatctaaatagtctttttttcattaaatttagatttctgaaactaatatgtgagaaattagaaaataraattttagatcaaggacttctttctaacatatttattaacagtagcctcaaatccaatctttgcttgccatctcaccattagaactcatgcttttggaaa

SEQ ID NO: 336912 - DNA, 201 bp, Homo sapiens
actcaggtaagaaacaccactaacagtttagtggtgttcactgaactattcaaggaatccagtcacaagaagagcagagagcttactaagtcatcatagtkcagtaaaccatgtgtgtgtttatagattttttaatcagtaagaaacctgcattaatactatgtgttttgtttttttatagactaccaaaaggaagcgtgg

SEQ ID NO: 336913 - DNA, 201 bp, Homo sapiens
taatgggaatatagtatttgcataaccttttctaactttatttacataaaaagaagtataacaataacttaaaagtgtaaagagcactgtcaatgtaagctgcaatgcaatgccttatcagagagaaggtacttaaagattgctttggggaacagcaaacttcttcaatacttaaaatttcatttgaatttgagtcagact

SEQ ID NO: 336914 - DNA, 201 bp, Homo sapiens
tctcaaaattgctaaaatcttaatgtttatatttgctcattgtatgtttagattcctaaatatacttattttaaaaagtaaaaatatatatttaacttagmacttcttttcctataggtctctgcttggggtggttatgtatttatcatcaatcttattccactgcatgtatttgtgttgttactgatgcagagatacagc

SEQ ID NO: 336915 - DNA, 201 bp, Homo sapiens
aatgggaatatagtatttgcataaccttttctaactttatttacataaaaagaagtataacaataacttaaaagtgtaaagagcactgtcaatgtaagctgcaatgcaatgccttatcagagagaaggtacttaaagattgctttggggaacagcaaacttcttcaatacttaaaatttcatttgaatttgagtcagactt

SEQ ID NO: 336916 - DNA, 201 bp, Homo sapiens
agggaatgacaataatatacatctcaataagttgtcataaagatcaaattattaataacaaaggtatttaaggcataataaccactcataaaatgttaacratttattgattttgttgttttcattattctcttaggctgggggtttcttttctcaaggaccttccaatccagtggaggagacaaatctgtaaatcaatgc

SEQ ID NO: 336917 - DNA, 201 bp, Homo sapiens
atgggaatatagtatttgcataaccttttctaactttatttacataaaaagaagtataacaataacttaaaagtgtaaagagcactgtcaatgtaagctgcaatgcaatgccttatcagagagaaggtacttaaagattgctttggggaacagcaaacttcttcaatacttaaaatttcatttgaatttgagtcagacttt

SEQ ID NO: 336918 - DNA, 201 bp, Homo sapiens
gttactggaaagcctcatgcatttttttttttttttggaagaggaggtgtaaaaaagagaagcaaataagccagttatgccttcaatactttggtgaagcmctaagtatccaagtattttcagcatcactaagggctttattttattctaggaaaatgaattatagtgcctactacattcacaacccttgcacaattctca

SEQ ID NO: 336919 - DNA, 201 bp, Homo sapiens
tgggaatatagtatttgcataaccttttctaactttatttacataaaaagaagtataacaataacttaaaagtgtaaagagcactgtcaatgtaagctgcaatgcaatgccttatcagagagaaggtacttaaagattgctttggggaacagcaaacttcttcaatacttaaaatttcatttgaatttgagtcagactttt

SEQ ID NO: 336920 - DNA, 201 bp, Homo sapiens
aatctgtaaaaactgggtcagttttttggacaatgtgctgctgcttatcctatttctatatggtaagatttcatatttgagactacatgaagtctagtagstctctggaggttaaaacagttcttttctcctgaagtctgtaggatttttattttgtttaatgtaatctttcattactaccatcctctttccttctcctac

SEQ ID NO: 336921 - DNA, 201 bp, Homo sapiens
gggaatatagtatttgcataaccttttctaactttatttacataaaaagaagtataacaataacttaaaagtgtaaagagcactgtcaatgtaagctgcaatgcaatgccttatcagagagaaggtacttaaagattgctttggggaacagcaaacttcttcaatacttaaaatttcatttgaatttgagtcagacttttc

SEQ ID NO: 336922 - DNA, 201 bp, Homo sapiens
gtgaccctgtatatccgtcttccttcacttagcataatatttttgagaatgtcatccatgttgttgatgttttagtagtttgttactttttattgctgaakagtactccattatatggatgtactacaatttcttttccagtttttggcaatgatgaattaagtggctataaaatgtttgcttgtgggtctttgtttggac

SEQ ID NO: 336923 - DNA, 201 bp, Homo sapiens
gcaattctcctgcctcagcctccccagtagctgggactacaggtgcacgccaccacgcccagctaatttttgtatttttagtagagatggggtttcaccaygttggtcaggctagtcttgaactcctgacctcaggtgatccatccatctcagcctcccgaagtgctgggattacaggcataagtcatcatgcctggccct

SEQ ID NO: 336924 - DNA, 201 bp, Homo sapiens
ggaaatatatatagtgttaggtttcacttcttttaaggtttacccctgtggtgtggtttaaaaatctataggcctgggaattccgatcctagctgcagatygcatcccacaatgcgagaatgataaaataaaattggatatttgagaaacattgtgctttttcatttaaagaccaaagtcatttgaattcgatggcaggcc

SEQ ID NO: 336925 - DNA, 201 bp, Homo sapiens
agctgaggaaagagctggcattgctcagactcgccagtgttagccagccgatatcggtcaaggctgccccgctcgagggtccattatcccctttccccggyctcagctgtgcactccaggccataacagcacaagacctttccacaaccccagggtaagggtcagatgtggggtttccaaaagcttcaaaacttacccctc

SEQ ID NO: 336926 - DNA, 201 bp, Homo sapiens; identical to SEQ ID NO: 70879

SEQ ID NO: 336927 - DNA, 201 bp, Homo sapiens; identical to SEQ ID NO: 70882

SEQ ID NO: 336928 - DNA, 201 bp, Homo sapiens
ttactccaaggctctctggctgggtttctcggaaaccctgatgacaacaagacatcttaaacacaacatatattttttgttattattttttatttttgttycatgttaatccttcccttcagtctccaatggcaatgcagctgaagcaatgtttggacgttctttcttctctaatcatcgtttttcaggcatgtgtgtgct

SEQ ID NO: 336929 - DNA, 201 bp, Homo sapiens; identical to SEQ ID NO: 70884

SEQ ID NO: 336930 - DNA, 201 bp, Homo sapiens
gggaccgcgccaccttggccgtgagtacatgcacttgggggccggtgggggatgagccagcctcactgagggtcctgtccaccatggggtatgggaaaaamgatcacggtcctggttttgtgtggtcgtgggtctgttccatcctctgagacacggctctctggcaatacttgcaggtgttaatgcctctagactgaatcc

SEQ ID NO: 336931 - DNA, 201 bp, Homo sapiens
cacgttgggccatgaggtcctttgcatcctgtccttgcccatctcagcctcttgtttttaaaagttgttccaaaccttgaggcccggttgtaggggaggakatctcctttctggcctttgatttggaaaaatggtttttctgatgtcgggaacaagcagtagggtagccactgtttaaaggagggtgtcagccaggacacg

SEQ ID NO: 336932 - DNA, 201 bp, Homo sapiens; identical to SEQ ID NO: 70887

SEQ ID NO: 336933 - DNA, 201 bp, Homo sapiens
gtgcaggattgcagttctgatcattgcacactcctatgttaccccacataccccaaatccagaccatgaaaagcaagtgtcctccacaaaggcatcgttgrgcacatgggacagggtaagagggtggatctgggcctccaaagcccctgtgctctgtcgcagtggaacttccccctgctgatgctggtgtggaagctggca

SEQ ID NO: 336934 - DNA, 201 bp, Homo sapiens
tgcagcccactttaggtgttttgaaataaaagcaatcctcacactcagagacaggcctcgctttacatttggtgtcatgctttctgaagaggtgcatctgwctgtgaggtctacagagcaatgtcctaggactgtgttctctccccaacttccatctttaacaacctgacagtgcaaaagaaaagcaagctatgtccgaaa

SEQ ID NO: 336935 - DNA, 201 bp, Homo sapiens
ttgtgtcttgcagattgatcaaaagcagttcgacaaaatcttagagctgatcgagagtgggaagaaggaaggggccaagctggaatgcgggggctcagccrtggaagacaaggggctcttcatcaaacccactgtcttctcagaagtcacagacaacatgcggattgccaaagaggaggtacaagggggctgtggcaaggc

SEQ ID NO: 336936 - DNA, 201 bp, Homo sapiens; identical to SEQ ID NO: 70878

SEQ ID NO: 336937 - DNA, 201 bp, Homo sapiens
tgtttcatgttaatccttcccttcagtctccaatggcaatgcagctgaagcaatgtttggacgttctttcttctctaatcatcgtttttcaggcatgtgtrtgctctgggcatatgaaaaacatgtaaagagaaggaaatgcttgttcacagcatgcatttccattcagtcatgcctctcattgccattcttgcaattaat

SEQ ID NO: 336938 - DNA, 201 bp, Homo sapiens; identical to SEQ ID NO: 70883

SEQ ID NO: 336939 - DNA, 201 bp, Homo sapiens
actgggcatcccgtatttttatttgctaaatttggcaacctgagtagaatgtaaagagttgggagaagaaagactgtgaccacttcagacctgtgtcactyatggactaactttgctgcatggaaaagggagatagaagtgtaaatatgtcccaaacctccagaggatgagactagtctatctccccatctctcccctgct

SEQ ID NO: 336940 - DNA, 201 bp, Homo sapiens
ctgcacactgggctggcagcaggggatgagaagcccaggtcagctcccagggtgcccacggtcaactgcttctgggtcctgggtaaatccagcccggcccrggttccctgtggggatgtgaggcagccacggctctctcggcccaaatgtggatccgtggtggatgaagtccgttcttcttcaagtgctatcttgatttct

SEQ ID NO: 336941 - DNA, 201 bp, Homo sapiens
cacggtcaactgcttctgggtcctgggtaaatccagcccggcccgggttccctgtggggatgtgaggcagccacggctctctcggcccaaatgtggatccrtggtggatgaagtccgttcttcttcaagtgctatcttgatttcttcccaggccgggttccctccaggagtggtgaacattgtgccaggattcgggcccac

SEQ ID NO: 336942 - DNA, 201 bp, Homo sapiens
ggtgcatctgactgtgaggtctacagagcaatgtcctaggactgtgttctctccccaacttccatctttaacaacctgacagtgcaaaagaaaagcaagcyatgtccgaaacagacatcatcttgttattgcaggccctggagacgatggatacagggaagccatttcttcatgcttttttcatcgacctggagggctgta

SEQ ID NO: 336943 - DNA, 201 bp, Homo sapiens
ctgtcctatttatatacaaatgtagtcccttgtttgcacttcttccagcgggaacagactcaaacgcttcccctcaccttgggccttggttggggcctttktgtggctctcttttgagattcttaaagatgctgtgaagggatgggcctggcttccatccccaaacagatgttcttgaccagtctatgtggaattggggtc

SEQ ID NO: 336944 - DNA, 201 bp, Homo sapiens
tcttctctttctcttttgttcgaggagggcagctcccactgcagccaccccagagccagctaaccttcagagagcttcctgggaacacacaagcacacacractggccacacagcagaggccactgtgctacagatggaagatcagatgccagtgtgcgttccttcccagcacagctttaaatccgcctggcctccaaggg

SEQ ID NO: 336945 - DNA, 201 bp, Homo sapiens
ctgggcatcccgtatttttatttgctaaatttggcaacctgagtagaatgtaaagagttgggagaagaaagactgtgaccacttcagacctgtgtcactcrtggactaactttgctgcatggaaaagggagatagaagtgtaaatatgtcccaaacctccagaggatgagactagtctatctccccatctctcccctgctc

SEQ ID NO: 336946 - DNA, 201 bp, Homo sapiens
atactccaaggcgtctgcacttgtgagtgaagcctgtccattagccttcccccttatccctgtggctggcttcgccttcagcggacatcagtaattgttgrccatgaaacccctttgcagaaattgcatttcctccctctagtggcctgtttgcatttgagttctgtgagcccctgcttcatcacttgttacacctgcccc

SEQ ID NO: 336947 - DNA, 201 bp, Homo sapiens
agctaaccttcagagagcttcctgggaacacacaagcacacacgactggccacacagcagaggccactgtgctacagatggaagatcagatgccagtgtgygttccttcccagcacagctttaaatccgcctggcctccaaggggcccttcaaagagggtgcatgtctatgttttagcccaccaccctgcagcccacttta

SEQ ID NO: 336948 - DNA, 201 bp, Homo sapiens
cctcccccttggagttgataccaggaaggacctagaatcagcaattttcactgacagtctctattatctaacccacgaaatttcatctttctacaaatggscccctcttcctggctgcactttcctccccgcactaacttaactcttcttcctcagttattaatttctcgctgttaccaagtgatgacttgctggatggca

SEQ ID NO: 336949 - DNA, 201 bp, Homo sapiens
ttcaaagttttctgatttttaaaacaccggtttttattatctctcttatgaaaaataaaattcccccaaatctccttttctgaaaacatattctttttgartttagctgagtggcctgttgtcagatggaagttacgggaaatcggcatcaataggattcacttgtatgactgtcatcttcacctctgcctgagacacctt

SEQ ID NO: 336950 - DNA, 201 bp, Homo sapiens
tcttgggtgcatttccctaagggtgcatccacacagaaactcgagctccccttccttccttcccagtcagcccggccagtccacatgttccccgggtgagrgtagctccctcccagggtaagcgcttctctctgaggagcctctggtttcttcctgcaacgtaagccagcgtcaaccctcaagctgccaaactggcttttt

SEQ ID NO: 336951 - DNA, 201 bp, Homo sapiens
aaaagatccattcctttctcttcttagtcgggctgatatgaccggcaggcaggtccacagttgcttagaagcaaggtgggaacagctggtgatgagccaaktttccactttcctttggtgatgtggggcataattaagtcacactggtgagacttaggaatgtgaaaatcccaactgttaagaaacagtgcctaaaaatct

SEQ ID NO: 336952 - DNA, 201 bp, Homo sapiens
ctaaaatcattcctcagtcacccctgaactggctagtagcgagcatatgtggagcggtggtgagggcaggatagcctggttataggaaacctcagaatagraaagacctgggttcaaatccccactctgccacttactagctgtgtgactttggacaagttgtgaaacctctctgagatttatttcttcatgtaaaatgtc

SEQ ID NO: 336953 - DNA, 201 bp, Homo sapiens
gggccgagccggtgcgccgcagactagggcgcctcgggccagggagcgcggaggagccatggccaccgctaacggggccgtggaaaacgggcagccggacrggaagccgccggccctgccgcgccccatccgcaacctggaggtcaagttcaccaaggtgaggcgggcgcccctcccacccgacggccgcgggcccctgcg

SEQ ID NO: 336954 - DNA, 201 bp, Homo sapiens
gagtggcctgttgtcagatggaagttacgggaaatcggcatcaataggattcacttgtatgactgtcatcttcacctctgcctgagacaccttacagctcygtcctgcttccatgtcattctgttccttttgtaaaatgtgaaccaggtctacagctcaatgtagcttaatgctatacctctataaggtttgttgtatgct

SEQ ID NO: 336955 - DNA, 201 bp, Homo sapiens
gtctctgctcacctgcccagccagagtctgcctcctgtgcttggtccccaaccgactcagaccaggcttcctcactatgagcttcagaggtttttgtgggttttttttttttttaacattctatcaacttttaagttctggggtacatgtgcaggatgtgcaggtttgttacataggtaaacatgtgccatggtggtttgc

SEQ ID NO: 336956 - DNA, 201 bp, Homo sapiens
taaggagactcccccactcccataagagtgtaaatctttctctttcaactccactgttacactagacgggaactggttcccacacagcatttgtaagaggmgagctggatcccaggaggttagaccctggaggtggtattttggggcacataaaaggatgagtccctgccaagggctttctggggcaggtatttcagaggc

SEQ ID NO: 336957 - DNA, 201 bp, Homo sapiens
ttctggctgggcagccggggacctccgtgctgtcggaatgtgttttgtatattgtctgtcatgtctcttcctagttttttccaaaagccctctcttttaayatgacattaataagacaattagaacttagtgtaaactaacagtaaatagtacatatgtttcagtgcatggacttcgtatgttcttcttagtctgctcatg

SEQ ID NO: 336958 - DNA, 201 bp, Homo sapiens
tcagtaattgttgaccatgaaacccctttgcagaaattgcatttcctccctctagtggcctgtttgcatttgagttctgtgagcccctgcttcatcacttsttacacctgcccctccagggacaggcagccagggctggggtcaccagggtcccctcttgggccctccaacagcaacagtactggcaacagctgggatttg

SEQ ID NO: 336959 - DNA, 201 bp, Homo sapiens
gtcaccagggtcccctcttgggccctccaacagcaacagtactggcaacagctgggatttgctgagcacagactctgcagcaggctcggttgagctctctrtgcctgttccttcataccatcctcacgcccatccatgagatgggtccagctgttttcagatgagaaaatggcacaggaagctggtaagtgacagtcagaa

SEQ ID NO: 336960 - DNA, 201 bp, Homo sapiens
cagggtttgtgtggtcatttgtctcctttcatctgctgccttcaaccagctgggtcattagggctggggaacccagaccccacacagtcctcctcccagasgccagacacagcctcacgccacagcaaggactccagtccccgaagcaaatgtccctgggcgtagaagctgcagggcccccaatccctggtgtgtactgct

SEQ ID NO: 336961 - DNA, 201 bp, Homo sapiens
ccccaggctgtctggcgtgcgcgtctgtcgtgggccggtgctggggcactttagaggcacaggccaggccgagagccattgccttaactttccccaccttkggcttctcttgatttttgcttttacccatagcccccaactccagctgacaccgcacttagagaatttcctcatccgttttactttaagaagtagcaatta

SEQ ID NO: 336962 - DNA, 201 bp, Homo sapiens
gaaatatatatagtgttaggtttcacttcttttaaggtttacccctgtggtgtggtttaaaaatctataggcctgggaattccgatcctagctgcagattrcatcccacaatgcgagaatgataaaataaaattggatatttgagaaacattgtgctttttcatttaaagaccaaagtcatttgaattcgatggcaggcct

SEQ ID NO: 336963 - DNA, 201 bp, Homo sapiens
tgcgtcatctcacttcctggcaggtctctcttcctgtactgtaaggcaccagctgacatttcatggaggattattagatttaaacaatgtgttcctacggrctctccagggagtgtggagtttggatgtgtaggttttccacggggacccagcactgcctgcaggacaaacagggtctgccagatgacatatgcccagcag

SEQ ID NO: 336964 - DNA, 201 bp, Homo sapiens
tgcgggggctcagccatggaagacaaggggctcttcatcaaacccactgtcttctcagaagtcacagacaacatgcggattgccaaagaggaggtacaagrgggctgtggcaaggctacgacttgcggggcctttcaaacacgagtccttccctagggcccagggatcccagaaatccttgtgatctgagtgtttttttgt

SEQ ID NO: 336965 - DNA, 201 bp, Homo sapiens
gaagaaacttttttaccccgtcgttatttgtaagtctctttctgtggctcttttcttggcttatgcctgatgtctgagtcttgacttttgaggccagatayaccgatttcttccaagagaacagatagaggcagaatgggtgctgatttcatcagtgcatttatgccaccgctcaaagtccttctgaaagctcactaaagc

SEQ ID NO: 336966 - DNA, 201 bp, Homo sapiens
ggggcctcaggtaatccccctggtgtgtgtgaaaccatggtgcttgtctaggggctgaagcaggcagtcccatggcaaccgcctacagggtccctctccgygaaaggaatgctgacctgtcctgcccaggaggctttcttttctttagaaactgatcagaaacacaatcctgtcaggtcccgggggctcacgaaagggggc

SEQ ID NO: 336967 - DNA, 201 bp, Homo sapiens
tcaggcggagcgtggagtatgccaagaaacggcccgtgggagaccccttcgatgtcaaaacagaacaggggcctcaggtaatccccctggtgtgtgtgaamccatggtgcttgtctaggggctgaagcaggcagtcccatggcaaccgcctacagggtccctctccgtgaaaggaatgctgacctgtcctgcccaggaggc

SEQ ID NO: 336968 - DNA, 201 bp, Homo sapiens
attttgtaagaccctaaccccaggtgcttggctgctgctactgatggttaagtggggaggttgtttgttttcttttggttgtacaggatttcaaaatactrtatatagaaaccagacagtaaatgtattatggtccttttactttttatgtttttgagtcctatcagcaatctgaccacatacaaaaagtttacctctttc

SEQ ID NO: 336969 - DNA, 201 bp, Homo sapiens
ttttacccatagcccccaactccagctgacaccgcacttagagaatttcctcatccgttttactttaagaagtagcaattatctttctcaaagaattttartcaagcggagaaagttgcagggcactatgtgtggccttcagatttgggtctcttggcacttaattcccaatgtcggctgagcctctgatcacaagacatt

SEQ ID NO: 336970 - DNA, 201 bp, Homo sapiens
tgcaggtgttaatgcctctagactgaatccctttcattttgaagtcagacttttgtcctctgcagctcagcttcttgaccaagttgttgtctataggcagytgagctacatcagtggtctcagacttggggcactcacagattggtgaccatgagctgggccatatcctggtaccacctgtgtgtttatgtacttaacttt

SEQ ID NO: 336971 - DNA, 201 bp, Homo sapiens
cttttttgtataaacttccttttatttattttattttatttatttttttgagacagagtctccctctgtcacccaggctggagtgcagtggcgcgatctcrgctcactgcagcctctgcctcccaggttaaaatgattctcttgcctcagcctcctgagtagctgggactacaggtgcctgccaccatgcccggctaattt

SEQ ID NO: 336972 - DNA, 201 bp, Homo sapiens
tccatttcagagatgagaaaattgaggcacagagagatgaagtgacttgcccagggtcacacagctagcagatggccgagagggctccagtacctgtgcckgtggcccctgtgctgtactgcccctccaactttattttccattctgattctaaaagcagttcatgcccatctgcaaaatgtggatactagtctctgcctc

SEQ ID NO: 336973 - DNA, 201 bp, Homo sapiens
cagggtttcatcatgttggccaggtcttgaactcctggtctcgaactcctggcctcaggtgatctaccggccttggcctcccaaagtgctgggattacagstgtgagccactgcacccagccttaactcccttttaaacttaagtttaatctcatcctaagaaacaatattcatgaaatcacaggtttgatgtgctaattt

SEQ ID NO: 336974 - DNA, 201 bp, Homo sapiens
attatgttttgtgatccccatattaaagattaatgaattgaggctcagagaggttgagcaataagcccagaatcatataaccaggaagcaggagaactttkgggtcagttctgtctcatttcaaagctaattcttattcctctacaccctgatttttctttttctttctttctttctttttttttttttttttttttttga

SEQ ID NO: 336975 - DNA, 201 bp, Homo sapiens
tcacctgagccctgcaagatttaaagaaaggaactataccaaggatgtgaacccaaaagctgtggcctccccatgtccactctgtgctaacgtctgcttcyctcatgccccctaggctggcctcactgcctgacagctggtccccagctgtgcactctgaggccagcttcaggcccttggtgttcttcccactggtcctct

SEQ ID NO: 336976 - DNA, 201 bp, Homo sapiens; identical to SEQ ID NO: 70892

SEQ ID NO: 336977 - DNA, 201 bp, Homo sapiens
ttctcggctcagtcactttccacagccacactggccagcctggccgagaaggaagagcctacatcttctctttctcttttgttcgaggagggcagctcccwctgcagccaccccagagccagctaaccttcagagagcttcctgggaacacacaagcacacacgactggccacacagcagaggccactgtgctacagatgg

SEQ ID NO: 336978 - DNA, 201 bp, Homo sapiens
aatgctggcagcttagtccttggacccaccgcagtgcaggaccttgctcaacagggatcacccttgtccgccacctgttcatgaggccacccagggtttgygtggtcatttgtctcctttcatctgctgccttcaaccagctgggtcattagggctggggaacccagaccccacacagtcctcctcccagacgccagacac

SEQ ID NO: 336979 - DNA, 201 bp, Homo sapiens; identical to SEQ ID NO: 70875

SEQ ID NO: 336980 - DNA, 201 bp, Homo sapiens
agctccaagaggtaggagcacagtcttacaaagtgcctgcagatatccttcaggacaactccgaaaaaagttacctaaaggttttgtgttctgtgcatctrtgggttactccaaggctctctggctgggtttctcggaaaccctgatgacaacaagacatcttaaacacaacatatattttttgttattattttttatttt

SEQ ID NO: 336981 - DNA, 201 bp, Homo sapiens
atatagtgttaggtttcacttcttttaaggtttacccctgtggtgtggtttaaaaatctataggcctgggaattccgatcctagctgcagattgcatcccmcaatgcgagaatgataaaataaaattggatatttgagaaacattgtgctttttcatttaaagaccaaagtcatttgaattcgatggcaggcctttctctt

SEQ ID NO: 336982 - DNA, 201 bp, Homo sapiens
agaatcggctccttctcatccggaaggctggctgccctcgctacttctctaacacttggaggttccctcagatcacaccaaagagccacacagaaccaccsccctactgggctgttggaatttcagctgtttctagtgagaggtagaagagtcaccctgcggtccctgaagccctttaccagactggctggaccagcctgc

SEQ ID NO: 336983 - DNA, 201 bp, Homo sapiens
catgagatggcagccactgcccagaaggaagccaggctgtacttcttgtttgtgtcttgcagattgatcaaaagcagttcgacaaaatcttagagctgatmgagagtgggaagaaggaaggggccaagctggaatgcgggggctcagccatggaagacaaggggctcttcatcaaacccactgtcttctcagaagtcacag

SEQ ID NO: 336984 - DNA, 201 bp, Homo sapiens
aaggacaggcaccaggacaggttagcgggtggcagccctgttcccagccagctgtgtgggcttccagaggctctaactcacacctgtaagtggagcggctyagaccaaggatcccaggatgtcatggtctggcatgggaggagatgctggcagaggccaggacagtgaagggacggcatcggggcctggagcgcctgggcc

SEQ ID NO: 336985 - DNA, 201 bp, Homo sapiens
cacctaaggtccttagcatgttgaaattatatgattttgatctaaacctaattggttacacttcctttcctggttagatatttatcaacaatgaatggcasgaatccaagagtgggaaaaagtttgctacatgtaacccttcaactcgggagcaaatatgtgaagtggaagaaggagataaggtaaatacttaaaataaat

SEQ ID NO: 336986 - DNA, 201 bp, Homo sapiens
atgtgttcctacgggctctccagggagtgtggagtttggatgtgtaggttttccacggggacccagcactgcctgcaggacaaacagggtctgccagatgrcatatgcccagcagccagggaggacctgcggttgggcgaagcccctgtgtcccttttggcccctcagggaggggaagagcagctcagcagcatctggaac

SEQ ID NO: 336987 - DNA, 201 bp, Homo sapiens
gaactgtaagtgtttccatcattctgagcctgccgtgggctgaacactagatccactagatttgcaggcagtgacacaggctccaatctgctgacaccccrtcccccccacaccgccgctctgtctgggccagctgtgtccctctagggttggtggggacccatcccttcctctctccagcccacccttcccacttacatc

SEQ ID NO: 336988 - DNA, 201 bp, Homo sapiens
aaaatgaccctggcacaatttcttactaaggtgtaaatgactgatatcagttcctttctggcagctggctttcacaatgggagaaaggacaggaggaggayacaggctctcaggaaggaaaggggagctgggtgtgaagatggactttccatttcttgcctgggtcagtgttcccttgtggaagcaccattagtgctatga

SEQ ID NO: 336989 - DNA, 201 bp, Homo sapiens
tgctgcccactcccagtcattcattctcccctccaagtcacatttcctatcatatgttttaagatccctgaagagtggaggtgctctttccttgtgtctcmgacctgataaatcagaggagggcagtagcaactgatccttcaaattacccgctttgcctggttctaggcctgcacccctgccctgggaaagcaacctgcc

SEQ ID NO: 336990 - DNA, 201 bp, Homo sapiens
gcaccctgtgttttcatcaaggaagctttggcaaaagactgtttattagacaatgccctgcactgggggctaagtggctgcagtgccaggagccagggggwcttctccagatgactctgagctttcttccattcttttctaggatcaactgctacaacgccctctatgcacaggctccatttggtggctttaaaatgtcag

SEQ ID NO: 336991 - DNA, 201 bp, Homo sapiens; identical to SEQ ID NO: 70886

SEQ ID NO: 336992 - DNA, 201 bp, Homo sapiens
tctcaccctcagatcaacaagatcgccttcaccggctccacagaggtaaccctcctcacagggtgctggggaaagtgaaaggggcgtgttatttgacaccygtgagcttttcctttgacaggctttaatatgatttgtttttcttctaaatttgaccatgttttagtacataacaaccagttaaaaaaagtcactggtcta

SEQ ID NO: 336993 - DNA, 201 bp, Homo sapiens
attttcctcttttctgtgatcacagaggtgaatacgctttggccgaatacacagaagtgaaaactgtcaccatcaaacttggcgacaagaacccctgaagraaaggcggggctccttcctcaaacatcggacggcggaatgtggcagatgaaatgtgctggaggaaaaaaatgacatttctgaccttcccgggacacattc

SEQ ID NO: 336994 - DNA, 201 bp, Homo sapiens; identical to SEQ ID NO: 70889

SEQ ID NO: 336995 - DNA, 201 bp, Homo sapiens
ttatttgaccaaaacttgaatttcgagtctgtcctagttgatctgttggtcatgcagtcctgggactctgttcccctccgggtctcatctataagatgtcraaggggagagggaagcagcagagaggaaggtggacaagatggataagacgtcacctaaggtccttagcatgttgaaattatatgattttgatctaaacct

SEQ ID NO: 336996 - DNA, 201 bp, Homo sapiens
cctcgcggtggcgccaggtggcggggctgcgcgccctggaggagctgcaccgccgtcgcggggctctctcagcactgaggacaccacgccctgcaaattgytgggaacttgtcggtggcaatcacactgctggctcctgcaaactggtgtgaggccctcaggggtgagaacaggattgcagaactgcgctcacccttttgg

SEQ ID NO: 336997 - DNA, 201 bp, Homo sapiens
tgctacatgtaacccttcaactcgggagcaaatatgtgaagtggaagaaggagataaggtaaatacttaaaataaatttgctctaagtaattcaattatgkatgaccaaaggataaggaaacggttcggcttagctataagacagaactggcctatcctgggggcagggcctgggctagctgcgcgaattggcatgtggtt

SEQ ID NO: 336998 - DNA, 201 bp, Homo sapiens
tgcaggacaaacagggtctgccagatgacatatgcccagcagccagggaggacctgcggttgggcgaagcccctgtgtcccttttggcccctcagggaggrgaagagcagctcagcagcatctggaactgttaacctgagacttggttcacccagagagaagttgagagaaccttgagctcttccgggatctgttgcaaag

SEQ ID NO: 336999 - DNA, 201 bp, Homo sapiens
agaaaagtgatttctgcgggttatataaacagttatttgcgacatctcttaatgtaacctggaaagtttctaacccagacatttaactttgtacttcaacrctggtttattatcaagcttcggaggtttttctgggttttttttttttttttgacattttatcaacttttattttaagttctagggtacatgtgcaggatg

SEQ ID NO: 337000 - DNA, 201 bp, Homo sapiens
ctatagtgaaaggattcccgcccctcccgcccccacctttgtacacctggttcttacccttctccccacggtatccccagttcttagttcctcatgtttcyctctagaatgttttcgtgtgcatgcaagcagatgaatgcaagtcctgattgcctttgttatttttacacggaagtttccatgatagtatatcatcttgca

SEQ ID NO: 337001 - DNA, 201 bp, Homo sapiens
cagcaagccctctctgattttctaacacacccggtccccgagtcagtcatgcagccgcaggtggagaactgttgccacctgtgggttttgccaggaatcarttcaagaacctgtggattcagggcccaaagccgccttcagtgcccctagactgaatttcaagtgttcactcaaggaacatgtcacagctggaatttttat

SEQ ID NO: 337002 - DNA, 201 bp, Homo sapiens
gcagtggcacactctcggctcactgcaacctccacctcccaggttcaagcaattctcctgcctcagcctccccagtagctgggactacaggtgcacgccascacgcccagctaatttttgtatttttagtagagatggggtttcaccatgttggtcaggctagtcttgaactcctgacctcaggtgatccatccatctcag

SEQ ID NO: 337003 - DNA, 201 bp, Homo sapiens; identical to SEQ ID NO: 70893

SEQ ID NO: 337004 - DNA, 201 bp, Homo sapiens
tcttctatccgatgtaggctgtgattcttcctgagcatttatttatagtatggaaaatatattatgtctaggtggagaccattggcgatgcctattgtgtrgctgggggattacacaaagagagtgatactcatgctgttcagatagcgctgatggccctgaagatgatggagctctctgatgaagttatgtctccccatg

SEQ ID NO: 337005 - DNA, 201 bp, Homo sapiens
caagccagtatgaaccagatctagcatgttactatatgtgcatgtgatataatgtgtattctagagtatgaatgagccagactctatcttctacctgtggktaattagagtgtgtccaatttttcattattacaaaaagtgattcaataggtatctttatacatatgtctttagataatataactaaaaatggtattccca

SEQ ID NO: 337006 - DNA, 201 bp, Homo sapiens
gactctatcttctacctgtgggtaattagagtgtgtccaatttttcattattacaaaaagtgattcaataggtatctttatacatatgtctttagataatrtaactaaaaatggtattcccagaccataggctatacccagtttcaactttaccaagcattaattagctgttcaaaatgattttaccaatctatgctccac

SEQ ID NO: 337007 - DNA, 201 bp, Homo sapiens
ctaaaaatggtattcccagaccataggctatacccagtttcaactttaccaagcattaattagctgttcaaaatgattttaccaatctatgctccaccagyagtgtatgaagtgtgctattctccaaggtgatattgtcagacttactgttaccaatatgataggtgtggtgtgatttctaattgatgcttagtcagtttt

SEQ ID NO: 337008 - DNA, 201 bp, Homo sapiens
tctgcctcagcctcccaaaaaactgagattaagggcatggacctaaagttacttttttaaaatttatttttatttttttgagacagggtcttgctctgtcrcctaggctggagtgcagtgcaatcttggctcactacaacctctgcctccctggctcaagccattttcccacatcaacctctcgagcagctgggactacag

SEQ ID NO: 337009 - DNA, 201 bp, Homo sapiens
taaacctaaatggaaaagagttaagaagtgtgactgttgattctgcactagtaatttttaattgcatgtgaggagtagagggaagttggctgaaggttttraggaaaggggtggtgtcctgagggtgaatggtaaaataatttagacggtattcaaacgacactgacgagtaggaagtgttttaccagtgactgggaacat

SEQ ID NO: 337010 - DNA, 201 bp, Homo sapiens
agaaaatgagacctaaatagggtgtattgggcaacaatacagggcttaaatagaaagaggaagaccaaaagaaagcaaagaatgtcctaagaagagctggkttttttttttttttttttaacaattttgttgcctattagttttcttcattcctggggatggttgggacatttttccacatcggcatgttatggccttgat

SEQ ID NO: 337011 - DNA, 201 bp, Homo sapiens
atgaatacaatgccttcttctggaataccttctgatgaaactgcctgaggctgttttacggttaacttatttttataagtaaaactagtaccctctaaaawaacaataaaaggcataatatagtaaatacataaaccaataaaatagtactttattatcactatcgagttttatataccgtaggtaattgtatgtactatg

SEQ ID NO: 337012 - DNA, 201 bp, Homo sapiens
cagagcgagactcctcaaacaaacaaacaaacaaaaaaaaaaaaaaactcatcattacagaagagggaaaataagggtgtgtgtatgtaagtatgtatgtrtgtgtgtgtgtttatgtatgtctctacatcaaggatgtagaggttttactttacttccaggccttcctgcctgaccaaaatttaaaagaggagaaattat

SEQ ID NO: 337013 - DNA, 201 bp, Homo sapiens
ttgctgctggaaaccctcatagaggaagatcctcttcatgaggatggattgcttttgttgttaacagaaagattggaggacttttgccaaaatgtacttamtactggaattcaaattattcttttgtagttaggtttcagggagataaaaagttgtgtattatactcaaccggtcattcttttttaatgaactagtttggg

SEQ ID NO: 337014 - DNA, 201 bp, Homo sapiens
agtcccagctacttgggaggctgaggcaagaggatcactggagctcaggagttcttggctgtagtgaactgtgatcaccactgcactccagcctggatgamagagcaaaactctatatccaaaaaaaaaaaaaaaagaagttcctggttcaagaagcaattaatatatatataaacaaatataattgaaatagtttacatt

SEQ ID NO: 337015 - DNA, 201 bp, Homo sapiens
taacatagaggactgtcctctgatatatttatcttctctggatatcatgtagtaaatcaacctgaaatctattctactcttcccccctccgttttttttttgcactcatacaacactgtttaattatgtatcttttttgcacattcttctgcaaatacacttattttccccatcgaattttatgtttggccacttgatttg

SEQ ID NO: 337016 - DNA, 201 bp, Homo sapiens
gaaatgaaagacaaataaacatcttgactaaaaaggtaaaagagtatacccaatggcttaatcagagacataaagaggagtggagtatctccagtagcatkgaagaggaagaagaaagcattcttcagtggcagaattggttgggttttctttctccctggcccacaaaatgttcctggtcagggcgagcatggtggctca

SEQ ID NO: 337017 - DNA, 201 bp, Homo sapiens
taccacttactagaactgtctttgtacaaacgtcaaactttcctgttacatatgggtaagcgtagaagcacttgatataatttttttttatcttggttcakagtgtagaagtggtctgttgcttttcctaaaattgctatacatattttttctttaagagtgatcatttcaggtaccctattatgtacagtggtaaaaagt

SEQ ID NO: 337018 - DNA, 201 bp, Homo sapiens; identical to SEQ ID NO: 70920

SEQ ID NO: 337019 - DNA, 201 bp, Homo sapiens
tactttggagaacaaattatcctaattaaagtcactgcttttcttctcttctctctctcctcctctttgaagctgtgagagtttatcttaacctagactgsttaccacctatggctttatggcttgcctgctggcttggctgagagcaagaaagttgtatatgagggatatcacaaggccaccttccacaaaaattgctct

SEQ ID NO: 337020 - DNA, 201 bp, Homo sapiens
ttagctgcttatttttctccatttgcaatatcactttgcagcttcaaatatgctcattataagcagttaaatgatatgtggtttttattacattattaagytaataaaataagtgacaaggagtttcagtattccatagtataacataaacttttaaattgtgtatttgtgagcataaagttatatcaagatctttagcac

SEQ ID NO: 337021 - DNA, 201 bp, Homo sapiens
aatgtggcaaacagtaggaagagtattctagacagaggaaaggaaaggattcactgcagggatcagatgtgtgtgtgggtgtgcatgtgtgtgtttgatgkgtgtgtgtgtaccctgtgtgtggcggaacgggtaatgctgagccttcccaggccatagctttgaagtatttatttgtggagaacaccacttttccatttc

SEQ ID NO: 337022 - DNA, 201 bp, Homo sapiens
tgtttggtataaagctattttgaggtaaaatgtctaaaagatatatttaatatccttagagctagcttcatttgcccttctttgtcagtgtttgggaaaaygattccaggagtccagaaattatgtctatctcacttgaatgagaggtggcagtttcacataaacagctcatatcccccttgctatgttgctgtggttact

SEQ ID NO: 337023 - DNA, 201 bp, Homo sapiens
ctctgtcattttctgcttaaatattacaatttcatttcctcagttgtaagtcattagaacagtgggatagtgtttggtataaagctattttgaggtaaaaygtctaaaagatatatttaatatccttagagctagcttcatttgcccttctttgtcagtgtttgggaaaatgattccaggagtccagaaattatgtctatc

SEQ ID NO: 337024 - DNA, 201 bp, Homo sapiens
gtcagtgtgcaaatctgggagtagaagtcaactgttactgtgttcataggactgtactgcctctcagtgcagtgcctcaatgtaatgggtctaaaccttgygcatttcctgaaaaagaaagccatttctgggcgtatctgattaaccctgatcctccagaaggcctgagcaatgagaattctgctatatgacttaatttct

SEQ ID NO: 337025 - DNA, 201 bp, Homo sapiens
ttgatcccctccctcctttcaccctttacagtccaaaaggccccagtgagtgttgttcccctctatgtgtccatgcgttctcattgtttagctctcacttrtaagtgagaacatgcggtgtttggttttctgttcctgggttagtttgcccaggataatggcctccagctccatccatcttcctgcaaaggacatgatctc

SEQ ID NO: 337026 - DNA, 201 bp, Homo sapiens
tcaaaaatatattgtttctacaaaaactatcttatatggtgaaaaaaaagagatgaaatgatatgatgagtcagtgtgcaaatctgggagtagaagtcaastgttactgtgttcataggactgtactgcctctcagtgcagtgcctcaatgtaatgggtctaaaccttgcgcatttcctgaaaaagaaagccatttctggg

SEQ ID NO: 337027 - DNA, 201 bp, Homo sapiens
ttcagagctgaacccaacaggaaataaataaattattgtggaagaaacgaatattattcatgataatacataagctcttgtcttgttttattctagatgcyagaagtaaaaccttacttttaaaaattcctaacaggaaagtccaaacagagccatgattcccttggggaaaaagaggtccatgtatacttacagaaaaaa

SEQ ID NO: 337028 - DNA, 201 bp, Homo sapiens
tttctgcatttgtttgcttacttgattcattactccaaaaatatttattgaatgcagtctgccttttaatatctttatggaatgttttataatgaaatttsataaatgtttatataaaaatgttttcaattatcaaatagctgacttaggttgaataataagaggtattgttttacaacaaacaaaagtcacttgtttctt

SEQ ID NO: 337029 - DNA, 201 bp, Homo sapiens
cactatcagaaatcatcacaaacaattaggcaaacatgaatcaacaagtcgtgcagttaaaactgcaaaaaaatcttatcaataaaaaagcatgctattayagtctcaatttctatgctgtaaaacaagtgcagtaattgcatgaagaataggtttctttcattactaattttttatacaaaatcaaggattaaagtttaa

SEQ ID NO: 337030 - DNA, 201 bp, Homo sapiens
gagacagtttccctgtgttggccaggctagagtgcagtggtggctgatctcggctcactgctacctctgccccgccaggtcccggttcaagtaattcttcygcctcagcctcccaagtagctgggattataggcacacgccaccatgcccagctaatttttgtatttttagcagagatggggtttcaccatattggccagg

SEQ ID NO: 337031 - DNA, 201 bp, Homo sapiens
ttgcaagcccagtcctgggagcaggtatggtgcattcattatgtgggtgttttccagccagcaatagctctgaatctgcccagaaacagagataattgttstgggaggactgccacactgtcctctcaaagaatgaggagagaatggagggaggatagggtgctcaaagaatggaggatggggtgtaggacctgtgaatag

SEQ ID NO: 337032 - DNA, 201 bp, Homo sapiens
gagtttttcagatctatacagtagctaaattatactaagcaagttagctttcctattctcagagataactctttaatagcatcttctcccttcttcttctrcatttatttatttatttatttatttatttatttatttatttatattttttgagactaagtcttgctctatggcccaggttggagtacagcagctcagtct

SEQ ID NO: 337033 - DNA, 201 bp, Homo sapiens
gtactcattgctgagaaaaagcttatgggtggcattgccacctggttcattcattactgggcacaggtaatgtaggagtcaataaactagacaaactcaargggcttacatatgattaggggaaacaaagacaataaacaaatgagtaaatttatagtatttaagtcagtataataatgtgaaagaaaaataaagtaggtt

SEQ ID NO: 337034 - DNA, 201 bp, Homo sapiens
caaagacaataaacaaatgagtaaatttatagtatttaagtcagtataataatgtgaaagaaaaataaagtaggttaaggggaagaagaagggcagtgggyaaggggtgattgctatttcttagagggtggtaggaatcagcttttctaataaggtgaggttttagcagggactgaaggaaaggagggacaaccacgtggt

SEQ ID NO: 337035 - DNA, 201 bp, Homo sapiens
tttctttcttgaacatgtttctcaactgccctttgcctttacatagctcaccaagcccgactcagaatctgccctctgggtgcgtcttccaccagcttttstttcatcctgtggcagatagtatcctttctctctatatctgaacagtctgaaaaattgttccacattgtaaatttaaattctctttaattttttttcagc

SEQ ID NO: 337036 - DNA, 201 bp, Homo sapiens
cactggagctcaggagttcttggctgtagtgaactgtgatcaccactgcactccagcctggatgacagagcaaaactctatatccaaaaaaaaaaaaaaaagaagttcctggttcaagaagcaattaatatatatataaacaaatataattgaaatagtttacattggaaacaacctaaatttgtttgtaaacaagctaag

SEQ ID NO: 337037 - DNA, 201 bp, Homo sapiens
tgtccaaaagatgtcacaagagcaaatgcgtatagttgattaccaaaaccatggtgtatcagttgggggttagttgagagagagagagaaagcaaaatctrtatagagaacacaatcttctctaacttgtttacattggaagaaatttattatagggtattaaatggcttacagaatcattgagaggacagaagaacccat

SEQ ID NO: 337038 - DNA, 201 bp, Homo sapiens
tactaaggcaatttgcttttaagttttctcctccttttggctactcttaaaaatctggactttcaagtttaatcttaaaaagctcatatctttttaatcayagatattggcatgtccaggtaccaggtatgatggtagacatttgatacagctaattgcttttgtgatggatacataatttttaggcttgcctcttccctg

SEQ ID NO: 337039 - DNA, 201 bp, Homo sapiens
cattccaagactgctgcttcacttacatgtcagattccttggtggggatggctgaaaggttgggttcagctgggattgttagcgttacatgtgatgccctratatgtattttttatgaggtggttcatgtcccactgaacaagactggtggaagctgcatgacttagtcttggaagacacaccgcaacacttccactgcac

SEQ ID NO: 337040 - DNA, 201 bp, Homo sapiens
acaatagtactttggcagataacctttgaaatggaaatgtttaattattcttaccacactctagttgctagacagccagcattggctaggataaaggatakagccctcctcagggagttggtttgtagcacagtctgggaaacaatcggtgctctcatttcaaggacagagtgaaatgaacagaaatgaaccaaaggtgat

SEQ ID NO: 337041 - DNA, 201 bp, Homo sapiens
gtttgaacggctgaatgttgcacttcagagaacattggcaaagcacaaaataaaagaaagcaggtaagtcaaaccactttagttgtgtgaacctcttattrcaatgactaatactgctactaatggccagcagttactgaatgtgtcagccctttattgaatcattgtggtatgtcagaaactggacttagtactttagct

SEQ ID NO: 337042 - DNA, 201 bp, Homo sapiens; identical to SEQ ID NO: 70912

SEQ ID NO: 337043 - DNA, 201 bp, Homo sapiens
tttatcattcaagcaattgtataatgtgctttattctcgaaaataaatcttcaggatgcatttttaaatatataattccaaacaaattattatataagggmatgtttaaaacatttcttttgaactttcagtttgaacggctgaatgttgcacttcagagaacattggcaaagcacaaaataaaagaaagcaggtaagtca

SEQ ID NO: 337044 - DNA, 201 bp, Homo sapiens
aatggaagtcatacacatattggactcttttttaaaaaacattatggttcacctccagcctgggcgacagagcgagactctgtctcaacaacaacaacaamaaaattctggttcacttgatggtgccaccaaaagttccacaggcttccttcattctttttcattcattcttctttttgcccttctgactgaataacttca

SEQ ID NO: 337045 - DNA, 201 bp, Homo sapiens
gagaattggagcattgatgcagtaatttgcggaaaaatggtgtctggtgaagaaggtgtagagaaaaatgtccacctatgaggacatctgggctgttgctrccttttttgggtgttgctatcatcaagctttcatcgaaatggtttgtttttctaaatggtttttcttatatattctgattttttaaaaagacaatataat

SEQ ID NO: 337046 - DNA, 201 bp, Homo sapiens
tcctttcctaagcctagaagcttatgatgagaaatgggctatgccacaagtggtctcaaatagaagatgcccttagtaggttcccattcaaacttttcccrggagccagaattctgcctttgcctttcattatttcacagggaagtctgttaccagtgaaaagagatatgctcagggcacgatgtgtgtcttaaacacgtt

SEQ ID NO: 337047 - DNA, 201 bp, Homo sapiens
cctgaaaattaatacaaaatagtggtactattatttgtataaatagttatttagtattatctattacactctttttgattactttgaagttgttcaaaaaytggatcccagccaggcacagtggctcatgcctgtaattccagcactttgtgaagccagggcaggaggattgcttgagcccaggagttacagaccagcctg

SEQ ID NO: 337048 - DNA, 201 bp, Homo sapiens
tagtttagaaaatgtagttttagttttccagcccctggaggagaggatattacatttgaatggatgttgactgttaattcaccaatattttccaaggcacrtgacatttcaaaatttctagatgagccagattccagactaatatctcaccacacatgaggaaataaagttaacatggtaggcattggtttaacagataga

SEQ ID NO: 337049 - DNA, 201 bp, Homo sapiens
aatgcctatttaatgaattgatttgatttcatacatctctaccacttactagaactgtctttgtacaaacgtcaaactttcctgttacatatgggtaagcrtagaagcacttgatataatttttttttatcttggttcatagtgtagaagtggtctgttgcttttcctaaaattgctatacatattttttctttaagagtg

SEQ ID NO: 337050 - DNA, 201 bp, Homo sapiens
aatgatttatattcttttgggtgtatacctagtagtaggattgctgggtcaaatggtatttctgtctttaggtctttgaggaattgccacactctcttccmcaatggctgaagtaatttacactcccacgaagagtgtaaattaaaaagcattcctttttctccacaaccttctcagcatctgttattttttgactttgta

SEQ ID NO: 337051 - DNA, 201 bp, Homo sapiens
acttcttatgtactcattgctgagaaaaagcttatgggtggcattgccacctggttcattcattactgggcacaggtaatgtaggagtcaataaactagayaaactcaaagggcttacatatgattaggggaaacaaagacaataaacaaatgagtaaatttatagtatttaagtcagtataataatgtgaaagaaaaata

SEQ ID NO: 337052 - DNA, 201 bp, Homo sapiens
ccagctccatccatcttcctgcaaaggacatgatctcattcttttttataactacatattattccatggtgtatatgtacgacattttctttatccagttkatcattgatgggcaattaggttgattccatgttttactattgtgaatagtgttccaacaaacatacgtgtgcatgtgtctttataatagaatgatttata

SEQ ID NO: 337053 - DNA, 201 bp, Homo sapiens
agcctgggctacagagcgagactccgtctcaaaaaaaagaattatcactgaatccatatttagaagaacagttagcttataaaagcaataattagagacargattccttgtataacaaatactaatcatttcccaatatggcattctgggaaaataaaatcagataccacaggatttctatttaagtttggttgttatgag

SEQ ID NO: 337054 - DNA, 201 bp, Homo sapiens
acgtaagccatactttttcttatcaaaacaacaggctgtctacatacagcctgcagacataggctagaaggaaaattctagaacaattaaatggtgttacmgtagttaaatatttcacataaaatagaccagatgtatgtattttaatgtattaggaaacaggtctgtgaacgtatttagtagaaatttgtaattaataga

SEQ ID NO: 337055 - DNA, 201 bp, Homo sapiens
ccagcctggtcaaacatggtgaaaccccatctctatgaaaaatacaaaaattagccgggcatggtggtgggtgcctgtaatcccagctactttggaaactraggcaggagaactgtttgaacctgggaggcggaggttgcagtgagccaagttcgtgccactgtactccagcctgactgacagagcgagattccatttcaa

SEQ ID NO: 337056 - DNA, 201 bp, Homo sapiens
ttcttttatgttttcttctgtaagttttatagttgtaactttcgtacttaggtttacgatttgtcgtagtctgtttattttgctataaaagaatacccgawgttggataatttatttacaaaagaggtttatttggctcaatgttctgcaggctgtgcaggaagcatggcaccagcatttgcttctagtgagagcatgagg

SEQ ID NO: 337057 - DNA, 201 bp, Homo sapiens
acagcctgagtgacagagcaagactctgtctctaaaaaataaataaaataaaacattctgtctcagtggctttccaaatcattggagacttccagaattcstaaaattttgccacaacacatcccagactgcctcttatatctaggcatggcacaaatctgatctttcatcagtatggatttttaatttcatgtatataga

SEQ ID NO: 337058 - DNA, 201 bp, Homo sapiens
ctttgaagaaaattaaagaaaggaatattttttgtccttttatgaaacagtaaattttgattgaattataaatggatctactgacaactcattttaaaatktatttccaataagcaagacattttagaaactctgatttagctttcttttatttgtattttatgttttttctggttcatgttttgccccctatattgatta

SEQ ID NO: 337059 - DNA, 201 bp, Homo sapiens
tatggaaaatatattatgtctaggtggagaccattggcgatgcctattgtgtagctgggggattacacaaagagagtgatactcatgctgttcagatagcrctgatggccctgaagatgatggagctctctgatgaagttatgtctccccatggagaacctatcaaggtaaggcagatgatatattgtccaaaagatgtca

SEQ ID NO: 337060 - DNA, 201 bp, Homo sapiens
tgtgagacataattcggctaagttttctgccaccatatactgacatattagtctgttctcacgctgctaataaagacatacctgaggctgggtaatttttmaagaaaaagaggtttaagggactcacagttccacatggctggggaaggcctcacaatcatggcggaaggtgaaggaggagcaaaaccacgtcttatgtgg

SEQ ID NO: 337061 - DNA, 201 bp, Homo sapiens
gttttaaaatatttgtagtcactaattgtaagtcatattcctctttgtccagctctatcccaaataacaatttaatacaccgcagcatctatttctgcttmttttctgtgtcactggctcagaataattcataagcccttgttgtttcatcttatgctaacaaaaatccagcagtggtatgtaggagagctgtgatatgcc

SEQ ID NO: 337062 - DNA, 201 bp, Homo sapiens
agaagaattgcttgagcccaggaggcggaggtttcagtgatccaagatcatgccactgcactccagcctggatgacagagtgagactctgtctccaacaamaaaaaaaaaagttcatgcttcattaaattttaaattctagagtttaaatgattgagggttgccttacttgcacaataatctgtccctgttattaatacta

SEQ ID NO: 337063 - DNA, 201 bp, Homo sapiens
taatgggtctaaaccttgcgcatttcctgaaaaagaaagccatttctgggcgtatctgattaaccctgatcctccagaaggcctgagcaatgagaattctrctatatgacttaatttcttctatccgatgtaggctgtgattcttcctgagcatttatttatagtatggaaaatatattatgtctaggtggagaccattgg

SEQ ID NO: 337064 - DNA, 201 bp, Homo sapiens
ttttgccttaaaagccataaacatctttctaatttaaaaatcaaatgatattttctcagtcctccttaccctcttcagacttgtgacatacacttcttttygaacacgtgtcctctttcatattcattctcattgtacttttctaattgctgcttctctgtcatagtcataatactttctccagtccttaaacatgaggat

SEQ ID NO: 337065 - DNA, 201 bp, Homo sapiens
tgtaatcccagctacttgggaggctgaggcagaagaattgcttgagcccaggaggcggaggtttcagtgatccaagatcatgccactgcactccagcctgsatgacagagtgagactctgtctccaacaaaaaaaaaaaaagttcatgcttcattaaattttaaattctagagtttaaatgattgagggttgccttacttg

SEQ ID NO: 337066 - DNA, 201 bp, Homo sapiens
gggagtagaagtcaactgttactgtgttcataggactgtactgcctctcagtgcagtgcctcaatgtaatgggtctaaaccttgcgcatttcctgaaaaasaaagccatttctgggcgtatctgattaaccctgatcctccagaaggcctgagcaatgagaattctgctatatgacttaatttcttctatccgatgtaggc

SEQ ID NO: 337067 - DNA, 201 bp, Homo sapiens
tacattttaattatgaaacaagataaaaatgctatggtaaatttaatatataataagctggagtaactaagtataggaagaaaaactggtttaaccagaasagtgctcacagaaagcaaaaattcctcaatctaaatatgctgaagtcatagttgatatttatgagcagaagagctttattctatctatctatctatctat

SEQ ID NO: 337068 - DNA, 201 bp, Homo sapiens
acctgtaatcccagctacttgggaggctgaggcagaagaattgcttgagcccaggaggcggaggtttcagtgatccaagatcatgccactgcactccagcytggatgacagagtgagactctgtctccaacaaaaaaaaaaaaagttcatgcttcattaaattttaaattctagagtttaaatgattgagggttgccttac

SEQ ID NO: 337069 - DNA, 201 bp, Homo sapiens
aaattgcctgtaacgacaacaataatgatgatgataatgataaggttaatacttagatttttgataatagcttgatttccagtggtctttcaaacaccacygttgtttttacctgctggttcaacatcttggtttttataattgtgattagtatccattagatatgtaattgctatgaggaccccaagggtcctttagaag

SEQ ID NO: 337070 - DNA, 201 bp, Homo sapiens
gggtggtgtcctgagggtgaatggtaaaataatttagacggtattcaaacgacactgacgagtaggaagtgttttaccagtgactgggaacatcatgttawtttttgctttcagatgcgaattggactgcactctggatcagtttttgctggcgtcgttggagttaaaatgccccgttactgtctttttggaaacaatgtc

SEQ ID NO: 337071 - DNA, 201 bp, Homo sapiens
gtcctgagggtgaatggtaaaataatttagacggtattcaaacgacactgacgagtaggaagtgttttaccagtgactgggaacatcatgttattttttgmtttcagatgcgaattggactgcactctggatcagtttttgctggcgtcgttggagttaaaatgccccgttactgtctttttggaaacaatgtcactctgg

SEQ ID NO: 337072 - DNA, 201 bp, Homo sapiens
gtgatccccagagtttaacatagaggactgtcctctgatatatttatcttctctggatatcatgtagtaaatcaacctgaaatctattctactcttccccsctccgttttttttttgcactcatacaacactgtttaattatgtatcttttttgcacattcttctgcaaatacacttattttccccatcgaattttatgtt

SEQ ID NO: 337073 - DNA, 201 bp, Homo sapiens
gtcaggagttcgagaccagactggccaacatggcgaaaccccgtctctactaaaaacacaaaaattagccaggcatggtggcagatgcctgtaatcccagytaatcaggcaggagaatggcctgaacccaggagacagaggttgcagtgagccaagattgtgccactgcactccagcctgggcgacagagtgagactccat

SEQ ID NO: 337074 - DNA, 201 bp, Homo sapiens
tcagcccaacaacttacaggtagtaattatgttaaacacctaaaatctcttgtttttatttatatacaattgccatttgccccactgatttgattcattcktcataacttttttcttccttagtcgtaaggaaaaaagaaacgtgataacttttatcatcctcactttaacttttttacactgcttattagcctcctaaga

SEQ ID NO: 337075 - DNA, 201 bp, Homo sapiens; identical to SEQ ID NO: 70909

SEQ ID NO: 337076 - DNA, 201 bp, Homo sapiens
gagtattctagacagaggaaaggaaaggattcactgcagggatcagatgtgtgtgtgggtgtgcatgtgtgtgtttgatgtgtgtgtgtgtaccctgtgtrtggcggaacgggtaatgctgagccttcccaggccatagctttgaagtatttatttgtggagaacaccacttttccatttctagcttttcgtttccccttg

SEQ ID NO: 337077 - DNA, 201 bp, Homo sapiens
agactaagtcttgctctatggcccaggttggagtacagcagctcagtcttgcctcactgcaagctctgcctcccagtttcaagtgattctcctgcctcagyctcccaagtaggtgggattacaggcgcccgcctccacgtctggctaatttttgtatttttagtagatactgggttttgccgtgttggccaggctggtctc

SEQ ID NO: 337078 - DNA, 201 bp, Homo sapiens
ccagtactcatctcctccttctttgttcccattacattggcccagctcccctcctgcccctggttgatacagttttactctcagtgctatttcctctcacsttctcaataacttttctgtggaaattaactctctatgatcaatttctctttgatgaaatgattattcccaacagaatacaaccatatctattaaagctct

SEQ ID NO: 337079 - DNA, 201 bp, Homo sapiens
gaaatgattattcccaacagaatacaaccatatctattaaagctctgaattgaaaaataaaaaattccttgtttccaagtccggcttctgctacaattttmaatttctgctctgttttatagcaaaactgaaagaagttgtctatactcactatctgtattttttccacctcttattttctcttcaactcactccagtcag

SEQ ID NO: 337080 - DNA, 201 bp, Homo sapiens
tcctgttggctgtttttgctttaataaaaaacactgttcggcttatttcctggaaattatagtaccgtgcagtacaggaaaagaaattatttcaaggaagrttgactggtcaattgtattctactgcagctggattcagtaggaagataagaattaaaatattgggcttgggtaccagcgttgaaatccaatgtgaatgag

SEQ ID NO: 337081 - DNA, 201 bp, Homo sapiens
gagtttcatgccagtaattttaaattaacttccgtgtctgacccttttgctgctggaaaccctcatagaggaagatcctcttcatgaggatggattgcttytgttgttaacagaaagattggaggacttttgccaaaatgtacttaatactggaattcaaattattcttttgtagttaggtttcagggagataaaaagttg

SEQ ID NO: 337082 - DNA, 201 bp, Homo sapiens
tgaggggaatgtatataatcttggtgaaaagttgtatgggagttttttgtacgattcctgcaacttttctataaacgtggcattatatctaaataaaaaawtaccaaaaaacatattttcacagtgaagttaaatcatctgtgataggttccccagaccagcctacaaaggcccattaaatacagaataatttgtggatct

SEQ ID NO: 337083 - DNA, 201 bp, Homo sapiens
tgttttcatccgtgcataaagtcactcctctttctgttctgactttttgctgtccatagacatcccagttaccagtgtccttgaattgatagtggcttctktttgtcagtctcatataagaactacagctcatcaggaggagatcgcagcagggtaagagacaccaacaccatgttctgcacgaagctcaaggatctcaag

SEQ ID NO: 337084 - DNA, 201 bp, Homo sapiens
gtgactacattatggaaatgtctaagtattttttccggaacttcaactttttctttttgttttacataaacatttaagcagctaggaacttttagttttarttaggtcagttgaagttctctggtgaactaaaaaatctacattttggttggggataaagatttgattttaaaaacagcttgaatttaaagcaagaaaaag

SEQ ID NO: 337085 - DNA, 201 bp, Homo sapiens
ttttgctgtccatagacatcccagttaccagtgtccttgaattgatagtggcttctgtttgtcagtctcatataagaactacagctcatcaggaggagatygcagcagggtaagagacaccaacaccatgttctgcacgaagctcaaggatctcaagatcacaggagagtgtcctttctccttactggcaccaggtcaagt

SEQ ID NO: 337086 - DNA, 201 bp, Homo sapiens
ctggttcatgttttgccccctatattgattatagctaatagcctaatattaatatattttattgagattagttaatattaattgagtggccaaatgatggwtgattctgtgctgagtgtttctgataaggcagtcaagtatagaaacatggatggtttttcatttagctgatttcacagcaaagtgcaaaaggaggatagg

SEQ ID NO: 337087 - DNA, 201 bp, Homo sapiens
ccactgcactccagcctgggcaatagagtgagactccatctcaaaagaaaaaaaaagaaaagaaaattcagtgtgtgtgtgtgtgtgtgtgtgtgtgtgtrtataccccactcatatcaggctttgaagaaaattaaagaaaggaatattttttgtccttttatgaaacagtaaattttgattgaattataaatggatcta

SEQ ID NO: 337088 - DNA, 201 bp, Homo sapiens
gccactgcactccagcctgggcaatagagtgagactccatctcaaaagaaaaaaaaagaaaagaaaattcagtgtgtgtgtgtgtgtgtgtgtgtgtgtgkatataccccactcatatcaggctttgaagaaaattaaagaaaggaatattttttgtccttttatgaaacagtaaattttgattgaattataaatggatct

SEQ ID NO: 337089 - DNA, 201 bp, Homo sapiens
gaactcactggctatcgtgagaacggtgccaagtcattcatgagggatctgcccaatgactcaaacatctcccatttcactccacattcaacactgaagawtagatttcaacataaagtttggaaggttcgaatatccaaaccatggcatggtccattaagatttaatttttgtatatggtatgatgtgtggataaaagtt

SEQ ID NO: 337090 - DNA, 201 bp, Homo sapiens; identical to SEQ ID NO: 70921

SEQ ID NO: 337091 - DNA, 201 bp, Homo sapiens
gagcatgaggctgcttccactcatggcagaaggtgaaggggagccagcgtgtgcagagattactgagagagagaggaagcgagggagagagagaggagacrccaggcttttgtgtaacagccagctcttgaaggaactagtagagcaagaactcactggctatcgtgagaacggtgccaagtcattcatgagggatctgcc

SEQ ID NO: 337092 - DNA, 201 bp, Homo sapiens
taataggtacctaataaatatttttggcatatgtgaatgaatgaatgagtgaataaataatcagattagttgatgaaagattctaagggaagattaggtartgtgattataagagaaagatcctgaagaatgcttgggaatggatcctttactcatacatgattttgttcatcagcttatatgtaggatcacagtcatttg

SEQ ID NO: 337093 - DNA, 201 bp, Homo sapiens
tttttatttctttgtttttgtttttaatccctgaaatttcgtcctttagaatgtagtaataggtacctaataaatatttttggcatatgtgaatgaatgartgagtgaataaataatcagattagttgatgaaagattctaagggaagattaggtaatgtgattataagagaaagatcctgaagaatgcttgggaatggat

SEQ ID NO: 337094 - DNA, 201 bp, Homo sapiens
ggagtctcagaaaatgtgatcttgttgagtgtttcttccaggttggtaggttggcttttcaccttatatgcaaacttaaatcaaacattgattagtgtagragtatttctgatataacacagcatagatgttcttggaaaacctcatatgcttcaaaactgtgcactaaaaataaaaggacttagggaaaaaatgtgtttg

SEQ ID NO: 337095 - DNA, 201 bp, Homo sapiens
tttacctaaattataatgtactctgtggagtctcagaaaatgtgatcttgttgagtgtttcttccaggttggtaggttggcttttcaccttatatgcaaayttaaatcaaacattgattagtgtagaagtatttctgatataacacagcatagatgttcttggaaaacctcatatgcttcaaaactgtgcactaaaaataa

SEQ ID NO: 337096 - DNA, 201 bp, Homo sapiens; identical to SEQ ID NO: 70913

SEQ ID NO: 337097 - DNA, 201 bp, Homo sapiens
ttttcttatatattctgattttttaaaaagacaatataatgaacatttcaaactccatagcattctaattatgtttgtctgttaagtgtctttaaaaagcrtagaagttgtattcagaagacatgccttagagtcccacaaacagcacttaccagacgtgcaatctagagcaatgcccttaataaattcaaatgatgcact

SEQ ID NO: 337098 - DNA, 201 bp, Homo sapiens
atactggaattcaaattattcttttgtagttaggtttcagggagataaaaagttgtgtattatactcaaccggtcattcttttttaatgaactagtttggratttttcttcagttactagaattttagaagctaacctaggtagataatttggatataggggtttcattttggttggaaatgttattagcagatataaagg

SEQ ID NO: 337099 - DNA, 201 bp, Homo sapiens
gttactgtgttcataggactgtactgcctctcagtgcagtgcctcaatgtaatgggtctaaaccttgcgcatttcctgaaaaagaaagccatttctgggcrtatctgattaaccctgatcctccagaaggcctgagcaatgagaattctgctatatgacttaatttcttctatccgatgtaggctgtgattcttcctgagc

SEQ ID NO: 337100 - DNA, 201 bp, Homo sapiens
ggaccagggaaataattgttttaccagcaaactcactggggaacaagcactgtgcctaggacctgaattataatgcaactgaaaggccacctctgtagggycttgcaagcccagtcctgggagcaggtatggtgcattcattatgtgggtgttttccagccagcaatagctctgaatctgcccagaaacagagataattgt

SEQ ID NO: 337101 - DNA, 201 bp, Homo sapiens
taatatactcttcaaacatctgcacgcattttagaactcatagaaaataggaactataagaaagcaaattgttccttttcagcaggtttaaacacaaaggrtttattactgtatctacttccccttcttttgtctcagaaagatgtgggaaacttgaataaaccacaattggttatcctttccttcataggttatggacct

SEQ ID NO: 337102 - DNA, 201 bp, Homo sapiens
attggaggacttttgccaaaatgtacttaatactggaattcaaattattcttttgtagttaggtttcagggagataaaaagttgtgtattatactcaaccrgtcattcttttttaatgaactagtttgggatttttcttcagttactagaattttagaagctaacctaggtagataatttggatataggggtttcattttg

SEQ ID NO: 337103 - DNA, 201 bp, Homo sapiens
ctcttcagacttgtgacatacacttcttttcgaacacgtgtcctctttcatattcattctcattgtacttttctaattgctgcttctctgtcatagtcatwatactttctccagtccttaaacatgaggattccctggagttctaaatttggttatcttctctctatatatgtagcctcttgatcttaaacagttttagtt

SEQ ID NO: 337104 - DNA, 201 bp, Homo sapiens
atagcaaaactgaaagaagttgtctatactcactatctgtattttttccacctcttattttctcttcaactcactccagtcagtgtttactccactcaacyggttcttatcaaggtcatcattgtgccctgctaaaataaaatcactgtcagttttctctccttatcctctcagaagcatttgaataggctgagaactccc

SEQ ID NO: 337105 - DNA, 201 bp, Homo sapiens
tccctaccaaacctttgttgccgtgctcagagcctcttttcctgttatcttctgtatctgaacttttatgactctaactattttttaaaaaaaatctttcrcccatcctgtgattctctgcagagctacagactcatatatcctattccatatttccacttggatgactaattcacatattaaaatgaactggaccgaatt

SEQ ID NO: 337106 - DNA, 201 bp, Homo sapiens
ctatttcatcttctcagttcacacctgtatctgaaattgtcttatgcagtatttatttatgtgttgattgcctgcctccctttttagaatgttagcttccwgtggtacacattccatattcccagctcctagatcagcgcgtgaaacacagaaggaaagcaagaagtatttactggttaactgttgactcctgggtatgaa

SEQ ID NO: 337107 - DNA, 201 bp, Homo sapiens
aattataaagtaagtaataggaataagtcataatctcattacccagagatagtaactattaacatttctgtctttgtttcagttacgtttatatacacatrcatgaatgacattgaaattttaatttaatttatattgaacttcagctcatttgctgaagtcatttctactttttatagacaaatatgatatagctttttt

SEQ ID NO: 337108 - DNA, 201 bp, Homo sapiens
acatggatgctgtccagtttgtggggtaaacaggcctagaatctcttatttgtaggacaagtctgagcacattgtgctagagaagcaagaattgacttctrtaagaagaaggaacaaagtgaataaaggaatataggaaagataacagagaattggagcattgatgcagtaatttgcggaaaaatggtgtctggtgaagaa

SEQ ID NO: 337109 - DNA, 201 bp, Homo sapiens
tgttctcattattagtgttggagtgggagtctcttgtgactttctgcaatttaaccagaagtcaaagaccctgtactttgagctaacttttgtgctctgtrtagtaagtatttctatttacagaaagctacaaatataggtaacaaaagaaaaggatttcatatcctcacaatccttctttcaaacttgctgtttcccaat

SEQ ID NO: 337110 - DNA, 201 bp, Homo sapiens
ttctatttaatgtagacatgacattacagactagtgagtagaagaccatggtctgtttgggtaaatataataaatgcttttctgtagaaattggttgagarcccacagccatgcaacatttttcatctatggcctgaatattaggttagagagaaggcttattaagttctcatttgatggaaagctagggaagcaaatgga

SEQ ID NO: 337111 - DNA, 201 bp, Homo sapiens
aatctaccattttgttatcacttatccacctttaaccggaaaataaaccaatccgtggtaactagaaatatatctttcatgtacattttgtctcattataytggaaactcttaagtaacaaaagagtttttcagatctatacagtagctaaattatactaagcaagttagctttcctattctcagagataactctttaata

SEQ ID NO: 337112 - DNA, 201 bp, Homo sapiens; identical to SEQ ID NO: 70911

SEQ ID NO: 337113 - DNA, 201 bp, Homo sapiens
atttttcttcaaaatataattcaggatctcatgtatttcagcagaggaccacaacatgttgacatatatttctgacaacaggacaatgctcatgacttaartcttagattcactgtattggcaatgttactagaaatgcacatataggtttttatagcatagatggtgttatcttttaaataaattttttattactgtggt

SEQ ID NO: 337114 - DNA, 201 bp, Homo sapiens
ttggcaatggcatcagaaggctgatgaacaggagagactttcaaggaaagcctaattttgaagaatactttgaaattctgactccaaaaatcaaccagacstttagcgggatcatgactatgttgaatatgcagtttgttgtacgagtgaggagatgggacaactctgtgaaaaaatcttcaagggtaaggaaaacataat

SEQ ID NO: 337115 - DNA, 201 bp, Homo sapiens
cgtgaacccgggaggtggagcttgcagtgagccgagatcgcaccactgcactccagcctgggcgacagagcgagactcctcaaacaaacaaacaaacaaamaaaaaaaaaaactcatcattacagaagagggaaaataagggtgtgtgtatgtaagtatgtatgtgtgtgtgtgtgtttatgtatgtctctacatcaagga

SEQ ID NO: 337116 - DNA, 201 bp, Homo sapiens
tcctgttataaaaagttgcctagagctctagtagaagaagcatcacagctttcgtaaggcaagtgactgaagacttgatccaagactggacttttatcttkttttaaaaaaattatggacctatggatgctaggcaagaccaggcactttatatatattattccaaattcttaatttgaatctgttacatcatgactttac

SEQ ID NO: 337117 - DNA, 201 bp, Homo sapiens
taagtaatcattccccctatagccatattacctttggaccacttcagtagtctattgaggtagaccgcttccattctgttctggcagaacaaattttctastcataaatgcataggattttcttttgtcccttcttgaagttccataaattatatatgagcatagattttgtttataactttaggtaacagagccttggca

SEQ ID NO: 337118 - DNA, 201 bp, Homo sapiens
tgtctgaccctctcagccctgctccagcttccgcagctcctccaccgcctgaaccgcctccattgatgcatctgttcttgttctccttgtgtttttttttktttttttttttttctctttgctgttctttctgtagccaggcctatacttctccattaatgtgttcttgattaggtttggtaagattctatctccagcatt

SEQ ID NO: 337119 - DNA, 201 bp, Homo sapiens
gttactttgttacaaaatatttaacctataacatttatattttctatattaattaagcatactattatgtatcgtttacaatactaactgatttgtggagygacttgagcctgtgtgcctgcagctctaagaaacaagtaaacagaaagtactaaaaaaactgcctcttggcaaggcatggtggttcacgcctataatccc

SEQ ID NO: 337120 - DNA, 201 bp, Homo sapiens
acttcaactctaaagattcaaatataaggctgaatcttggatgtttcagataccactagccaatgaacaggaaattatgttcctcactgaattttaatatraatttgtaaaccatattttgaagataaaaatctaagttgattaacaaagcccgattgtgtagaaactgctctaatttagtaatattagtttggagttata

SEQ ID NO: 337121 - DNA, 201 bp, Homo sapiens
ccttctttaatgattgtctattcagatgttttgcccattttaaaatggaattgtttattttcttactgagttggaaaactgtatattctgaattaaactcycttgctgttgtgtgttacatatattttcttctagtatatgacttgtgtttttgtttatgtaataatgtcttttgaagagccaaagtattttttttatttt

SEQ ID NO: 337122 - DNA, 201 bp, Homo sapiens
gtcctcgcctatgaatacaatgccttcttctggaataccttctgatgaaactgcctgaggctgttttacggttaacttatttttataagtaaaactagtaycctctaaaataacaataaaaggcataatatagtaaatacataaaccaataaaatagtactttattatcactatcgagttttatataccgtaggtaattgt

SEQ ID NO: 337123 - DNA, 201 bp, Homo sapiens
cattgcttaatttacttcttagttctagttattttgtatatccactgggaattcctacatgaacaattttaagtatatgtgtgtgtgtgtgtgtgtgtgtkcacatgcatgtgtatgatccttgaacaacacaggggttggggcactgacactcctgcacagtcaacaatccacataaaagttttgactcctcaaaaactt

SEQ ID NO: 337124 - DNA, 201 bp, Homo sapiens
gaacccaggagacagaggttgcagtgagccaagattgtgccactgcactccagcctgggcgacagagtgagactccatctcaaaaaaaaaaaaaaaaaaaagtaataggccccgtttttgattccctgaaatttcaaggtttatttggtctataaataatagaataaatactggtgttgaaatttgcagaactgaacattg

SEQ ID NO: 337125 - DNA, 201 bp, Homo sapiens
tttgctgtccatagacatcccagttaccagtgtccttgaattgatagtggcttctgtttgtcagtctcatataagaactacagctcatcaggaggagatcrcagcagggtaagagacaccaacaccatgttctgcacgaagctcaaggatctcaagatcacaggagagtgtcctttctccttactggcaccaggtcaagtt

SEQ ID NO: 337126 - DNA, 201 bp, Homo sapiens
gtttagttccccattttatacacagtcatctaatacaagtgctcaatggctcataagcactcagtgaaaacgtgtgctatggccgggcgtggtggctcacrcctgtaatcccagcactttgggaggccgaggcgggtagatcacaaggtcaggagttcaagaccagcctggccaagacagtgaaactccgtctctactaaa

SEQ ID NO: 337127 - DNA, 201 bp, Homo sapiens
acattgcttaatttacttcttagttctagttattttgtatatccactgggaattcctacatgaacaattttaagtatatgtgtgtgtgtgtgtgtgtgtgtgcacatgcatgtgtatgatccttgaacaacacaggggttggggcactgacactcctgcacagtcaacaatccacataaaagttttgactcctcaaaaact

SEQ ID NO: 337128 - DNA, 201 bp, Homo sapiens
atagttgaatcctgcttataattttattgtggactcatattatctcagggtcaggatatatcacaggaagtacagcaccaaggtaggaaactcgatgcacyagcagcctctaccaataaatattctgcctggaaaacatgtgagttctgtctcttatgggttttgttttgaatttacaaaaattttccagaagagcaatgg

SEQ ID NO: 337129 - DNA, 201 bp, Homo sapiens
tggtccattaagatttaatttttgtatatggtatgatgtgtggataaaagtttatttctatttctatatggatttccagttgttccaatggcatttttatwaaaaaacaaacaaacatattttctttcctgattttattgccttgacacctttgttgtaaacacaattgtggatctctatctcattgatctctttgtcacc

SEQ ID NO: 337130 - DNA, 201 bp, Homo sapiens
attaaactcccttgctgttgtgtgttacatatattttcttctagtatatgacttgtgtttttgtttatgtaataatgtcttttgaagagccaaagtatttkttttattttgatgaagtccactttatcatgctctttttaaatatttcatgttttttttttcaaatttaagcatctttgcttcaaacctggtcacaaagaa

SEQ ID NO: 337131 - DNA, 201 bp, Homo sapiens
caagttcctaacgagtcttcagaggaggcagcaggaagctcagagagctgcaaagcaaccgtgcccatctgtcaagacattcctgagaagaacatacaagmaagtcttcctcaaagaaaaaccagtcggagccgagtctatcttcacactttggcagagagtatttgcaaactgattttcccagaggtgagtgcgtgctct

SEQ ID NO: 337132 - DNA, 201 bp, Homo sapiens
aatacaaaaattagccgggcatggtggtgggtgcctgtaatcccagctactttggaaactgaggcaggagaactgtttgaacctgggaggcggaggttgcwgtgagccaagttcgtgccactgtactccagcctgactgacagagcgagattccatttcaaaaatatatatatatgtatatatatgaaaaaatcaatagac

SEQ ID NO: 337133 - DNA, 201 bp, Homo sapiens
tcagtgtttgggaaaatgattccaggagtccagaaattatgtctatctcacttgaatgagaggtggcagtttcacataaacagctcatatcccccttgctrtgttgctgtggttactatgatccctgtgcatggaaacttgtttcagatgttgaagacagacacaattaagatggtttgtgtaataaacctaaatggaaaa

SEQ ID NO: 337134 - DNA, 201 bp, Homo sapiens
agggtgtattgggcaacaatacagggcttaaatagaaagaggaagaccaaaagaaagcaaagaatgtcctaagaagagctgggttttttttttttttttttaacaattttgttgcctattagttttcttcattcctggggatggttgggacatttttccacatcggcatgttatggccttgattatctacctaaatcaaac

SEQ ID NO: 337135 - DNA, 201 bp, Homo sapiens
agttcaggagttcgtgaccagcctgggcaacacggtgaaacctagtctctactaaaatacaaaaaaaaaaattagccgggcgtggtggcgtgcgcctgtcrtcccagctactcaggaggctgaagcaggagaatgacttgaacccgggaggcagaggttgcagtgagccaggagtgtgccactgcactccagcctgggcta

SEQ ID NO: 337136 - DNA, 201 bp, Homo sapiens
gtatactgagacagacttggtcaaattcctccctgaaatgagtctccactttctgcagaatagatgtcaagtaactgctattaaaaacaaaaggagataastaggttagttgacaaggataggttcctgtgacctctccttatcttgtagataacagcacttcacattttgaatgcttgcatgccatgtttttaatcatct

SEQ ID NO: 337137 - DNA, 201 bp, Homo sapiens
agcaggaccaagccaagaaggggtcatggacaggtccagaaggaaagagtgtgaatctatgtgtctgacagaagctttgtttacacgagtaacatgagaarcattccagaacacctctgaccttaataaccagtcaagctgataagatagtcttaagtctctcactgtgctactgtgtctgtctgcttaagtccttggcag

SEQ ID NO: 337138 - DNA, 201 bp, Homo sapiens
aaaaaaaaaaaagaaaagaaaaatgaacaacattttgtttttatttagctgtaactgaagaaatgttgtcccaaactttttctgttttgggtctggttgcmgttgagatcgagttttccctttgtaagagggctcattgcttgcaatttcttaacccaaaaagaagaggaaaatctatactttaataatgtatttgcctgt

SEQ ID NO: 337139 - DNA, 201 bp, Homo sapiens
tttcagtaccttacccaatttaatattgtaacttttttttctttttttgagacagagtctcgttctgtcgcccaggctggaatgcaatggcatgatctcgkctcactacaacctctgcctccccaggttcaagcaattctactgcctcagcttcccgagtagctgggattataggcacccaccactgcgcctggctaattt

SEQ ID NO: 337140 - DNA, 201 bp, Homo sapiens
tgacagatccattggtaaaatcctttatgcttactctttttttcttaaatactaacttttggagttgtatatggcatacgtttagagatactttttgcttrtaattaaagagacttgaaaattcaggattagcccagttggatcaggtgaaatggaagcagagtagtgtgctgtcctggctctggtattgactctacctgt

SEQ ID NO: 337141 - DNA, 201 bp, Homo sapiens
agaatagaaagcatatgaaaaatacttagttcattgtaagcaatcaatcagtgttacctattgttttcacttttagccctctagataaatattaagagagkgtttgctcatgtttttggtattttaatttcatttcaagccatacacatttaacataacactgtacattttaaaagataaattttcattttttctccttct

SEQ ID NO: 337142 - DNA, 201 bp, Homo sapiens
ttaacagaggtaaattttagagactgtctttctgagacggccttgtttcacatcaaaaaaccaacatcttttactccctgtacagctacagtgccttattytagaaatcagaactaaaaaggatttttttttttggaacttcactcaaaaccacttatttattctttcttaaattgtctattgttcttagtagcgtttttg

SEQ ID NO: 337143 - DNA, 201 bp, Homo sapiens
ctagagaacatggttgaactctctgcactgagggcattaaagctgctccttggtttccaacccaatacccctgagtaattactaaatgctccctgggagarcatttgctttccacagaaaagaatcttgctgcctggggagaggggaggagaacctggaggagtgtaattgaaaaatgctccttgggtgattctggttcct

SEQ ID NO: 337144 - DNA, 201 bp, Homo sapiens
ggggcgatcggtgcctttgcttcccaggcgggtttgccgctccacaccgcagcttcctgagctcgggaaggggaggtgcggcggaggcgtggggtcttccyggctctggccggccccaccagtgtgggaggctgagcgccagcggaagggaaggctccgggttcgcgtccccgcgctgcccccgatgcccagcctctcccg

SEQ ID NO: 337145 - DNA, 201 bp, Homo sapiens
ttcacatgtttatttattcactgaataaatattcattggatatctaccatctgtaaatagctttaaaaatcaactattgatggtgttaagggaaaaggggrgattttaaaaagaactaaaacacaaaatgatagagatgatgatggattcagtagaaaaagcatcaaaggaagcagttgggatgatgatgagaaactgctg

SEQ ID NO: 337146 - DNA, 201 bp, Homo sapiens
cactgcactccagtctggttgacagggtgagactccattatcaaaaaaatagaaaaaaaaaaaaaaaataaagcaaaacaaaacgaaaaacaaaaaaaaaacacagcatctatactgagtgaacgtatatgcatattgtatgcactgttggttttatttttatttaaccagactgagaaagaggtaggttcatagaaactt

SEQ ID NO: 337147 - DNA, 201 bp, Homo sapiens
ccattacatgtttaaaaatttattttctgggaccttgaatttaggattagaaagaaatgaatctgacaaattgtaatattatatgtaatgacaacaattayatctatagtgacatacattagcaaaaatatcaaaatataaaacatttctatgagtggtggattcaattatgaaatattgagcaaggacatgaaagataat

SEQ ID NO: 337148 - DNA, 201 bp, Homo sapiens
ccttgtatgtgaagttataagaaatgttacctggatattttggacaaattgtatacctagttttaaaaaataaataataaaaaatattctttagtttgaawgcaaatgatggacttttgttagtaatgtttgattacttgtttgttttttttttttttttgtagggagcttggaaatgtgtggggaaattgatttcattaa

SEQ ID NO: 337149 - DNA, 201 bp, Homo sapiens
cagcaacagactgtaatacaaactaggatgcatgaagattgtagtgctgttggttattatttgatagatgagcactcttgaacacagtttaatccaatttrcttagagtttatatgatattttttgtcatctaagaagcattgaaaaaaatgacagtatgtccaaaattttcagaaaaatcttaaattgtggttctcaggg

SEQ ID NO: 337150 - DNA, 201 bp, Homo sapiens; identical to SEQ ID NO: 70941

SEQ ID NO: 337151 - DNA, 201 bp, Homo sapiens
tttttcttggaatgttcaagcatgcgtacaggtgatttttgacaacaatatttttaaaggcgaattgacatgaagcatatacacaagtgtctaagtaaatkcatttgtctgttaaagctgctgaaaatggctcagcagctcaaatgaagatttgtaagttttgtggatatgttttcaaaattggagaaattaccattaagg

SEQ ID NO: 337152 - DNA, 201 bp, Homo sapiens; identical to SEQ ID NO: 70943

SEQ ID NO: 337153 - DNA, 201 bp, Homo sapiens
gtgaatctgttcaggttagtaaatgaagtagatattgtaataatggtatgtaaacctttttggacaattgattcatatcgttgtccggaaaatcattaacrtgtataaagaagggcatcttgacaacaaagactatagcatttcatccagcccactgtactacattctttcatagacatggagatttatctacctgtttga

SEQ ID NO: 337154 - DNA, 201 bp, Homo sapiens
atagcaattccttttggaagtgtcagagttcttttatgttttctcatgtcatgtggatgtattggaaggactaagaactctattgttagaatgacaatttyatatgtcaaaagacaattactagattggattcaggacatgattgaatcctttagcaagtttctaaaaggcagggatgtgtggtgctgtttaaagtcagtg

SEQ ID NO: 337155 - DNA, 201 bp, Homo sapiens
cctgcaagggaaaaactgttagtcacactggtgttggtaatccaggtgttagtgttgattctttatttgtctaagcatcttttggtggaccccagctgatyttgggtgtggtttagtgtctgggctagagaacatggttgaactctctgcactgagggcattaaagctgctccttggtttccaacccaatacccctgagta

SEQ ID NO: 337156 - DNA, 201 bp, Homo sapiens
gctacaacatccatttgaaataggaaaggactttacagctcaatttttttaataacaaagttgattttccaagaggttaattcccatatgtaattacttaytgtcccagagaattacatataggaaactgaaaagtcagaacttcagcccttgttcttctgttgccaggtttaatgcttcttttaagatataactgtgaaa

SEQ ID NO: 337157 - DNA, 201 bp, Homo sapiens
cttattttggggggagagttaggaatactcagaaactacattgacactgtcatcttcccagaatcctgcatatatttatttagcatctactttgggtaggyactgctcaagatatttgagaaatgtcattgaacaaaacatctctgcctttgaatacctcatattccaatttttacatcttgcatgtttttaaatctctac

SEQ ID NO: 337158 - DNA, 201 bp, Homo sapiens; identical to SEQ ID NO: 70937

SEQ ID NO: 337159 - DNA, 201 bp, Homo sapiens
tcaaactatatcaaaagatagtgaagttaaagtggattttattccaggtaaaagtagacattctgaagtatttattggacctcctcgttactgtggctttkgttctgttgcatattctggtctacttccccttcattgttgaatcatgaaatatgaaattgttaaatttattgaaattctttgtggtcaatcttcagataa

SEQ ID NO: 337160 - DNA, 201 bp, Homo sapiens
ctagattggattcaggacatgattgaatcctttagcaagtttctaaaaggcagggatgtgtggtgctgtttaaagtcagtgtcatagactgtaactcagtrtttagaatactgaaattaaatttgaaatccagctgagctctcaccatgtcatgctatttcgaatgtaatatgtcacgtatattaaacacataccatatgg

SEQ ID NO: 337161 - DNA, 201 bp, Homo sapiens
cgttactggatttaaagggcctgtctctccacttggcagctccctcaagccagagtctctcctttggggttcaggcttactgagaatcattagattaggcyattgaaaacttagaggctattcatgctccacagccacttagaaaaaagcaatataaagttttacttttttagatgttatatatagttactatccacagtt

SEQ ID NO: 337162 - DNA, 201 bp, Homo sapiens
aagccatgtgacctgtaatagctctggtgtagtaaataaaatctttcacattgcttttaaaaagaaattatgcttaaggaaataaaccagtcttaatggtrgtggaaatatgtctgctatttttagaagccaagttggaataatataggccaaaatatcttttggaaaatcatgagaataactcaaattcaaatttagttc

SEQ ID NO: 337163 - DNA, 201 bp, Homo sapiens
tgtatacctttattaagcacatgtgcacctttattaagcacatgtgcaattccaggcacctgggttaggcaccagtaattacattaaagaaaaaaatcccracttaccaaacaccaccactataaaaataccaactacctctttgtgaaaaggtaattagtataaataaaggatctgcttaaattccaacaaataagagta

SEQ ID NO: 337164 - DNA, 201 bp, Homo sapiens
aaaaaggatttttttttttggaacttcactcaaaaccacttatttattctttcttaaattgtctattgttcttagtagcgtttttgtgggtgaataaaagwgatgaaatattcacacagttgataatttagatagtgctgggatctcacggtttctgttcttgggatagatacagcaaaagtcattttcctagagtaccca

SEQ ID NO: 337165 - DNA, 201 bp, Homo sapiens
ttctaaacagttactgtggctacagatacaaagaatgtgattatttctgattttgttgccaggtgagaattcgatctttatttttaaagcccttaggggcracagagcttgtttgtttcttggctattttagtttgtaaattctatcagcaaatctgcatactaagtgcaccttaattatttgattctgactaaaaatgac

SEQ ID NO: 337166 - DNA, 201 bp, Homo sapiens
tgatgaaatattcacacagttgataatttagatagtgctgggatctcacggtttctgttcttgggatagatacagcaaaagtcattttcctagagtacccrttgaatcctttctgtatttggaactgactgtttgcagctgctctatgaatacagggtgggagaatggggaggcttggcttattctttgagagtctggtaa

SEQ ID NO: 337167 - DNA, 201 bp, Homo sapiens
taggttttgttgtcgttgttgttgttgtttgagatggagtctcgctctgtcacccagactggaatgcagtggcatgatctcagctcactgcagcctcctgmtcccgggttcaagcaattctcctgcctcagcctcccgagtagctgggactacaggcgctagccaccacacccagctcatttttgtatttttggtagagac

SEQ ID NO: 337168 - DNA, 201 bp, Homo sapiens
ttttattcataaattgacaataaaatgtgtggttccatgctattgctatagtcaatgtctttttttgcgttttttaatgttttattattattattattatwgagacggagtcttgctctgtcgcccaggctggagtgcagtggcgcagtctcggctcactgcaaactccgcctcccgggttcacgccattctactgcctca

SEQ ID NO: 337169 - DNA, 201 bp, Homo sapiens
gcgcgatcttgttcttttgggagaacaatttagagaggaatacaaactcacccaagaactggaaatcctcactgacaggctacagctcacgttaagagccytggaagatgaaaagaaaaagacagacacgtaagaatgtaacgcttggagcactactgttattcataacataatgtgactctactatatttaagtttgaga

SEQ ID NO: 337170 - DNA, 201 bp, Homo sapiens
actaggaaaaacattgagagctcagctccattttgcatatttaaacttcccacatatgcccttttgctttagagcaaaaggcaggaagaaaaaggcaggarggcttcatttgttcctcttcagtcttccaatccagagcccataggtctagtttctgcttctttccctctaaattcaccagctgtcatcctcctcctgtgt

SEQ ID NO: 337171 - DNA, 201 bp, Homo sapiens
tctgaattataaagttatctgaggtgagaaattaattgcttactaaaggaaaaataattctatgtctgtacctgcccgtcatcaaagaccccaagtgtccrtcatgtgtgtaaattataagtaattgcaaggtttcattttgttggagttgaatatattagaattttaagagaattaaagggggagggaagcttaaagttg

SEQ ID NO: 337172 - DNA, 201 bp, Homo sapiens
ataggatatttccctggggagatagagatttcatggagggcttttgaagttgtccataatatgcttgaaattcttatagacatctcttacgatgttatatsatgactctacattattctgtaatataaagtaagcaaaaattcatgtgttacaggaacagaaaaccaaacaccacatgttctcactcataagttggagctg

SEQ ID NO: 337173 - DNA, 201 bp, Homo sapiens
aatcatccacaacacaatttttctggtaaaaatgaaacaagttatattggtcttttcttaaataaaattgcctcaaggttatgcccctgcaagggaaaaastgttagtcacactggtgttggtaatccaggtgttagtgttgattctttatttgtctaagcatcttttggtggaccccagctgattttgggtgtggtttag

SEQ ID NO: 337174 - DNA, 201 bp, Homo sapiens
attttggttctgatgatctgaggtatcccccagaaatcaagctgggtcttggagtctttattttccttgcattctgtgatttttgagaattaaaaaaaaaatcagaggagtacatcacttaatttggcgtgtcggaaggatctttgcacattacggtgagcatcagaaatcagaaaatctgtattctcactcttaatgtac

SEQ ID NO: 337175 - DNA, 201 bp, Homo sapiens
aagcagaaaacacacaataggaagcaaacacaccaatagatcaagctgaattatttgcctcaggataacccatttcgagtgagatcctgtaatttttttttacggatgaatcatagattgaaatataaaagaagagacatacactagaccaatttccttttcaggtgaacatcctaaattactgtttattatttaatttac

SEQ ID NO: 337176 - DNA, 201 bp, Homo sapiens
accctctgcttcagggaatattaaagcagtcattggtccaagatgctttcagttttaacttttataagaaattgaatataagaggaaaaacatttttttttgtctcagtaagtaccaaactcttattttttcttttggtctttgagaaactatctaaattgatgtttatacaaatttacattatacttttttgcttcacta

SEQ ID NO: 337177 - DNA, 201 bp, Homo sapiens
ccccagaaaggttaggtataaggtggtaaggatggaggtttcctgctcaagtccttgctccggcgtcactgtccccatgaagcctaccatgaacacctatgtatattatcctcatatgtatactgcatccagccccttcctcttgcatttccactctcatgtctttatccagagctacctcttcctgtagtatctattgct

SEQ ID NO: 337178 - DNA, 201 bp, Homo sapiens
gtagatatgctatgacaatgaatatgcttagaatttttagagcagaataaaagatggctattatgattaaacagtcattatgtaatttaaccagatttagrttgtatatcctagccattatcagtttagatcactgttaaatacagagatgaaaaataatactttatagagtaatgtatcagacattttaaaaagttaaaa

SEQ ID NO: 337179 - DNA, 201 bp, Homo sapiens
aggactttacagctcaatttttttaataacaaagttgattttccaagaggttaattcccatatgtaattacttattgtcccagagaattacatataggaarctgaaaagtcagaacttcagcccttgttcttctgttgccaggtttaatgcttcttttaagatataactgtgaaataggaactaatgtagtatacatacaa

SEQ ID NO: 337180 - DNA, 201 bp, Homo sapiens
ttttgtttatttttgtgtaaaaatcattacagtctaaggcaggcatgggtgaaatcagcgactgagtcctctgctcccgggcaactggggctctgaagagkgggggtcaggggagtcccctgagaagtttgtgtcctggaatccaagacaaggtgagggcagggcctgaagaaaatacaagtctcaggaaatatgtagatt

SEQ ID NO: 337181 - DNA, 201 bp, Homo sapiens; identical to SEQ ID NO: 70939

SEQ ID NO: 337182 - DNA, 201 bp, Homo sapiens
ttccaaagttttgttctctctataattttggttgactgctacaacatccatttgaaataggaaaggactttacagctcaatttttttaataacaaagttgrttttccaagaggttaattcccatatgtaattacttattgtcccagagaattacatataggaaactgaaaagtcagaacttcagcccttgttcttctgttg

SEQ ID NO: 337183 - DNA, 201 bp, Homo sapiens
gctgtgtgtatatcctactatatatgtgcagcacacacacacacaccccaacatgttatgaactgagtgttatttgaaaaatcatcttgggccacataaaatgtatagcttacaccgtttcttctagtactctttacaccaattagttttgtatattagtaatctgagactcagggaaacgtggcatcttccaaactaatg

SEQ ID NO: 337184 - DNA, 201 bp, Homo sapiens
tattattcttgagagagagaataaagatagatttttttcctctccttatgatgagaaaaaatttgagaataataaattacagcctgtgttaaatacctcarcgtttatcatagagatgttttctacatgatcgtttcaatttagactgatggcaccaaaaagtgcaacctggcaaaaatgcatctcaagttcactgctttt

SEQ ID NO: 337185 - DNA, 201 bp, Homo sapiens
ttgtttccaaaagggaaaaataagcagttacaagattcatagaatacagaaagcaaaatgaaagtttctcaaaagaagcattattattcttgagagagagaataaagatagatttttttcctctccttatgatgagaaaaaatttgagaataataaattacagcctgtgttaaatacctcaacgtttatcatagagatgtt

SEQ ID NO: 337186 - DNA, 201 bp, Homo sapiens
attgtttccaaaagggaaaaataagcagttacaagattcatagaatacagaaagcaaaatgaaagtttctcaaaagaagcattattattcttgagagagagaataaagatagatttttttcctctccttatgatgagaaaaaatttgagaataataaattacagcctgtgttaaatacctcaacgtttatcatagagatgt

SEQ ID NO: 337187 - DNA, 201 bp, Homo sapiens
ttgaaaatagtgaaagactatgttcacttgggatttggtaggacttttaaaaataaaaataatagtagtaagcagcaacagactgtaatacaaactaggakgcatgaagattgtagtgctgttggttattatttgatagatgagcactcttgaacacagtttaatccaatttacttagagtttatatgatattttttgtca

SEQ ID NO: 337188 - DNA, 201 bp, Homo sapiens
ttaattcacttcttttcctaaattgtcagcttaagcagagtattagcttctcttcctagaccaggagtccaaaactgggagttgctgggagttaaacagcrgccttgtctttaatacgagtagctgataagtacttattacagaactacttctttgtttggattccccaaggtgggtttcacattcaggaactatttgcac

SEQ ID NO: 337189 - DNA, 201 bp, Homo sapiens
cattgtttccaaaagggaaaaataagcagttacaagattcatagaatacagaaagcaaaatgaaagtttctcaaaagaagcattattattcttgagagagagaataaagatagatttttttcctctccttatgatgagaaaaaatttgagaataataaattacagcctgtgttaaatacctcaacgtttatcatagagatg

SEQ ID NO: 337190 - DNA, 201 bp, Homo sapiens
taaattactagaagtgttattcttgcctttgctcttgaggaaagaacttaaaagttatgggatagcaaagtgggagatgcagaattatgagataatattayttgaattatgtaaattgtttatgtaatctgaatattagcttacttcctaacttttcttaaatttactggtcgccctctgtgacttcaggtagcagataaa

SEQ ID NO: 337191 - DNA, 201 bp, Homo sapiens
tcattgtttccaaaagggaaaaataagcagttacaagattcatagaatacagaaagcaaaatgaaagtttctcaaaagaagcattattattcttgagagagagaataaagatagatttttttcctctccttatgatgagaaaaaatttgagaataataaattacagcctgtgttaaatacctcaacgtttatcatagagat

SEQ ID NO: 337192 - DNA, 201 bp, Homo sapiens
atctttaattagaatattctgtcagagtctccaaaattttaatctatagatcagtgttgtttcaaaataaaatgttaatagcaaaatgacaaaacataagktatccatatccgtcaaactatttatcccattcctaggaatttgttctgtttttacatagaagtgtaagaagctataaagatattcataacattttttata

SEQ ID NO: 337193 - DNA, 201 bp, Homo sapiens
tttttccttttagagtaattattattcagagtggccagaagtaatgactttgcattaaaaaaattcaagccaaagatataaccttatgccattttaaccarttaggttttgttgtcgttgttgttgttgtttgagatggagtctcgctctgtcacccagactggaatgcagtggcatgatctcagctcactgcagcctcct

SEQ ID NO: 337194 - DNA, 201 bp, Homo sapiens
ttttaatctatagatcagtgttgtttcaaaataaaatgttaatagcaaaatgacaaaacataagttatccatatccgtcaaactatttatcccattcctargaatttgttctgtttttacatagaagtgtaagaagctataaagatattcataacattttttatacttgtggaaaaaataaaaacatctaactacctacca

SEQ ID NO: 337195 - DNA, 201 bp, Homo sapiens
ccactgcactccagtctggttgacagggtgagactccattatcaaaaaaatagaaaaaaaaaaaaaaaataaagcaaaacaaaacgaaaaacaaaaaaaaaacacagcatctatactgagtgaacgtatatgcatattgtatgcactgttggttttatttttatttaaccagactgagaaagaggtaggttcatagaaact

SEQ ID NO: 337196 - DNA, 201 bp, Homo sapiens
ctgcccagaacacaatctctctaaattgctcgtggcttactctcggagctccttcagactttcttcaaatgccagcttctcagtgaggccttcctggctgytgtccttgagctctccactgctctactctgctttatttttctccaaagtataatacttagcattatatgttatttattaattttatgttgtgtctgtttt

SEQ ID NO: 337197 - DNA, 201 bp, Homo sapiens
ggaggcacaggttgcagtgagccgaaatttcgccactgcactccagtctggttgacagggtgagactccattatcaaaaaaatagaaaaaaaaaaaaaaaataaagcaaaacaaaacgaaaaacaaaaaaaaaacacagcatctatactgagtgaacgtatatgcatattgtatgcactgttggttttatttttatttaac

SEQ ID NO: 337198 - DNA, 201 bp, Homo sapiens
ttcttcaaatgccagcttctcagtgaggccttcctggctgttgtccttgagctctccactgctctactctgctttatttttctccaaagtataatacttascattatatgttatttattaattttatgttgtgtctgttttcccagaatatatgtattgcaagaagtcagggatttttgtctgttttactaaagattgtac

SEQ ID NO: 337199 - DNA, 201 bp, Homo sapiens
atcgcttgaacccgggaggcacaggttgcagtgagccgaaatttcgccactgcactccagtctggttgacagggtgagactccattatcaaaaaaatagaraaaaaaaaaaaaaataaagcaaaacaaaacgaaaaacaaaaaaaaaacacagcatctatactgagtgaacgtatatgcatattgtatgcactgttggttt

SEQ ID NO: 337200 - DNA, 201 bp, Homo sapiens
tcttttgtgatctgttcaactgccctttttttggggtaatggctctatatcctagtgattgtggttttatgtgttagacatttaatatggccttattttcyatttacaaaacattcctagtttgtagatataatcgagcaatgtatcagtatttatgaagttctacctggagctcaatgtttaggaaaaagtagtagggtt

SEQ ID NO: 337201 - DNA, 201 bp, Homo sapiens
aaaaccaaattctatttcagagataaagccattgtttatacaattattatacttatagtagctatttttttaacttcaacttttctcttctgtctttcttrtttttgttttccagaaaagaggcacagttagatgaagaaggacagtttcttgtcagaataatatatgatgactccaaaacttatgatttggttgctgctg

SEQ ID NO: 337202 - DNA, 201 bp, Homo sapiens
aaaaaaagcctacattttcaataagaagggattggttaaataaattattgcatccatatgttgaataagatagcaattaaaactgatacacagcactttgrgaggccgaggtgggtggatcacttgaggccaagagttcgagaccatcctggccaacatggtgaaaccccctctctactaaaaatacaaaaattatccagg

SEQ ID NO: 337203 - DNA, 201 bp, Homo sapiens
cttttgtatcaaaatattgtcatgtgcattcttgatgattttaaaaatctgtgttttttggaaaaaagaagtagtatatcaaatatatgctttaaaatggycaaaattaagtacagggtgagtatctcttgtctaaaactcttgagaccagaagtgtttaggctttcagattttttttggattttggaatacttgcatatc

SEQ ID NO: 337204 - DNA, 201 bp, Homo sapiens
cgttattggagcgtctcgaatacattttagcattatattttttctttaacttctggttgctgatactgaatatgcaagttgtaaattaatgttccctgaaraactccaggtggtcttttgtgatctgttcaactgccctttttttggggtaatggctctatatcctagtgattgtggttttatgtgttagacatttaatat

SEQ ID NO: 337205 - DNA, 201 bp, Homo sapiens
atttggtttgaactagtttgggcttgcggatgtcttatgtgattaggatgaacaaataatttatgttttctgtaaatccttgcttataaatacagctaatrtttgatgctaattttagaggatgtcctgctagaatccaggcctttaaagtacaaacgacactgatgctgtgtgaaaaggacagcagaagcactaaaggct

SEQ ID NO: 337206 - DNA, 201 bp, Homo sapiens
tatttttcctgttttttgattttatgaagcctagaagaatgaatcaaagcatatttcagatttacatcattgtttcctgggaatctacttgtgctgcaatrtaagagtttacattttttcagtgtcttttttactttcatacatatggacatacttctttgcaattggccacacagctctttactttctgtaagtgcttct

SEQ ID NO: 337207 - DNA, 201 bp, Homo sapiens
gttttaaaaaataaataataaaaaatattctttagtttgaaagcaaatgatggacttttgttagtaatgtttgattacttgtttgttttttttttttttttgtagggagcttggaaatgtgtggggaaattgatttcattaattcattcactaatttttaaacatgtatacctttattaagcacatgtgcacctttattaa

SEQ ID NO: 337208 - DNA, 201 bp, Homo sapiens
cacaacaaagtgcaatgtgctgcaagtgtaaaatatacaccagatgtcaaagacagtacaaaaagaataaaagatggctcattcacaattttatattgatkgatttcatgttaaaatgttaatattttggatatatttggttatataaaatgtagttaacatagctttaaattatacacaattttattttatttctctttc

SEQ ID NO: 337209 - DNA, 201 bp, Homo sapiens
tactcagagagagaaggacttcaggatattgtcattggaatcatcaaaacagtggcacaacaaatccatggcactgaaatagacatgaaggtaacaaacarcaatggagacttctgaacacagatgacatctaaaaatattttaaatgacactctctaaatttacctgcagttatcactgttagtgctcttccctggaagt

SEQ ID NO: 337210 - DNA, 201 bp, Homo sapiens
gtcattggaatcatcaaaacagtggcacaacaaatccatggcactgaaatagacatgaaggtaacaaacagcaatggagacttctgaacacagatgacatmtaaaaatattttaaatgacactctctaaatttacctgcagttatcactgttagtgctcttccctggaagtatatataagccaaaacagtggaaagaccag

SEQ ID NO: 337211 - DNA, 201 bp, Homo sapiens
catgaagatcgtcaacctcctcaacgacctctacaccagatttgacacactgactgattcccggaaaaacccatttgtttataaggcaagtgttctttatygctgactgcagagctatccagaggctggcgttctgagactcccctccagaggccatgtcatcacagctctctgactccagcactgcagccttgagtacag

SEQ ID NO: 337212 - DNA, 201 bp, Homo sapiens
gcctcatttctccatatgacagtgtcatgaacctggacgatttgacaaggagagggctgtatctaagtgacatccctctgcatgatgccacgcgcgatctygttcttttgggagaacaatttagagaggaatacaaactcacccaagaactggaaatcctcactgacaggctacagctcacgttaagagccctggaagatg

SEQ ID NO: 337213 - DNA, 201 bp, Homo sapiens
gggggattttgggtttttgaatacatatttcactttttagtacttttgttggccactatcaacttatagcaaagtttcaactttcagttgttctgacttayaactctctctctcaatgcccatgtttacataacaaaacaaagattcaagtggttttattaattccttttttttttttttaacctctactcattgtgacca

SEQ ID NO: 337214 - DNA, 201 bp, Homo sapiens
gaaatatctagtgtaatgatggagtacagttaatgggaaatcacatacattttaaatgtgatggtagttaagacaacttttttgagaacaattttgcctcrtgaaagccttttaaaaaaatattaaaaccttcagtaatttttcctaaataaattattagatctctttccattaagatttatgtatgtgttttcatgtcag

SEQ ID NO: 337215 - DNA, 201 bp, Homo sapiens
tattctttggttgatttaataattgaaaatataatgtatcaaaaagagaaaaagaagacatttttaaaatttgatttttggatcttatatattttacctgrgtatattgttttaaagacaagaccatatttcagtaagaattttgtctagtttttccacttttttattcataaattgacaataaaatgtgtggttccatgc

SEQ ID NO: 337216 - DNA, 201 bp, Homo sapiens
tcacaatcttcgttcaattctccataattctattgtcttcagcctgatgttttgaatggtaggaggtggcaggatcagattccttgacagaaatcgggatkgcattgtcatgtatataagttgagactgatcttgcctcatttctccatatgacagtgtcatgaacctggacgatttgacaaggagagggctgtatctaag

SEQ ID NO: 337217 - DNA, 201 bp, Homo sapiens
taattcccatatgtaattacttattgtcccagagaattacatataggaaactgaaaagtcagaacttcagcccttgttcttctgttgccaggtttaatgcytcttttaagatataactgtgaaataggaactaatgtagtatacatacaaaaatgaaaccacatttattttcttacccagaaacttcctcagtacaaataa

SEQ ID NO: 337218 - DNA, 201 bp, Homo sapiens
tctcttcctgacaattgcatgtcaggaagaaacatgcaattatgtatcaagactgttgttgtttcccctaaaactaaggtatgggtgtcactcaggagagyatttattgttactgtttacagtgattggatgagtgagtgaacacattgacatgaaaggactgacctttactaactaaaagggggttcaggcaggaagtcg

SEQ ID NO: 337219 - DNA, 201 bp, Homo sapiens
attgaaaattatatagttgtttgcaaaggatatttctaaactggctgctttcagcagccagatcttgctggaaaatgatgtcagtgcaatactagctgaamcgaagcccagttttgagggaatgtaaactactttcagtccagctgcattattgatttaacagccaaaataagaactttagtgtttaatcaaaatgtctgt

SEQ ID NO: 337220 - DNA, 201 bp, Homo sapiens
agcgtctcgaatacattttagcattatattttttctttaacttctggttgctgatactgaatatgcaagttgtaaattaatgttccctgaaaaactccagrtggtcttttgtgatctgttcaactgccctttttttggggtaatggctctatatcctagtgattgtggttttatgtgttagacatttaatatggccttatt

SEQ ID NO: 337221 - DNA, 201 bp, Homo sapiens; identical to SEQ ID NO: 70942

SEQ ID NO: 337222 - DNA, 201 bp, Homo sapiens
cattatagagtgaatgcatgattgagtggatgtgtggaagggacagaaaattaatgctgtaagtgtcctgttagagtattgctcaaatgtggacacccgcrgaatcatctcattctcaccgtagtttcctcccagtaatctcactggatttttctgtttttctaaattgacctctttgagacatttggaatgaaagccata

SEQ ID NO: 337223 - DNA, 201 bp, Homo sapiens
atatagactggatcttttttaacatgagtttaaaagcaatagaataagagaaatattttaactgtttttctttaattaaaatatttccttggagaggatgktaatgataaattgatatagctttaaagctatttccatttaaataattttagtgactctggtacagtttctttttaaatagagattttcaatgtttctttt

SEQ ID NO: 337224 - DNA, 201 bp, Homo sapiens
gaataactggtatatattttcataatttttcaaaatattgattaattgttacatgtagtattatatagactggatcttttttaacatgagtttaaaagcartagaataagagaaatattttaactgtttttctttaattaaaatatttccttggagaggatggtaatgataaattgatatagctttaaagctatttccatt

SEQ ID NO: 337225 - DNA, 201 bp, Homo sapiens
cctctctccagtccttcaacagtctcctacatctcagaaccagtcgcatggtgttgaatccttctcatactcccatctctttgaccttttgtcattgcacrtctctctgtcaccatgtagcagggaaagcttcttgacttttaagtgcacagtcacccatgtgactaggttgggctcacctggataatccaggataatctt

SEQ ID NO: 337226 - DNA, 201 bp, Homo sapiens
gagaagcacaagccacatggagaggccacgtgtagactggcagatagcagttctagctgggctctcagcaaagagctggaaataactaccagccatttgaytgatccatcttggaaaaccagcctgctccggcattctgataatttcagcccagtttccatctgattccgtcccaagggtagaactttctaatttagccag

SEQ ID NO: 337227 - DNA, 201 bp, Homo sapiens
catgcaaaatatccataatatggatagtcaaattctaaggcaatataaaattaagtattattttatagatcattttctctttgtcgatttttgtctgcccygaaatatagttggaatgtctaattttgtgaatgaaagtgtttgtttttgtttttgtttttaatcaagttacttggtgaaagaagccaggtctggtacttt

SEQ ID NO: 337228 - DNA, 201 bp, Homo sapiens
gcaccattcactttatttttaactttggaattttaaaaaagagctgttttctcagcatccacaacgccaatttctataatccaataataaaaatagttttrttttttaaaaacttatgaaggaagataagaagtattccagaattgtaaggcttttcagtttgaataactggtatatattttcataatttttcaaaatatt

SEQ ID NO: 337229 - DNA, 201 bp, Homo sapiens
tgttcatacccaagagtcaattctcagtagctttaaacttgaggccaaagtggggagatagatacctttttccaacctttctttgtttatagaaaacctawtagacagttctttcttatagatcatagatatattgtaacacacttgggaggtctaaaacccttaagtggagtattatccaaaattaaaatagtaacattt

SEQ ID NO: 337230 - DNA, 201 bp, Homo sapiens
ataaattagaaagatattccacatatttaatctagtaaagttatgttagagttcatggttttctttctttcagaagttggtgttagttcttacgtggcacyttttggtgatttccaggtgcatcgttagttttctacaaccattagtaatggcggaaaccacgattactgttgcaccaacctaatagaaagtaggactgtg

SEQ ID NO: 337231 - DNA, 201 bp, Homo sapiens
attttcagattaggtatgctccacttataatttgtaatagaagctgaaaaactggttgctttgcttgtaaatgcaaatgtacaccattaacatgtttataygttgtcttctctgatttcattgtattgtcctggcgggatttttttcatatgatctatgcttgccatgcacaaaaattgaagacattttacattacttaat

SEQ ID NO: 337232 - DNA, 201 bp, Homo sapiens
caccagggtacatgttatatgtaatcaagttattaaatatacatatttatataaagacttttgtatcaaaatattgtcatgtgcattcttgatgattttawaaatctgtgttttttggaaaaaagaagtagtatatcaaatatatgctttaaaatggtcaaaattaagtacagggtgagtatctcttgtctaaaactcttg

SEQ ID NO: 337233 - DNA, 201 bp, Homo sapiens
tatctttctgaagaaggcaaagttttaaaaatttcatggagaagaagttgttctcaaagtagtatctattattcccacagtgcttaatttttaactgggcyatagtttggatacaatagaatgaagcttttagctttgccacatataactaggaaagcaaacactatctatagtagaataaaaattgttttaaaagattgg

SEQ ID NO: 337234 - DNA, 201 bp, Homo sapiens
actttggctcctttatgatttacacacctggcgtaagttaggcctttttggtatgctgaaacacgcgggagattatttcttgagcaacagtgaattaagckcatttattcatttttaaataaagtgaaaattggaagttttttgttttccccaaatcccactgcccaccccccccgccccaacccctatcccccgtttttt

SEQ ID NO: 337235 - DNA, 201 bp, Homo sapiens
ttcggccgtacctctgcgtgggggctgcctccccggctcccggtgcagacaccatggtaagtgctctcagccgggtgcggcccgaacctcacccctcctckgccggcctggcagcgagggaactggccgcgcagccggagcttggctcgggggccctgggcgctcactgccggccacgggagcagcctcactccttgcccg

SEQ ID NO: 337236 - DNA, 201 bp, Homo sapiens
tgccggcctggcagcgagggaactggccgcgcagccggagcttggctcgggggccctgggcgctcactgccggccacgggagcagcctcactccttgccckcgcccagtcaggggaggtgggaacgccgcgagtcgtggcgggggcgatcggtgcctttgcttcccaggcgggtttgccgctccacaccgcagcttcctga

SEQ ID NO: 337237 - DNA, 201 bp, Homo sapiens
aatgtttaatattaacaagaaaaatatctagcctccagcaatcaaaattgaaacaaacatgaaataactttttttattatcaatttggcagtcttaaaaayggaaatatctagtgtaatgatggagtacagttaatgggaaatcacatacattttaaatgtgatggtagttaagacaacttttttgagaacaattttgcct

SEQ ID NO: 337238 - DNA, 201 bp, Homo sapiens
tggtggtgggttcctgtggtcccagctactcaggaggctgaggcaggagaatggcctgaacccgggaggtggaggttgcagcgagccgagatcctaccagygcactacagcctgggcgacaaagtgagactctgtctcaaaaaactaaaaaaaatgtgatacagaaaatttaagttttaggaaatattaatgattgtttat

SEQ ID NO: 337239 - DNA, 201 bp, Homo sapiens
agaaatgaaaacttacaaatctttggtaacagatattgttatagttgaatcatggacagcacatgtcatgaaaaaacaggagggtcaacaagaaaaatcawtaaatacatttatctttgccaattattgaaacaaacccagtggaaaccaccaaaaaattagaaccaaatgttgtgaaacgataacagtttatcagtttga

SEQ ID NO: 337240 - DNA, 201 bp, Homo sapiens
aaaaattgaagacattttacattacttaataaacacttatcttcattttttctattaacaatatttcacctattatatgctttttttcccctcttgaattygtaaaatagatctcaatgctggagaaatcctccaaatgtttgggaagatgtttttcgtcttttgccaagaatctggttatgatacaatcttgcgtgtcct

SEQ ID NO: 337241 - DNA, 201 bp, Homo sapiens
tcttaaataaaattgcctcaaggttatgcccctgcaagggaaaaactgttagtcacactggtgttggtaatccaggtgttagtgttgattctttatttgtytaagcatcttttggtggaccccagctgattttgggtgtggtttagtgtctgggctagagaacatggttgaactctctgcactgagggcattaaagctgct

SEQ ID NO: 337242 - DNA, 201 bp, Homo sapiens
ggccgcgcagccggagcttggctcgggggccctgggcgctcactgccggccacgggagcagcctcactccttgcccgcgcccagtcaggggaggtgggaaygccgcgagtcgtggcgggggcgatcggtgcctttgcttcccaggcgggtttgccgctccacaccgcagcttcctgagctcgggaaggggaggtgcggcgg

SEQ ID NO: 337243 - DNA, 201 bp, Homo sapiens
tccctgattggttgaagaactggggagcaccgaccagccccctgcggctcgactcgccattggctgggaagaggtggcaatcagggcgggccaaggcggcwgttctcgctccagctcgatgctgcctccccggcccggttgcgctgtagccgctgccgcctctgcctgggtcccttcggccgtacctctgcgtgggggctg

SEQ ID NO: 337244 - DNA, 201 bp, Homo sapiens
aattttatgttgtgtctgttttcccagaatatatgtattgcaagaagtcagggatttttgtctgttttactaaagattgtacccctagtacccagaacaaygtctggcacctaatagggactcaacaaaacttgctaaacatctattaacccaaaagttatttaatttattatatttaatggcaggtattgtattgagcag

SEQ ID NO: 337245 - DNA, 201 bp, Homo sapiens
cttgtaccttgtttatttatgggttactagagattggtgagtgtttcaaataaacagagtttattacagaaatttatgtgatttgatttattccaattggragaaacagaatggtgaaacatgaataaatttctacttattgtatctttaattagaatattctgtcagagtctccaaaattttaatctatagatcagtgtt

SEQ ID NO: 337246 - DNA, 201 bp, Homo sapiens
ttgagacatttggaatgaaagccatagtttaattttggcatatctccagtactttcattttaggtatgttcttttatgcccatgacattttgaaactgttytgttgtttttcttttcttctctttaaaaataatcaccagttgtgaatagattactacttgcttggtgtatttgttttttattgctaccataacaaatgac

SEQ ID NO: 337247 - DNA, 201 bp, Homo sapiens
ctgtaatacaaactaggatgcatgaagattgtagtgctgttggttattatttgatagatgagcactcttgaacacagtttaatccaatttacttagagttyatatgatattttttgtcatctaagaagcattgaaaaaaatgacagtatgtccaaaattttcagaaaaatcttaaattgtggttctcagggaaacctgtgg

SEQ ID NO: 337248 - DNA, 201 bp, Homo sapiens
aaactggctgctttcagcagccagatcttgctggaaaatgatgtcagtgcaatactagctgaaccgaagcccagttttgagggaatgtaaactactttcartccagctgcattattgatttaacagccaaaataagaactttagtgtttaatcaaaatgtctgttgtttacatagtgacatttttcttataaacttaaaac

SEQ ID NO: 337249 - DNA, 201 bp, Homo sapiens
aatgcagtggcaagatcacgcctcactgaggcctcaactcccgaggctcaagcaatattctcccacctcagcctcccaagtagctgggactacacacttgygccaccacacctgcctaattttttttttatttctaggagagaagaggtcttggtatgtcgcccaggctgttctcaaattcctgagctcaacggatcctcc

SEQ ID NO: 337250 - DNA, 201 bp, Homo sapiens
ggctgaaatgcagtggcaagatcacgcctcactgaggcctcaactcccgaggctcaagcaatattctcccacctcagcctcccaagtagctgggactacasacttgcgccaccacacctgcctaattttttttttatttctaggagagaagaggtcttggtatgtcgcccaggctgttctcaaattcctgagctcaacgga

SEQ ID NO: 337251 - DNA, 201 bp, Homo sapiens
agtttaaaagcaatagaataagagaaatattttaactgtttttctttaattaaaatatttccttggagaggatggtaatgataaattgatatagctttaamgctatttccatttaaataattttagtgactctggtacagtttctttttaaatagagattttcaatgtttcttttagaaaagaatctctatatcttttcag

SEQ ID NO: 337252 - DNA, 201 bp, Homo sapiens
ggctggggcttctccactgtcattgttatggcctcaaatgaaggccttgtcaccaggcgggggcgggaaggcactggagcgcagcagcattgagagcatcygaattccctcctctgtccctgattggttgaagaactggggagcaccgaccagccccctgcggctcgactcgccattggctgggaagaggtggcaatcagg

SEQ ID NO: 337253 - DNA, 201 bp, Homo sapiens
accagtaattacattaaagaaaaaaatcccaacttaccaaacaccaccactataaaaataccaactacctctttgtgaaaaggtaattagtataaataaargatctgcttaaattccaacaaataagagtaagtaggaagttgattgctactgggaaactatttcacttatacgtattcaacttctaaacagttactgtgg

SEQ ID NO: 337254 - DNA, 201 bp, Homo sapiens
actagcaaagccttgaaaacaatgattacaacactttatttatttatttatttttgagacggagtctcgctctgtcactcaggctggagtgcagtggcgcratctgggctcactgcaagctccgcctcccaggttcacgccattcttctgcctcagcctcccaagtagctgggactacaggagaccgccaccacgcccagc

SEQ ID NO: 337255 - DNA, 201 bp, Homo sapiens
taactagcaaagccttgaaaacaatgattacaacactttatttatttatttatttttgagacggagtctcgctctgtcactcaggctggagtgcagtggckcaatctgggctcactgcaagctccgcctcccaggttcacgccattcttctgcctcagcctcccaagtagctgggactacaggagaccgccaccacgccca

SEQ ID NO: 337256 - DNA, 201 bp, Homo sapiens
aaaaaaaaaacacagcatctatactgagtgaacgtatatgcatattgtatgcactgttggttttatttttatttaaccagactgagaaagaggtaggttcrtagaaacttcagaaagaaacacaaattaggacacacttggaaactactattactgtggtattagaatctttggcatgggagattgatggctttagcaaac

SEQ ID NO: 337257 - DNA, 201 bp, Homo sapiens
tttatgtgtttaattttttcaaaagcactgttttgacttctcgagggattctcacattaagtttatcaggtccagagataccagacaatttgaaccacatrgttaatactagatcatgtcataaagtgatataccaatgagaagttaaaaatatgattagaaaagctatttgttttgccagtttgatcaaagcaaaaaaat

SEQ ID NO: 337258 - DNA, 201 bp, Homo sapiens
tctgaaatctctacccttcaggcctctcttccaattcctcaaagaagatgtccttgtgattgttacatttaagggacaaaaatatggtgttctctattgagagcgccaaaaatactaaaccggaattcctccataggctcagtatttgcctcaaaaatgtcccagcactttgagaggctgaagtgcgcagatcacttgagg

SEQ ID NO: 337259 - DNA, 201 bp, Homo sapiens
actttggaaacagggcctcgctctgtcgtccaggctatagtacagtggtgtgatcatggcttactgcagcctttgacctgggctcaagcgatcctcccacytcagcctcccaagtagctactaggattgtagacatgcaccatcatccctggctaattttctttttaaaaagtttctgtagagatggggtctcactattta

SEQ ID NO: 337260 - DNA, 201 bp, Homo sapiens; identical to SEQ ID NO: 70952

SEQ ID NO: 337261 - DNA, 201 bp, Homo sapiens
agtagaaaagcatggactttggaataatttaaatctggtctgaggccaggcgcggtggcgcacatctgtaatcccagcactttgggaggctgaggtgggcrgatcgcttgtggtcaggagtttgagaccagcctggccagcatagtgaaacctcatctctactaaaaatacaaaaattagctgggcatgatggcaggcgcc

SEQ ID NO: 337262 - DNA, 201 bp, Homo sapiens
ggtgaaaaaattatgtttattagcgtcccaaatctaaagatctgtgaaaatgagtttggaggtagtaggtgaaaaaccaagggcctagtctggaggagagrgtctaattctggcactaagaatctggggtagagtcaacatttttccatgaactttgagaggaaatggttttggggagaagcagcaatgtgggaaaatgca

SEQ ID NO: 337263 - DNA, 201 bp, Homo sapiens
cagtactttgggaggcagatcacgaggtcaggagatcgagaccatcctggctaacactgtgaaatcccatctctactaaaaatacaaaaaatttagccggrcgtggtggcgggcgcctgtagtcccaactactcgggaggctaaggcaggagaatggcgtgaacccaggaggcagagcttgcagtgagctgagatcacgcc

SEQ ID NO: 337264 - DNA, 201 bp, Homo sapiens
ccatggatagatccagggtgatcagctcatctcactccatctcttctgtcttgcctccagactcccaagacagctgggctgcgaccaatggaaacaaaggmcattccagtagtgcaccagctcctcaccaggtacttgaagcaatttcaccttacgcccgtcatgagccaggaggaggtggagcactggttctacccccag

SEQ ID NO: 337265 - DNA, 201 bp, Homo sapiens
atgcatctcaaaaatgaatttaaaaaaaaaaaaaaagaggcagcttgggattaatttgcttctgttcctcttcagcccagcatactttgttttcctttcayctgtaaatgtagaaagtgcttcagtttagttctcagaaagctcaagagaaaaccacacagttgctcatacgggccctgacactttgaggaaggaggaaca

SEQ ID NO: 337266 - DNA, 201 bp, Homo sapiens
gcagtgtgtggtgtcggactccatggaagagcagtcaccctgagcatctgactagtctgcctttgaggtccagggtcagtcaagccccagttagattcctktgtttgtgtcagcctgtaaaaagtgccaccttggcaggcgtgttagcctgcatggctgaggcgtcaccctagttctgagttttctcaggggtggtggtac

SEQ ID NO: 337267 - DNA, 201 bp, Homo sapiens
tcgtgcatatcagctgcactgtgtttttacagtactctccaccttcttgggagagttttaattagatggtattccactaaagaaacctacaagtctctctkatttatttatttatttatgagacagagtctcactctgtcgcccaggctggagtgcagtggcgttttctcggctcactgcaacctctgcctcccaggttca

SEQ ID NO: 337268 - DNA, 201 bp, Homo sapiens
gatagagggctcctagggacaggaggaatttgctctggttgagttttgaactgagccctttactgccccgagggggcaaagggtgaggctcacagctgtgstcttctttcaggcgaagtggtgaacacccatggccccgtggagcctgacaaggacaatatccgccaggagccctacaccctgccccagggcttcacctgg

SEQ ID NO: 337269 - DNA, 201 bp, Homo sapiens
actaggggctggcatggtcactgagtcactggtgcacggttggtgctcagtaatgtgtctgatggaagagggtgagatgatcagtgccagcggtggtgtcrtgtgctgcagcctgatgcagccctttccaccacacttgccccacagattatcattctgggaaggtctagagcttcctgttacatgttagaatgaaatgtt

SEQ ID NO: 337270 - DNA, 201 bp, Homo sapiens
gtggatcacttgaggccaggggtttgaaaccagcctggccaacatggtgaaactccatctctactgaaaaaaaaaaaacaaaacaccaaaattagccagcrtggtggcggacacctgtaattccagccactcgggagtctgaggcaggagaattgcttgaaccagggaggtgaaggttgcagtgagccaagatcgcaccac

SEQ ID NO: 337271 - DNA, 201 bp, Homo sapiens
atctctcagcatatatgagtccgattgagctctggataggaatgagggctgtgtctttggagcactccccacatgctcccacagaggaggggcctatcctrctcagggaggggatgttgtgtcagggtgacttcccggcagcactgtgtagacttggtgattcagcccaaaggcacttgcaggactctaaacactgagggc

SEQ ID NO: 337272 - DNA, 201 bp, Homo sapiens
cgaagtggtgaacacccatggccccgtggagcctgacaaggacaatatccgccaggagccctacaccctgccccagggcttcacctgggatgctttggacytgggcgatcgtggtgtggtgagtgggccctcagaaggttacacctgcgggtaggagccactttcacagtaagccctgcagtctcacctagactacgttta

SEQ ID NO: 337273 - DNA, 201 bp, Homo sapiens
ggcactggcaagggcaggctgaaatcaaacctcggattttggaacctccacgcctgaaaccctaaaccagcatcgaactacaactcccatcatgccaggckgccgcccggttcccaagggtcggtcccaccaaccttgcgccccttctttcctcaaagcgtggccgaatgcctaggcttccgggtatcagtggccccgcct

SEQ ID NO: 337274 - DNA, 201 bp, Homo sapiens
gtaggagccactttcacagtaagccctgcagtctcacctagactacgtttactcgagccctagagagctgagccaaggaggtctgaacagactcccgtctrtaacttcctggggcatggccaagactccacataaatagctcttagcttttctggcaggttggaagttaacctctgtaggtccccgatgtggatacctgtt

SEQ ID NO: 337275 - DNA, 201 bp, Homo sapiens
acaaatattattttcagaagtcattctaatcgcaccactgcactccagcctggcaacagtgagactccatctcaaaaaaaaaaaaaaaagtcattctagtrggtgagatttctgccagcattgagccactgctcaacatattcttgataatggtctctgaacagcatttgattttaccttggagttgcaaagtcaaagtct

SEQ ID NO: 337276 - DNA, 201 bp, Homo sapiens
catgacaagaattggctcgttcaccctcagtactctggcttactatcccagggagggccgagggtggcagcaaaagtggtcttttgtaatccctttttatracctgctgttctcttcacagacctcccagggtacctttttttgtgtgtgtgtgtgtgagatggagtctcactctcacccaggctggagtgcagtggcgta

SEQ ID NO: 337277 - DNA, 201 bp, Homo sapiens
gtagtcgcccgtcaccacgcccggctaattttttgtatttttagtagagacggggtttcaccgtattagccaggatggtctcgatctcctgacctcatgawccgcccacctcggcctccctaagagctggaattacaggcgtgagccaccgcgcctggccaatttttgtaatttttagtagagaagggttttgctatgttg

SEQ ID NO: 337278 - DNA, 201 bp, Homo sapiens
acaggagtgagccatcacacatggccgagaatttatttaataaactgcaaggggaagaaaattaaaatgccacttcccaggcctaagcaatatgaacataytggtttatattctttctttcctttataatctaagtgaaaaacagaaaactaaataaaaatattagaagaaaatgtatgtagttttattaatctaagtctg

SEQ ID NO: 337279 - DNA, 201 bp, Homo sapiens
aaaacaggcagacatcagagaactagaatagtcagagctgactttctggataaaacatgactcactttcctcattacttctaatgcttgctcctctcaaayaccaaagctgtgttctatagcccagtgtgaggaaacaatattctcttggctttggaggattctcaaatcaattcttacagggaacgaagccatagccttt

SEQ ID NO: 337280 - DNA, 201 bp, Homo sapiens
ttgttcattcatttcctcattttctttctagtctgtctcctgactggagcagctggggctgctaaatgaggccctgtcctcccctttccaccccggccacscagagccccttgttttgacctgagggatttatttcccttataaagaatgatgaaaatgtcgccgggcgtggtggctcacacctgtaatcccaccgttttg

SEQ ID NO: 337281 - DNA, 201 bp, Homo sapiens
aatgtgtctgatggaagagggtgagatgatcagtgccagcggtggtgtcgtgtgctgcagcctgatgcagccctttccaccacacttgccccacagattatcattctgggaaggtctagagcttcctgttacatgttagaatgaaatgtttggactttgggaggccgaggcgggtggatcacttgaggccaggggtttgaa

SEQ ID NO: 337282 - DNA, 201 bp, Homo sapiens
ggagtttcttttgtggtaagttgtgggggctttcttgaggttcttgagaggaaggcatagagcagatccaccagagggcaccagagttttcatccctgccaggggccaacctttgaatggcaaattagtgtgtcatttttgagttcctgcatctgaaggacacttgctttcattagcacttagaattgcagccttgtttaa

SEQ ID NO: 337283 - DNA, 201 bp, Homo sapiens
agatggtaaaaaatcagacaaggtgggaaacagcagtgactctccgtggtaattccttgactagcttcgagagtcgtccctctatagcacttcacagaagytgagaccagtggctctccattgttgatggcgcagaatgatgaagtggttggttagttaggtggcattctcggtctgccactctaccacgtgatggctcag

SEQ ID NO: 337284 - DNA, 201 bp, Homo sapiens
tctggtctcgaactcctgacctcatgatccacccatctcggcctcccaaagtgctgggattacaggcatgagccactgcgcccagtcttttttttttttttgagatggagtcttgctctgttgctcagactggagtgcaatggcacaatcttggctcactgcaacgtccacctcctgtgttcaagcaattctcctgcctca

SEQ ID NO: 337285 - DNA, 201 bp, Homo sapiens
gtctggtctcgaactcctgacctcatgatccacccatctcggcctcccaaagtgctgggattacaggcatgagccactgcgcccagtcttttttttttttttgagatggagtcttgctctgttgctcagactggagtgcaatggcacaatcttggctcactgcaacgtccacctcctgtgttcaagcaattctcctgcctc

SEQ ID NO: 337286 - DNA, 201 bp, Homo sapiens
ttgtaggctcaaaaatgtttttttaatatacatagctgtcagttggaagcggattgacttaaattcacaagagctactttatgaataatcaaatggtgggwtttggctgggcgccgtggctcatgctataatcccagcattttgggaggccaaggcaggaggatcacttgagtctaggagtttgagaccagcctgggcaac

SEQ ID NO: 337287 - DNA, 201 bp, Homo sapiens
tgaaggttgcagtgagccaagatcgcaccactgtactccaacctgggcgacagaatgagactgtctcaaaaaaaaaaaaagaaaagaaaagaaaaaaaaaatatttgggatcaggagtctgaaagtcagtaaaagcatgaattgagtgcctagtctatacagagccctttgctaggaacactgttactgggttggtccctt

SEQ ID NO: 337288 - DNA, 201 bp, Homo sapiens
cttgcctggctgagccatccacctgcccaggccacgtttaatatccaggaagagagaggcatgggccgaaatggagagggactacctgaaagggaaggaaraatttgtaccagaaagagggagacaggacaccagagctccagggttgccacagtcagctctcaaccatgggacccactggcctccgaaccaaagatgcca

SEQ ID NO: 337289 - DNA, 201 bp, Homo sapiens
gtgaaggttgcagtgagccaagatcgcaccactgtactccaacctgggcgacagaatgagactgtctcaaaaaaaaaaaaagaaaagaaaagaaaaaaaaaatatttgggatcaggagtctgaaagtcagtaaaagcatgaattgagtgcctagtctatacagagccctttgctaggaacactgttactgggttggtccct

SEQ ID NO: 337290 - DNA, 201 bp, Homo sapiens
gtagcaaaggaatagtttttgaaattgagcaagaaaaatagggagaaagaaaatccaggaggagctttggcagcactcactgtggggagggggaggctggmgagcagggtgacaccactgactccggaggcacctgatgtgtctctcacgccacctgctggccagctggggtctccctgccattgtccttgtaatagggat

SEQ ID NO: 337291 - DNA, 201 bp, Homo sapiens
ggtgaaggttgcagtgagccaagatcgcaccactgtactccaacctgggcgacagaatgagactgtctcaaaaaaaaaaaaagaaaagaaaagaaaaaaaaaatatttgggatcaggagtctgaaagtcagtaaaagcatgaattgagtgcctagtctatacagagccctttgctaggaacactgttactgggttggtccc

SEQ ID NO: 337292 - DNA, 201 bp, Homo sapiens
cccttgtcctcgccaaaatggtgaggagcagacgggggggtctctggagatgtgcagggaaggggcagtggagccatggtgagcacagctcccgggacgcrgcctcccatgggctggaggctctgagccctcctcatctgttctgcttaggcagggttcccgcagtttttaggcagaaactcaaaacttggagggaacaag

SEQ ID NO: 337293 - DNA, 201 bp, Homo sapiens
aggtgaaggttgcagtgagccaagatcgcaccactgtactccaacctgggcgacagaatgagactgtctcaaaaaaaaaaaaagaaaagaaaagaaaaaaaaaatatttgggatcaggagtctgaaagtcagtaaaagcatgaattgagtgcctagtctatacagagccctttgctaggaacactgttactgggttggtcc

SEQ ID NO: 337294 - DNA, 201 bp, Homo sapiens; identical to SEQ ID NO: 70953

SEQ ID NO: 337295 - DNA, 201 bp, Homo sapiens
atctcaactcactgcaacctccacctcccgggttcaagcagttctcctgcctcgtcctcctgagtagctgggactacaggcatgtgccaccaggccccagytaatgtttatatttttagtagaaacagggttttgccatgttggccagtctggccttaaactcctgacctcaagtgatccacctgcctcggcctcccaaag

SEQ ID NO: 337296 - DNA, 201 bp, Homo sapiens
atttattggttcatgttggccttgagagaatcagctgcattcttgctgtgctctgcagagcagccttccacccctgctcagcaggaggtactcaaaggccrttgtaagggagaaggcaggctgctccccacagagcaggacaagcagaggccatgatgctggcaccacaccgaggacagcacaggagccttgggctgcttc

SEQ ID NO: 337297 - DNA, 201 bp, Homo sapiens; identical to SEQ ID NO: 70954

SEQ ID NO: 337298 - DNA, 201 bp, Homo sapiens; identical to SEQ ID NO: 70955

SEQ ID NO: 337299 - DNA, 201 bp, Homo sapiens
gatgggaggatcgtttgggcctaggaggtcgaggctgtagtgaaccaaggttacgccactgcattccagcctgggcaacagagcaagaccccatctcgccrgtcatgagtttcctaactagggaagaaaaatatgacctctctcccaagcaaacctgttgggaagcctgattaccaacagagcaggctgcttccctgttgt

SEQ ID NO: 337300 - DNA, 201 bp, Homo sapiens; identical to SEQ ID NO: 70957

SEQ ID NO: 337301 - DNA, 201 bp, Homo sapiens
aatggatttccaaaacacgaaccaccttggatcccagtgattgtcctgaggttttgccatgaattggccctcagttaggggctaagggtagctggaaagayggtttgcagttgccaagcacagaatgttcttcagatagagggctcctagggacaggaggaatttgctctggttgagttttgaactgagccctttactgcc

SEQ ID NO: 337302 - DNA, 201 bp, Homo sapiens; identical to SEQ ID NO: 70958

SEQ ID NO: 337303 - DNA, 201 bp, Homo sapiens
tgggagagtctttgggccactgtcaactcagctctgcctctccctgttggctttcctaggttggactggtgctacaataaccagtcaccagtgcgattctrgataaagccactgaaaattcgaaccaggaaatggaaccccaccactgttggtccaattttcacacacgtgagaatccctggcaaagggagcagaactgaa

SEQ ID NO: 337304 - DNA, 201 bp, Homo sapiens
catgcagttttgagcggattgcatcatccagtaagactgagaggaggcccacatatggaccctcgctgctcctgttgtctagaagttcctcttctcctgcygttcatctgccagcttacccttacctcccacccgctcacatacccagcattgcgctctatttctagaaataagtactgaagttagttttccatctcctcc

SEQ ID NO: 337305 - DNA, 201 bp, Homo sapiens
ttgggaggccaaggctggcagatcatgaggtcaggagttcaagaccagcctggccaacatggtgaaaccccgtctctactaaaagtatgaaaaattagccrggcatggtggtagtcccagctactcaggaggctgaggcaggagaatcgctgaacccaggaggcggaggttgcagtgagctgagaacacggcactgcactc

SEQ ID NO: 337306 - DNA, 201 bp, Homo sapiens
ttagctgggtatggtggtatgtgcctgtattcccagctacccaggaggctgaggcagaagaatcactggaacctgtgatgaggaggctgcagtgagccaarattgtgccattgtactccagcctgggtgacagagcgagactccatctcaaaaacaaaaaacatgaatcaagaaacaaacaaaaaatgatgccagattcct

SEQ ID NO: 337307 - DNA, 201 bp, Homo sapiens
aaaaaaaaaaaaagtcattctagtaggtgagatttctgccagcattgagccactgctcaacatattcttgataatggtctctgaacagcatttgattttaycttggagttgcaaagtcaaagtctaactcgccaaacaaactcagtgtggaatatacacatttgtctcattccggttttaaggagtttagtataccagagc

SEQ ID NO: 337308 - DNA, 201 bp, Homo sapiens
ttctatttaaaaattttttaatttaattttaaaattattgttattactttggaaacagggcctcgctctgtcgtccaggctatagtacagtggtgtgatcrtggcttactgcagcctttgacctgggctcaagcgatcctcccacctcagcctcccaagtagctactaggattgtagacatgcaccatcatccctggctaa

SEQ ID NO: 337309 - DNA, 201 bp, Homo sapiens
acaggtgtgagccaccacacccagccttttccttttttttttttttttttttgagacagagtctcgctttgtcacccaggctgaaatgcagtggcatgatstcggctcactgcaagctctacctcccaggttcacaccattctcctgcctcagcctcccgagtagctgggactacaggcgcccgccaccgtgcccggctaa

SEQ ID NO: 337310 - DNA, 201 bp, Homo sapiens
gggggcagaaggatttgtgagactccacgtcgtttttggtagtttgcttcatccttctgaaaagcctagagccccagggtattggagttggtctactaccyggcagaatacctccaagtgagctgcttatttctttacagctaaaagaactgtacaccctcctgaatgagaactatgtggaagatgatgacaacatgttcc

SEQ ID NO: 337311 - DNA, 201 bp, Homo sapiens
accagggaggtgaaggttgcagtgagccaagatcgcaccactgtactccaacctgggcgacagaatgagactgtctcaaaaaaaaaaaaagaaaagaaaagaaaaaaaaaatatttgggatcaggagtctgaaagtcagtaaaagcatgaattgagtgcctagtctatacagagccctttgctaggaacactgttactggg

SEQ ID NO: 337312 - DNA, 201 bp, Homo sapiens
tttccctgggaggtctgatggacgtgtgaaccctggtgtggaggttgagtgtggggccggctgggtgtgagtctgctcccacagcacaggcggtggacccrggcccagccactcggaacttcagggatagggggtgtgggagagtctttgggccactgtcaactcagctctgcctctccctgttggctttcctaggttgga

SEQ ID NO: 337313 - DNA, 201 bp, Homo sapiens
gacaaccgctgtagcaaaggaatagtttttgaaattgagcaagaaaaatagggagaaagaaaatccaggaggagctttggcagcactcactgtggggaggrggaggctggcgagcagggtgacaccactgactccggaggcacctgatgtgtctctcacgccacctgctggccagctggggtctccctgccattgtccttg

SEQ ID NO: 337314 - DNA, 201 bp, Homo sapiens
tctaggagtttgagaccagcctgggcaacagtgagacctcatctctatgaaaaataaaattagccaggcgtagtggcgcatgcctatagtcccaaccactsgagaggctgagatgggaggatcgtttgggcctaggaggtcgaggctgtagtgaaccaaggttacgccactgcattccagcctgggcaacagagcaagacc

SEQ ID NO: 337315 - DNA, 201 bp, Homo sapiens
gagtgcagtggtgcgatcttggttcactgcaagctccacctccagggttcaaacgattctcctgcctcagcctcccaagtagctgggattacaggcatgcrccaccacacctggctaatcagaggctcatttttgaacgcctgtaccagtcacacatggaagcacttgaacagcagcagaaatgggccagagcgagtgtga

SEQ ID NO: 337316 - DNA, 201 bp, Homo sapiens
actttgggaggccgaggtgggaggattgtttgagcccaaaagttcgagaccagcctgggcaacatagaccttgtttccacaaaaagtaaaaaaaaaaaaaatagccaggcatagtgacatgcacctgtagtcccagctactcaggaggctgaggtgggaagatcacttgaacctgggaggtcaaggcggcagtgagctgag

SEQ ID NO: 337317 - DNA, 201 bp, Homo sapiens
tgttttcagagggtggtttttaaaaatgcagcataaagactatcattcagagaccttaccattttatagcagcacaccttgagaacaaataatgattcttkccaacagcactggctcacacctataatctcagcactttgggaggccgaggtgggaggattgtttgagcccaaaagttcgagaccagcctgggcaacatag

SEQ ID NO: 337318 - DNA, 201 bp, Homo sapiens
gatggtctcgatctcctgacctcgtgatccacccgcctcgacctcccaaagtgctaggattacaggcgtgagccaccgcgcccggccacttttttttttttaatagggacaggggtctcactatattgcccaggctggccttgaactcctgggcttaagcagtcctcccgcctcagcctcccaaagtgctgggattacagg

SEQ ID NO: 337319 - DNA, 201 bp, Homo sapiens
gttgtctagaagttcctcttctcctgccgttcatctgccagcttacccttacctcccacccgctcacatacccagcattgcgctctatttctagaaataaktactgaagttagttttccatctcctccccaaggtctgaatttatacaggagcatccttaggatgtcttacatctttgaacttgtaacattttggtcttca

SEQ ID NO: 337320 - DNA, 201 bp, Homo sapiens
agagggttgctccagttctgatccgagagatcaccaggcgggttcacctggagggcatcttccaagcagtttacactgccggggtggtactaccaaagccygttggcacctgcaggtaaaactgtcttcctgtaaggccccaaaaatgcgggtgtctgcactgtagttgaggagcatgtgccactgtgagtcacagctccg

SEQ ID NO: 337321 - DNA, 201 bp, Homo sapiens
gtgaccacactggctaattttttgtatttttagtagggacggggtttcactgtgttagccaggatggtctcgatctcctgacctcgtgatccacccgcctygacctcccaaagtgctaggattacaggcgtgagccaccgcgcccggccacttttttttttttaatagggacaggggtctcactatattgcccaggctggc

SEQ ID NO: 337322 - DNA, 201 bp, Homo sapiens
acaaaacagattttttttaaaccctgcattagtatttactttttgttacagtggtttgagtccagccaatgacactggagccaaaaagaagaaaaagaaamaaaaaaagaagaaagaaaaaggcagtgagacagattcagcccaggatcagcctgtgaaggtaacaaggaggttctgttttttgtgactcagtcacttttt

SEQ ID NO: 337323 - DNA, 201 bp, Homo sapiens
tctgtcattcaggttggagtgcagaagtacgaacatggctgaccgcagcctcaacctcctgggctcaagcaatcttcccacctcagcctcccgagtagccrggactacaggtgtgcaccacgacacccagctaatttttttattatttgtagacatggggtctccctgcattactcaggttgatctctaactcaggctcaa

SEQ ID NO: 337324 - DNA, 201 bp, Homo sapiens
ttttgagactctgtcattcaggttggagtgcagaagtacgaacatggctgaccgcagcctcaacctcctgggctcaagcaatcttcccacctcagcctccygagtagccaggactacaggtgtgcaccacgacacccagctaatttttttattatttgtagacatggggtctccctgcattactcaggttgatctctaact

SEQ ID NO: 337325 - DNA, 201 bp, Homo sapiens
aggcggcagaggttgcagtgagccgagatcacgccattgcacttcagcctgggcgaaagggtgagactttgtctcaaaaaaaaaaaaaaattaaaaaaaaatttaaaaaaaggaacagcctctgaaacagtttataagcctcgcaaaaatccatattcattccaatatacccacactttgctgtatgcctcaaatgttatg

SEQ ID NO: 337326 - DNA, 201 bp, Homo sapiens
ggtgcggtggctcacgcctgtaatcctagcatgttgggaggctgaggtgagtggatcacttgaggtcaggagtccaagaccagactggccaacatggtgaraccccgtctctactaaaaatataaaaattagctgggcctgatggtgggcgcctgtaatcccagctactcaggaggccgaggtgtgaggatttgcttgaac

SEQ ID NO: 337327 - DNA, 201 bp, Homo sapiens
gctgaaatgcagtggcatgatctcggctcactgcaagctctacctcccaggttcacaccattctcctgcctcagcctcccgagtagctgggactacaggcrcccgccaccgtgcccggctaatttttttgtatttttagtagagatggggtttcaacatgttagccaggatggtcttgatctcctgacctcatgatctgcc

SEQ ID NO: 337328 - DNA, 201 bp, Homo sapiens
tgggaggtggaggttgcagtgagccgagatcacaccactgcactagaggctgggcaacagagcgagactcttgtcttaaaaaaaaaaaaatggctgggcgyggtggctcacgcctgtaatcccagcactttgggaggccaaggctggcagatcatgaggtcaggagttcaagaccagcctggccaacatggtgaaaccccg

SEQ ID NO: 337329 - DNA, 201 bp, Homo sapiens
ctccctgccattgtccttgtaatagggattggccagaaccctgaggacaggacatttgtgtccccacaggtattggcatcggtccctaaacccacggaagytgattgaagtgaagttctcccacctgagcagaaatatgaccatgcagcgcaccatgaagctctaccgactgccagaggccagtgctgccccgggtggtgg

SEQ ID NO: 337330 - DNA, 201 bp, Homo sapiens
cctcttctggcatgacactttcttagcccttcctcccccagtgccacaggggacataggggtgagctggagcgtgggccagttttccctgggaggtctgakggacgtgtgaaccctggtgtggaggttgagtgtggggccggctgggtgtgagtctgctcccacagcacaggcggtggacccgggcccagccactcggaac

SEQ ID NO: 337331 - DNA, 201 bp, Homo sapiens
tgcagtactcagtaacatgcagcagcctattgctcctaggctacaaacctgtatagcatgttactgtaatgtacaccatatagcctaggcatttagtaggytataccatctagatttgtgtaagtacaccctataatgttggcaaggcaaaaatcacctaaccatgcatttcccagcacatatgcctgacgttcagtgaag

SEQ ID NO: 337332 - DNA, 201 bp, Homo sapiens
tttttttttttttaattttttgtaaagatggagtctcactatgttacccaagctgggtcttgaactcctgggctcaagcaatcctcctgccctagcctccsaaagtgctgggattacaagcgtgagccactgcattcagccaaagacttcttcttaagacctttatatatttgcaaacattctcttaatgccatagtcatt

SEQ ID NO: 337333 - DNA, 201 bp, Homo sapiens; identical to SEQ ID NO: 70962

SEQ ID NO: 337334 - DNA, 201 bp, Homo sapiens; identical to SEQ ID NO: 70961

SEQ ID NO: 337335 - DNA, 201 bp, Homo sapiens
gccaaggcgggtggatcacgaggtcaggaatttgagaccagcctggccaacatggtgaaaccctgcctctactgaagatacaaaaaaaaattagccaggcktggtggcacgcacctgtaatctcagctactcaggaggctgagacaggagaatcacttgaacccaggcggcagaggttgcagtgagccgagatcacgccat

SEQ ID NO: 337336 - DNA, 201 bp, Homo sapiens
taagaaggcctggggcattccggctccaggcaggtagcacccgcgggcctcaggccctttcacttacccgggaaacgtaacggtccttaacggcagccaawaacggctcccagcggcccaggcactggcaagggcaggctgaaatcaaacctcggattttggaacctccacgcctgaaaccctaaaccagcatcgaactac

SEQ ID NO: 337337 - DNA, 201 bp, Homo sapiens
tgtcacccaggctggagtgcagtggtgtgatcttagcttactgcaacatctgcctcccaggttcaagcaattctcgtgtctcagcctcctgagtagctggsattacagggacacgccgccatgcctggctaattttttgtattttagtagagacagggtttcaccatgttgcccaggctggtcttgaactcctgagctcag

SEQ ID NO: 337338 - DNA, 201 bp, Homo sapiens
ctaatttttgtatttttagtagagacagggtttcaccatgttggtcaggtgggtctcgaactcctaacctcaagtgatctgcccgccttggcctcccaaartgttgggattacaggcatgagccactgcacccagctccccttaactcttgaactcataattaatcaaaagtcttactaacataatgggccttttctctcc

SEQ ID NO: 337339 - DNA, 201 bp, Homo sapiens
ccaaagtgttgggattacaggcatgagccactgcacccagctccccttaactcttgaactcataattaatcaaaagtcttactaacataatgggccttttytctccccaactttgtcttgtccagatgaactctttgccagcagagaggatccaggaaatacagaaggccattgagctgttctcagtgggtcagggacctg

SEQ ID NO: 337340 - DNA, 201 bp, Homo sapiens
ttcagcccacgatcacggctctgtcctcaagtgccctgagccaatgtccctcctcctccccacatgtcctgttgcagtttccagccatttatctagagggkcagagctgcctgaaggtggagtgagagaaacattttgttcccgggccgcagtgccactgtgcatgcttgacattgcctctttattgccttcccttcagaa

SEQ ID NO: 337341 - DNA, 201 bp, Homo sapiens
gcttgtccacattactgctcccctccagaaacacaatgagacttcactagtatgttcggtgcagaggaggagggtggggcagggccagacagggtagggcyaaagactggtgaggtgaggaaggcagctgtgcccaaggagatttgtttgctgcagaggttgggagcagctaatccatgaggcctgcagacctgcaggatg

SEQ ID NO: 337342 - DNA, 201 bp, Homo sapiens
tgggcattgcctaattgctagtagaaatgcagtttgtcgggccccaccccaaagctgcagaatcagaactgccagaggatttctgtccactttgaaagttwgagaagctctgctctagagcggatgcagttcttagaagcttggtcacaatagaagcaagctgaggaggtgcatccccacgggtgagggagagcagagcac

SEQ ID NO: 337343 - DNA, 201 bp, Homo sapiens
gtaaccttgctacattcttcacagatagtggcacttgggaaagaggcagattgaggctgggcgcagtggctcacgcctgtaatcccagcactttgggaggycgaggcaggcggatgacctgaggtcaggagttcgagaccagcctggccaacatggtaaaacctcgtctctactaaaaatacaaaaactagctgggctggt

SEQ ID NO: 337344 - DNA, 201 bp, Homo sapiens
agctgcttattctttctacaacgttcacacccagacccctcttctagacctcatgagcgacgcccttgtcctcgccaaaatggtgaggagcagacgggggkgtctctggagatgtgcagggaaggggcagtggagccatggtgagcacagctcccgggacgcagcctcccatgggctggaggctctgagccctcctcatct

SEQ ID NO: 337345 - DNA, 201 bp, Homo sapiens
agcactccctccctgaaagccgagggggcgcgagtcaggaggagtgctggtgtcctccaaatgccctttctggacctgggttcttcagcctgcttctgaarccaacaggcttgattaaggaaggtctggctccacagaaagctctttgtcaggggtagcacaaaacagattttttttaaaccctgcattagtatttacttt

SEQ ID NO: 337346 - DNA, 201 bp, Homo sapiens
atgccagggggcagaaggatttgtgagactccacgtcgtttttggtagtttgcttcatccttctgaaaagcctagagccccagggtattggagttggtctrctacctggcagaatacctccaagtgagctgcttatttctttacagctaaaagaactgtacaccctcctgaatgagaactatgtggaagatgatgacaaca

SEQ ID NO: 337347 - DNA, 201 bp, Homo sapiens
cccaaggtctgaatttatacaggagcatccttaggatgtcttacatctttgaacttgtaacattttggtcttcattaaaagatgactttttttttttttttgagacagagtctcgctcagtcgcccaggccggagtgcagtggctggttctctgctcactgcaagctccgcctcctgggttcacgccattctcctgcctca

SEQ ID NO: 337348 - DNA, 201 bp, Homo sapiens
catttgggaggtggaggaaggaagggcaaagcattccagaaagcccatcactgccttttggctgtcatccttttacattcagagttcaaggaagtattgtrgtatgaatgccttgttaacaattatcattcgtctttggtgccattaccctggcaatataaagaaaataagcaacataaaagcaagaacggaaaaggccct

SEQ ID NO: 337349 - DNA, 201 bp, Homo sapiens
acggggtttcaccatgttagccaggatggtctcgatctcctgacgtcgtgatccacccgcctcggcctcccaaagtgctgggattacaggcgtgagccacygcgcctggcctattttttttaataaaaaaagaaagttgataatttaaaatcccaatcagtagctcaagagcacagcatttccattgctctcatagaatat

SEQ ID NO: 337350 - DNA, 201 bp, Homo sapiens
ctcccaaagtgctgggattacaggtgtgagccaccgcacctggcctatttttttttttgagatggagtctctctctcttgcccaggctggagtgcagtggygcgatctcagctcactgcaagctccgcctcccgggttcacgccattctcctgcctcagcctcccgagtagctgggactacaggcgcccgccacgatgcct

SEQ ID NO: 337351 - DNA, 201 bp, Homo sapiens
tggagtgcagtggcgcgatctcggctcactgcaacctctgccacccaggttcaagcaactctcctgcgtcagcctcctaagtagctgggattacaggtgcstgccactgtgcctaactaacttttgtagttttagtagagacggggtttcaccatcttggccaggctggtcttgaactcctgacctcgtgatccatcctcc

SEQ ID NO: 337352 - DNA, 201 bp, Homo sapiens; identical to SEQ ID NO: 70963

SEQ ID NO: 337353 - DNA, 201 bp, Homo sapiens
ggtgggcggatcacgaggtcaggagatcgagaccatcctggctaacatggtgaaaccccatctctactaaaaatacaaaaaattagccgggcgtggtggcscccgcctgtagtcccagctacttccgggaggctgaggcaggagaatcgcttgaatctgggaggcggaggttgcaatgagccgagatcgcgccactgcact

SEQ ID NO: 337354 - DNA, 201 bp, Homo sapiens
gaggtaaaggtcgtctttgaaacatggcagctgggaggactgggtggcagagggtgggggccaggcccagggaggccttccaacagcagttgctcgaggasggttagcgtgaaggcctcagggtccttcctttgcttggtttgagacagccatggcgctaccacactgcagggctcctgtggggaggccctgacccccggg

SEQ ID NO: 337355 - DNA, 201 bp, Homo sapiens; identical to SEQ ID NO: 71017

SEQ ID NO: 337356 - DNA, 201 bp, Homo sapiens
actccagagatccgcacagcccaaatctcagaggcagctcaagctgggacctggcccagaacagatcaagactaggacagggagcctttccaagttccagkttcccccaaggtaggaaagacttgggcactttgtcctttgatatcctcaaaggtctggacagggtgagccactctggggcttgaggcactgtgcaactgt

SEQ ID NO: 337357 - DNA, 201 bp, Homo sapiens
aggacatgaaccagccccttgcccactacttcatctcttcctcccacaacacctatctgactgactcccagatcggggggcccagcagcaccgaggcctaygttaggtactgtagcagggggtgaatgtttccgggagccccacctggggagagacatgggctggcttcctggggccttcctggcccagcctgcctgctgc

SEQ ID NO: 337358 - DNA, 201 bp, Homo sapiens
atctggactaggataggaagcggagggaacccccaggacagcccaggcaggggcttgtctgcaaaaactgcagtgatcaggaccattctttcttcagagtyagaccccaggcgtcctgaatgcgagtccaaatgcgagtccccgcagcctcaccgttcttgggcaggttctggatgacgctcactgcagcctggaactgtt

SEQ ID NO: 337359 - DNA, 201 bp, Homo sapiens
ggtcgtctttgaaacatggcagctgggaggactgggtggcagagggtgggggccaggcccagggaggccttccaacagcagttgctcgaggagggttagcstgaaggcctcagggtccttcctttgcttggtttgagacagccatggcgctaccacactgcagggctcctgtggggaggccctgacccccgggatggtgct

SEQ ID NO: 337360 - DNA, 201 bp, Homo sapiens
gaggcctcagacaccctgggaggtcagaagttgtggttgaggagcctccttttcctacctcaaggcagtgtggtggggtcagggtcgccaggtggcgaggsaggtggcgagggcctcagtgccagatgtgtccgtccccagatgcgcctcctttaggtgcacatctccaactcccgaacaggtggagaaacaagataggag

SEQ ID NO: 337361 - DNA, 201 bp, Homo sapiens
tgcgggctggcgcgggcatcatctcgggcaggttacctcacctcctccagactcagcttccacatgtgtaaaatggcacaacagtttgtcttcctcccagrgtctggtcgaaggttaagtggcatgacttacatggagtctagtcagtagattgtctagtcattattcctaagctgagtgggccttgggggcattggaagc

SEQ ID NO: 337362 - DNA, 201 bp, Homo sapiens
ttgcaaagtccatctatgtagctgagtaatgggctgctatgggtttaatcccagcatggccgcttatgacacagatcaagtcattaccttttttttttttkttttagacagtcttgctctgttgcccaggctggagtgcagtggcacaatgacctcggctcactgcaacctccgcctcctggattcaagcgattctcctgc

SEQ ID NO: 337363 - DNA, 201 bp, Homo sapiens
gctgaggcaggagaatcgcttgaacccgggaggtggagattgcagtgagccaagattgccccactgcactccagcctgggcgagagtgagactccatctcaaaaaaaaaaaaagagtaagcaaaatggacatcgcagaatgatggttaccagaggctgggaagggtactggggagggggggaaatgggtacaaaaatacag

SEQ ID NO: 337364 - DNA, 201 bp, Homo sapiens
tgccccgcggcgcccactgccaggacacctgggtcctctctcgccaccaccccgcggcttcctactgaccccggggtccagcagggccgggatggcgacgyagatcgagggggggaatttaggccaatgagagagcctgtttcacattcggcttacctacctcaaccattcagcacagctctttcaagatcatgcaaatag

SEQ ID NO: 337365 - DNA, 201 bp, Homo sapiens
ctagaagggaagagggcagaactcattgtcttctgagatttccaaacgggggagtccagagaatatggatgacttcctgaggctgtgcagctgtaggtggragaactgggctaggactcccatcccgctggccttactcaggacctgcagagggtgcagactcctgggtgccctttggggagaggagggagggcggggact

SEQ ID NO: 337366 - DNA, 201 bp, Homo sapiens
actcagcacttttggagctcccagcctgggagtctgacctgtgacccttctcaggaaggtctctgggggcctcggcatgtcagggatcacctggtacaggrgctcgaagtaaccaaacatgtcctctgccacctcacccaggggcactgtgtcgatcacctgtaggggagggggtctgttggggacggagtggcctcctgt

SEQ ID NO: 337367 - DNA, 201 bp, Homo sapiens
gccactgaagtgctgcgttggacctgccattggtagaatagtcagtgatggagaggctaggtgtggaactccggaacagaaggacaaggctgccagggacyccgtgtagaacttggggcagaattcaggggtcctgattgccagttttgccttcttgttacctcgactcattccacctgagcgctgactatgtctgggcgc

SEQ ID NO: 337368 - DNA, 201 bp, Homo sapiens
ggagaacatgaggcttagtgacaggttagtgccactggggccatgtattaaataactgggaagtgacagtgttgagacttactccccagacttcggaattyagaagcactagaagagccgtgcagtgcagggccaaaggtcagaggcgctggaccccgacctccagagcccaaagtggcttctaccagtatggaattctga

SEQ ID NO: 337369 - DNA, 201 bp, Homo sapiens
cgcctacctcctcttcaaggtgggcttccgccctgaaccccagcccctggctctgccatcactctgacctctgcctgcccccagccatctgaatcatcagytcccctgccctctccacctgcagcttttttggagcgagcagcctttccctgcacaaaggcaacatctggggttagttagccttttgcctcccctgaggcc

SEQ ID NO: 337370 - DNA, 201 bp, Homo sapiens
agcacagacacacagggaagggggctcaggaggcaattcagctctgggcagggtgggggcaggctggggcaagcccaggaaagtgtaggagtggaacccartcgctgtaccaagtgtgattcttgcaaagtccatctatgtagctgagtaatgggctgctatgggtttaatcccagcatggccgcttatgacacagatcaa

SEQ ID NO: 337371 - DNA, 201 bp, Homo sapiens
agaggcgctggaccccgacctccagagcccaaagtggcttctaccagtatggaattctgacaacttacttaagcttccctgagcctcagtttccttgtctrttagtacatgagcagggcctgcacacaggagatgcttttatttatttattttttagagacagagtctcactctgttgcccaagctggagtgcagtggcgc

SEQ ID NO: 337372 - DNA, 201 bp, Homo sapiens
ggttaatttgtgtgtctgaaagaggataatcagaatcaaaagggcccagaaggaatgggccgagccaggcgggccgggccaggcagcccgggcatctggcmctcagggctgtcagagggtcaggctgccaaactgcagcctcaggatgggaggcacagtgaggctaagtccagttttagcaaatgaagagccattagcatt

SEQ ID NO: 337373 - DNA, 201 bp, Homo sapiens
gcttcctactgaccccggggtccagcagggccgggatggcgacgcagatcgagggggggaatttaggccaatgagagagcctgtttcacattcggcttacmtacctcaaccattcagcacagctctttcaagatcatgcaaatagtttctcagagcctttcccaatcaggcggggcttaatcgaagggtcggacttcccag

SEQ ID NO: 337374 - DNA, 201 bp, Homo sapiens
atcccaggacgcgtagggggcgtctccctggccgccaccttccatcgcttagacctcgctaaagaaacgcgagcggccattggtgaaaaatcacacgactsgctgaggaaggacggccaatcgcagagaagatggggcgggttctggaccgtaccattctgtttcaggaatacgagaagattcgatggcctatgagagtcc

SEQ ID NO: 337375 - DNA, 201 bp, Homo sapiens
gtggcaaaggggagaggctgggggtgggaggagctcctccaggccctccctggagagtcatggactttatctggagggcatcaggagccccagaaagggcwtgggcaggagtgagtgtggagagtggggggcaggttggatgaaggcaggggcgaaacagggagacccaaggagggaggctgaggagttagttgggcaagg

SEQ ID NO: 337376 - DNA, 201 bp, Homo sapiens
tgtgatcgacaggtgtcattctctgggctaagaaatggtgtggtttggggatggctgagggcagccctgggagtcagccctggcagggtcatgggtgccgyggaagggctgaggggaggccccatgcccattggcctcttcatcccacacgtttgctgagcgccattagtgggccagggtgctgtgccaggggctggggct

SEQ ID NO: 337377 - DNA, 201 bp, Homo sapiens
aaggctctttgtgaggtggaggaaggcaagggaggctggggacatttggaagtgagggtggtgtgagcttgaggcccatgaggggatggccaaggtgggcrtgggccccagccactccctccctcacccacaggtgctgactgcacagcagctgcccaagctgaatgccgagaagccacactccattgtggaccccctggt

SEQ ID NO: 337378 - DNA, 201 bp, Homo sapiens
tggtgggagcagagcagcactaagcagacagtgggaccccaggccctttgtagagaggaatgcagtcccctgaaactgagtagtgagaacagggccgctargagcccctgctctgaccctgctgtgtccacagtggccttgaacttccagacgccaggctacgagatggacctcaatgccgggcgcttcctagtcaatggg

SEQ ID NO: 337379 - DNA, 201 bp, Homo sapiens
tggctacggtttcacatcaagggaaaaaggctgttggtggcaaattctggacttgaaggctggaagccatgtggtgggggatagtggcagaaaaggcaatttttttttttttttttgttaagacgcagtctcactctgtcgcttaggctgcagtgcagtggcacaatcttggctcatggcaacctcagcctcctaagtagc

SEQ ID NO: 337380 - DNA, 201 bp, Homo sapiens
cgttggaagctgcagtgagctatgatcatgccactgcgctccagcctgggtaacagagcaagaccaaacaaacaaacaaacctaaaaaacaaaccaaaaartcctgccctgtaatttaccagctgtgtgagctagagtcacaagtcttactctgtttttccacctgtgaaatggggaccattgccttctcagatgtggtag

SEQ ID NO: 337381 - DNA, 201 bp, Homo sapiens
tcctttcagtcctgagctgtcgcgtgcattgtagtggctgctgtgtatattctgatgttgagggaccttattaagcatcccttcctgatggcctcccgggccattctccactctttcctattagaaacatcgctcatctctgtgtctcctttcctgcctcccacccctagccagcccctcacaaggcggtggttgaataac

SEQ ID NO: 337382 - DNA, 201 bp, Homo sapiens; identical to SEQ ID NO: 71019

SEQ ID NO: 337383 - DNA, 201 bp, Homo sapiens; identical to SEQ ID NO: 71021

SEQ ID NO: 337384 - DNA, 201 bp, Homo sapiens
attttgcctgaactgtatattgtagcatacttaaacccattcaaggaaaaaattggcaaattgaaaattctcccattaaagattgatatttttgcaaactracaaatttaacgatttcggtacccctccccaaaaatgcagtcacataaaatatatcaatactattttgaattagctctagaaatcacactgaaactatgt

SEQ ID NO: 337385 - DNA, 201 bp, Homo sapiens
cagctctaaatagcccgatccctgctcctggcttaaagctgctgcgagtatcacaagactgtctgaggatgccaattcagcaggtcagcgcctccccacaacacacacacacacacacacacacacacactcacacatacacagaggggccttgaatgaggaggagacaggagtctgagggaccctcagactgccactctc

SEQ ID NO: 337386 - DNA, 201 bp, Homo sapiens
gcgcgaccatgccttcacggtgagcccctgggatgcccagccccagccccacagccttcccaatgacctccgtccgcactcacatgccagctgccctccgkccttccagaggaaacccttgcccagagaatcattcattcaccaagtgctgctgggataagtggccaatggggtggcataaagctgaatgagatgccaccc

SEQ ID NO: 337387 - DNA, 201 bp, Homo sapiens; identical to SEQ ID NO: 71007

SEQ ID NO: 337388 - DNA, 201 bp, Homo sapiens
cacatcactgacatagtcaatgtcattcacatgtaaaaagcatttatgggaccaggtgcggtggctcacacccgtattcccagcactctgggaggctgackcgaggatcacttgaggccaggaattccagaccagcctgagcaaatagctacatcctgtctcaacaaaaataaaaattagctgagtgtgggggcatgtgcc

SEQ ID NO: 337389 - DNA, 201 bp, Homo sapiens
gtgggccttgggggcattggaagctggacatgggggatccctatgtggcctgatgccctctcctgccacccctgcagccaagcagcatgagctgatgacaytggatggcttcatgatgtacctgttgtcgccggagggggctgccttggacaacacccacacgtgtgtgttccaggacatgaaccagccccttgcccacta

SEQ ID NO: 337390 - DNA, 201 bp, Homo sapiens
ttacctcacctcctccagactcagcttccacatgtgtaaaatggcacaacagtttgtcttcctcccagggtctggtcgaaggttaagtggcatgacttacrtggagtctagtcagtagattgtctagtcattattcctaagctgagtgggccttgggggcattggaagctggacatgggggatccctatgtggcctgatgc

SEQ ID NO: 337391 - DNA, 201 bp, Homo sapiens
gtgcgccatcgcagcacatctgtgagaggccggggagcgccgggcggacagggaggtggggacaggcccggtcctccgccctgacccggccctcctctcastcttcgtgcagcacatcgaggcggtccgcgagggccaccagtccgagggcctgcggcgcttcgggggtgccttcgcgccagcgcgctgcctcaccatcgc

SEQ ID NO: 337392 - DNA, 201 bp, Homo sapiens
gggctgccttggacaacacccacacgtgtgtgttccaggacatgaaccagccccttgcccactacttcatctcttcctcccacaacacctatctgactgaytcccagatcggggggcccagcagcaccgaggcctatgttaggtactgtagcagggggtgaatgtttccgggagccccacctggggagagacatgggctgg

SEQ ID NO: 337393 - DNA, 201 bp, Homo sapiens
tggtttattcctaaaaagtagtccctaaaatgtaaaagaattaaatcctataaagagagacgtcggcccacggctgctaactcgcgagtcttaagattatrgaaatggcttcaaggcgggtggtgagtgcctgagactgacacttgcggaaggatatcgcgagcacattttgtaaagaccgaagagcgcatgaagaagtaa

SEQ ID NO: 337394 - DNA, 201 bp, Homo sapiens
cgagaagattcgatggcctatgagagtcctcacagaatatttttatgaaaaggtgcgttataaaggctattatcgtattttgttctcagcggaggggttcsgaaggttatgaacctttattaactaacgcaagaatggtttattcctaaaaagtagtccctaaaatgtaaaagaattaaatcctataaagagagacgtcgg

SEQ ID NO: 337395 - DNA, 201 bp, Homo sapiens
ttttagtacctcccaccccagtcttgagggatcccagggcagaagtacaggtgacagtgggggctgggtccatgaccccctcccctaaagtcatggtgggrgcagagcagcactaagcagacagtgggaccccaggccctttgtagagaggaatgcagtcccctgaaactgagtagtgagaacagggccgctaagagcccc

SEQ ID NO: 337396 - DNA, 201 bp, Homo sapiens
gtaggtgtagtcggcttgcaggcccgccttcattttgcagcagagtaaaactgaagcctcaggcctcccctggttctggggaaggtgggccaggccatcaraaggctgcctcacaggtgggtaggcactgacgggagggacactcctgctccctcccctgatctaacatctggttcccctccttctcctagagtgcagctc

SEQ ID NO: 337397 - DNA, 201 bp, Homo sapiens
gaatgctgttcttctaaaccctaggaaggctcagggcacagcaagatagtctcagttggctgcagagacccctccactgacagtcacctcttttgggtccraaacattcggaagagccactggacgacgaagggccacaggaggaagaagagcagcgcgggccccgggagcccaaggggccatggccgagcactgggcctg

SEQ ID NO: 337398 - DNA, 201 bp, Homo sapiens
atcgggaggaggaggaggaggatgacgaggaggaagaagaggaggtggaggctgcagcgcagaggcggctggtgagagctgggatgggtggggtggggaakggggggaaggtgggaggacggatgtgggaagcgggggccagctgaaccccgctgagcctggtctcctaggccaagcagatctccccggagctgtcggccc

SEQ ID NO: 337399 - DNA, 201 bp, Homo sapiens
gactgactggctgccacaggggcgagaaggcctaacccttcatcctccacgttggcccccacagcagctgaagggccgggtcctggtgaagggaaagaagytgcccgctgctcggagcgaggatggccgggctctgtcggatcgggaggaggaggaggaggatgacgaggaggaagaagaggaggtggaggctgcagcgca

SEQ ID NO: 337400 - DNA, 201 bp, Homo sapiens
gtggtgattcccatgagggggtccatgtgtaggaaacgtagtgggggtcagaactggaagggtgaggccacctggccaggagcctggggacagagaacctrcagcccttaccttctgtgccaccagtttcatttcagtgatgtaggcagacatggcctcctccctgctcatcttgcccagactgttccaggcgtccctggg

SEQ ID NO: 337401 - DNA, 201 bp, Homo sapiens
cgcactcacatgccagctgccctccgtccttccagaggaaacccttgcccagagaatcattcattcaccaagtgctgctgggataagtggccaatggggtrgcataaagctgaatgagatgccaccctcatatttgggaaatatgttccctctctcatatttgggaaatgtcctaaaaatcacagagtttccagaagaaaa

SEQ ID NO: 337402 - DNA, 201 bp, Homo sapiens
gctggactctgtgatcgacaggtgtcattctctgggctaagaaatggtgtggtttggggatggctgagggcagccctgggagtcagccctggcagggtcaygggtgccgtggaagggctgaggggaggccccatgcccattggcctcttcatcccacacgtttgctgagcgccattagtgggccagggtgctgtgccaggg

SEQ ID NO: 337403 - DNA, 201 bp, Homo sapiens
ctgagccccagctgacaacactgaattgggcgggaggtgccgctgtcctggtctggggaaggtaccccctggaggccatgggactaaggggacagatggawcagaacacgtgggtgcctctttccacccggggcactaactcacttccccagagccctgcctcagtttccttctttgtgatcatttactgagcacccacta

SEQ ID NO: 337404 - DNA, 201 bp, Homo sapiens
ggtcggacttcccagcccgggatggccaaggcgggcggcagcgccccctggtgcacatagtgaaaggtcgtggcgtcctagcgccccctggtggaaatcckcatctgttcgctgatatccaggcctggccgatccgaggcaacccactcagctctctagacacttaggcactggggattaaaaaaagtcatgtcctgtggt

SEQ ID NO: 337405 - DNA, 201 bp, Homo sapiens
atccacccacctcggcctcccaagtgctgagattacaggcgtgagccaccgcgccctgccagaaagggcaacctttagtgaggcctgagtcccaggcattrtccgagggcagttccacactgagggactgcagaggccgctgcttggaaggaaggagggagatggggtacgggttggggggcgcttagggctccaaagcct

SEQ ID NO: 337406 - DNA, 201 bp, Homo sapiens
ctgttttctatttttagtagagacggggtttcaccatgttggtcaggctggtctcgaactcctgacctcaaatgatctgcctgcctcggcctcccaaagtkctgggattacaggtgtgagccaccatgcccagctaatgttttatgtttttagtagagacagggtttcaccatgttggttaggctggtctcgaactccttg

SEQ ID NO: 337407 - DNA, 201 bp, Homo sapiens
tcgaactccttgcctcaaatgatccacatgcctcagcctcccaaagtgctgggattgcaggtgtgagccaccatgcccggctgatgttttatattttaaayagaaacagggtttcaccatgttggtcaggctggtctcgaactcctgacctcaaatgatctgcctgcttcggccttccaaagtactgggattacaggtgtg

SEQ ID NO: 337408 - DNA, 201 bp, Homo sapiens
cgagggcctcagtgccagatgtgtccgtccccagatgcgcctcctttaggtgcacatctccaactcccgaacaggtggagaaacaagataggagtactcarggcggggcgaacagtctcccaccctggccgcctgcaccttggcccagcgtgtgccccgcggcgcccactgccaggacacctgggtcctctctcgccacca

SEQ ID NO: 337409 - DNA, 201 bp, Homo sapiens
aagaacctgggcagagagttgggaagccagggcaaagcatcactcccagctccaaggggcggaggggcgggagaaccctgcttggaaagggcagaggtggkgatgggtcccacccagggcatctggactaggataggaagcggagggaacccccaggacagcccaggcaggggcttgtctgcaaaaactgcagtgatcagg

SEQ ID NO: 337410 - DNA, 201 bp, Homo sapiens
aggtgggcttccgccctgaaccccagcccctggctctgccatcactctgacctctgcctgcccccagccatctgaatcatcagctcccctgccctctccayctgcagcttttttggagcgagcagcctttccctgcacaaaggcaacatctggggttagttagccttttgcctcccctgaggccactgggccaggaaggga

SEQ ID NO: 337411 - DNA, 201 bp, Homo sapiens
acgagatggacctcaatgccgggcgcttcctagtcaatgggcagtgtggctacgtcctaaaacctgcctgcctgcggcaacctgactcgacctttgacccygagtacccaggacctcccagaaccactctcagcatccaggtcagcaggctggaacgggccccagtgtggggtcagactggttctagaaaggctctttgtg

SEQ ID NO: 337412 - DNA, 201 bp, Homo sapiens
caaatgatctgcctgcttcggccttccaaagtactgggattacaggtgtgagccaccatgcccagctaatgttttttattttttgtagagacagggtttcrccatattggtcaggctggtcttgaactcctgacctcaaatgacccgcctgccttggcctcccaaagtgctgggattacaggctcatctgttgatgagcac

SEQ ID NO: 337413 - DNA, 201 bp, Homo sapiens; identical to SEQ ID NO: 71025

SEQ ID NO: 337414 - DNA, 201 bp, Homo sapiens
agctctaaatagcccgatccctgctcctggcttaaagctgctgcgagtatcacaagactgtctgaggatgccaattcagcaggtcagcgcctccccacaacacacacacacacacacacacacacacactcacacatacacagaggggccttgaatgaggaggagacaggagtctgagggaccctcagactgccactctcc

SEQ ID NO: 337415 - DNA, 201 bp, Homo sapiens
cctggggctcttgcattagagagctgaggttccagcagggagatcagacagtgaaacaaaggaacaggaccttgggggtgggggaacagggggcagcacawgaggggctggggagccagcaggccctggctggccccagctgaggaagacgggagtggcaaaggggagaggctgggggtgggaggagctcctccaggccct

SEQ ID NO: 337416 - DNA, 201 bp, Homo sapiens
agctcaggctggagtgcaatggcaccatctcagctcactgcaacctctgcctgccagtttcaagtgattctcctgcctcagcctcctgagtagctgggatyacaggtgcctgccacctcgcccagctaagttttgtatttttagtagagacggggttttgccatgttggccaggctggtctggaactcctgacctcaggtg

SEQ ID NO: 337417 - DNA, 201 bp, Homo sapiens
attaaaagaacaggagaaagcacgcaagctacatatagctaaatttacgaaaccaaccaaagccagggggatttctcttctgattatgtgtcataaaaagktccactgtcttatatacacatgtatataatgttacattccatcactgtaaaaagtcccctttgccccctcccccaaaaaagtttcagtctagtctccaaa

SEQ ID NO: 337418 - DNA, 201 bp, Homo sapiens
cgctgcccccatcctcctcacccccttcttccatgaagtcgtcatcgctggtgtcgtcggatttggcggcggcccgcttggagtacaggccggttttgagrtccggctcctcctggtcgtgatcatccatgaggaactgcgtggtgttatagggcgcgaccggctggcccttggcgaacatctcggctcggatccttgaag

SEQ ID NO: 337419 - DNA, 201 bp, Homo sapiens
gtccgggcctcctggcctccctcccgcggcctcccagccaatcattcttccaggccccggcccaagtcccaacttgctcaagagctcaacctcctcggggrgaagcaggggtgggaaaattcgggtgacccagagactggggaaggcaggggctgagacccgatcgccccgcccccgagtcacggccaacccagcaccggg

SEQ ID NO: 337420 - DNA, 201 bp, Homo sapiens
gcaaatcactttccccaggcctgtgatagtaaaaatcatctgagaggcaaaaagaaaaacgcaggaacctgacaggcaccatgttgcagagacatccctayatgtctgctataattacacaaggtaccaaaaagggcctgtgaggataaagagtggaaaattcctggcctaaattgcgttgtttcactgagggatttctca

SEQ ID NO: 337421 - DNA, 201 bp, Homo sapiens
tacttgaaatatgctaaaatatatgaccttcaaaactaatagtagggcttagagtttatctcatgattatattattttgttttcttgtatgatatttagarctatatatattaaacatgaaataccttccccttaaactcagtaacaaattaggaacgtctggcttgaccaccatgagttaatgatgttctgagagtacca

SEQ ID NO: 337422 - DNA, 201 bp, Homo sapiens
ctaggaagataaattttaaacgttaaatcaggcagagaatgtattggaaaaacaaatatatttttctctggtggcatttagatttacaaaaagaaaaagtdcaggtatctcaacaattgtcactatggcccatgcaccaaagatgatgaatattggccatgagcttctgagcacatttgacactaattattcatgatggaa

SEQ ID NO: 337423 - DNA, 201 bp, Homo sapiens
tggagaagaaatggaggctgggtgcagtggctcatgcctataatttcagcactttgggaggctgtggcctgccagacctcttgaggccacttgaggtctcraaccagcctggtgaacatggtgaaaccctgtctctactaaaactacaaaaattagccaggcatggtggcacacacctgcaatcccagctactcgggaggc

SEQ ID NO: 337424 - DNA, 201 bp, Homo sapiens
ttgtatcaactctatggggtgtttcttacatccttactgtagtcagtggggaagtgctaagagaaaaagaggcaagtggactcattagctgaatctggtcrgtgctggagtacacactggtcattctgttttgtttttttcataacttaaaaaaattacatccttattcatttcagaaccatttaaaatagtctaaaggaa

SEQ ID NO: 337425 - DNA, 201 bp, Homo sapiens
aaaatctggtgtcctggcatcattcttctcaaatcctttggtgccattccagatgctgacattccggcagaaggaaacttgattgtatcaactctatggggtgtttcttacatccttactgtagtcagtggggaagtgctaagagaaaaagaggcaagtggactcattagctgaatctggtcggtgctggagtacacactg

SEQ ID NO: 337426 - DNA, 201 bp, Homo sapiens
ttcttgaagaaatgtcctaagattcacctgttgctaaaaataggcatgagttagtcagtacattgctggattaaagatagtgacagctaattagtcattgytcaaacaatagaagagttgaaaagagaaagtgagagacactccagcattctggccagtcttcttttcttctgattttagagagaagaccaagagtgtaat

SEQ ID NO: 337427 - DNA, 201 bp, Homo sapiens
ttccagcttgcctattttcataggcaaatagcattacaagatctagttgcccaggttctagttacccaggttctcggaatgttgaacagaagacacgaagraataaaagaagcaatgaaagacaaagcaacagaagaacggagtaaggaaagaaaaagcacagactgagcgaagacaactcacagaatagaaacaaacacc

SEQ ID NO: 337428 - DNA, 201 bp, Homo sapiens
tctactagatatttccagcttgcctattttcataggcaaatagcattacaagatctagttgcccaggttctagttacccaggttctcggaatgttgaacaraagacacgaaggaataaaagaagcaatgaaagacaaagcaacagaagaacggagtaaggaaagaaaaagcacagactgagcgaagacaactcacagaata

SEQ ID NO: 337429 - DNA, 201 bp, Homo sapiens
cacccgtaactgtcagcaagagataggcccctacaacgcctgaaatgaaagttaagctgtgtttcgtgccagcctgtgctagtgctcggtttgtggatctrgcctcccttaagtttaaaaggaaaagctgtcgaaaaccctaaagttacctgagagaacttaacagcactacatcagagccgcatcttctgctcaagcttc

SEQ ID NO: 337430 - DNA, 201 bp, Homo sapiens
tgttactcccatcctctttcaccatacatgtctatctccatgcaaggtgcaccacttaaatagattgtgcttaaactgcacccgtaactgtcagcaagagrtaggcccctacaacgcctgaaatgaaagttaagctgtgtttcgtgccagcctgtgctagtgctcggtttgtggatctagcctcccttaagtttaaaagga

SEQ ID NO: 337431 - DNA, 201 bp, Homo sapiens
tcaaaagccaatccacaaccttgtctatttttcttaaaagggtttttacttatttgggaggcacattagcaatcagacgctttttcaggaaagcctgtgtkactaatttagtttactatttgaaggtggaaaatatagaatacaattggtaatgcaagtagccctcaccacctcagtcctccttgggaaaatccgtaggtg

SEQ ID NO: 337432 - DNA, 201 bp, Homo sapiens
ggggaaatgagtaaggttgtatgaaggagtaagagaagaattagataggtttaaaaatggcagaaaatatattagaagagaaaaattgattctttgagcartcaaaactaagaggctcattgtttcctgggccatggttaagtgttttaaacactttattagattttatgattaacaaaaaagttggctaacaacttcttt

SEQ ID NO: 337433 - DNA, 201 bp, Homo sapiens
gtttggacgataaggaaatgctttctgtcaacagctgttcatttagtaacaacctgcctggctaacatggaggttacacactagaggatatatatttagckgaatccaaagcccatttcagctctacatgttgtgagctgcacgtgtaaaggaaaatccagttcatatttacaggcagaataattcagttcatatttatgg

SEQ ID NO: 337434 - DNA, 201 bp, Homo sapiens
tagtctatgaatgcagactattataagtaggtgatgttagtgatgaaaacagcaacagtgtggtattaatgatatacttttcaaaaattatgaacttttgygaatactctgaagaaatcatttttcccttgctttacatggtagtagaaaactattaaaaatggccacaaaatatttggcattggtatgttaaacagttag

SEQ ID NO: 337435 - DNA, 201 bp, Homo sapiens
tattctgtttgcttaagcctatatgcagtggtatggcagtaaattttctttcagaagttaaagaaagccccagtttgtagtgtctgccaattttcatggtktaaatatttctgtcatagcaaattgcaagctaccaatggttgtagttgaggaaattcctgaatatttaacagtggactctcaaccactacaaagtagctc

SEQ ID NO: 337436 - DNA, 201 bp, Homo sapiens
ttgttcccccacaaaaggcttgcatgtggttctcctttacacatcttgaaaaaataaaatggtaggctttctgcccctcacattgaacttgtaatccatgrggaaagcaaaaaaggatgaagccatacttcaaaagccaatccacaaccttgtctatttttcttaaaagggtttttacttatttgggaggcacattagcaa

SEQ ID NO: 337437 - DNA, 201 bp, Homo sapiens
cagacctgaatgagtttatagtctaacaggggattcagacatttaaacactaccgctattaggctagtatatattttctacaactgtcacacacacacacaagcaaaaatggacgatttcctgtcgtaacatattgcaaaggagatagccctcctaggacaggcccaagaaattccttagggggagaagtcttcacttatc

SEQ ID NO: 337438 - DNA, 201 bp, Homo sapiens
ttgtccactacatcttttgttctatccaaagattctgccaagtacttcttaaatgtttaactgctatttaaggatagttttaaataggactgctcatgatkatagtaatgtcagtaatatcccacaaatcttcaatgggatttatacaaagacgaccagggaactcgtgtttcagaacttgcattcctgcatagcattttc

SEQ ID NO: 337439 - DNA, 201 bp, Homo sapiens
ccagacctgaatgagtttatagtctaacaggggattcagacatttaaacactaccgctattaggctagtatatattttctacaactgtcacacacacacacaagcaaaaatggacgatttcctgtcgtaacatattgcaaaggagatagccctcctaggacaggcccaagaaattccttagggggagaagtcttcacttat

SEQ ID NO: 337440 - DNA, 201 bp, Homo sapiens
tttgcttaaggaaactggagaaaactcaagttacacctggccatttgatggctccttagctctcaagtccacctagcatccctaccctgggtcattcttaytttatgtgatacctttagagtgttccatttaaactacactgagacttgtaaagacccacagcatctaccaaggacatcaagtatgggagcttaattaagt

SEQ ID NO: 337441 - DNA, 201 bp, Homo sapiens
aaaaagtacctttggcatttgtttaaatctttttctaatcacaacataggtatctagacatttgccttttgtttcattcattcgtttaacaattatttattgaacatttccaatgtgtcagacactattctaaggaggactcccagacctgaatgagtttatagtctaacaggggattcagacatttaaacactaccgcta

SEQ ID NO: 337442 - DNA, 201 bp, Homo sapiens
ctagcatccctaccctgggtcattcttattttatgtgatacctttagagtgttccatttaaactacactgagacttgtaaagacccacagcatctaccaargacatcaagtatgggagcttaattaagtcaggatccattccatttgaaggatgtagagcattgataacttcctattgctttaagatttcttgtaatattt

SEQ ID NO: 337443 - DNA, 201 bp, Homo sapiens
aaaaaagtacctttggcatttgtttaaatctttttctaatcacaacataggtatctagacatttgccttttgtttcattcattcgtttaacaattatttattgaacatttccaatgtgtcagacactattctaaggaggactcccagacctgaatgagtttatagtctaacaggggattcagacatttaaacactaccgct

SEQ ID NO: 337444 - DNA, 201 bp, Homo sapiens
aaaaaaagtacctttggcatttgtttaaatctttttctaatcacaacataggtatctagacatttgccttttgtttcattcattcgtttaacaattatttattgaacatttccaatgtgtcagacactattctaaggaggactcccagacctgaatgagtttatagtctaacaggggattcagacatttaaacactaccgc

SEQ ID NO: 337445 - DNA, 201 bp, Homo sapiens
aaaaaaaagtacctttggcatttgtttaaatctttttctaatcacaacataggtatctagacatttgccttttgtttcattcattcgtttaacaattatttattgaacatttccaatgtgtcagacactattctaaggaggactcccagacctgaatgagtttatagtctaacaggggattcagacatttaaacactaccg

SEQ ID NO: 337446 - DNA, 201 bp, Homo sapiens
agtatttctggcttcctcacaagaaatacaaacgtgacagattcattttgataattgcctcatgtgagcctcagatatattatgtactggaatcaaaattytaatgctctccaaagataaggcataaaataccattttgggagaaaaaatggaagtattgaaaagtaaacaggaatacactatgcaaattaggcctgagcc

SEQ ID NO: 337447 - DNA, 201 bp, Homo sapiens
tgacagctgggaggggtcaggggatactggaatgttcgagaagaggaagagtggtgggtaagatttttggcttaagactaaagagtattcccagttaacaytagttcctttgattttcataatacttatgtatgatgggtagaacaagtaacagcattttcattaggccaatgagaaaaatgaagcccaagatgttaagtg

SEQ ID NO: 337448 - DNA, 201 bp, Homo sapiens
agcagtggctcacacagaggaaccagccatttaaagctgacttggaactgtgtatgaatgttatgtatgcaaatgatgacctcttggtaggaaaaaaaaaagtacctttggcatttgtttaaatctttttctaatcacaacataggtatctagacatttgccttttgtttcattcattcgtttaacaattatttattgaac

SEQ ID NO: 337449 - DNA, 201 bp, Homo sapiens
gaagcccactgatgcccagcaacttgcttcagagtttaccaaatcaaaagcatttcacccatggttggaaggctccacctggaataattctaagtcacagwaacattgttttgtttccaagaagcgtaacttctttcagtagataactccagcaaagtaaagctgcacgtgatgattgttttagtatttgaggagcacgtt

SEQ ID NO: 337450 - DNA, 201 bp, Homo sapiens
actaatttttatgtttgtagagatggggtctcactatgttgcccaggcttgtatcaaacggctggcctcaggtgatcctcttgcctcagccctccaaagcrttgggattacaggtgtgagccacagtgcccagccttatcagttttatactcagtttattgtggatactggatgaggggcatattgtaattcttggttata

SEQ ID NO: 337451 - DNA, 201 bp, Homo sapiens
ttctcaagacccacacattttctacttattacccctctcctttgacatgtcccccccatggactctggttggaggctagtgctgagttattgctacatacaaactacccccaaactccagtggtttaaacacaatcaagcctatctttcctaatgaatctggatggatctactggtcttggcaagtgtaagagagacaagc

SEQ ID NO: 337452 - DNA, 201 bp, Homo sapiens
attctcaagacccacacattttctacttattacccctctcctttgacatgtcccccccatggactctggttggaggctagtgctgagttattgctacatacaaactacccccaaactccagtggtttaaacacaatcaagcctatctttcctaatgaatctggatggatctactggtcttggcaagtgtaagagagacaag

SEQ ID NO: 337453 - DNA, 201 bp, Homo sapiens
attgctttttatgaaagctagccagtgtgatagatggtttaaaaactttatagctacatgtcttctgaaaaagtgttcagagaatggcatatgtagaacayctggtactttgtgagcatacgtgcccatgtgtatgctcacgttatcgctcaaggattcccatattactagttaatattgacaatttttaatacaattgca

SEQ ID NO: 337454 - DNA, 201 bp, Homo sapiens
tatatttggtatataatttctctgtagtataaaatcatacttttttgtaatagaatatatttagatccagagtagtatctacacaagacaatgttgcttamattaagtcagcaaacttatgctttcatttgaaatgtgatatcttgagatttccttttcattcagctaattagcacaagctgattagtcaaatgaagcaca

SEQ ID NO: 337455 - DNA, 201 bp, Homo sapiens
aatcatggcagaaggtgaaaggggagcaaaggcacatcttacatggcagcaggtaagagcatctgcaggggaactgccctttattaaaccatcagatcctragagacttattcactgtcatgaaaacagcatgagaaaacccacccacatgattcaattacctcctaccaggtccctcccatgacccatggggattatggg

SEQ ID NO: 337456 - DNA, 201 bp, Homo sapiens
tgtttttctttggttcgaaaatcagtgacactgagagcctaaagcaacatgtgattactgggcataattgaaacccagggggctcaggtttaaaactaccrctatggcacaaagccagtgactgtacatttctgatatctgcctaggaaagtaaaaaatgttttactatacaaggttacctgttgctgagggcaccttcta

SEQ ID NO: 337457 - DNA, 201 bp, Homo sapiens
gggttgtcagaaatttagcaaggaaaaatttagtgcctaggagacctctaaggcttttcctaatttccatttgaccctgtcaacccaattgaagagagaayatttctcccagaaaatattaattactaaaatgcttttgtttttctttggttcgaaaatcagtgacactgagagcctaaagcaacatgtgattactgggca

SEQ ID NO: 337458 - DNA, 201 bp, Homo sapiens
atctaaatggagcttaactttgaagtttttatattgactaagatttaaggatgagattttgatagaccaatgatcactgcaccgatcagatagccctcttyatattcccctgggaaagtaagagcagacactttcaggaggacaatgattccaattttatgggttgtcagaaatttagcaaggaaaaatttagtgcctagg

SEQ ID NO: 337459 - DNA, 201 bp, Homo sapiens
caattctggggtctattctgtttgcttaagcctatatgcagtggtatggcagtaaattttctttcagaagttaaagaaagccccagtttgtagtgtctgcmaattttcatggtgtaaatatttctgtcatagcaaattgcaagctaccaatggttgtagttgaggaaattcctgaatatttaacagtggactctcaaccac

SEQ ID NO: 337460 - DNA, 201 bp, Homo sapiens
tttctaatttctgcagagaaatatcacaggaggataaatgttaacatttcaattcaattcaacaaacacttattgtttgtaaatgtttgtcaagttgaatygaattaacattttagtgagcattgctgcagactgtgacctatgtttaagtatttgaaaaataatccctcctctttcctgctgttactcataatagttttt

SEQ ID NO: 337461 - DNA, 201 bp, Homo sapiens
aaggatggttcacaaagcttttctcctataggtaggaagtatattcatctatttgttttgtatttttaagttctttttcaaaaactatataagtaaccacrtgtatgaaactttgaaaggagatataaaaagggaatggaaaaccacacaccctcattgcatcttgtttccccctccctcaggtaaacaatttatgacgta

SEQ ID NO: 337462 - DNA, 201 bp, Homo sapiens
acagaaagaagggcaagagctcctcttagctattgtttagaaatcaagtgcagggagtagaatatactctggctaattttggaagaaaaagatttatagakaaagatttacataatcattgtgagagctaaagagacagatgtctaagtcctaccctagaactgggctgcccagggagctgctgcttctgctccaatctgc

SEQ ID NO: 337463 - DNA, 201 bp, Homo sapiens
tttttccattcaaagtatacaatactagttgcaaaatgttttgtgggttgtgttctgcatggtaaattttaatccttgttttgccagtctaggtaaatatwtattagccattgattttttagaacagcacaggacatcagcctttaattttctagttgaagcaggaatggccagtttccctatgtcctttcctttctacca

SEQ ID NO: 337464 - DNA, 201 bp, Homo sapiens
actacctcctctgtcttgcgtaaatctagcagttagtgttgtaagttgctatttagttttggttctgctggtcaaatcatcagttcggaaggaaaaaaaaagtcaatttgcagttgtgactacagatggctaaacctccatcgtcagacttttcctgcaatctgtccttggattatgctgtttcttatgaaaatgtccccc

SEQ ID NO: 337465 - DNA, 201 bp, Homo sapiens
aactacctcctctgtcttgcgtaaatctagcagttagtgttgtaagttgctatttagttttggttctgctggtcaaatcatcagttcggaaggaaaaaaaaagtcaatttgcagttgtgactacagatggctaaacctccatcgtcagacttttcctgcaatctgtccttggattatgctgtttcttatgaaaatgtcccc

SEQ ID NO: 337466 - DNA, 201 bp, Homo sapiens
agtaacattgttttgtttccaagaagcgtaacttctttcagtagataactccagcaaagtaaagctgcacgtgatgattgttttagtatttgaggagcacrttattggcaggctcttatagctaaaatatccacttccctaggccctagggtcaggtctctaaaatactggaaaagctgtgcaactcttttcctttgataa

SEQ ID NO: 337467 - DNA, 201 bp, Homo sapiens
gaactacctcctctgtcttgcgtaaatctagcagttagtgttgtaagttgctatttagttttggttctgctggtcaaatcatcagttcggaaggaaaaaaaaagtcaatttgcagttgtgactacagatggctaaacctccatcgtcagacttttcctgcaatctgtccttggattatgctgtttcttatgaaaatgtccc

SEQ ID NO: 337468 - DNA, 201 bp, Homo sapiens
ggaactacctcctctgtcttgcgtaaatctagcagttagtgttgtaagttgctatttagttttggttctgctggtcaaatcatcagttcggaaggaaaaaaaaagtcaatttgcagttgtgactacagatggctaaacctccatcgtcagacttttcctgcaatctgtccttggattatgctgtttcttatgaaaatgtcc

SEQ ID NO: 337469 - DNA, 201 bp, Homo sapiens
ttgagatttccttttcattcagctaattagcacaagctgattagtcaaatgaagcacatttaatacattctctgatcagaaggaaacattttctaggaccsccatgtctactgagaagcttttttgtagcttcctgtacagcactagtagttttgcattgttaaagtttggaaaattcaccaaatgagaagctcatccaac

SEQ ID NO: 337470 - DNA, 201 bp, Homo sapiens
tgtggggaattcgggataaggacagcttaaggaagacatgttaggggagatgaacattttgatggctcttctaatgttgcctttgagggaactacctcctctgtcttgcgtaaatctagcagttagtgttgtaagttgctatttagttttggttctgctggtcaaatcatcagttcggaaggaaaaaaaaagtcaatttgc

SEQ ID NO: 337471 - DNA, 201 bp, Homo sapiens
ctttatatcatatcacagcggctggggtgtttgagtctactcgccacgtctttcatattccttgatcagcatactagccagcgcattcttgagatggccakgacagaaggccaagaaggcaaaccaattatgtaagcccactttaaactcctgattgtattatatctgtagctgattgcgttataatactcctttggtcaa

SEQ ID NO: 337472 - DNA, 201 bp, Homo sapiens
agccagtgactgtacatttctgatatctgcctaggaaagtaaaaaatgttttactatacaaggttacctgttgctgagggcaccttctaggcctttgttayggcattcaggttaaatggatatccactaagggatttttcaagcaggctagaagagtcatgtctaagtcttttcaacaacaacaaacagctcaggaactcc

SEQ ID NO: 337473 - DNA, 201 bp, Homo sapiens
atgtggggaattcgggataaggacagcttaaggaagacatgttaggggagatgaacattttgatggctcttctaatgttgcctttgagggaactacctcctctgtcttgcgtaaatctagcagttagtgttgtaagttgctatttagttttggttctgctggtcaaatcatcagttcggaaggaaaaaaaaagtcaatttg

SEQ ID NO: 337474 - DNA, 201 bp, Homo sapiens
gagcaacaagctgtctgaatgtgttaaaacaacaattgttttccccctagaggtctaaatgttggctagcatgactttatactttatatcatatcacagcrgctggggtgtttgagtctactcgccacgtctttcatattccttgatcagcatactagccagcgcattcttgagatggccatgacagaaggccaagaaggc

SEQ ID NO: 337475 - DNA, 201 bp, Homo sapiens
catgtggggaattcgggataaggacagcttaaggaagacatgttaggggagatgaacattttgatggctcttctaatgttgcctttgagggaactacctcctctgtcttgcgtaaatctagcagttagtgttgtaagttgctatttagttttggttctgctggtcaaatcatcagttcggaaggaaaaaaaaagtcaattt

SEQ ID NO: 337476 - DNA, 201 bp, Homo sapiens
tgtgtgtgtgtgtgtgtgtgtgtgtgtgtgtctatctgtgtctgtaataggaagacctaaggaaagtaatacttgaaatgtgttgcaagtacatgttttcrtttgtgcattatttcatccaatacacattttctcagtacctactaagtgttaggaattatgaacagagcagtcctatcacctccctccaagatcctagcc

SEQ ID NO: 337477 - DNA, 201 bp, Homo sapiens
tataacccaatcagaactgagattctttgtaaggaagaaaaattgttttgcagcaagtttatcattaatgcatatgccaagatcaagccagaatactaatrtgttcttaccccacagtaggattggtgaaaactcaatgtgtatttttttctctcttttatgccaaggttagtggaaaggacaaagagtttcatgaagtta

SEQ ID NO: 337478 - DNA, 201 bp, Homo sapiens
gctgacctgcagatttgtgactaatgttagtcatttataacaggctcctttctccttaatagtagaggagaaataaatcttaaaatctacttgacgggttkattgtttggtgataaaacttgatgatattccagatatctttagaaagagtttagtattctccctggcaggtttctgattaacggcacttgaagatgagac

SEQ ID NO: 337479 - DNA, 201 bp, Homo sapiens
cagcacagtgttaaactgcatggatgtaacaatggataggaaatgattcctgctcccaagaacctgcttgaccacacaaggagagaatataggtagtgacygctcattgcatgcggaaagcacaggaccaaggccaacaaatgcagccaaataccagttactcctttgagcccaaggagatgggcagatgaagctgaaggg

SEQ ID NO: 337480 - DNA, 201 bp, Homo sapiens
taaatgttttccatctcagcttgaaacaaaactgattagggtcccacaacacaaagattacataaattaaaatctaagaaaggaagagacataagattaarggaataaaacaagcctggaatgaacgtaaaagaaaaatttatgccataataagcatgctgtgcctgcttcaggtaggctagaatttggttttactatttt

SEQ ID NO: 337481 - DNA, 201 bp, Homo sapiens
ttttattttattattaactcacggcaacaaggccttctatttttaagttctgggatacatgtgctaagcatgcagatttgttatataggtatacatgtgcygtggtgctttgctgcacctatcaacccatcatctaggttttaaaccttgcatgtgttaggtatttgttgtaatgctctccctccccttgttccccacctg

SEQ ID NO: 337482 - DNA, 201 bp, Homo sapiens
aagatgcgtggtgacttggctactctagatttctagcctgaactctccagctatggcccacctccttaattagctccagttgtactcaattagttctgttytctcatctgtccagctgtccctcacttttcagctctcagcttcttctgaaaagccatctctcacacctctaaggtggtgaatatgaccctcgtttgtgct

SEQ ID NO: 337483 - DNA, 201 bp, Homo sapiens
cacatctgctgattctcactttattctgccagattagtaatgaagttttaagttgtaatatctgtaggagccttggaagattccatcactaatcattcttrttgtggcatttaagatgcgtggtgacttggctactctagatttctagcctgaactctccagctatggcccacctccttaattagctccagttgtactcaa

SEQ ID NO: 337484 - DNA, 201 bp, Homo sapiens
catctaggttttaaaccttgcatgtgttaggtatttgttgtaatgctctccctccccttgttccccacctgaggacaggccctggtgtgtgatattccccsctccctgtgtccatgggttctcattgtttatctcccacttattagtgagaacctgcagcgtttggttttctgttcctgtgcaagttaaggccttctcttt

SEQ ID NO: 337485 - DNA, 201 bp, Homo sapiens
tccactaatccatgggcctgtaatcatcctcaatatttactaatagcattacattagctttaaggctgtacacagccagagttctgtgagcaaggatatasctgctcataaagagactaactggtttccctttcatgtctttaattcttttcactttccatgcgaattgtcctaagcatttatgctttttataggcttctg

SEQ ID NO: 337486 - DNA, 201 bp, Homo sapiens
atcgaaattttatgcttaagtatacttaagtacatgtaaaatactatgttttaagggtgcataagaggtgccaaaatatttttagagataaagttgcaggygatttcttttatatttctctgcaatttgaaaattttctataatgtatgtttgtgaaaataagataacattaaaaagataccttagtggagtaattgatcc

SEQ ID NO: 337487 - DNA, 201 bp, Homo sapiens
ggcaacataagactttatatacaatatgaaagagaaagtttataagaaaagttttattatataaatacttgagcatgacagtattggaatacataaggaagtgataagattcttgcatatactcttagaaacacagtgaatgtagtctatgaatgcagactattataagtaggtgatgttagtgatgaaaacagcaacagt

SEQ ID NO: 337488 - DNA, 201 bp, Homo sapiens
aggcaacataagactttatatacaatatgaaagagaaagtttataagaaaagttttattatataaatacttgagcatgacagtattggaatacataaggaagtgataagattcttgcatatactcttagaaacacagtgaatgtagtctatgaatgcagactattataagtaggtgatgttagtgatgaaaacagcaacag

SEQ ID NO: 337489 - DNA, 201 bp, Homo sapiens
aaggcaacataagactttatatacaatatgaaagagaaagtttataagaaaagttttattatataaatacttgagcatgacagtattggaatacataaggaagtgataagattcttgcatatactcttagaaacacagtgaatgtagtctatgaatgcagactattataagtaggtgatgttagtgatgaaaacagcaaca

SEQ ID NO: 337490 - DNA, 201 bp, Homo sapiens
aaaggcaacataagactttatatacaatatgaaagagaaagtttataagaaaagttttattatataaatacttgagcatgacagtattggaatacataaggaagtgataagattcttgcatatactcttagaaacacagtgaatgtagtctatgaatgcagactattataagtaggtgatgttagtgatgaaaacagcaac

SEQ ID NO: 337491 - DNA, 201 bp, Homo sapiens
aggtgcacgctatggagtagaaaatttttaaataggatgttatcaagaaggcagaagggattgttactctataagattctgatgttaaaattttatacacmtgataactcttgaagaaactagctaagagttttaaaagtatttcattgcattctaagataaatcttaagataacaactttatattttttctaattctcag

SEQ ID NO: 337492 - DNA, 201 bp, Homo sapiens
aaaattgttttgcagcaagtttatcattaatgcatatgccaagatcaagccagaatactaatgtgttcttaccccacagtaggattggtgaaaactcaatrtgtatttttttctctcttttatgccaaggttagtggaaaggacaaagagtttcatgaagttattactgcttttcgagtccacttacttgaatgccttttg

SEQ ID NO: 337493 - DNA, 201 bp, Homo sapiens
acttaaggatcagtgttggagagagaggatccagggcatctctgagcatgtatgtaagcaggcactaactgacgatcagagctgggttgagtcagcttcaractttactgttttttcctgatctttgcacatttaagatgaaagagaacctgctaggtgcacgctatggagtagaaaatttttaaataggatgttatcaag

SEQ ID NO: 337494 - DNA, 201 bp, Homo sapiens
cgtactttttttccggcttgcaccatgtaagattagtttattaaatgtattttgtctttaggctgttttcatatattgaaaaaaaagttacgaggaataartcatccctagaaacataagcagaggtgacttaaaacattttggctttcctcccaacaacacatttcatttaagcatttatttaagaagaggatagggtac

SEQ ID NO: 337495 - DNA, 201 bp, Homo sapiens
agccagctggcccacaagcagtgcaggtggttttctaaatggttttccagaattcctggtgtaaggatttttgtatgtgatctgcatttgccgcttttctttttattacactgagaataaagcagaattagaccctgaatgtcacatataaagttgatagtctttttgcttatatgcatttgtatgtctatatatgtatat

SEQ ID NO: 337496 - DNA, 201 bp, Homo sapiens
gagccagctggcccacaagcagtgcaggtggttttctaaatggttttccagaattcctggtgtaaggatttttgtatgtgatctgcatttgccgcttttctttttattacactgagaataaagcagaattagaccctgaatgtcacatataaagttgatagtctttttgcttatatgcatttgtatgtctatatatgtata

SEQ ID NO: 337497 - DNA, 201 bp, Homo sapiens
ttgtctttaggctgttttcatatattgaaaaaaaagttacgaggaataaatcatccctagaaacataagcagaggtgacttaaaacattttggctttcctyccaacaacacatttcatttaagcatttatttaagaagaggatagggtactttttagtagaaacacttataaaccagcatttgtgaaagtatgctgtggcc

SEQ ID NO: 337498 - DNA, 201 bp, Homo sapiens
gcactttataaaactgaggggaaaaaatggctccatgctaaatggagaaaaaaataacttttagaggcactaaactttcagaggcagtaaatattcttgtmtatttctcaggtgctctagaatcttaatattctacttgctcccctcacccccacatttgtctgcaaacttcacctacacagcgagcaacacatctctacc

SEQ ID NO: 337499 - DNA, 201 bp, Homo sapiens
ggagccagctggcccacaagcagtgcaggtggttttctaaatggttttccagaattcctggtgtaaggatttttgtatgtgatctgcatttgccgcttttctttttattacactgagaataaagcagaattagaccctgaatgtcacatataaagttgatagtctttttgcttatatgcatttgtatgtctatatatgtat

SEQ ID NO: 337500 - DNA, 201 bp, Homo sapiens
tgaatttttgatcacatgcctttcggaaaactagtaggaaaatagattgatgcatgaatttggaagttatgttcaaggcaaaatcctgatggtgtttggtrtttgcccagatagcatatttataattatataatttctgttcttctctgtacttgtgaaatactttggatctgctttacattggagtacactgctcctctg

SEQ ID NO: 337501 - DNA, 201 bp, Homo sapiens
tggtttgcactttgatataaatttcttgggtgtatagaaatcccgtgtttgtaaagttcctgtatatttcagatcacttctggaattagcataaagcagtrattatgatttgccactaaaaagtagggtaaaaagaaacccttacctcccaggccagtaatcaatgggctagctcctctctagcagggcttaggccaggag

SEQ ID NO: 337502 - DNA, 201 bp, Homo sapiens
gatctatctatctcagattgacattgggttgtattttgccctcaggtacttaaagatagctccacttttctaattctgattacaagatttttattcagcarattcattggttggagatattttgctatttctcagggggagagcattgtgcttttccttatagttagatgtcagtggggtaggctagcatttatcattatg

SEQ ID NO: 337503 - DNA, 201 bp, Homo sapiens
atggcaggtaatggatcaaccctgtttcccacctaaaactgaattgtaaagccgtaacagtgtacagaaatagaaaacattgatttagaaagataaaaccygattgtttaatcccctttggaacctatacaaaatgaagtagtaatgctgatgattttgctaattctaactcatttccacagccagtcgggttaaactgac

SEQ ID NO: 337504 - DNA, 201 bp, Homo sapiens
ttatggggcttagagaaaattgtgatttatgaatgaaaagctcttcaggttttctaaaaattaaaggttgagtctttgaagaaaacatctttataagggamtgtaaaccacaccaaattatcctatttgtgcatagtatacatctggcaaatgcctatagtattagattaaatttgacacaagcctatctggcttattaaa

SEQ ID NO: 337505 - DNA, 201 bp, Homo sapiens
cccatgaagcccactgatgcccagcaacttgcttcagagtttaccaaatcaaaagcatttcacccatggttggaaggctccacctggaataattctaagtyacagtaacattgttttgtttccaagaagcgtaacttctttcagtagataactccagcaaagtaaagctgcacgtgatgattgttttagtatttgaggagc

SEQ ID NO: 337506 - DNA, 201 bp, Homo sapiens
aactccttaacagggttttttttttttttaaagaattcattcctgaatcttagtgacaataaaacccatgtctattttcatggcatgaattaagaggttargggaattctattcactgtgcaaagaactgagcactttcaaaaagttgccaattttttttttaatgaaaagaccgttttcaatttaaatggaataggaaag

SEQ ID NO: 337507 - DNA, 201 bp, Homo sapiens
cactgtagtttttaatgttgatgtctactgttggtgagcgtcaggagattcctgtaagctattcatgggtaaattttgtaccatttttctgaaaagcaacwttataaaacatatcaaatatcttatctttcagcaattccttttctaaaaatgtattaagttatagaaatatgggggagaagctactaagacattcatagg

SEQ ID NO: 337508 - DNA, 201 bp, Homo sapiens
ttacagaatatgactactcatcctgaaagtgtgattgagttggtctgcagtaaaaacctaggatcatatttttatctggcttttgatgtgcaggaagagcygagagccaccacttcttatgagtggtgatccatgtggggaattcgggataaggacagcttaaggaagacatgttaggggagatgaacattttgatggctc

SEQ ID NO: 337509 - DNA, 201 bp, Homo sapiens
gtcctcctctctgtgctggacttagaaaagattatgttgatctttcttgattttaagtgaacttacaagcaggattagacaccaaaaacaaaacaaaacaraacaaaaaactctttcctccaagccagctatttaatgtaagtacctatggttaaatcccccatttacagtatgaatgtaagacccacatgttcagagata

SEQ ID NO: 337510 - DNA, 201 bp, Homo sapiens
ggttacaattataatagactgatagaattttcaaaaatatgttcggtaaacagaagacattcttgtctttgtgattttattgaagttgccctaagttatayattctttataaatcttgagaaattatctagtattgagttttaccacatacctttctattatcaaataaggtaattctatcaatttactccttaaactaaa

SEQ ID NO: 337511 - DNA, 201 bp, Homo sapiens
tcatctatgccctttacttaggtgtgacaattctctttcccccaacattcaaaatgactttatagatattatatcaatggctacagcccacttttttcccctcatattcaggtaattttttttcttgtattttttaagttttggggtacatgcgcaggatgtgcaggttacctaggtaaacatgtaccacggttggctgca

SEQ ID NO: 337512 - DNA, 201 bp, Homo sapiens
atgtacaaggagattaatattgtttccatgcttgctaacacaacattcattttacagctcatggatcaaggagtaatttagactttcaagtcttatttaaraaatgtgttttgtaaggctatagccgtgatatcagtgattcctctgatagatctgggcaaagtgaattgaaaattttatgggtttacccttttatacacc

SEQ ID NO: 337513 - DNA, 201 bp, Homo sapiens
aatatattagtggatgatttttgcctccatgtacataatatagatctattctttgtgtttttatcttggttggatagtattttgagtgcagttttaaaacktctttaaaaaaataatttcaataacaggcatcagtttttagaaatgttcaggaaatttaattataaaactcttgctcagaaattttggggtagataattc

SEQ ID NO: 337514 - DNA, 201 bp, Homo sapiens
tgacctggaaggccctgggtacattaggccttgaagaaagagttaatcgtgctcttgctttatctaggtactagcctctctctctctctctctctctctctttctgtgtgtgtgtgtgtgtgtgtgtgtgtgtgtgtgtgtgtgtgtctatctgtgtctgtaataggaagacctaaggaaagtaatacttgaaatgtgttg

SEQ ID NO: 337515 - DNA, 201 bp, Homo sapiens
tgaaagtatgctgtggccagtagacttccaagagatcttaatagatcatccctcaaaaaatagttccatggttaaatgtgtctgggagatgctaactactrtattattcctctcctagaaattcgaagtactcattaggatatttaaaactttgagagggcctgtaatatagaagcattttttaactttaatcaatatgca

SEQ ID NO: 337516 - DNA, 201 bp, Homo sapiens
gttgggataatatactccattattttctagcaaaggattggctttttaaaagaatttttgtaagtcctgcggttattcaaaatacatatttccttaaatcraaggtaactttaaaaattctacttatcccgggttagaatgctgaattcagccaactatgaacacttgtggagctttttaattttcttttttaaaattaat

SEQ ID NO: 337517 - DNA, 201 bp, Homo sapiens
gtagacttccaagagatcttaatagatcatccctcaaaaaatagttccatggttaaatgtgtctgggagatgctaactactgtattattcctctcctagarattcgaagtactcattaggatatttaaaactttgagagggcctgtaatatagaagcattttttaactttaatcaatatgcagacactgttgatttgctca

SEQ ID NO: 337518 - DNA, 201 bp, Homo sapiens
cggttattcaaaatacatatttccttaaatcgaaggtaactttaaaaattctacttatcccgggttagaatgctgaattcagccaactatgaacacttgtkgagctttttaattttcttttttaaaattaattttttttgtgtgaaaccagcagttaattagtttgattctaaccaaagagacaattgcacatggtgtttt

SEQ ID NO: 337519 - DNA, 201 bp, Homo sapiens
gatgacctggaaggccctgggtacattaggccttgaagaaagagttaatcgtgctcttgctttatctaggtactagcctctctctctctctctctctctctctttctgtgtgtgtgtgtgtgtgtgtgtgtgtgtgtgtgtgtgtgtgtctatctgtgtctgtaataggaagacctaaggaaagtaatacttgaaatgtgt

SEQ ID NO: 337520 - DNA, 201 bp, Homo sapiens
aactcagactacagtatactgtaaatgtaacctttatatacactgaggaactttcctgcagcattcactttattgtagtgttctggaaccaaacctacaayacccccgagggatgcctatattgttttaatttgcacttctttgattattactgattttgaataacttttctgatatctgttgagcaatggaattgctttt

SEQ ID NO: 337521 - DNA, 201 bp, Homo sapiens
tagactctttcactccagtactgttctcttccttcatgagggcaattgttatgctagtttctgtctgagaacaaaacgtcgggctggtctagctcttcttyaaaatcagaggttgtagctgctggaaagcctctcattcccaacaaagcttcctattctctcacccattcctcattccaagtgccatagaaggcacaaacg

SEQ ID NO: 337522 - DNA, 201 bp, Homo sapiens
gaagcacatttaatacattctctgatcagaaggaaacattttctaggaccgccatgtctactgagaagcttttttgtagcttcctgtacagcactagtagttttgcattgttaaagtttggaaaattcaccaaatgagaagctcatccaactgtgtttattctattcataccacatgtcagggcattgagagtggaatcat

SEQ ID NO: 337523 - DNA, 201 bp, Homo sapiens
tgaagcacatttaatacattctctgatcagaaggaaacattttctaggaccgccatgtctactgagaagcttttttgtagcttcctgtacagcactagtagttttgcattgttaaagtttggaaaattcaccaaatgagaagctcatccaactgtgtttattctattcataccacatgtcagggcattgagagtggaatca

SEQ ID NO: 337524 - DNA, 201 bp, Homo sapiens
tcaaaatcagaggttgtagctgctggaaagcctctcattcccaacaaagcttcctattctctcacccattcctcattccaagtgccatagaaggcacaaaygtatttaaaatcatggcctttagaggctgccaaatctcaattccattcttaccttcacttccctttcaagattggttctactattaatttattaactaat

SEQ ID NO: 337525 - DNA, 201 bp, Homo sapiens
gaagattgacataatatgagactaaaggattaagcagtgggtagatcatgaagggtcttagagaccattgtgatgattttagacttgatctttagaacaayagaagaactaaaagagttattggaaaaaattttcatttaggacaatgaattggaggggaacaagaatagatggaagactaagaaaaaggcttgcagtatc

SEQ ID NO: 337526 - DNA, 201 bp, Homo sapiens
ttcatatactcttatgacacattttcttcccgtcttgccagttacgataataaagcaatatttgggaggggagttgggaaagattatgtcaagctagaggygagagaaacagacaaattatgcaatgcataggagaaaatggctgatgaattttaagcatagggatgatgcattacaattcccctatgatacagtagattg

SEQ ID NO: 337527 - DNA, 201 bp, Homo sapiens
gattgagttggtctgcagtaaaaacctaggatcatatttttatctggcttttgatgtgcaggaagagccgagagccaccacttcttatgagtggtgatccrtgtggggaattcgggataaggacagcttaaggaagacatgttaggggagatgaacattttgatggctcttctaatgttgcctttgagggaactacctcct

SEQ ID NO: 337528 - DNA, 201 bp, Homo sapiens
ttatctggcttttgatgtgcaggaagagccgagagccaccacttcttatgagtggtgatccatgtggggaattcgggataaggacagcttaaggaagacaygttaggggagatgaacattttgatggctcttctaatgttgcctttgagggaactacctcctctgtcttgcgtaaatctagcagttagtgttgtaagttgc

SEQ ID NO: 337529 - DNA, 201 bp, Homo sapiens
agtgctggcttagagaagtttttagcttattagaatatctacatagaaaaacaagttttttagtaatagtatcttcttccaagaagctggcttggaactcyccatttattgttgctatttaataagaaaagcatccaggttaataaatcaagctgatggtttcaccatgtaaacatctttgaatattttagtcagtaatta

SEQ ID NO: 337530 - DNA, 201 bp, Homo sapiens
gtgagttaacaattcttaagtgtaagatgatcagagaattcacatgggaacttgcctactcaaacaatatatttattgagcatctattgtgttccactgtycttggtgcttgggacatgcttctcgagtgatttcctctaataaaatgctcagcaaggggcttagaaaaataacaagggaccaagtagtacgaaagagttg

SEQ ID NO: 337531 - DNA, 201 bp, Homo sapiens
tctattgtgttccactgttcttggtgcttgggacatgcttctcgagtgatttcctctaataaaatgctcagcaaggggcttagaaaaataacaagggaccragtagtacgaaagagttggaaagaaaatgtaactacacttggctctacttccatttttacaggaaaaaaagctcagtttgattcagtttataatgcactg

SEQ ID NO: 337532 - DNA, 201 bp, Homo sapiens
ttttgtagccttggtagaaatttttcttattctcagaaactagatgtggagtccccaacgcttttgtttgtgtctcaaattgggggaaataagtatgccaytttcttgtaaagtataaatgagaagattccacgactttgtgtatattttgttttagctttctggattccattttgcttcttttactcccatgagccatct

SEQ ID NO: 337533 - DNA, 201 bp, Homo sapiens
ggtgcttgggacatgcttctcgagtgatttcctctaataaaatgctcagcaaggggcttagaaaaataacaagggaccaagtagtacgaaagagttggaargaaaatgtaactacacttggctctacttccatttttacaggaaaaaaagctcagtttgattcagtttataatgcactggagtcttgtagtttcgcttttc

SEQ ID NO: 337534 - DNA, 201 bp, Homo sapiens
tatagaccctcccccgcaccccccccacttttatttttggagaaggagtagcagaaaaaagagtgggatagtcattcaacacatagttattgaggatgtgytgagccacatagtacaacgtaaaggaaaaaaaaaggagactaatgtcatttcccagtgtggtcaccaggaaaagacagaatttttgctggaaaatatacc

SEQ ID NO: 337535 - DNA, 201 bp, Homo sapiens
gaaatgtggggtcagagcccccacacagagtccctactggggcactgcctagtggagctatgagacaaaggccaccatcttccagaccccagaatggtagrtccactgacagcttacactgtgtgccagcatgtgaaagcagccatgatgggggctataccctgcaaagccacaggggtggagctgccaaaggctatggga

SEQ ID NO: 337536 - DNA, 201 bp, Homo sapiens
tttctaatctgactttgaagttgtttgttgaagtacatgagttcagatatgctttgtgtattttttcatgcttgacaattcaaaaatcgcatgaaaacttyagtcttcgaaggacccttatatattgaactaccaggtagaaaaggaagccttttaaagcatatgtcctcacttctcttttctcacctagattactgccat

SEQ ID NO: 337537 - DNA, 201 bp, Homo sapiens
agtaaataaagcatacaatataaagatttacgtccagggtctcttcagagatccttcattaaatgcctatatgaaacccgatagcttttttccattcaaartatacaatactagttgcaaaatgttttgtgggttgtgttctgcatggtaaattttaatccttgttttgccagtctaggtaaatatttattagccattgat

SEQ ID NO: 337538 - DNA, 201 bp, Homo sapiens
actgcttgacatctttatcagtatatttgaggctccacaggctgcccatcatcaccctgcccccacctgaagaaaaacatgtggagaagtcccaagattakagaatcaattcagggccaagtcacataaccaaaaccactcattgctttacaagaatgatttcaaatagtattccttcaaattagaagcttcactagccta

SEQ ID NO: 337539 - DNA, 201 bp, Homo sapiens
tatgaaccaaagcaaattccaagaccaggctagattacagagatgaggaatagacttcacctgttgatagtaggaacttcaaaggcacagtgcaaaaagtsgtagaaggataattggtaccatatttgcaatcattctaccacaaagatgcctttataactttatacattatagagtgttttatggcttgacaagtgttta

SEQ ID NO: 337540 - DNA, 201 bp, Homo sapiens
tagattacagagatgaggaatagacttcacctgttgatagtaggaacttcaaaggcacagtgcaaaaagtcgtagaaggataattggtaccatatttgcartcattctaccacaaagatgcctttataactttatacattatagagtgttttatggcttgacaagtgtttacacatccacaatctcacttggacttggcaa

SEQ ID NO: 337541 - DNA, 201 bp, Homo sapiens
atgaagcacatttaatacattctctgatcagaaggaaacattttctaggaccgccatgtctactgagaagcttttttgtagcttcctgtacagcactagtagttttgcattgttaaagtttggaaaattcaccaaatgagaagctcatccaactgtgtttattctattcataccacatgtcagggcattgagagtggaatc

SEQ ID NO: 337542 - DNA, 201 bp, Homo sapiens
agagggatctaggtcacgtgattcttatgagactctaatgcctgatttgaggtagaactgtttcttcctgaaaccatctcccccacaccacaccccacatytgtggaaaaactgtctcccatgagcactggtccctggtgcccaaaaaaaaaaaaaaaaaaaaaaaaggctggggactgctggtgcacagaatcctgactt

SEQ ID NO: 337543 - DNA, 201 bp, Homo sapiens
aaacattttaaacaataacactgcccttacttcacactgaaaattctggttttttggccttgagtaggaaccctgcaatgttattttggggggaaaaaaaaccatatgattctaatgttatccagggttaacaatcactgtaccaattgttcttgagttacacagtcaattgtaagtcatgccagctttttatttttttcc

SEQ ID NO: 337544 - DNA, 201 bp, Homo sapiens
agagagatgggaaaatgtgaaattcactatacattttagctatcaattagacagggctcaattatcaattattatcaattatcaattatgggagatgagasagaagcaggtgtcatgtaatcatcctgattactgatacagcaactgaacgaatgattccatttaggaagatgaagatcactggaggaaagagttgagagt

SEQ ID NO: 337545 - DNA, 201 bp, Homo sapiens
atttctatatgtctgcctattttggagagatgcaattaatccatctagactgaagaaatatgtcctgtgttaataaatatattttttccaggcatttacttaatcatgccacaaataatccaaatatctccaggaggtgggctgcagtgcaatattattatcctcaatttgcagatgaatgaaaatgttatatgatgaagc

SEQ ID NO: 337546 - DNA, 201 bp, Homo sapiens
tatttcaaaggctcgtgaatcactagttttcaaggccagccatttcagacttctcttttggtacagacaaaagccaagcctagaagagaggagtcaatatyatatagggcaccatgttctcaatgttgttttagtcttttctcactcatattccatatttcatctatgccctttacttaggtgtgacaattctctttcccc

SEQ ID NO: 337547 - DNA, 201 bp, Homo sapiens
catttctatatgtctgcctattttggagagatgcaattaatccatctagactgaagaaatatgtcctgtgttaataaatatattttttccaggcatttacttaatcatgccacaaataatccaaatatctccaggaggtgggctgcagtgcaatattattatcctcaatttgcagatgaatgaaaatgttatatgatgaag

SEQ ID NO: 337548 - DNA, 201 bp, Homo sapiens
ttctcaatttgagttgtgttattttctctggtgttgggagctatagtgcttatgaaaagtcctatacaccttgaaactgtacagtcttttgacagagctgraagtgatgagaaaaaagatgggccgattaaaaagttctttatatattcttcctaaagtcttagaaaagaaaaaccacttaccatcgtcattaggaaattg

SEQ ID NO: 337549 - DNA, 201 bp, Homo sapiens
acatttctatatgtctgcctattttggagagatgcaattaatccatctagactgaagaaatatgtcctgtgttaataaatatattttttccaggcatttacttaatcatgccacaaataatccaaatatctccaggaggtgggctgcagtgcaatattattatcctcaatttgcagatgaatgaaaatgttatatgatgaa

SEQ ID NO: 337550 - DNA, 201 bp, Homo sapiens
tgctcttggtgaagatttgctcttccagcctcattccaaagcagaacactcactctgtgtctgttttgtccagtttgaaagagaacatttctatatgtctbcctattttggagagatgcaattaatccatctagactgaagaaatatgtcctgtgttaataaatatattttttccaggcatttacttaatcatgccacaaa

SEQ ID NO: 337551 - DNA, 201 bp, Homo sapiens
atgacctggaaggccctgggtacattaggccttgaagaaagagttaatcgtgctcttgctttatctaggtactagcctctctctctctctctctctctctytttctgtgtgtgtgtgtgtgtgtgtgtgtgtgtgtgtgtgtgtgtgtctatctgtgtctgtaataggaagacctaaggaaagtaatacttgaaatgtgtt

SEQ ID NO: 337552 - DNA, 201 bp, Homo sapiens
gctggaagtgatgagaaaaaagatgggccgattaaaaagttctttatatattcttcctaaagtcttagaaaagaaaaaccacttaccatcgtcattaggarattgcaaacactcatgtccttgcaatgaaagctaaggtgggattttagtcagccttctgcccctggattttttcatctgtgggagccagctggcccacaa

SEQ ID NO: 337553 - DNA, 201 bp, Homo sapiens
agcaacatcaagcattagaggattagccactgtaatagatttcatttcccaattttgaaagatatagggcccctgcacttaaaaagttcaattgaaatctraaaggaaaatctctagggaagtagagttcttcaaatgtcttctttgtttaaaaagcttgtgattgaggaaatgacttacccatgattggtggcaaggtta

SEQ ID NO: 337554 - DNA, 201 bp, Homo sapiens
ctcctctctccccgcctccccacacccagcagtccccagagtgtgatgttccccttcctgtgtccatgtgttctcattgttcaattcccacctatgagtgrgaacatgtggtgtttggttttttgtctttacgataagtttactgagaatgatgatttccaattttcatccatgtccctacaaaggacatgaactcatcat

SEQ ID NO: 337555 - DNA, 201 bp, Homo sapiens
attaatttgagaagacttaacatctttgtgtgattttagccttccaacctagtaatatttattcagatcttatttcacacaaagattctttttaacttcttatgataaatttcaaatatgtacaaaagtagagatgaacttccacgaacccatcacatggttttagtagggatcagttcatgaccagtttcatatctactg

SEQ ID NO: 337556 - DNA, 201 bp, Homo sapiens
atatctgaggtcataggaatgggttatagatgccttgggaggatctttggaattagaagaaaataaggcctagaacttagccctgaaaaactttagcattkagagattagatagaggaggaaggattccccatgaaggctgagtcagaatggccagggagatggtgggaagaccagaaagagtgatgctaaccagacaggg

SEQ ID NO: 337557 - DNA, 201 bp, Homo sapiens
ccttgagaaccactgtctcacaggataaaatcttaccatatcttaccaatcgaatcttgtctctttggcatccaaagctctccatgtctgagtaaattggrccagaggagttaggaaacactggaaattgggtactggatatctttcactaatcaaattgacaaatcactgtagtttttaatgttgatgtctactgttggt

SEQ ID NO: 337558 - DNA, 201 bp, Homo sapiens
agagtgatgctaaccagacagggaagaacatgtaagaaagaaaaagtcatctcttttccttaccccaatttgcaaggttcatggctgacttccccataacraaagacattgacaaaagaaaagcataacaaacttatttaaccaaaattttttgtgaaacaagaaccttcagagatgaagatccaaaggcccagggaaaac

SEQ ID NO: 337559 - DNA, 201 bp, Homo sapiens
tttcatgtaatattctctcccactagaatggaagctacatgaggagaaagaatgtcattatattcaccactgtgttgtcagtgcctagcaagtattcactraaaaggggaaaaaaaacccactaatatctatttaaaaactgaatggttgattaaatacattaatcatcctcagaagtatctgccttcatgtcagcagtaa

SEQ ID NO: 337560 - DNA, 201 bp, Homo sapiens
ccataggtactttattaaagaaaatattaacaaattgcaataattgctttgacctgtttgaaatcttctagagtattttaaagcttctttcaaatattaaactgatgtttatctctttttaaaaataaaaagacatttacttgttcttctgggttttcagtaaaaccatgctgctctgcatacataccatgttttattaat

SEQ ID NO: 337561 - DNA, 201 bp, Homo sapiens
aatttgcagttgtgactacagatggctaaacctccatcgtcagacttttcctgcaatctgtccttggattatgctgtttcttatgaaaatgtcccccctctgcaggatgttctagaaatggtagtgcctcactgttttaggggtaggtagggataattcaaatgttggcagtgccacagcagagcttgctttagtcaactg

SEQ ID NO: 337562 - DNA, 201 bp, Homo sapiens
tgaaataatgtaataaaagtccaagcgggagtgtaaattgattaaatacaaatttattttaagaaataaataatattagttcctattagtgagtgcctagyatgccaagcactatgcttattgtgttctcattatttcatttagtccacataaggaccctgcaaaggattatcggctctgaatggaagagaaatatgattc

SEQ ID NO: 337563 - DNA, 201 bp, Homo sapiens
acttggacttggcaacgaatcctagatagtcaatttccttcttattctcatcttatgtaggaggaaactgaggccagatcagttgagtagctgagtttcakaacttacgtttctcttgttaccaagctccatgttcattgtcatggtccataaaaacattttatcaaaataaagtgaaaatgaatgcttgacatagctaga

SEQ ID NO: 337564 - DNA, 201 bp, Homo sapiens
tactattgtgtatagatcatgtaacgtagattggaactatctccattcacacaatctgaagggaatttctgcttgcctgcagtcaggggtggggcctgtgkagcgtggttaatatttcgcaaggttacttagaagattgaaatcagactaaataactgactcacccataagaaaaagacactgcacttatttattggcagt

SEQ ID NO: 337565 - DNA, 201 bp, Homo sapiens
tcactctaaaatttatttctggtatcattgggaaacatggttaatacaggaaatacttcattttatgtgcttaaccttattttccagatattgtgttttgrgggttttgttgtttttacaaattgagggcttgtggtaatcctgcatggagcaagtctatcaagtgccattttcccaacagcatgtgctcacttcatatgt

SEQ ID NO: 337566 - DNA, 201 bp, Homo sapiens
ttgtgccactccgtgtgctgttacagctttcatgagatagactgttggtgcgtgtctggtgaccagaggatgaattgcccaactcaggacatttttgaaastgaaaaggatactatcaataatcacaccagaacaacaacataaagaaataagtacttttgtaagaaaccagcatctccagttatgtgctcttctgattgt

SEQ ID NO: 337567 - DNA, 201 bp, Homo sapiens
aaaatatattggagactgtcttttccaaagaaattggatttgaggattctgcacagatgtccaaagaaatgtatgggtagatgtgaatttatcctttaccraaattgctaagtttgtgaggtgtcagactctactcaattccacctttctttcactctctcctacccttccttctctagtattcagatagacaaatgcacc

SEQ ID NO: 337568 - DNA, 201 bp, Homo sapiens
ctcattttcactcccctgcattgctggccatcaggaacaccaaaatacaacattgaatttatagacaataattttgtagatatgatagatctggttcactwttttcaattattttaatggaaatttttattgtcaattatcttaatgtccattgttttcttgcatctccaacttatatgtcacttttatgtgttggcattt

SEQ ID NO: 337569 - DNA, 201 bp, Homo sapiens
cttaaccatgttcctcaatggctcctggatagcttttaattttaaaaccatataaacatagttgtagaacatgctacattaggcttgttatttagatttcrttcgccgctgttcgtgtttcttattctacaacaagggtcagcctacaggcaaaacacatcccattgtcatttttttgtaaataaagttgtattggaacat

SEQ ID NO: 337570 - DNA, 201 bp, Homo sapiens
accatataaacatagttgtagaacatgctacattaggcttgttatttagatttcgttcgccgctgttcgtgtttcttattctacaacaagggtcagcctayaggcaaaacacatcccattgtcatttttttgtaaataaagttgtattggaacatggccactctcatttgttttctattatttatggctgctttcacttac

SEQ ID NO: 337571 - DNA, 201 bp, Homo sapiens
gtggtgtgatcatggctcattgcagcctcaaactcctgggctcaagcaatcctcccgcctcggtctcccaagtagttgggactacaggcatgagccaccayacctggctaatttttttaaagtttttggtagaaatggagttttttaatgttgcccaggctggtcttgaactcctggtcttaaatgaccctctcccatcag

SEQ ID NO: 337572 - DNA, 201 bp, Homo sapiens
aattaatttgagaagacttaacatctttgtgtgattttagccttccaacctagtaatatttattcagatcttatttcacacaaagattctttttaacttcttatgataaatttcaaatatgtacaaaagtagagatgaacttccacgaacccatcacatggttttagtagggatcagttcatgaccagtttcatatctact

SEQ ID NO: 337573 - DNA, 201 bp, Homo sapiens
tttgtaccatttttctgaaaagcaactttataaaacatatcaaatatcttatctttcagcaattccttttctaaaaatgtattaagttatagaaatatggrggagaagctactaagacattcataggcattattttaaaatagcaaatatttcagaagaaactattcaactataaagagctggctaaattttagtacataa

SEQ ID NO: 337574 - DNA, 201 bp, Homo sapiens
gaattaatttgagaagacttaacatctttgtgtgattttagccttccaacctagtaatatttattcagatcttatttcacacaaagattctttttaacttcttatgataaatttcaaatatgtacaaaagtagagatgaacttccacgaacccatcacatggttttagtagggatcagttcatgaccagtttcatatctac

SEQ ID NO: 337575 - DNA, 201 bp, Homo sapiens
gcggctggggtgtttgagtctactcgccacgtctttcatattccttgatcagcatactagccagcgcattcttgagatggccatgacagaaggccaagaargcaaaccaattatgtaagcccactttaaactcctgattgtattatatctgtagctgattgcgttataatactcctttggtcaaagaaaatcatatggcta

SEQ ID NO: 337576 - DNA, 201 bp, Homo sapiens
cctgtgtataacgtctcctgatctcttagggacttgtagatatgcatacacacatgcacacatgttcacaaattaattgaaagctgtgtatttttcagaaytctgattttgtcattgtctttgacattagtatattcagtcactcatttttggactgtgaactaaaagcacctgtgtctttaaaggtgcagcactttaaaa

SEQ ID NO: 337577 - DNA, 201 bp, Homo sapiens
tatttaagttttagttattatttacttaactgcttggaaaatcatgtaggaccttcttagagatttatagcaatttcttctttctatactgggagtagtgkgggtattctgagcaacaagctgtctgaatgtgttaaaacaacaattgttttccccctagaggtctaaatgttggctagcatgactttatactttatatca

SEQ ID NO: 337578 - DNA, 201 bp, Homo sapiens
gttggtactatctaggtactgtctgctaacttgtgtcccacttccagtcttagatccctccagcctaactgccacactgctgctagagcagcttttcaaaratgagatctatttcctatagtgaaactctccagtgactccatgttcctctagaatcaagcccaagcttccaagtacatcatacgagaagtccttcatgac

SEQ ID NO: 337579 - DNA, 201 bp, Homo sapiens
aaggcttttataaaaatttgctatgagtatttttgtgcacatatctttacttcttatctctaaggttccatccggaataattttccttcctcttgaagacyacatttaggaattttcttgtgggtcaaatggtagcatattgttatattttgcttctttaaaaatgtttttcatttttgctggtgttaagattgtcagtaa

SEQ ID NO: 337580 - DNA, 201 bp, Homo sapiens
gacttgtagatatgcatacacacatgcacacatgttcacaaattaattgaaagctgtgtatttttcagaattctgattttgtcattgtctttgacattagyatattcagtcactcatttttggactgtgaactaaaagcacctgtgtctttaaaggtgcagcactttaaaaaatgttcaaagatgaggttcttttttaaac

SEQ ID NO: 337581 - DNA, 201 bp, Homo sapiens
acacatgataactcttgaagaaactagctaagagttttaaaagtatttcattgcattctaagataaatcttaagataacaactttatattttttctaattmtcagcctgaatatgccaatatttgcttttggtacattccaccgagcctcagagagatggaagaaggacccgagttctgggcaaaacttaatttggtaagt

SEQ ID NO: 337582 - DNA, 201 bp, Homo sapiens
ctcccactagaatggaagctacatgaggagaaagaatgtcattatattcaccactgtgttgtcagtgcctagcaagtattcactaaaaaggggaaaaaaamcccactaatatctatttaaaaactgaatggttgattaaatacattaatcatcctcagaagtatctgccttcatgtcagcagtaactaagaatttgaattt

SEQ ID NO: 337583 - DNA, 201 bp, Homo sapiens
ttattgttatctggtggtttgcatgatcagatttctttgactctggtataattctgagtaacaacttgtaagttcgttctgctgagaaccacagatattgytttctagttttagtttcatttctttttacataaattcctatcaaaaataatttgcattatgttgttaatgcttgttggtggggaatattaattgtgtcat

SEQ ID NO: 337584 - DNA, 201 bp, Homo sapiens
ctgaagttactgttttcttataaacctgatattctattccatctcctgctggctttactgtcattcaattttttgtatttaaatccttaatccatgtagargttattttagtgtatcatgcaaagtatgaatctaacctgatcatttcctcaaagtattatcaagtttttctaattaattcctcctaacactttattatgg

SEQ ID NO: 337585 - DNA, 201 bp, Homo sapiens
atgacaggccaaacagttgtagacattgtttacatttaacaaattaacatggttgacacacacccaaaacaattaggttgtctgtaaggtagaagttctgsctcacagtgtacttcaggaagtgacatctggtcatgggacacaaggttaaagttgtgtgatgaatgactatttatttcaactctgctactgcatctctga

SEQ ID NO: 337586 - DNA, 201 bp, Homo sapiens
aatgacaagtgaactttattgttatctggtggtttgcatgatcagatttctttgactctggtataattctgagtaacaacttgtaagttcgttctgctgaraaccacagatattgttttctagttttagtttcatttctttttacataaattcctatcaaaaataatttgcattatgttgttaatgcttgttggtggggaa

SEQ ID NO: 337587 - DNA, 201 bp, Homo sapiens
cttataaacctgatattctattccatctcctgctggctttactgtcattcaattttttgtatttaaatccttaatccatgtagaggttattttagtgtatyatgcaaagtatgaatctaacctgatcatttcctcaaagtattatcaagtttttctaattaattcctcctaacactttattatggggtcttatgttacaat

SEQ ID NO: 337588 - DNA, 201 bp, Homo sapiens
tcattcaacctgaaaatatgtagagactactgcgtattcagtgaataagacatgctccctaccctaagtcaaaggttagtaacattttaagcaaacatatrctattatttagttatgtaatgattaaaaagcaggagttggagaatgtaaataaaatgagaacactgctgaaaaggctggtcaagaaacttgtagcagagg

SEQ ID NO: 337589 - DNA, 201 bp, Homo sapiens
tgacttcaggtgtgtgtcctactttttttttttttttttttttttttaaacattccaatgacaagtgaactttattgttatctggtggtttgcatgatcaratttctttgactctggtataattctgagtaacaacttgtaagttcgttctgctgagaaccacagatattgttttctagttttagtttcatttctttttac

SEQ ID NO: 337590 - DNA, 201 bp, Homo sapiens
tcctttacgataggttctcaaatctgctaatactctatcctcctggatcttttgtaaaatagcattctttaatatttttcatttttatatgttttagaacyctttaagttaaaaagggcatcttttaaatattcttattgaagattaaatcactgattctgaagtaaataatgcctctgccactcactggctgcatgacca

SEQ ID NO: 337591 - DNA, 201 bp, Homo sapiens
agagactactgcgtattcagtgaataagacatgctccctaccctaagtcaaaggttagtaacattttaagcaaacatatactattatttagttatgtaatkattaaaaagcaggagttggagaatgtaaataaaatgagaacactgctgaaaaggctggtcaagaaacttgtagcagaggtgacatatcagttaactggta

SEQ ID NO: 337592 - DNA, 201 bp, Homo sapiens
caatatttggcttgaacttctgtatttaaaatttctgccattattgcagatgtattgacttcaggtgtgtgtcctactttttttttttttttttttttttttaaacattccaatgacaagtgaactttattgttatctggtggtttgcatgatcagatttctttgactctggtataattctgagtaacaacttgtaagttc

SEQ ID NO: 337593 - DNA, 201 bp, Homo sapiens
taaataatgcctctgccactcactggctgcatgaccatgaacaagttactgaaacttgctttccttttcattttttccatcaataacaggaggatatttaraaactacctgcacctcacagaactttgatggggattacagtatttaagcattataccaaagtgcttagaatagtgcctggcacagagtaaatgcttgata

SEQ ID NO: 337594 - DNA, 201 bp, Homo sapiens
gtcatctttttgtgacacatgttaactattcatctatagagaaagtttccaagtgataccagacttccatatgagcaaattatcccattaggtgtaccaartgaaacctaatattgtacaaaacctgcatatcaactacaggaaatgtggaatagtctaaagtgaaaataatttgtaaaaaaacatagcattagtgtataa

SEQ ID NO: 337595 - DNA, 201 bp, Homo sapiens
acaatatttggcttgaacttctgtatttaaaatttctgccattattgcagatgtattgacttcaggtgtgtgtcctactttttttttttttttttttttttttaaacattccaatgacaagtgaactttattgttatctggtggtttgcatgatcagatttctttgactctggtataattctgagtaacaacttgtaagtt

SEQ ID NO: 337596 - DNA, 201 bp, Homo sapiens
gagtaaatgcttgataaacattagctttcattattattcatcctgttacctcatatttgaaggactatatgagccccagatatcttctccatgcctttttstttgcttaacaaaataccttaacactatcacaataatagacttcctaaagtccaactctcaatatgtcactcatgtttccccccttgtcccataggaaag

SEQ ID NO: 337597 - DNA, 201 bp, Homo sapiens
cacaatatttggcttgaacttctgtatttaaaatttctgccattattgcagatgtattgacttcaggtgtgtgtcctactttttttttttttttttttttttttaaacattccaatgacaagtgaactttattgttatctggtggtttgcatgatcagatttctttgactctggtataattctgagtaacaacttgtaagt

SEQ ID NO: 337598 - DNA, 201 bp, Homo sapiens
ttttcagggactaaataggatagtacatgtaaaccacttcacatagtgctaagtgggacaggctacataatttgcagagcctgatgtgaagtaaatgtggrgttccttttccagaaactactaaaaatttcaagatggccacagtagagcattaccaagcatggggccccttgtcagctcaggagcttgtgtgactgtgct

SEQ ID NO: 337599 - DNA, 201 bp, Homo sapiens
gcattttaattccctacttatgaatattaatcttgtttctagttattttgtatggaatatacctatatacccacagtacagacatttagatagtacatatwaatatatgtgcacatatatgctgttatatctatccttgatattgataacttttttctttgtagaccagcatttcaaaactggtttgcttgataagatatg

SEQ ID NO: 337600 - DNA, 201 bp, Homo sapiens
acttaccctaaactcttaagcaaaagaagcttggtttcagcagagccacatgtttctctaggacctttctcacaacttccccaacttgggaaagaatgccrgactccaagagcaactttctccccttagacgtggcatgtaggaattcccttagctgacatcttgagggctattttgcagttattcccaaaaaaagatctt

SEQ ID NO: 337601 - DNA, 201 bp, Homo sapiens
ttgaatagtgattacctggaagaagcaaaagagacctttggggggaaggtgatagtgttttgttatgtaactgctttaggacgtacgtagaggttcaattrtgtgaaatagtaatttattactatcattacttgacttgaacataacttgacgtgtatcacttaccctaaactcttaagcaaaagaagcttggtttcagca

SEQ ID NO: 337602 - DNA, 201 bp, Homo sapiens
ccagccattgctaaaaggggccaaggtgcagctcagcccatggtttcagagggtgcaagccccaaaccttagcagcttccatgtggtgttgagcatgtggrcacacaagtcaagaattgaggtttgggaacctccacctaaatttcagaagaggtatggaaacccctggatgcccagataaaagtttgctgcaggggaggg

SEQ ID NO: 337603 - DNA, 201 bp, Homo sapiens
agactaagtaactaaatgttagtcaaaaacagaatctttgttagtagcaccaccagcagaagttgtctctttgtcatttcctgtcttcaaacagagcctcctctccatgctcacagattctacctggaagctttggttttcaggcttcctaccagctttccatatgtagggagtgaggccaatataggctacaatagaaca

SEQ ID NO: 337604 - DNA, 201 bp, Homo sapiens
tgtgatcatggctcattgcagcctcaaactcctgggctcaagcaatcctcccgcctcggtctcccaagtagttgggactacaggcatgagccaccacaccyggctaatttttttaaagtttttggtagaaatggagttttttaatgttgcccaggctggtcttgaactcctggtcttaaatgaccctctcccatcagcctc

SEQ ID NO: 337605 - DNA, 201 bp, Homo sapiens
caagctcaaaatgcacccatttacacagacgctttgtattgacctatactttagcacttgaaatctcacatttgaatgatatcctcattttttttttttttgagatagagtcctgctctgtcgcccaggccagcgtgcagtaacgctgtctcagctcactgcaacctctgcctcccaggttcaagcgattctcctgcctca

SEQ ID NO: 337606 - DNA, 201 bp, Homo sapiens
tggtagaaatggagttttttaatgttgcccaggctggtcttgaactcctggtcttaaatgaccctctcccatcagcctcccaaagtgctgagattaggggycatcatactcagctactatctggctcttcacaaaaaatttttgccatctcctgtattattgattgatattatctatatgactaaaccacctttatgatgg

SEQ ID NO: 337607 - DNA, 201 bp, Homo sapiens
aggcaccttggtcactccacatatctccttcactcactccacatctctgcttcctatttgctggagttataaaatggaaagtaaaatcatctaaaaagctkcctggtaatataagtttcaatttcctttttaaagaaagccaacccttctgtgagcttgaagatgaaagttgcctgttaaatgcatatatttctggctatt

SEQ ID NO: 337608 - DNA, 201 bp, Homo sapiens
aaatgcatatatttctggctattctgccttgaggtcagtgaagtagaacaagatattaaagatactctctcaaactgggtcagaactgtgttaaaagatgrgaggattatttcaggaagccacaaaataatccactcacacaggttgaaaaaaatttatgtagcatttttggactctgaaaaaccatctgaggagatggat

SEQ ID NO: 337609 - DNA, 201 bp, Homo sapiens
cactcacacaggttgaaaaaaatttatgtagcatttttggactctgaaaaaccatctgaggagatggattagtcagctggtgtagcatacaagatcatgcrcaggttctgtttttattgctccattcagcagaatgtcattatttctaaagctaagcagaagcatgctttaagaagcaatttcaccattttcttcctatct

SEQ ID NO: 337610 - DNA, 201 bp, Homo sapiens
gattagtcagctggtgtagcatacaagatcatgcgcaggttctgtttttattgctccattcagcagaatgtcattatttctaaagctaagcagaagcatgstttaagaagcaatttcaccattttcttcctatctctgaacaagtaaataaaaaaagtaatccaaaattacttctcccacttaaatgtagcaaaaaaaaaa

SEQ ID NO: 337611 - DNA, 201 bp, Homo sapiens
cagctggtgtagcatacaagatcatgcgcaggttctgtttttattgctccattcagcagaatgtcattatttctaaagctaagcagaagcatgctttaagwagcaatttcaccattttcttcctatctctgaacaagtaaataaaaaaagtaatccaaaattacttctcccacttaaatgtagcaaaaaaaaaattacttg

SEQ ID NO: 337612 - DNA, 201 bp, Homo sapiens
attttcttgtacgtttgggacataccaaatagtattcttcaacctttctttgataaagacataagtgacaagaaagcacaaggagactgcacaatgctggraataagctcatgaattttaagtacatggccttttcatgggtccaagaaaaagtaactttttttacttttaaaatgtttttgtattctaacaacttatgca

SEQ ID NO: 337613 - DNA, 201 bp, Homo sapiens
acattgtcaggtgctctaagaaacatgaaggtgctaaagtacttgtctgtcaagtactggtttcttccttaatggggagcaaaattgactatatgatgaargataatcaaaatttctgcagtttatggctatggacaaaagcaagctgtgttgggagggcaaatgtctggtatgtaagatgtctcatttgggagaagagac

SEQ ID NO: 337614 - DNA, 201 bp, Homo sapiens
agctgactgttagtgagaacgtgcttggtccctaaattgccaaaacatgaattcctttcaaataagctttaatttgaatttatgggaatcagacaagtgaraggacattgcaaattgtaaagaactggtaaaatacttgttaaaaacaacaactactactaccagcagaatagtttgtgataaagatttgatgaatatcag

SEQ ID NO: 337615 - DNA, 201 bp, Homo sapiens
tcacaatatttggcttgaacttctgtatttaaaatttctgccattattgcagatgtattgacttcaggtgtgtgtcctactttttttttttttttttttttttttaaacattccaatgacaagtgaactttattgttatctggtggtttgcatgatcagatttctttgactctggtataattctgagtaacaacttgtaag

SEQ ID NO: 337616 - DNA, 201 bp, Homo sapiens
atttgcagagcctgatgtgaagtaaatgtggggttccttttccagaaactactaaaaatttcaagatggccacagtagagcattaccaagcatggggcccyttgtcagctcaggagcttgtgtgactgtgctggttgcacatcttcaagacatccctgatgctcagggttaatgagagtgaatttagcattcctacctcct

SEQ ID NO: 337617 - DNA, 201 bp, Homo sapiens
attttccccttagaagacaaaaaacaaaagactccctactcaggtaagcaacaaacatttgctgagtgtccactatactatgcactggaaatacaaacatsaaaaggacgtgtctctgcccttgagaaactcaatattcctagagacaatgagtaaagagacaatcacaaggtaaccaagaagtacctgaatggagattaa

SEQ ID NO: 337618 - DNA, 201 bp, Homo sapiens
aagtgtatctatcctcataggagttcatactttaacaaggatgggttttttaatgtttttaagtttgaatattatagttctgttgttgtacttttttttttcaagttttcataaaaactacctagtcctggagaatgctagatcacaatatttggcttgaacttctgtatttaaaatttctgccattattgcagatgtatt

SEQ ID NO: 337619 - DNA, 201 bp, Homo sapiens
aggggagatgaaggtggggacaatgtgtcacattagggtcatatttgagtttcaacccttccaagcctggctagtacaaaaactcatgcaaaataaaaatktggggctccttgtttcaaaattacccagagttttaagatgctgacagctgagcattaaaccaagcatgcccttctgagggcagggccttgttcagctgca

SEQ ID NO: 337620 - DNA, 201 bp, Homo sapiens
gtgtccactatactatgcactggaaatacaaacatcaaaaggacgtgtctctgcccttgagaaactcaatattcctagagacaatgagtaaagagacaatsacaaggtaaccaagaagtacctgaatggagattaactgtttgcagtgaaagtagagagaaagggtatctaccccaatgtgtgatactagagctgagtttt

SEQ ID NO: 337621 - DNA, 201 bp, Homo sapiens
aatgctttttaaattcaggtttcctaatctttcttcaaaagcatttacattctcatgagcagagtagagtatatatgtgcatatgtgtgtacatgcatacrtctgtgttctaacctttgacatcacaggcatagttttgtcaatttgataggcaagacatttgtacacttaatgacatagatgcaaacattttccttctaa

SEQ ID NO: 337622 - DNA, 201 bp, Homo sapiens
agccagcataggctggtggagcaagtagagaattaattacactttcttgtacattattactcttcaatatgcatatggtcttttaacaacctgaaataaaagcatcctacaggcattttggacatgtcctatttgatatttggaaattaattatttagaacggtttcatttttcctgatgttacttctgcatttattttta

SEQ ID NO: 337623 - DNA, 201 bp, Homo sapiens
tgttttcacaatgttatcacatagtagatgcatagaaaataatttattgattcattcagcaaaataaggcatgaacttcatttgggcaacttatatgcttrttgtggcttcctgaagacatcatggtttgttctttgtccattatcccacctgtagttttacagaatatgactactcatcctgaaagtgtgattgagttgg

SEQ ID NO: 337624 - DNA, 201 bp, Homo sapiens
tttgtgacacatgttaactattcatctatagagaaagtttccaagtgataccagacttccatatgagcaaattatcccattaggtgtaccaagtgaaaccyaatattgtacaaaacctgcatatcaactacaggaaatgtggaatagtctaaagtgaaaataatttgtaaaaaaacatagcattagtgtataaactggagg

SEQ ID NO: 337625 - DNA, 201 bp, Homo sapiens
cttactgacaagctcaaactaggatgaacattgaatatttagagacattttgttagagttgtgttagaaatgacaaattttcttagacaatacagctcacyggcagcatgccatcaatactgtttctactgaattctcattaacagcaggagatatggggaagaaagtctaggttaaatccagatcgcaaaagtttaattt

SEQ ID NO: 337626 - DNA, 201 bp, Homo sapiens
agcatgaggctgggttcagtctatctggcttctggttctggcctcttggggaattaaaccagctgtgtgttgttagagacatcccttggacactctttttsttcattctctaaaatgtaacatttatgtaccccattctaccagctaacttgagaatcaaattagtcagcactggagtccagggcacagtgtacatttata

SEQ ID NO: 337627 - DNA, 201 bp, Homo sapiens
aaaatttctgccattattgcagatgtattgacttcaggtgtgtgtcctactttttttttttttttttttttttttaaacattccaatgacaagtgaacttkattgttatctggtggtttgcatgatcagatttctttgactctggtataattctgagtaacaacttgtaagttcgttctgctgagaaccacagatattgtt

SEQ ID NO: 337628 - DNA, 201 bp, Homo sapiens
aagtataggagtcaaattgccacgcaggctccatgacaatcttggctgacgctcggagatctctggaactacagtggcccttcaagaggggtctggagttrggcccagacggctaggcctttacatctccagcagttatcaggtgtagaccaccacaagaatgggtgtgaccctggaggaggtagctccctgcagccaagg

SEQ ID NO: 337629 - DNA, 201 bp, Homo sapiens
attatcccattaggtgtaccaagtgaaacctaatattgtacaaaacctgcatatcaactacaggaaatgtggaatagtctaaagtgaaaataatttgtaawaaaacatagcattagtgtataaactggaggagaaaagtagaggaattttaattaagggtcagaagactggataaggcaagaagataacttgatattccat

SEQ ID NO: 337630 - DNA, 201 bp, Homo sapiens
tgttacaatgtgggttcccaagaatgctgctctagatggtgtttagtgagtgggacgtttattaaggagtacccttgggatcaacatgagtgacgacctgrggaaggaggaggaggatgcaagaaagggcaagtataggagtcaaattgccacgcaggctccatgacaatcttggctgacgctcggagatctctggaacta

SEQ ID NO: 337631 - DNA, 201 bp, Homo sapiens
taatttttaattaaaattttttccaattacttttctttccatgaggaatcactttttgcatttatttttcatgtccttattaaatttatgtaattaatatycattttctcctgatttatgtttttgttctgtaagaatgctattttacatttgagggcagttttggctcagctccttaagttccattttggagtgtgctca

SEQ ID NO: 337632 - DNA, 201 bp, Homo sapiens
atgagtgtgttctatcttatcttttcctccaccctccaggctgattcctaggtttataattgagccagttttcaaagacaggctaaatactttttttttttattatgaaagtaactattttatatatatttgtaggttcacataaatatatgcttttttcatactttttgtgtatgtacactggcttcataacgtggttaa

SEQ ID NO: 337633 - DNA, 201 bp, Homo sapiens
attgaatccaagtgtgtaagtgccatgctatagaaatttcacaccaaacgtggattagagactttaagtagatgaaattttatttcaaaaatctctatttaatggtttcttttgcatagtgccatcgcaaataatggaatagttttatgatacttatcagtattcaaatagctatttgatttaaatagtggtaccgtgaga

SEQ ID NO: 337634 - DNA, 201 bp, Homo sapiens
cattgaatccaagtgtgtaagtgccatgctatagaaatttcacaccaaacgtggattagagactttaagtagatgaaattttatttcaaaaatctctatttaatggtttcttttgcatagtgccatcgcaaataatggaatagttttatgatacttatcagtattcaaatagctatttgatttaaatagtggtaccgtgag

SEQ ID NO: 337635 - DNA, 201 bp, Homo sapiens
gcattgaatccaagtgtgtaagtgccatgctatagaaatttcacaccaaacgtggattagagactttaagtagatgaaattttatttcaaaaatctctatttaatggtttcttttgcatagtgccatcgcaaataatggaatagttttatgatacttatcagtattcaaatagctatttgatttaaatagtggtaccgtga

SEQ ID NO: 337636 - DNA, 201 bp, Homo sapiens
ggagtgtgctcatctaaattactttccaattaatctgtaataaccatgttagtttactctgagcaaaggctgagtttactctgagcaaaggctgatttatraaagtgattttaacctcccaagtgcttaagatgtgttatgaaattctggttctttttattgtactcaatgatcagaatgaaaccagagataaagagtgac

SEQ ID NO: 337637 - DNA, 201 bp, Homo sapiens
tcaatgatcagaatgaaaccagagataaagagtgacaaatttttaccttttacacttcatagttattcttggaaggacatcttatacaaaaaaccattttyagttcacaccctctttcccaagtagataaacaggcctcagagttggggagggaagaggactctctgaagagaaagcaattcttaagtataagtgtaaacc

SEQ ID NO: 337638 - DNA, 201 bp, Homo sapiens
atggattttgtaaggcaggggagaaagaaaatgtctacggttcattttaggtcactggggtatgggcactgtatgtcagcccatgctgactttttagaggrtatgctgagcagtgataggcttggggactatataagtgattggatatgggacaggaataggtactcttcaccctaagatgctatacaatacagttatccc

SEQ ID NO: 337639 - DNA, 201 bp, Homo sapiens
gcaaataattctagaaaataatgtgatacatacataatgtgagcattttcccatttaatatttgtatctttatatttaaatttttaatgttatatttgtayatcagtgtacatttatgttaccatcttttgatggaaaggttttttccacctagtgaagatttccaaatgctttttataaacaagtgaaacttttcttaag

SEQ ID NO: 337640 - DNA, 201 bp, Homo sapiens
agagaggagagagaatgttggaattaaaataggaaaactcatttacagatgttctatttccaagtgcttggctctccatgttctgtggagtttcccggatwttcttgttcccaggtggctggagactattaaaacactgaaatcacccgtattcaggattcttggctagaagcagctctaaggatcaatccagcctctcca

SEQ ID NO: 337641 - DNA, 201 bp, Homo sapiens
atgtttgctttgtggaaacagatggaaggtaatgggaacaggatctggaagcctggtgggtggagggaaaagtttatatggtttataaagcagtatcattrtctgttaattactaaacataactgaaagtctcaaatctttgtcccttagaggtaaaatgatacctgaggaactggagaagcaagtctggcaagccagaaa

SEQ ID NO: 337642 - DNA, 201 bp, Homo sapiens
cattattggcatgatccctttaaagagtaggaaattgaggcttggagagtgtatattatttgttcaagattccatagctgtaactggaatacttgacgttmaatcctggtttctctgaccccaaagtgaatgttctcaaccactatgctaaggagctcaattaaattacttttttatgcaataatgtcccaaagattgtgc

SEQ ID NO: 337643 - DNA, 201 bp, Homo sapiens
taggcattattggcatgatccctttaaagagtaggaaattgaggcttggagagtgtatattatttgttcaagattccatagctgtaactggaatacttgaygttaaatcctggtttctctgaccccaaagtgaatgttctcaaccactatgctaaggagctcaattaaattacttttttatgcaataatgtcccaaagatt

SEQ ID NO: 337644 - DNA, 201 bp, Homo sapiens
agcattgaatccaagtgtgtaagtgccatgctatagaaatttcacaccaaacgtggattagagactttaagtagatgaaattttatttcaaaaatctctatttaatggtttcttttgcatagtgccatcgcaaataatggaatagttttatgatacttatcagtattcaaatagctatttgatttaaatagtggtaccgtg

SEQ ID NO: 337645 - DNA, 201 bp, Homo sapiens
ctgaatgtcacatataaagttgatagtctttttgcttatatgcatttgtatgtctatatatgtatatgtacatgtatttgagagagtatgtgtcactgttktctaacagcaaggagaaagtggaacattggaaattgtaagtgaacataacaagacaatacccagtacttgagtattttttcctggaaagaataaaaataa

SEQ ID NO: 337646 - DNA, 201 bp, Homo sapiens
ccttccagggctcttccttctctgaagctttcagatgtttaaacttcagttttgcagttttttgttttttttttttttgatctatctatctcagattgacrttgggttgtattttgccctcaggtacttaaagatagctccacttttctaattctgattacaagatttttattcagcagattcattggttggagatatttt

SEQ ID NO: 337647 - DNA, 201 bp, Homo sapiens
ttgtttctaaatgcagttgttacttctgaattccagccttctaggtttttcctttccttgaaactactcagcatgtctgaagcatcaccttcttttgttcycccttccagggctcttccttctctgaagctttcagatgtttaaacttcagttttgcagttttttgttttttttttttttgatctatctatctcagattga

SEQ ID NO: 337648 - DNA, 201 bp, Homo sapiens
ccactaaaaagtagggtaaaaagaaacccttacctcccaggccagtaatcaatgggctagctcctctctagcagggcttaggccaggagaggcaagtgagktatgtagggtgtgtctcagggtcatgcctctaaattttgcactctaggtgcctctttctcttcctcctgattgctgggtgagggctgaggttgagttgcg

SEQ ID NO: 337649 - DNA, 201 bp, Homo sapiens
tcactgcaaccttctcctcccaggttcaactgattcttgtgccttagcctcccaagtagctgggactacaggtgtgtgccactatgcctggctaatttttrtattttttggtagagacagggcttcatcatgtttgccaggctggtctcaaactcctggccacaagtgatctgcctgcctcagcctcccaaagtgctgaga

SEQ ID NO: 337650 - DNA, 201 bp, Homo sapiens
aagtttaacagtcttgtaaatcttttctttttcgaaggatcttcttaaaaaatgctactctgccaaggcatcttacctcttccagcaggataaattctatkatgtgagctatgacacaggagacaagtctatccagtgtagcagaagaccagatgcattcaagttctggatgacctggaaggccctgggtacattaggcct

SEQ ID NO: 337651 - DNA, 201 bp, Homo sapiens
tttctatatgtctgcctattttggagagatgcaattaatccatctagactgaagaaatatgtcctgtgttaataaatatattttttccaggcatttacttaatcatgccacaaataatccaaatatctccaggaggtgggctgcagtgcaatattattatcctcaatttgcagatgaatgaaaatgttatatgatgaagca

SEQ ID NO: 337652 - DNA, 201 bp, Homo sapiens
aagatgatcacccaaaacaaaaatatacaaagaacataaataggcatttcacaaaaagaagacattcaaatggctggtagataacttgaaaccctaggggmatatatgggagagtaagaaagtaggagttgaatagtgattacctggaagaagcaaaagagacctttggggggaaggtgatagtgttttgttatgtaactg

SEQ ID NO: 337653 - DNA, 201 bp, Homo sapiens
agaactatatatattaaacatgaaataccttccccttaaactcagtaacaaattaggaacgtctggcttgaccaccatgagttaatgatgttctgagagtrccagccaatataatgaccagaaaagacctgaattttataatatttaaatggagaagacccaaatatgttcattttaaattgtgtgattgtatatctataa

SEQ ID NO: 337654 - DNA, 201 bp, Homo sapiens
ttattgaacatttccaatgtgtcagacactattctaaggaggactcccagacctgaatgagtttatagtctaacaggggattcagacatttaaacactacygctattaggctagtatatattttctacaactgtcacacacacacacaagcaaaaatggacgatttcctgtcgtaacatattgcaaaggagatagccctcc

SEQ ID NO: 337655 - DNA, 201 bp, Homo sapiens
gctgggaaaaagtacttgattatttgggattgttattgaatagagtttccttcttcatgcttcagccctggatgtttcaatgtgagggaccccagtggatmataaatgcagagtctcttctgcattcaaactgctatttccaagcttgggaaagctgattaaatagcgcccaggttatcagctcaggttttttacttttgc

SEQ ID NO: 337656 - DNA, 201 bp, Homo sapiens
ttaccatgacaatggattttctttgaccatcaacagcatccaagtcagtgttccaagcatccacagagtgaaatggccactgctcatggctaatacatagmacgcaaatgcattgcctttattgctcctcacggaattgaggtttttctcgaaagactgctgcagcaacttgcagatccctgaggccacaagctattggca

SEQ ID NO: 337657 - DNA, 201 bp, Homo sapiens
gctgtggcagccacgaggagagcatgcctagtgtcacatgttgttgaatattcaactaagagcctaaacagcatccactggattagctacatggacgtcaytggcaactttagggaggttttgatggagtgatgacagcagataccaggttacaatcagttacagtgagggtaagtcaggagagacagtaaaattacacac

SEQ ID NO: 337658 - DNA, 201 bp, Homo sapiens
taaaaatataaataggttggaggggacccgttaggagggcattactttagtcgggtgagagaggaaagtagctcggacttggagagaagagataggaatasagcgggaaagaatgagttcaaaaaataaaacagaaaggatgggatacacagcttgaaaataacagtaaaagggagaagactcctgggacaatgcctgggt

SEQ ID NO: 337659 - DNA, 201 bp, Homo sapiens
tatgaactgaaaggccagtgtgggtacagctgagagagttacaggactgtagtggagaataagactagagaaagagagagagagatagaagccagacatayagggcccaggtgaccatgtttatgagtctttctaaatgtaacaaaaagccattgaaggtttctaagtcactaggtgccattttcttactgaaaaaatctc

SEQ ID NO: 337660 - DNA, 201 bp, Homo sapiens
atgtcataactactgtgaactttgtacgtgcagtaatgtgatgtcaatcttacactgaggcaccattctagcttacctgttaatatcctgttcatccagcraacaagtttcaaaaatgggagaataatcttccaaaatatttgtcagtgtaatgtaaaggtatctagcgcttaagatcatacaggcattactttgtaaatt

SEQ ID NO: 337661 - DNA, 201 bp, Homo sapiens
gatgtcataactactgtgaactttgtacgtgcagtaatgtgatgtcaatcttacactgaggcaccattctagcttacctgttaatatcctgttcatccagygaacaagtttcaaaaatgggagaataatcttccaaaatatttgtcagtgtaatgtaaaggtatctagcgcttaagatcatacaggcattactttgtaaat

SEQ ID NO: 337662 - DNA, 201 bp, Homo sapiens
ttggcaacaccccccacgtgccctttagaggcctccaattggttatgccctttgaaggattggcctgtgaccaatcagaggctgaagtgaggcttggccckcaatcagaggctgaactggaaactcctgtcttgttatcacaggagcgaggatatggcccgtaagctgcccaatcttgcctagaactggctgcacctgctg

SEQ ID NO: 337663 - DNA, 201 bp, Homo sapiens
ccatcaacatctacattactgtaatagttcttttcgtctgaactatagttgcatgtttaaatcacccgctgcccagaagctttgtaatggtagagtccacrtttgtaacatcctctcaatacctggctatggtggatactcaatttgtgttgtggttgaatctccaggtgtgtgaatggaggcctcctgaacaactgaaac

SEQ ID NO: 337664 - DNA, 201 bp, Homo sapiens
taaaagaagcaatgaaagacaaagcaacagaagaacggagtaaggaaagaaaaagcacagactgagcgaagacaactcacagaatagaaacaaacaccagyaagcggctcaagagtctccttaccacaatggtcccagggctttataaagccaaaagaattggcaacaccccccacgtgccctttagaggcctccaattgg

SEQ ID NO: 337665 - DNA, 201 bp, Homo sapiens
tgctatccccattgctgccatccaatcttgtgtccaagctggaaaccttgggatgatccttggctcattcatctcaccctcaaaatctaactgatttccargttctagtgattctgcattttaaatatctctaaaaactacatatttaatacagcattgactgtcatccagatcatcaccttctcttgcctggcttattac

SEQ ID NO: 337666 - DNA, 201 bp, Homo sapiens
taggtctcctgcacagtcccaaggtttctcctgcgaggcctgggtgaggtgactgtgtgaactatcaagcagctgaggtcttaatctgcatataggaggcrgcttgtgggagtctaccaccagggaccatagcagtggctcacacagaggaaccagccatttaaagctgacttggaactgtgtatgaatgttatgtatgca

SEQ ID NO: 337667 - DNA, 201 bp, Homo sapiens
gcgtatttctgaagaacctaatctaccacaaataaagatggtcacttttaaaaacaggtttaggcatagttcagcaatgtacaaaatgtggaataaaaccyagtgacaattcaacattaggctttagcttaccacagtgttactgtgggaacgtgtctcagttcaattcagcaaatgctttgtgccaagcactatgggaaa

SEQ ID NO: 337668 - DNA, 201 bp, Homo sapiens
ccaaatccagccatatgcacaaatccaatggcagtcgagcagaggaaatgttacttctaaggaagtgaagtagtgaggatacatatgcgtatttctgaagracctaatctaccacaaataaagatggtcacttttaaaaacaggtttaggcatagttcagcaatgtacaaaatgtggaataaaacctagtgacaattcaac

SEQ ID NO: 337669 - DNA, 201 bp, Homo sapiens
cattagcttggccatagtgaatctcataactaagcccaaccttaaaagatattggagactatgctacagttagccaaatccagccatatgcacaaatccartggcagtcgagcagaggaaatgttacttctaaggaagtgaagtagtgaggatacatatgcgtatttctgaagaacctaatctaccacaaataaagatggt

SEQ ID NO: 337670 - DNA, 201 bp, Homo sapiens
cggggggtcccagtaaggatgtgataaatgctttgagactggaacagatttttgggatttcactcaggagcgagtactttgagctcagatgtggaatgtargtaaagggcaagtgagaattttggggggcagtggcaggggaagagaaagtttggcgttagggtactcatttctggaggaagaaagcaggaaggtcaataa

SEQ ID NO: 337671 - DNA, 201 bp, Homo sapiens
actttatatcatatcacagcggctggggtgtttgagtctactcgccacgtctttcatattccttgatcagcatactagccagcgcattcttgagatggccmtgacagaaggccaagaaggcaaaccaattatgtaagcccactttaaactcctgattgtattatatctgtagctgattgcgttataatactcctttggtca

SEQ ID NO: 337672 - DNA, 201 bp, Homo sapiens
aatgttggctagcatgactttatactttatatcatatcacagcggctggggtgtttgagtctactcgccacgtctttcatattccttgatcagcatactarccagcgcattcttgagatggccatgacagaaggccaagaaggcaaaccaattatgtaagcccactttaaactcctgattgtattatatctgtagctgatt

SEQ ID NO: 337673 - DNA, 201 bp, Homo sapiens
gccacaagtgatctgcctgcctcagcctcccaaagtgctgagattgcaggtgtgaaccaccgtgcctggtgtcatttatgtattgaataaatattgttgtwatttactactgttagctaacttttattagttcccaatatgtaccagacactgttttaaggcattatctgtattaattcacttaattctatgtcagaggaa

SEQ ID NO: 337674 - DNA, 201 bp, Homo sapiens
gttgtaagttgctatttagttttggttctgctggtcaaatcatcagttcggaaggaaaaaaaaagtcaatttgcagttgtgactacagatggctaaacctscatcgtcagacttttcctgcaatctgtccttggattatgctgtttcttatgaaaatgtcccccctctgcaggatgttctagaaatggtagtgcctcactg

SEQ ID NO: 337675 - DNA, 201 bp, Homo sapiens
taagttgctatttagttttggttctgctggtcaaatcatcagttcggaaggaaaaaaaaagtcaatttgcagttgtgactacagatggctaaacctccatygtcagacttttcctgcaatctgtccttggattatgctgtttcttatgaaaatgtcccccctctgcaggatgttctagaaatggtagtgcctcactgtttt

SEQ ID NO: 337676 - DNA, 201 bp, Homo sapiens
ccgacattagcttggccatagtgaatctcataactaagcccaaccttaaaagatattggagactatgctacagttagccaaatccagccatatgcacaaayccaatggcagtcgagcagaggaaatgttacttctaaggaagtgaagtagtgaggatacatatgcgtatttctgaagaacctaatctaccacaaataaaga

SEQ ID NO: 337677 - DNA, 201 bp, Homo sapiens
cgtagtaattattaaatttggagtctggtatggtgagaggaagataacagattttgtgtatagatggcctggaagatggtaagagaaagaggaaacagaasgaaatattgctggatgtggtttggagagttttatgtaagatgttaggaggaatgccagctagacacagtctgttggtagctagaagttggtggctatgac

SEQ ID NO: 337678 - DNA, 201 bp, Homo sapiens
ttctagttgaagcaggaatggccagtttccctatgtcctttcctttctaccaaatgactgcttgacatctttatcagtatatttgaggctccacaggctgyccatcatcaccctgcccccacctgaagaaaaacatgtggagaagtcccaagattatagaatcaattcagggccaagtcacataaccaaaaccactcattg

SEQ ID NO: 337679 - DNA, 201 bp, Homo sapiens
ttctgcatggtaaattttaatccttgttttgccagtctaggtaaatatttattagccattgattttttagaacagcacaggacatcagcctttaattttcyagttgaagcaggaatggccagtttccctatgtcctttcctttctaccaaatgactgcttgacatctttatcagtatatttgaggctccacaggctgccca

SEQ ID NO: 337680 - DNA, 201 bp, Homo sapiens
ttttagcttagcttgttgaggagctctgagaggctctagctgtcttcttccctggagactcagaattctcattgctatccacgatagaacatctctcaatrtataatgtgatagaaatatagcctgatttagaggaaagctggaattttattaaagtaaataaagcatacaatataaagatttacgtccagggtctcttca

SEQ ID NO: 337681 - DNA, 201 bp, Homo sapiens
attgagtcaattttagcttagcttgttgaggagctctgagaggctctagctgtcttcttccctggagactcagaattctcattgctatccacgatagaacrtctctcaatatataatgtgatagaaatatagcctgatttagaggaaagctggaattttattaaagtaaataaagcatacaatataaagatttacgtccag

SEQ ID NO: 337682 - DNA, 201 bp, Homo sapiens
gatgaggattgatagtttcaattggataaagtttggtttagactcagacttcctggacacagaacaaagatcagcttcagattcagggaaggaagcttacycaataattctttgcactaaaaatttggctagtataggagctaaaatataccatgcagtaaaaataaacatatctatcccccaggttctgtagttaattga

SEQ ID NO: 337683 - DNA, 201 bp, Homo sapiens
tcattccttttttaaaaagttactacagactgatgaggattgatagtttcaattggataaagtttggtttagactcagacttcctggacacagaacaaagrtcagcttcagattcagggaaggaagcttactcaataattctttgcactaaaaatttggctagtataggagctaaaatataccatgcagtaaaaataaaca

SEQ ID NO: 337684 - DNA, 201 bp, Homo sapiens
cagacctctcacctacccacgtcacattgcaagacctgtactcactgtctcggctcttttgtgccttggtttcagatactctattagattctcactcccayggccccagatattatatacatataatacatatacacatgcatataaacttcatattatatatcctgtgaaatgcagcatttgtgttgtgctgtttcaaga

SEQ ID NO: 337685 - DNA, 201 bp, Homo sapiens
gttggaaagaaaatgtaactacacttggctctacttccatttttacaggaaaaaaagctcagtttgattcagtttataatgcactggagtcttgtagtttygcttttcttatgagttacataactcaagagaattatgttttaagtgtaatctaacaaattttgcatggtttctcttagagtctacacaccagaatctatc

SEQ ID NO: 337686 - DNA, 201 bp, Homo sapiens
ctcggatctaaaaatctcttaagagaatttttcttcatgtcctcagttacttaagaactaagttttgaaaaactttaagtataaaatcacttcagtaaagygttaatatatttaataaacataagtatatataatgtacatttgcatttttatgaatgttaaaactttctatgctattctgaccaaattacggagtatttt

SEQ ID NO: 337687 - DNA, 201 bp, Homo sapiens
taatgtacatttgcatttttatgaatgttaaaactttctatgctattctgaccaaattacggagtattttaaatcctgtatcctcatttagagatttgagrtttgtttagtagaaatattttatgtattttattctttgttaagaaaaaagtcaatgggaagattttttcctttttattatcaagagaatttataaaatca

SEQ ID NO: 337688 - DNA, 201 bp, Homo sapiens
gctatttaagttttagttattatttacttaactgcttggaaaatcatgtaggaccttcttagagatttatagcaatttcttctttctatactgggagtagkgtgggtattctgagcaacaagctgtctgaatgtgttaaaacaacaattgttttccccctagaggtctaaatgttggctagcatgactttatactttatat

SEQ ID NO: 337689 - DNA, 201 bp, Homo sapiens
ccgactcagcctcccaaagtgctgggattacaggcatgagccactactgcacccggccgcacattcactattgtcctctgcttactctcttccatcccccrcaccaactacacaggagttaaccatttttccctctttgcttaaggaaactggagaaaactcaagttacacctggccatttgatggctccttagctctcaa

SEQ ID NO: 337690 - DNA, 201 bp, Homo sapiens
tcaataagaaatagaccagacttaattccatattcatctattagcctcactcatgccatagctgagtaaagtagtttgtctattattacttttgttcttakgattttagccacattcttgggtgtttcagtcttgtgttcagtattaaacaagattggtcaagtgtctgatcagcacttataactcattgtttgctctagg

SEQ ID NO: 337691 - DNA, 201 bp, Homo sapiens
ggcacaaagaggtcaaatatgttgcccaagattatacacaagtatcagagccgggactaaaatccaggcagtatcacttcacaatctgcactcttaactaytccatatgcctcttaaaattaccgaatcaacctttatcacattggttttcatgttggaggtggattatcaacaaatggatgtaaggaagagatttttatt

SEQ ID NO: 337692 - DNA, 201 bp, Homo sapiens
agagacagatgtctaagtcctaccctagaactgggctgcccagggagctgctgcttctgctccaatctgcagaggcctgtcgaattgtggatttgccttamgagatgccagcactaaatccaaccagctccatcgtgatctgcactggaaaaaaaacggatttttaatcattatgactcttctcccacctaactcaagttt

SEQ ID NO: 337693 - DNA, 201 bp, Homo sapiens
gcagatattgataatgatagtattccattgcctgtagaaactaattgagtcctctccctactctgtccctttgtttaaacaatagggctgactctgtggcytggaacccacacaagatgctgatggctgggatccagtgctgtgctctccttgtgaaagacaaatctgtaagttttcctcttgtggtcctttgggcttcaa

SEQ ID NO: 337694 - DNA, 201 bp, Homo sapiens
ggatgacctggaaggccctgggtacattaggccttgaagaaagagttaatcgtgctcttgctttatctaggtactagcctctctctctctctctctctctytctttctgtgtgtgtgtgtgtgtgtgtgtgtgtgtgtgtgtgtgtgtgtctatctgtgtctgtaataggaagacctaaggaaagtaatacttgaaatgtg

SEQ ID NO: 337695 - DNA, 201 bp, Homo sapiens
tgtgcaaagaactgagcactttcaaaaagttgccaattttttttttaatgaaaagaccgttttcaatttaaatggaataggaaagctaaaccatgagataygagatgtggcaatcagtttaagttttgtgttggcagttttctatctcttttgtacctggtttctgcctctgttactctcttccatatcattaattcattc

SEQ ID NO: 337696 - DNA, 201 bp, Homo sapiens
attctggttttttggccttgagtaggaaccctgcaatgttattttggggggaaaaaaaaccatatgattctaatgttatccagggttaacaatcactgtascaattgttcttgagttacacagtcaattgtaagtcatgccagctttttatttttttcctttaaattaacagaacagaatagactgaaatagaaaaaatca

SEQ ID NO: 337697 - DNA, 201 bp, Homo sapiens
aaatagccattagtatagtggaaacgttttttgtcatttcagcgcatttctgcattttatcataagtccttgaaaaaatgctattgtccactacatctttygttctatccaaagattctgccaagtacttcttaaatgtttaactgctatttaaggatagttttaaataggactgctcatgattatagtaatgtcagtaat

SEQ ID NO: 337698 - DNA, 201 bp, Homo sapiens
ttatggaatgtctcttcactggaatgtcttaaagcatggggtctaaaaattatggcccttgggttaaacctggcctgtcacctgttcttataaagttttaktagaacacaggcatgctcatttaaatatcctctatggcagctttcatgctacaaccatagagttcagtggttgtgatagagatcatatggcttgcaaacc

SEQ ID NO: 337699 - DNA, 201 bp, Homo sapiens
aaccgaccagagagaactgtctactttccctccctgccttcctttttgttcctttactagtaacttccacttgctgtttgcagtaaaacagaaaatgaacmcaaatttaaccagttttatcacagagtaaattttttttcttcttggggcatcgggggaacaatgaaaattagaaattataagccagtatgggtcttgatt

SEQ ID NO: 337700 - DNA, 201 bp, Homo sapiens
cacagagctggaatcttaagtatattctagaatctgatattggatttacaatataacaataaaattagtatgaactcatggagtttaacactccctgtatrgggatttatttttctcaatgcctctacagctttagacaattttgagaaaggttgtcacttacattcaggacatttatcataattatttagaaccaaaaac

SEQ ID NO: 337701 - DNA, 201 bp, Homo sapiens
gagttttaccacatacctttctattatcaaataaggtaattctatcaatttactccttaaactaaatttatgttaacagattttctgtattactgattaayctcattttactgcagtaaactattttaaatatattagtggatgatttttgcctccatgtacataatatagatctattctttgtgtttttatcttggttgg

SEQ ID NO: 337702 - DNA, 201 bp, Homo sapiens
ccttgcataaacagccattgactccttcaaattccactatgtaaagactttcctgctgccttctctataaaacatgggttcctaagcagggcagtcaagayatttggtgatgtagactgtctcctgcatccagacctctcacctacccacgtcacattgcaagacctgtactcactgtctcggctcttttgtgccttggtt

SEQ ID NO: 337703 - DNA, 201 bp, Homo sapiens
cacacaaagattctttttaacttcttatgataaatttcaaatatgtacaaaagtagagatgaacttccacgaacccatcacatggttttagtagggatcarttcatgaccagtttcatatctactgcttcctcctctgccgtgtgtataaaaaaagagaaaaaaaagacacacattatatcagtttacttgtaagtatttc

SEQ ID NO: 337704 - DNA, 201 bp, Homo sapiens
acttactcctagcatcgtcactaccccaagcccctcttctcttcactgttagaggccttgcataaacagccattgactccttcaaattccactatgtaaaractttcctgctgccttctctataaaacatgggttcctaagcagggcagtcaagatatttggtgatgtagactgtctcctgcatccagacctctcacctac

SEQ ID NO: 337705 - DNA, 201 bp, Homo sapiens
tgagggaatgtatacctcatttttcatgatgtgcttatttcagtgcatgcctgtatcaaaacatcttatgtacccccagaattatatacacctactatggwgcccacaaaagttaaaagtttattataaaaatgttaagtttctaatctgactttgaagttgtttgttgaagtacatgagttcagatatgctttgtgtatt

SEQ ID NO: 337706 - DNA, 201 bp, Homo sapiens
tagttaccagagagtgggaaggatagtgggggtctgggaggtgggcatggttaatggatccaaaataaaaagaatgaaggagacctattatgactgcacartagagtgactattcaataactacatttttaaataacttaaaaagtgtggttgggacatttgcaactcaatagataaatgcttgagggaatgtatacctca

SEQ ID NO: 337707 - DNA, 201 bp, Homo sapiens
aaacaattgagactagaaagatagttaccagagagtgggaaggatagtgggggtctgggaggtgggcatggttaatggatccaaaataaaaagaatgaagragacctattatgactgcacaatagagtgactattcaataactacatttttaaataacttaaaaagtgtggttgggacatttgcaactcaatagataaatg

SEQ ID NO: 337708 - DNA, 201 bp, Homo sapiens
aagactaacatcacatgttttcagttatctgtgggatctaaaaatcaaaaacaattgagactagaaagatagttaccagagagtgggaaggatagtggggrtctgggaggtgggcatggttaatggatccaaaataaaaagaatgaaggagacctattatgactgcacaatagagtgactattcaataactacatttttaa

SEQ ID NO: 337709 - DNA, 201 bp, Homo sapiens
tccaaccagctccatcgtgatctgcactggaaaaaaaacggatttttaatcattatgactcttctcccacctaactcaagtttgaaattatgtgcaggtaygtctggctggctcactttaaattacatcagactaactgcaagagagttttggaaatgtgtaagcctctgcaatataggaagggactttagaaggagatca

SEQ ID NO: 337710 - DNA, 201 bp, Homo sapiens
accaagttgatatattcgtagaaggtccacatttatatttaagcatttaccatgttatcttatactgtgctaagcccattacatatatgatctcatttagmgtcctctcaaccaccctctatgaggtagttaccatctcatgtttttttgtcagttactcagagccagtctgattctaaagttctcaagcacaatcattgt

SEQ ID NO: 337711 - DNA, 201 bp, Homo sapiens
tctttcttatctccaagccctgtctgaatcagttttgtcatatcagtcatgttcatgacacttttacattgcagattataaatattattgtgacttttaaytttaggtacctagtagatgaaatcaagaaaagagaaggattcaagttactgatggaagtaagtgattgcataattgtgcttgtgattttgtcagttaaca

SEQ ID NO: 337712 - DNA, 201 bp, Homo sapiens
tgctaagcccattacatatatgatctcatttagagtcctctcaaccaccctctatgaggtagttaccatctcatgtttttttgtcagttactcagagccartctgattctaaagttctcaagcacaatcattgtggttcttcctgaggagaggggaagacaggaaaaaagataaaaggcaatacggagcaaagtgtaggaa

SEQ ID NO: 337713 - DNA, 201 bp, Homo sapiens
ccctctatgaggtagttaccatctcatgtttttttgtcagttactcagagccagtctgattctaaagttctcaagcacaatcattgtggttcttcctgagragaggggaagacaggaaaaaagataaaaggcaatacggagcaaagtgtaggaaatggagatctgacggaaggaagagctggagggaggctgcaaagaata

SEQ ID NO: 337714 - DNA, 201 bp, Homo sapiens
ttatttcacacaaagattctttttaacttcttatgataaatttcaaatatgtacaaaagtagagatgaacttccacgaacccatcacatggttttagtagrgatcagttcatgaccagtttcatatctactgcttcctcctctgccgtgtgtataaaaaaagagaaaaaaaagacacacattatatcagtttacttgtaag

SEQ ID NO: 337715 - DNA, 201 bp, Homo sapiens
gaggaaaagcgcaaccattaaagacaacttaaatggttttagtaaattatttttctattgcttttaatgattttaatgattggtgtaaagctggtcttatktcctttaggtcactggtatgataaagccatagttgtcagtagtttgaatacagggaagaagtttcaaagcctctggtttctccagggctctgtcacctac

SEQ ID NO: 337716 - DNA, 201 bp, Homo sapiens
atttttaagaagtctgtatacatttgcaatgccagcagtaaggaatgagtacacaagcttcaatctaactaacattgggtgttataaggataagggggggrgtatggggagttatttagaaggtaaaaaatcctatctcaagtttattttgcacatatttattaattgttggtaggctgaacaatttctctttactgattg

SEQ ID NO: 337717 - DNA, 201 bp, Homo sapiens
agttaccatctcatgtttttttgtcagttactcagagccagtctgattctaaagttctcaagcacaatcattgtggttcttcctgaggagaggggaagacrggaaaaaagataaaaggcaatacggagcaaagtgtaggaaatggagatctgacggaaggaagagctggagggaggctgcaaagaatagcccagagaaaac

SEQ ID NO: 337718 - DNA, 201 bp, Homo sapiens
ctttcacccctctccccttttctccccacacaggtggccccagccattaaggagaggatgatgaagaagggaagcttgatgctgggctaccagccgcaccrgggaaaggtcaacttcttccgccaggtggtgatcagccctcaagtgagccgggaggacatggacttcctcctggatgagatagacttactgggtaaagac

SEQ ID NO: 337719 - DNA, 201 bp, Homo sapiens
ctccccacacaggtggccccagccattaaggagaggatgatgaagaagggaagcttgatgctgggctaccagccgcaccggggaaaggtcaacttcttccrccaggtggtgatcagccctcaagtgagccgggaggacatggacttcctcctggatgagatagacttactgggtaaagacatgtagctgtggctttggtcc

SEQ ID NO: 337720 - DNA, 201 bp, Homo sapiens
ttattagtgtcaaccttgtgtgaatgagaatgggatccaaaccagtggatgcccagtaaatgtccaatggctggtgaaaatgctattgaaatgccttgatrttctggtctttcacccctctccccttttctccccacacaggtggccccagccattaaggagaggatgatgaagaagggaagcttgatgctgggctaccag

SEQ ID NO: 337721 - DNA, 201 bp, Homo sapiens
aaaggcaatacggagcaaagtgtaggaaatggagatctgacggaaggaagagctggagggaggctgcaaagaatagcccagagaaaactcatcagctaagraggggctctttcagagagtggagtgctccaccaagctgtcaaaggtgttcactaagaatacatacttggtgcatgcaactgtatgtggatagtacttggc

SEQ ID NO: 337722 - DNA, 201 bp, Homo sapiens
tgtttgatggttggagagagtagtttggtatcatccagatttggttttgctcttggctgtgcaggaaactatgaaagctatgaagcttttggggcaagctrctgcatcttgagaagtttcgtctataaaattagtttaatacttaactcatggaattgagaaaacaaatttggattaatgaataaacaccatggtactcag

SEQ ID NO: 337723 - DNA, 201 bp, Homo sapiens
atgaattgcccaactcaggacatttttgaaagtgaaaaggatactatcaataatcacaccagaacaacaacataaagaaataagtacttttgtaagaaacsagcatctccagttatgtgctcttctgattgtaattttagcgccttctgtcccattcattaaaatatttcagagcaagagtgagaggaatattatatgggg

SEQ ID NO: 337724 - DNA, 201 bp, Homo sapiens
atggctggtagataacttgaaaccctaggggcatatatgggagagtaagaaagtaggagttgaatagtgattacctggaagaagcaaaagagacctttggrgggaaggtgatagtgttttgttatgtaactgctttaggacgtacgtagaggttcaattgtgtgaaatagtaatttattactatcattacttgacttgaac

SEQ ID NO: 337725 - DNA, 201 bp, Homo sapiens
cagcaggagatatggggaagaaagtctaggttaaatccagatcgcaaaagtttaatttctggtcctgtatttttaatgagatctttttttaaaggtgaggraaactcattaataggctataatagcttgcaaatgtattttctcatgactgtcaggatgtcatatagtttatgaggaaaagcgcaaccattaaagacaact

SEQ ID NO: 337726 - DNA, 201 bp, Homo sapiens
cacaaaaagaagacattcaaatggctggtagataacttgaaaccctaggggcatatatgggagagtaagaaagtaggagttgaatagtgattacctggaaraagcaaaagagacctttggggggaaggtgatagtgttttgttatgtaactgctttaggacgtacgtagaggttcaattgtgtgaaatagtaatttattac

SEQ ID NO: 337727 - DNA, 201 bp, Homo sapiens
cataaattattattattattagtgtcaaccttgtgtgaatgagaatgggatccaaaccagtggatgcccagtaaatgtccaatggctggtgaaaatgctaytgaaatgccttgatattctggtctttcacccctctccccttttctccccacacaggtggccccagccattaaggagaggatgatgaagaagggaagcttg

SEQ ID NO: 337728 - DNA, 201 bp, Homo sapiens
caaagataagatgggaaatgttagaccccagagaatgtaattgaaaattccactagtttgttttgccccatcattactcagtattctgatgtagaatattycttattttgtcaatatttcataaataagtacactatgccaacacaatttacgttcttaaaagtaattaacaagctgtcttttcgtattcatgtatggtta

SEQ ID NO: 337729 - DNA, 201 bp, Homo sapiens
ggctggggtgtttgagtctactcgccacgtctttcatattccttgatcagcatactagccagcgcattcttgagatggccatgacagaaggccaagaaggmaaaccaattatgtaagcccactttaaactcctgattgtattatatctgtagctgattgcgttataatactcctttggtcaaagaaaatcatatggctaaa

SEQ ID NO: 337730 - DNA, 201 bp, Homo sapiens
atagggcccctgcacttaaaaagttcaattgaaatctaaaaggaaaatctctagggaagtagagttcttcaaatgtcttctttgtttaaaaagcttgtgaytgaggaaatgacttacccatgattggtggcaaggttaatttcacagagctggaatcttaagtatattctagaatctgatattggatttacaatataacaa

SEQ ID NO: 337731 - DNA, 201 bp, Homo sapiens
tgaaaactgttctgttctctaagatcaaagtaggtcccattagtctaaagtgctggcttcttgaagaaatgtcctaagattcacctgttgctaaaaatagkcatgagttagtcagtacattgctggattaaagatagtgacagctaattagtcattgctcaaacaatagaagagttgaaaagagaaagtgagagacactcc

SEQ ID NO: 337732 - DNA, 201 bp, Homo sapiens
gtgtgaatgagaatgggatccaaaccagtggatgcccagtaaatgtccaatggctggtgaaaatgctattgaaatgccttgatattctggtctttcacccytctccccttttctccccacacaggtggccccagccattaaggagaggatgatgaagaagggaagcttgatgctgggctaccagccgcaccggggaaaggt

SEQ ID NO: 337733 - DNA, 201 bp, Homo sapiens
ttctagctgccacctctagttattgaacaatattatatttattgaatgttttttgtgtgcagcacactgtgaaataggtgctgttggtaccgattttctgrcgataaaagctattgagttccagaaaatgtttaaattttttgatagctaaagcctcttacacatatattgtttaactgaaaaataccatggctgatagat

SEQ ID NO: 337734 - DNA, 201 bp, Homo sapiens
tagtattcagatagacaaatgcaccatcattttgacagatatatttatgcagttgattcattattgtcagtagccaaggagacattttctcgtggtgtgtytaaggtctggaggcagctccctggaaagaacttcagacaacccaaggtgctggatgctaaatccctgggaggtaacaaatggcctgggtattctcacgat

SEQ ID NO: 337735 - DNA, 201 bp, Homo sapiens
tttttcactaacttgacctctaacatcaccttttctacattttttcttttacactcatatattttcttttcatatcttgtgataatgtaagaaacttccarttttttgctagaatggcaatgtgattttcctgaataggtgtttgttttgttattgcaagcactgtgtagtccatgttttgcaagacttatattctaaaat

SEQ ID NO: 337736 - DNA, 201 bp, Homo sapiens
tgtctaacttttcacatctgcagaagctggcattcaagactctctaggttggcttttctcagatggttaatcagccttcagcttttgaggactgtggctamtttctcctgagtacagtgagacaggaaaaactctgccttctagatagccactgcattggagcaccccctcagaagggggaggcacggggaaagcccatca

SEQ ID NO: 337737 - DNA, 201 bp, Homo sapiens
gtgatagtgttttgttatgtaactgctttaggacgtacgtagaggttcaattgtgtgaaatagtaatttattactatcattacttgacttgaacataacttgacgtgtatcacttaccctaaactcttaagcaaaagaagcttggtttcagcagagccacatgtttctctaggacctttctcacaacttccccaacttggg

SEQ ID NO: 337738 - DNA, 201 bp, Homo sapiens
ggtgatagtgttttgttatgtaactgctttaggacgtacgtagaggttcaattgtgtgaaatagtaatttattactatcattacttgacttgaacataacttgacgtgtatcacttaccctaaactcttaagcaaaagaagcttggtttcagcagagccacatgtttctctaggacctttctcacaacttccccaacttgg

SEQ ID NO: 337739 - DNA, 201 bp, Homo sapiens
ctaaaatatttactatgtagctttttcttttctttttggagacagtgtgccactctattgcccaggctggagtgcggtggtgtgatcatggctcattgcarcctcaaactcctgggctcaagcaatcctcccgcctcggtctcccaagtagttgggactacaggcatgagccaccacacctggctaatttttttaaagttt

SEQ ID NO: 337740 - DNA, 201 bp, Homo sapiens
atatttggcttgaacttctgtatttaaaatttctgccattattgcagatgtattgacttcaggtgtgtgtcctactttttttttttttttttttttttttwaacattccaatgacaagtgaactttattgttatctggtggtttgcatgatcagatttctttgactctggtataattctgagtaacaacttgtaagttcgt

SEQ ID NO: 337741 - DNA, 201 bp, Homo sapiens
tttttgtaactgtggaaataagggggaaaatcaaatacatcagcagttctacctaaatattgtactctcataaaagaaacatcacatatggattatatagyttatgtagtttgtataaaatggagaaaagtaaatagtttatgtaaaacagtcaccacagcagcttttaaattgggaatgacattaagagatttatggggc

SEQ ID NO: 337742 - DNA, 201 bp, Homo sapiens
tggccatgaacctgtgtcaggcaacatgcttgtactcttaccctgccacacatgcttggactagactatgtggaggctcggtgacctcccctgctcacccsgctccttgatcacaaccctggcaactctacaacggccactgtatttccttgcagggatgggcagggatgagacctctgtctggggggccttgggtgcctc

SEQ ID NO: 337743 - DNA, 201 bp, Homo sapiens
tcttgagggcctcagggagtcctgggttggcctgcagagttctaagtctgaggggcgtggcattaggaagcatgtggtctgtggcacacaaaatggcacayagccattttgcctggattgatgctaaccgcactcatcaattcagtcagtctgtttatccttggtcacagcagaagagcctcagaccccacccagaatcac

SEQ ID NO: 337744 - DNA, 201 bp, Homo sapiens
agcgagactgtctcaaaaaaaaaaaaaaaaaaaagtttttcccagagacccgctagctgctcctccaggtgccctggcctgccggctgtttgtgatgcccrttttgatgactccttcctcctctgtgtgttgtgtgactggggttatttctgggctgttgatgtgcatttctatttttatactggggacacagcctcaggt

SEQ ID NO: 337745 - DNA, 201 bp, Homo sapiens
cctggctttgggaagaccttctcactggagttcctggaccccagcaaaagcagcgtgggtatgtagcccttactcaaggcctccgggagctgggatggggkttctgccggactggagctggagctggaggaactctgctggtttgtagggacagcctgtgagctgtctctgatcagcgtgggcacagagccctgtagcatt

SEQ ID NO: 337746 - DNA, 201 bp, Homo sapiens; identical to SEQ ID NO: 71068

SEQ ID NO: 337747 - DNA, 201 bp, Homo sapiens; identical to SEQ ID NO: 71069

SEQ ID NO: 337748 - DNA, 201 bp, Homo sapiens
acagtatgggcaacatgtacacgctctactttctgcagcggcagccgcaggcctggaaggacaagtatatccgggccttcgtgtcactgggtgcgccctgrgggggcgtggccaagaccctgcgcgtcctggcttcaggtaagaccctacctggcccagcgtggggggctgttgccaggaattctgccctctcttcccttc

SEQ ID NO: 337749 - DNA, 201 bp, Homo sapiens
aagctacttcacaatctggctgaacctggaactgctgctgcctgtcatcattgactgctggattgacaatatcaggtgggggctggggcacacagaggggkgtgctgctcaccaacagtgcctgagaggcctccagagtctgttccttctatcctcatctcgaggtcactgacctctctccttccccaggtcctcggtctg

SEQ ID NO: 337750 - DNA, 201 bp, Homo sapiens
acatgcctggcatctgtctccccttgttcctgagtggccccacatggggctctgagcaggctgtatctggattctggcaataaaagtactctggatgctgwaaggtgccctggcctacattctgctctgagcatgaggggagggaggtggtggaggtacaaggtggctacagaggcaggaaattaggggctgggcctttac

SEQ ID NO: 337751 - DNA, 201 bp, Homo sapiens
ccttgtgggctggggctacacacggggtgaggatgtccgaggggctccctatgactggcgccgagccccaagtaagcaggcactctcattccctccctgamgtctcgggaggtaggggtgaggtgatcatgggcaccacagaccttgggctctccccttgtccttggctgtctcctgtccctgggcctctggcatccagtc

SEQ ID NO: 337752 - DNA, 201 bp, Homo sapiens
atttttgtgtttttagtagagatggggtttcaccctgttggccaggctggtctcgaactcctaacctcaagtgatccacgtgcctcagccttccaaagtgmtgagattataggcgtgagcccctgtgcctggcctagtgtgttttgttttgttttttttttttttttgagacagggtcttactttgctgcccaggctggtg

SEQ ID NO: 337753 - DNA, 201 bp, Homo sapiens
aggcctccgggagctgggatggggtttctgccggactggagctggagctggaggaactctgctggtttgtagggacagcctgtgagctgtctctgatcagygtgggcacagagccctgtagcattcttccaaggacctgctagctgtcacagtctccatgctgggcatagtgtaggtggccggcactagctgtatcttttc

SEQ ID NO: 337754 - DNA, 201 bp, Homo sapiens
agagacagagccaaggaaacatggataggggatagggtcccagcctgaattttgtagtccagagcccagccggtacccagttctgtcttaactcagccccrcaagctggggcgccagactttgatacaccaggggccacaagagggcgccctgaaccctctcactgaaccacctgttagccaaacctggaaggacgaggtg

SEQ ID NO: 337755 - DNA, 201 bp, Homo sapiens; identical to SEQ ID NO: 71066

SEQ ID NO: 337756 - DNA, 201 bp, Homo sapiens
gtgcgggggcctcaagggctacgagtctgagctgtgcgtgtgtttggacaagtccccagagtgtgtgtcttcctggggttcctagactgcgagtggcagtsgcccggcggcggaggccgtttggatccctgtgtgagctgtagggggcgccctgggcgtcgggcccaggtcaagtgcgagataggaacggggtgcgggggc

SEQ ID NO: 337757 - DNA, 201 bp, Homo sapiens
tagaagccacatctgtgtctcaggtgggggcaagacaagatggtggatccccacactattagcccccagacccagagcttatattctgtagggaaagggcractccgatgcgatgtgttgaacattgaaggatgataacacagaggctgttttgatttatggttaagtacgtgcacaagaaacagtagataaagtggaaat

SEQ ID NO: 337758 - DNA, 201 bp, Homo sapiens
tacgggctcccagccatgctagggccctccagatgatctgctctctggcaccttactggactctggcctttagtaaggcctgggcccttggtaggctggcrggtgccaatgtaagcttctctcagctgtgtttctgttcatttccctcccaccagcctgtcctgcatactttgtctggttgaattttagctgagtggccca

SEQ ID NO: 337759 - DNA, 201 bp, Homo sapiens
atgagacctctgtctggggggccttgggtgcctcattgaggccgtcactcccatccagagctggtgtgtccgtggccagccaggattcctgaaagcagagrcatctgaggcatgaattacacgtggagtctagtgcagcatgatctccatgctctttctgctgagagtactttaaatggggacgatgcaaatcacagaagg

SEQ ID NO: 337760 - DNA, 201 bp, Homo sapiens
gtgttgtataatacatttcttttaagaggtgattttatcccattttcacattctttacttggggaagaaaaccacatggcaaacatattttataaacccaytgtcttccagacttgtttcttgtcctctatgttctataagctattgttcttgagtcttgccagtgtataaggtgacaggttttgtttccatggtgctatg

SEQ ID NO: 337761 - DNA, 201 bp, Homo sapiens
cagtggtgcgatctcagctgtctgtagcctcgacctccggggctcaagtgatcctcccacctcagcctcccgagtagcagggatgggctctaccatgcccrgctaagttttgtgttgtttcgtcatgtttcccagactggtttcgaactccttgactcaagtgatcctcccgccttggcctcctgaagtgctgggattaca

SEQ ID NO: 337762 - DNA, 201 bp, Homo sapiens
caacttctcaaagtttgtgggatatactgaaagcagtgcttagatagaaatagcattggatgtatataatagaaaagagaaaatatctaaatcgataataaccttccaccttattaggaaactagaaaaagaagagcaaaatggggtagaggaccacttggagtaagaaggatgagtttggttacataattaggagaattg

SEQ ID NO: 337763 - DNA, 201 bp, Homo sapiens
acaacttctcaaagtttgtgggatatactgaaagcagtgcttagatagaaatagcattggatgtatataatagaaaagagaaaatatctaaatcgataataaccttccaccttattaggaaactagaaaaagaagagcaaaatggggtagaggaccacttggagtaagaaggatgagtttggttacataattaggagaatt

SEQ ID NO: 337764 - DNA, 201 bp, Homo sapiens
tacaacttctcaaagtttgtgggatatactgaaagcagtgcttagatagaaatagcattggatgtatataatagaaaagagaaaatatctaaatcgataataaccttccaccttattaggaaactagaaaaagaagagcaaaatggggtagaggaccacttggagtaagaaggatgagtttggttacataattaggagaat

SEQ ID NO: 337765 - DNA, 201 bp, Homo sapiens
taagcacatggtagacgtatgaatagacaaatactttattcttgttgaacatggtcattgggaaggaaaactgaggtaatgtcattctattaaaagatgarttaggctgatcttgaagttgtatactaatcttaagtaaattttcaattctttgccttaaaattttgtttacaactagattatatttgtaaataaaatact

SEQ ID NO: 337766 - DNA, 201 bp, Homo sapiens
gcagcacaccagcatggcacatgtatacatacatatgtaactaacctgcacaatgtgcacatgtaccctaaaacttaaagtataataataataataataawaaaaaagaactggcactttaggaatcctgaattcagatgcctaagggaactagcagattatatcatctaatctaatgaagcaagcctggtgtaaaatagt

SEQ ID NO: 337767 - DNA, 201 bp, Homo sapiens
cataaaaaatgatgagttcatgtcctttagggacatggatgaaattggaaatcgtcattctcagtaaactatcccaagaacaaaaaaccaaacaccgcatrttctcactcataggtgggaattgaacaatgagaccacgtggacacaggaaggggaacaatcacactctggggactgtggtgtggtggggggaggggggag

SEQ ID NO: 337768 - DNA, 201 bp, Homo sapiens
gtaagtctcctgaaatcaatagatggatagagattgaagcttagagcacaaactggaacccaggagccccagaactagacagtctataccatggcaggtcygcacgtcactgccctgtgctctttgtgagcttggcaaatctccatgccatgaggttgcccattcagactgtcagtcctggaagcagcatccagcaggcca

SEQ ID NO: 337769 - DNA, 201 bp, Homo sapiens
aaggacatgaacagacacttctcaaaagaagacatttatgcagccaaaagacacatgaaaaaatgctcaccatcactggccgtcagagaaatgcaaatcaraaccacaatgagataccatcttacaccagttagaatggcgatcattaaaaagtcaggaaacaacaggtgctggagaggatgtggagaaatgggaacactt

SEQ ID NO: 337770 - DNA, 201 bp, Homo sapiens
gtgttctttttttttttttttttttttttttttttttgagacaggttctctgtcgcccaggcaagagtgcagtggtgcaatcatggctcactgcagcctcratctcccaggctcaggtgatccccccaccttagccccccaagtagctgggactacaagtgtgcatcaccaggcctggctaatttttgtattttttgtgga

SEQ ID NO: 337771 - DNA, 201 bp, Homo sapiens
tgtggtggggggaggggggagggatagcagtgggagatatacctaatgctagatgacgagttagtgggtgcagcacaccagcatggcacatgtatacatayatatgtaactaacctgcacaatgtgcacatgtaccctaaaacttaaagtataataataataataataaaaaaaaagaactggcactttaggaatcctgaa

SEQ ID NO: 337772 - DNA, 201 bp, Homo sapiens
ctcaaacaaatttacaagaaaaaaacaaacaaccccatcaaaaagtgggcaaaggacatgaacagacacttctcaaaagaagacatttatgcagccaaaaracacatgaaaaaatgctcaccatcactggccgtcagagaaatgcaaatcaaaaccacaatgagataccatcttacaccagttagaatggcgatcattaaa

SEQ ID NO: 337773 - DNA, 201 bp, Homo sapiens
gctgggtttaggtgatggtctttgattaaaaagtggggcagttaggagtgacagctgggtttgtgggagagataatgaactttgttttgtataggttgagytggaagtacttcttggacatctaaatggaagtgccctcaggttaagtatatcagacagaaatcaggagagaagcttgggatagaattactgaaaactgtg

SEQ ID NO: 337774 - DNA, 201 bp, Homo sapiens
ttttctttccatttcagctaatcttccagtaccaacaattgcagcaatagatggactcgctttaggtggtggtcttgaactggctttagcctgtgatataygagtagcaggtaagaattaatcctgttaaaaacataatttaaaaaagtgaaggttgtgtttactcttcaggtaattttaaatattttattctgcttcctg

SEQ ID NO: 337775 - DNA, 201 bp, Homo sapiens
cttagaacttgttaaatatgtatattcagccacctcgttcatcataaattccacttccctttgcctttcccttgaagtgtctgtttctggcttctggccaraagctgtgctccccagcctgtcagtatggcacaagccgcaaccatttatgagaaataaaactctcctttccaagtttatgaacctcctcattcttcagtt

SEQ ID NO: 337776 - DNA, 201 bp, Homo sapiens
tggctgtgaccaattattattttagagagacagttaacagccgcctgacaattacatggtcacctgacattcctggtgtgtgtattttgtggggagccctytccaactctgctcgtgtctgattagctacctactgtaacagtacttgaggggaatttacaacattaaatccataagttagcaaggagatgtcattgatga

SEQ ID NO: 337777 - DNA, 201 bp, Homo sapiens
gaggactgtgaggcattatgatatttagaggctggaatgaaagcggtagattgagaaaggccacccagggtaggaaggtgggaagaaaacaatattcttarttgtttgtgcttattttatgttagatccggggatacatgtgcaggtttgttacatgcatgtattgtgtaatggtgagtttgggctcctagtgaacccatc

SEQ ID NO: 337778 - DNA, 201 bp, Homo sapiens
aatggagacttttggagctgttttaagtagtttggggctggaacagaatatctgaggttttggaagagattaggcaggtgtgcagaacttagttccaggtrccttcctgtgccatgctaaatgtttacaccatttctatcctgaaggtagaataaatcattgaacagttttaaataggggaatagcatgactgtgtttaca

SEQ ID NO: 337779 - DNA, 201 bp, Homo sapiens
gcctcccagaatgctgggattacaggcatgagtcactgtacctggctcaaattcctattagacttaaaaatagtttttattaattccaaaaagtataaacwtattggagaaataagaaagatgcatttatcactccagagattccaagggttttaagagctgtgtgtctggaaacagggatgaagaccaaatatgtatttc

SEQ ID NO: 337780 - DNA, 201 bp, Homo sapiens
gtcagtgatgtatattgatgctaaagtacaaatgttatgtagtcagtattttgctctcctatttctttagagtatgttctatgcctactaggtcttacttkattttacagtgaagttttttttggtttgtaagtttgtgaaatatattcagctataattattttattgagtactgcttatgcaccagatacttgttagtaa

SEQ ID NO: 337781 - DNA, 201 bp, Homo sapiens
ttttgtattgcattatagaaggactaatataatatcttattatgcagaaaggctacatatatttgaagtaattgtcataggacaagccctactaaacgtaktcttctttcctcacttacattttttactaaatgccttagactgaatatttatttttgtcactgtgaatattaaagaaaactaagcagaagcagtcttaat

SEQ ID NO: 337782 - DNA, 201 bp, Homo sapiens
tagagatgatgaagcaggaaaatacgacccaggagcagaagcagtcagtagaaacagagatgatggaattggcagaaaaggatctcaaagccacgactacrtttatactcaaggatttaaaagaaaaaaactaataagagaaatggaagatataaaacaactatttgagatgtctaggggtaaaatgtacaatctctgaag

SEQ ID NO: 337783 - DNA, 201 bp, Homo sapiens
atacgacccaggagcagaagcagtcagtagaaacagagatgatggaattggcagaaaaggatctcaaagccacgactacgtttatactcaaggatttaaargaaaaaaactaataagagaaatggaagatataaaacaactatttgagatgtctaggggtaaaatgtacaatctctgaagtgaaaattttgctgcatttat

SEQ ID NO: 337784 - DNA, 201 bp, Homo sapiens
atactccagcttttccactctttcactcttgccatttcttccttttttttttaattattatttttttcagtggcagagtcttgctatgttgcccagattgrccttgaactcctgggctcaagcaatcctcctgcttcaacctcccaatgcacaccaccacacctggctatactcttctcatttcaaacaacaagccctacc

SEQ ID NO: 337785 - DNA, 201 bp, Homo sapiens
agccttttggaatttgagggacgtttttggctgttgaagagctttattgacatatggttagtgggggccaaggaagctagacatcatgcagtgcataacaragaatagtgtgttttcccataacttctctaaagttcattggagtagtttactgcaaatataagtatagaaatttaatacatactaatcctaaagaatatt

SEQ ID NO: 337786 - DNA, 201 bp, Homo sapiens
caattgcaaagcctttttgtttaaaatgaacacaaacagtagttgatgaatacctttttgaacatggtctttaagtgtacttttacctgctgtattcatartcatgagcaaaggtacagaagatatttgagtattaagtatgctttgaaagtatctcttatattgctgatcttatgtcggtgttaccaaaaaaaaactacc

SEQ ID NO: 337787 - DNA, 201 bp, Homo sapiens
ttaggcaggagaaggaaataaagggtattcaattaggaaaagaggaagtcaaattgtccctgtttgcagatgacatgattgtatatctagaaaaccccatygtctcagcccaaaatctccttaagctgataagcaacttcagcaaagtctcaggatacaaaatcaatgtgcaaaaatcacaagcattcctatacaccaaca

SEQ ID NO: 337788 - DNA, 201 bp, Homo sapiens
tggaggttgactctgtggggttttagtctggtcttcattttttctgcttgagaacatcctcctggtcatctggagttaatgtatgaagaccagagcagccygtagctgaaactggaagttaggaggatagatctgtgagtccagaattaggggctctgggcaaaagtgcaatatctgtgggtggaggggctggaaccagca

SEQ ID NO: 337789 - DNA, 201 bp, Homo sapiens
tggaggttcatttcttttttttttttggagaccgagtcttgctctgtcacccaggctggagtgcagtacagtggtgcaatcacggctcactgcaacctccrcatcccaggttcaagtgattctcgtgcctcagcctcctgagtagctaggtttacaggtgtgcaccatcacgcccagcttatttttgtgtttttagtagag

SEQ ID NO: 337790 - DNA, 201 bp, Homo sapiens
gtttattttaaaccagagtatgttctcattatagaaatgttacataggatgagaagacctatggaatactgctgaagcctaatttaacccaaagtttaggyggagcactttgtgctttcatgtataaaagaaaactgtttctgcgtgaataaagttttaatggtaaaaagctactgaatttggaatgatgatgtttattac

SEQ ID NO: 337791 - DNA, 201 bp, Homo sapiens
tattataaaagagaaaactgaggaacagtcaagtggaggaggtacttagagcaaagttagggtggagggttgcagagcttccataccctctccaggtgtgycacttacccagcacatccatgtgttcactaacctgggagctccctaagccctgtttcagggattttttatggaggcctctttacataatgattgattaca

SEQ ID NO: 337792 - DNA, 201 bp, Homo sapiens
gccaagaatggacagatgcacaccatggcagtctttaaataaaagattttgaaaggaagattttgtgttcctctggtaggtaacaatacatcttcaaaatwttttttaaaaagatatcacaatgtatcagcaaatatttgtttttaaaggtgcatgtaaacattgaaaaataagcgtaattttgtttttaatgattaagac

SEQ ID NO: 337793 - DNA, 201 bp, Homo sapiens
gttttgtttttaaatgcctactacttttttcctaaaaaaaaaaattcggccggctgcggtggctcaagtccgtattcccagcactttgggaggccgaggcrggcagatcacgaggtcaggagatctagaccatcctggccaagatggtgaaaccctgtctctacaaaaaatacgaaaattagctgggcatggtggcgggct

SEQ ID NO: 337794 - DNA, 201 bp, Homo sapiens
tacatgacctttcattgtggtctttaccctacttttgtgtgtgattgtaactttcctttattttttatttttatttatttatttatttatttatttattttgagatggagtctcacactgttacccaggctggagtgcagtggcgtgatcttggctcactgcaacctctgcctcccaggttcaagcgattctcctgcctca

SEQ ID NO: 337795 - DNA, 201 bp, Homo sapiens
gtacatgacctttcattgtggtctttaccctacttttgtgtgtgattgtaactttcctttattttttatttttatttatttatttatttatttatttattttgagatggagtctcacactgttacccaggctggagtgcagtggcgtgatcttggctcactgcaacctctgcctcccaggttcaagcgattctcctgcctc

SEQ ID NO: 337796 - DNA, 201 bp, Homo sapiens
atctttctgtaattaatactttttcaataatattattcattggatttatctgtatttactcttaattctttcaccttcatgcttatacaggtaacattctrtttataattatgtccttgttttattaattctcctatggatggatatttaggttatatccatttttttgctagtctttgtatgctcccttgaattttattg

SEQ ID NO: 337797 - DNA, 201 bp, Homo sapiens
atgactttaaatcaatcacatatacttatatataatatataacatattgtctatataaataactagggattagaatgaaaaagtgcaacacatgtaagacrtagttggttaggcatgttatggcatgatatttttactgtaggtaggtagatgtcttactgcagccctagtaattgatctgatacatgtatgctgctacag

SEQ ID NO: 337798 - DNA, 201 bp, Homo sapiens
agtacatgacctttcattgtggtctttaccctacttttgtgtgtgattgtaactttcctttattttttatttttatttatttatttatttatttatttattttgagatggagtctcacactgttacccaggctggagtgcagtggcgtgatcttggctcactgcaacctctgcctcccaggttcaagcgattctcctgcct

SEQ ID NO: 337799 - DNA, 201 bp, Homo sapiens
caagtacatgacctttcattgtggtctttaccctacttttgtgtgtgattgtaactttcctttattttttatttttatttatttatttatttatttatttattttgagatggagtctcacactgttacccaggctggagtgcagtggcgtgatcttggctcactgcaacctctgcctcccaggttcaagcgattctcctgc

SEQ ID NO: 337800 - DNA, 201 bp, Homo sapiens
attcgattctaatacagtcccatggagtgtggaactgttagtatcttaatagagtaagaaactgaggatcagagaggttaagtaacttgccgaattcttartagagtaagaaactgaggatcacagaggttaagtaacttgccgaatagctagtaagcggcagactgggatttcatccccagcaatcacaccttagagcct

SEQ ID NO: 337801 - DNA, 201 bp, Homo sapiens
tatgggatttctgttcggcttggagatttggcctgttgaagtggttgacattttatgaaaacaaaggagcaaacttttacctgatgccgtgttaagattcrctctgtcaagtggttgagaacacttatttaattatctaactgtacttttgcattacctttttttatggccaactttaaacatgcctagggaagttcccgt

SEQ ID NO: 337802 - DNA, 201 bp, Homo sapiens
acgttggactatgaagtaacctggccgttgttgtttcagaatcttagattgtcatatttatgtatttaactgttagtccttcagagagtttgataagtaaygtgaagggatagataccacaaatttgtagtagtttaacaagtttgtattagtttagctatatagggttttgtttttttgttgttgtcatatattgtttgt

SEQ ID NO: 337803 - DNA, 201 bp, Homo sapiens
caacaaaaaatgtttatgaaagtaattcaataatatgggaagatttaaagatattgcacatacatgtgatggaacactatacagtaattatataatgttttgaagaataatgatggaaatgcttatattttgttaaaggtaaaagggatacaaaagtctgtatatgatctcccatttaaagcataaattcacagaaaaaaa

SEQ ID NO: 337804 - DNA, 201 bp, Homo sapiens
aatggtttgagcttcatccatattcatgtttcactagtttcattttattggcatgtattttattttattgctgagaatagtatttattgtatgactgtttsacggtttgtttattcattaggtgatggtcatttgggtttttccatcgtttggcttttatgcatcacttctgtgaccattcacacacacctttttggcaat

SEQ ID NO: 337805 - DNA, 201 bp, Homo sapiens
gaaatatttatcaaccccttaccacattataattacataatcacagcacttaaaggggcagcgtgaattattctttgcttgatcagtataagaatttatcygaagagttgctagaatagatgagggctgttgggttatgagggaatgaaagagaatgctcaggagcagcaggagtaaatggaaagtttactctatcctggc

SEQ ID NO: 337806 - DNA, 201 bp, Homo sapiens
aacaaaaatgagtctaggactacatgtagcatatttggagaaattataaaactttattgtaacatgtttaaaaaaataaatggagacaaattatcctcttraataggaagattgagtattaaaaagatgattctcacaaatggtgtaattcagtgtaattacacctagactctcagtattgattttgtgagggacttgatg

SEQ ID NO: 337807 - DNA, 201 bp, Homo sapiens
actcaacattttaatttgtattgccccaaatgcttatgtgatgttttatcttttcaaatgagatttggctttctttttttttttttatttggttttagttyttttttttttttaatttttgattttttctagagacagggtctcactttatcacccaggctggaatgcagtggcatgataatagctcactgtaacctccaa

SEQ ID NO: 337808 - DNA, 201 bp, Homo sapiens
tttaacttggaagatttgttatgagcatccccctttatcagtatgacttctttctttgtgctctcttgagaagggaaaagatgaaggataaaaaaaaaaaacagaacaaaaagcttgggttttccaccgttaaatgttactaaaacatactttataatccaaagtcataaggtatggtcagttctttacacattacattgt

SEQ ID NO: 337809 - DNA, 201 bp, Homo sapiens
ttacaacccttagaaaagatgtaaaagctgggtgcagactggcctgcaggctgttttttgctgtcttctggttcacactccagttttctctgtttgttccrgctggaggagcaggggtcagttacactgggctttgcaggaagaagctggagaggcttggccatggaggctgtttttcttgacataaaaataaaaatgttc

SEQ ID NO: 337810 - DNA, 201 bp, Homo sapiens
cacatgcaatgatttaaatttaaattgatcagaatgaactaaaaattaaaacttgagccatactagtcacatttcaagtgttcagtagccacatgtggctrgtgacttctgtattacatagtgcaaacacaaaccctttccaccatcacagaaacttctccctggaagtacagctccagatagccttacctggaggccttc

SEQ ID NO: 337811 - DNA, 201 bp, Homo sapiens
ctctgcctttctagtcagtggacttactggctggtactgcctatccactgctgttcacctgatggttactgatggggtgatgactgtggattggactcagkgtataccagagaggttgcaggtgatactcagtgccaaaatcacttaataaggatgtaaggttctcaagtccttttttggtgttattagttttatagggga

SEQ ID NO: 337812 - DNA, 201 bp, Homo sapiens
tttgactaaaacagcagtcatcttgcctatggaagaagtccctggcttgcttccaagtaaagggatgcgtgggctctgtaaaactagagcagttacacaarataaacactatgatcctgtggaattctgatgacgctttgaagatgctccaagggtcttattgtagccacactttgataaaatatcccttgacaatgcttg

SEQ ID NO: 337813 - DNA, 201 bp, Homo sapiens
agaagtccctggcttgcttccaagtaaagggatgcgtgggctctgtaaaactagagcagttacacaaaataaacactatgatcctgtggaattctgatgaygctttgaagatgctccaagggtcttattgtagccacactttgataaaatatcccttgacaatgcttgtcacatgtgcacaacttcctagcaaggtgtttt

SEQ ID NO: 337814 - DNA, 201 bp, Homo sapiens
tgtatatctgttttgatgacttgtttatttgaattttttcccaatgtttttcttagaatctcatctcattgagttgtaaggttttttttttgtttttttttatattcttgatacaagacttttatctgttatacttggtaagttttcttccactaaatggcctgtcatttttctgccttataatttgttttgaagaacaaa

SEQ ID NO: 337815 - DNA, 201 bp, Homo sapiens
tatataattagataatcatgacctatagctgtttaacgtgacacttaatatatttaatttgaaaaattatgtaaaatatttaataattacagatgtcttaygtatgataaaatatgaaggtatttatttattagacaacaataataatttgccataagcctttgacttacaatatctatatttaactatatacatgcaaac

SEQ ID NO: 337816 - DNA, 201 bp, Homo sapiens
ctccaaaataagagcagtgattaacgatattggtaagcactattaagttcttctttcagcatgccgaaggggttcttaaatgtcacatttaaaaagttacrcattatatataagcattggttaaatatttatataattagataatcatgacctatagctgtttaacgtgacacttaatatatttaatttgaaaaattatgt

SEQ ID NO: 337817 - DNA, 201 bp, Homo sapiens
acacccggctaatgtttttgcaattttagtagagatagggtttcaccatgttggccaggctggtttcaaactcctggtctcaagtgatccgcctgccttgsccttccaaaatgctgagattataggcatgagccaccgcgctcgacctgttcctaatttttttttcaaattttgaaatgcagataatattatgtaccccat

SEQ ID NO: 337818 - DNA, 201 bp, Homo sapiens
aaatggtgtttctagttctagatccctgaggaattgccacactgtcttccacagtggttgaactagtttagagtcccaccaacagtgtaaaagtgttcctrtttctccacatcctctccagcacctgttgtttcccgactttttaataatcaccatgttaactggtgtgagatggtatctcattgtggttttgatttgcat

SEQ ID NO: 337819 - DNA, 201 bp, Homo sapiens
cacatcatagctacgaattcagcctctgaggtttctctgtggtccccttggccaaaagaaggtcagttcagttggttgaggggcttagaatttttttttttatttctcattattttcaagggaagccaagattttacatgtctagaaaaatagctcttgggcttttggttttaaggtgttttttttttttttttccttctt

SEQ ID NO: 337820 - DNA, 201 bp, Homo sapiens
aagcagccatgggttagaggattagaacttttagcaccctctccccccagaggggaaaggggccagagattcagctcagttaccagtggccagtgatttaktcattcatgtctccctatggaggtaatgaaacctccataaagacccttaaacagcggggttcagagccaggcacggtggctcatgcctgtaattctgcca

SEQ ID NO: 337821 - DNA, 201 bp, Homo sapiens
gcttggaaaaatcactgtttgattggttaaaaggcatcatccagaaggaaccaatcaagagagtgagggtaatatggggatagaagttctctctctgtttrtggactctctcaaaccagcagctcggtttttagactttaaactgtcagtggcttgaaggttgggtttcactggggacacatccctgtctgctggggaatt

SEQ ID NO: 337822 - DNA, 201 bp, Homo sapiens
agctaatttttgtattttttgtagagacggagtttcaccatgttggccaggatggtcttgatctcttgacctcatgatctgcctgcctcaagctcccaaartgctgggattacaggcgtgagccaccacgcccagcctgaaatgtgtgtcttaaataataagacttgaaagtagactgatccatgggctgtggaatggctg

SEQ ID NO: 337823 - DNA, 201 bp, Homo sapiens
atgcaccatattctatttttttggtcgttatgacttgaatgcaattaaaggaatatttgtgcagaatgtctggacagactttaagttaggatctgaatggwcagaagagagaatatcagataataaaagataataaacgaaaatttttttgggtatcatggtttctttttttttttttctttagccttgatttcctgatga

SEQ ID NO: 337824 - DNA, 201 bp, Homo sapiens
tgtgagttttttttaagatgtcagtattacagcattgctatatgctgatgggaacgaacctctaaggaggggtagtattgatgccagccaaggagagcgcktaagtgctggagtgagtgatgtccccaaggagattagaaggggttgaatccagtgcacaaggggatggattggcctccctcatgatgttacaggattcct

SEQ ID NO: 337825 - DNA, 201 bp, Homo sapiens
atttttatattctttgtgtttaaatgtgttatagatattgtcctctaatgtgcttaatttgattccagtatctttaaatttaaaacttttaatatctagakgatgctaggttctctttattattctttttccttgaaggttttctctgttgattctcgcacatcagtttttccaaatgaatttagaattatttttttaagg

SEQ ID NO: 337826 - DNA, 201 bp, Homo sapiens
aaattttttggtttcccagtgcatataaaagttatgtttacactatctgcagtctgttaagcatgcagtaccattatgtctaaaaacacaatgtacatatyttaatttaaaaatactttattgctaaattttctaatggtcacctgagccttcaaagaatcataatctttttgctggtagagggttttgccttgatgttga

SEQ ID NO: 337827 - DNA, 201 bp, Homo sapiens
agtcccagctactcgggagactgaggcaggagaatggtgtgaacccgggaggaggagcttgcagtgagccgagattgcgccactgcactctagcctgggcracagagcaagagactccgtttcaaaaaaaaaaatcatgcgtctgacactaacattttcctttaataatcaaattgttcatatttttctagaagcatcaaa

SEQ ID NO: 337828 - DNA, 201 bp, Homo sapiens
ttcctctatatttattcaagaaatctcacttcagttctaatttgaacaacttgatgcatgcttggcttatacctttgtcattgggttttgctttttggagwcataaagcttttaattttaaggtcttcgctttgatagggagtttaaaatattgcatctgggggttttgtattcttgataaaattcaaagaaaacaaaaca

SEQ ID NO: 337829 - DNA, 201 bp, Homo sapiens
tggttttgaatgctacctgtatgatactaatcattggtaaaccttattctctgtgtccagtctcacacatgactgctccactcttatgtgtaaaagatacmttatacttaccttggccagagcacagcttccccctcctccattcttgtcagtgttcataatatcggacactcacacactcaggctaaaaatctagccatt

SEQ ID NO: 337830 - DNA, 201 bp, Homo sapiens
ttatcctatggatggtgagactgtcaagttccctgtggattagcttaagtatccagagctcctcaaactgtattgtgtgtataaatcacctgggttaaaaatgtgcattgtgaaaaatgtagatcctgcttcagatgggtctgcgataggacctgggagtctacatttataaaaagcttacaggtgatgctaatcctgctg

SEQ ID NO: 337831 - DNA, 201 bp, Homo sapiens
aatggaatcactggtgttaaaaataaccctgacaaatagaattgagaagcccatgaaaagagggttcttatgcttgtatgcctgataactaaaaccatcasaaaacactctgcaaaaaccacaaccttacatgaaggccattgtaaccttatacagaagacacttctgcaaggatgtctgttcaactgcctgtccagcctc

SEQ ID NO: 337832 - DNA, 201 bp, Homo sapiens
tgttgggtaccattttcccctcttgcctcctgttatattcacattttctacaactggagaattgatgggatctgaaaggcaaatgtattttctctttggcmaccgtgatttcctgtactctgtgtgtttttaatgaaagagagtttataagcaacttacagacatgacttatttgaaagctcttctgttttattaaaatag

SEQ ID NO: 337833 - DNA, 201 bp, Homo sapiens
ttcattttcttttttttttttttttttttgagacggagtctcgctttgtcgcccaggccggactgcggactgcagtggcgcaatctcggctcactgcaagstccgcctcccgggttcacgccattctcctgcctcagcctcccaagtagctgggactacaggcgcccgccaccgcgcccggctaattttttgtatttttag

SEQ ID NO: 337834 - DNA, 201 bp, Homo sapiens
aaacactctgcaaaaaccacaaccttacatgaaggccattgtaaccttatacagaagacacttctgcaaggatgtctgttcaactgcctgtccagcctcargctggcgttacttgttattgatctttgtagccaaggataattattttgaaacagttacgtaatcttcattttttcctctaaaaacctttgtcttccttta

SEQ ID NO: 337835 - DNA, 201 bp, Homo sapiens
attgagagggcaaattggcttatatcttattggtgtaaacatgttagccatactgtaattatttcatcttatcttcaggctgaaccttctcttgcaatccytttcctgtctgcctctacctaaaattccaagaatgctgctcaacttgcctgagtttgatcctctgtcttttctacccaagctcctgctgctcttaggaca

SEQ ID NO: 337836 - DNA, 201 bp, Homo sapiens
gctgagttttggttctttgatactttttttgaaaggcctgaaggtccttttctggggaagaaactcaaaacagatgcaagtttcaaactttaacagcagargggtcaatttctttgtttatccaaaaagaactgtctatgggactattgggtgggtttcaaaatgctactgcacacccattaggatggctactataaaaaa

SEQ ID NO: 337837 - DNA, 201 bp, Homo sapiens
ggcagtaatggttaagagcaaaaccctgaaaccagacagcctgtgctcagactgtaccaggcaagtaacagcaactcctttgtgcctcagtgtgtcatctrtaaattgaaagtcatgagttcttacagcataaggctgatagaagtttaagtaatctttgtaaggttcttaggacagtggccacacatagtaaaaactttt

SEQ ID NO: 337838 - DNA, 201 bp, Homo sapiens
tctacctaaagacaaattaaaggtacaagtatcaggagagtataatctgactgaatattggtgttataacttaccttggcttaaaactttatgaccagaayatacctcagttgaaagaaaggggtgtgtttaagaaaggttatgacacagttccaattctgatgatctgcagagcccgctcctggcctcctgacatggatg

SEQ ID NO: 337839 - DNA, 201 bp, Homo sapiens
gatgtaaaatttaccaaaatgttgcaaattatcttggtgcttaagaagagatcgattgaagggaacgtgatgtcatgaatttctttgatttgttaagttcraagctagctagatgtgtgatgtagagtctgttctctgaatgccttgctcactcaagtgcttgtactttttttcccctttaactaggaattgtggtgcttg

SEQ ID NO: 337840 - DNA, 201 bp, Homo sapiens
gcttttcaccatgttggccaggctggtctcaaacttctgaccttgtgattcacccgcctcagcctcccaaagtgctgggattacacgcatgagccaccgtscccggccgtaactttcctttataagcttaaaaatcattaaggctctgggtcaagaaagcagactagttactgagcattgtcatctgccttctcattttaa

SEQ ID NO: 337841 - DNA, 201 bp, Homo sapiens
aacttactaaatgtaaacaccagaaattattcaaggtattcttcagaccacaatggaattaaactagaaatcaataaaagaaagactgctggaaaaacccmaaatattgggtgattaaacaacatccttctaaataatgttatatgtcagagatgtcttgaggaattataaagtattttgaattaaaatgaaaatacaact

SEQ ID NO: 337842 - DNA, 201 bp, Homo sapiens
atactattcataaaatatatttttaaaagcattgaaacaaacttattctttatatcaaagtgataaatacaggtgtgcaaacttatttggattgtgtacargtgtattttggtgggtgcattgctaccttgtttggtttgataggtaccacatatggcaccgggtaggtcaaatactgattctttattcattttgatcaca

SEQ ID NO: 337843 - DNA, 201 bp, Homo sapiens
cacttccctttctgccatctggactgataatcaagagacctggattatagtactggagatctggttttgctcctgagtagctttgtgcttctcagacttcycaccaaaatataacatacacacacggagtgcactagcagtctgtcacatgggcatactttgtctaaaatgtcagtttaataattttttataaagtttgct

SEQ ID NO: 337844 - DNA, 201 bp, Homo sapiens
atgaactcccgaagtccctaaagtagtaagtgacaacgtcaaaaccaaatgcatggcttctgactccacacacagtggattttcctcaccagctggaaaargggtgtgtttgtgtgagagagcgtctccgagagaagagctaacggagatgaccaggacttgcactgagaaaataccaccaggacaaagcctgttttcatg

SEQ ID NO: 337845 - DNA, 201 bp, Homo sapiens
tgagatattgtttctttggtatgtcacagagccatgtgggtccagtgttccccaaaccccctcttacagaactccaggtcagtgttcagaaatattgtgtwctttttttttttttttttttttttttttttttgagacaggttctctgtcgcccaggcaagagtgcagtggtgcaatcatggctcactgcagcctcaatct

SEQ ID NO: 337846 - DNA, 201 bp, Homo sapiens
ggaggctgggtttaggtgatggtctttgattaaaaagtggggcagttaggagtgacagctgggtttgtgggagagataatgaactttgttttgtataggtygagttggaagtacttcttggacatctaaatggaagtgccctcaggttaagtatatcagacagaaatcaggagagaagcttgggatagaattactgaaaac

SEQ ID NO: 337847 - DNA, 201 bp, Homo sapiens
gaatcgtttgaacccaggaggtgaaggttgcagttagccaagatcgcaccactgtgctccagcctgggtgacagagcgagactccatctcaaaaaaaaaaagaaagtgttaattatctgaatcataccacctcagtaggataaaccttgatataatagtagtcatgccagcatcttgttttatattcttgtctattaaata

SEQ ID NO: 337848 - DNA, 201 bp, Homo sapiens
atttggcctgttgaagtggttgacattttatgaaaacaaaggagcaaacttttacctgatgccgtgttaagattcactctgtcaagtggttgagaacactyatttaattatctaactgtacttttgcattacctttttttatggccaactttaaacatgcctagggaagttcccgttctattcccagccagaagcaagtgt

SEQ ID NO: 337849 - DNA, 201 bp, Homo sapiens
ataagttatgggatttctgttcggcttggagatttggcctgttgaagtggttgacattttatgaaaacaaaggagcaaacttttacctgatgccgtgttargattcactctgtcaagtggttgagaacacttatttaattatctaactgtacttttgcattacctttttttatggccaactttaaacatgcctagggaagt

SEQ ID NO: 337850 - DNA, 201 bp, Homo sapiens
ggtcatctggagttaatgtatgaagaccagagcagcccgtagctgaaactggaagttaggaggatagatctgtgagtccagaattaggggctctgggcaaragtgcaatatctgtgggtggaggggctggaaccagcaaatccgcgttgtcatcttccaacaactcatatggaaaaggtggtagtagtgttaggtgaagga

SEQ ID NO: 337851 - DNA, 201 bp, Homo sapiens
agctccggcagttagaaagggagacttcaaaagttagaaaaaattagatttttgtcagtctgcttctggaaattgatactcagtagtagtttgccttctcrgggctttctctgggaactggcattagtctagactgaggttagtaaattttgtgtgtaaaaggccagatattttaggctttgtgtgcctcttaacaatttt

SEQ ID NO: 337852 - DNA, 201 bp, Homo sapiens
ccataataatcaggagtgaagtcccagggatattctgtgctggtatgtaaatatgttgtattatgaaattaaactgtagtctgatttttcctcaatagtartctgttttccattagaatgttctttggtttgaaccccattaccaacaactcctctttgtctgtgttttactgattcacaagaaaaaaacatgcttagtct

SEQ ID NO: 337853 - DNA, 201 bp, Homo sapiens
gttatgtttttctcagtgtgtgtgtggtccttgcactttcatatggctgcaaacactttaaattttgtgccctcccaacatagatatgagttatgttggartgagtttattttaaaccagagtatgttctcattatagaaatgttacataggatgagaagacctatggaatactgctgaagcctaatttaacccaaagttt

SEQ ID NO: 337854 - DNA, 201 bp, Homo sapiens
aagcactatttctaatagcattttgaattttcctgtttttctcatggctttctaaactttacttcccaaagtgtggtctgtggaccagcagcctgggcatytcctggcagcttgttagacgtgcagaatctcaggcccatctcagacccactgagtccacatctgcattttaacaaggaggatggggatttgtgtgcatct

SEQ ID NO: 337855 - DNA, 201 bp, Homo sapiens
gttcattttcttttttttttttttttttttgagacggagtctcgctttgtcgcccaggccggactgcggactgcagtggcgcaatctcggctcactgcaasctccgcctcccgggttcacgccattctcctgcctcagcctcccaagtagctgggactacaggcgcccgccaccgcgcccggctaattttttgtattttta

SEQ ID NO: 337856 - DNA, 201 bp, Homo sapiens
agcccgtagctgaaactggaagttaggaggatagatctgtgagtccagaattaggggctctgggcaaaagtgcaatatctgtgggtggaggggctggaacyagcaaatccgcgttgtcatcttccaacaactcatatggaaaaggtggtagtagtgttaggtgaaggaatgcatttacagagtagagaaaaggggctagga

SEQ ID NO: 337857 - DNA, 201 bp, Homo sapiens
cttaaaaagatttttaaaagttttaagttcaaagaatgttgaactaaagcaacaatacaaggaacagaaatgagtaaaatggaagacagagatgcagtgcctagggtcaacacaaggccgtgctctttacagtggagtaaaaagtgttttaacaatacgtattacaaatgaaaaaaaggtgtgattatagatacaggagag

SEQ ID NO: 337858 - DNA, 201 bp, Homo sapiens
agtaggtggcagaaatttggggagggagcaagatgaacttggtaatttggatatttactgtgacttgattatgaaaagttttgtgttacaactaccagaaratagagagcagtgtttggtttgattagatgagaaaagatagattatgctataacaacctcttctgtcttgtcttgtgaactcactgtgccataccatatg

SEQ ID NO: 337859 - DNA, 201 bp, Homo sapiens
cctggcctcctgacatggatgttcagctctctacttcagagctccctataggcagcttattagccccttagggcctgacttgctctctctcccatgatgcytctgtggccaccatgcagcaaatgccaccaccgtccacacaccgccccgcctgagaacgtgagcactgtcctctcctctgctccctccttccactgccag

SEQ ID NO: 337860 - DNA, 201 bp, Homo sapiens
aatctgtagttttttcaaatttgaaagagtacctcattcatgttttttgttttctataacactaatttaacttttcatgttgcagtaatttcagatttacrgaatagttacaaagatagtataaatcactcttatgtacgctttacccagcttcctcaaatattaacatgttatagaactgtaccacagttaacaaaagta

SEQ ID NO: 337861 - DNA, 201 bp, Homo sapiens
attttggttatgagtattttaatttcctccttataacctcaaatttatgtcagtgtttattgctctcatttttaaaaattgctagtaacttgctctcttaraaaaaacaggttattcattttatgagtggcaggttactttcttattatccagcagtaatcaaggtggtcttatttacattttaatattctatagtgttta

SEQ ID NO: 337862 - DNA, 201 bp, Homo sapiens
ttgcattatttttgtgaaatgaccaaccacttaatcagaaaagttatcttactgtatatccagactttctatttttccattcgttgaaatcgcgccaaacyacttccaagatttgttacccacaaaggtgaaatcagacttaacagtgacgatcttaaaaggcatttggtatgagtagtttaaaggaccacttttcctttg

SEQ ID NO: 337863 - DNA, 201 bp, Homo sapiens
tgttaattatctgaatcataccacctcagtaggataaaccttgatataatagtagtcatgccagcatcttgttttatattcttgtctattaaatacatgcwtagatattgtattatgcatatccttgaatatatttagaagcatcacaattgaatatgtatggatttacctcaaagaagactgggaaatagttacaactgg

SEQ ID NO: 337864 - DNA, 201 bp, Homo sapiens
gtgagtgttcgtctttgtcttttctcaatcttatggggaaggcatccagtcttttactactaagtatgatgttagctgtagttttttcacagatgcagttyatcagggtgaaaagtttctttttatttgtagtttgctgaggcattttttttttttcatgaacatgtattgaattttgtcaaatctctttttggcatctat

SEQ ID NO: 337865 - DNA, 201 bp, Homo sapiens
tgagaccctgtctcaaaaaaacaaaacaaaaaatggggctcagggagcttctaggttggtgaacacattgattttctaggaggttggcactcctaaagagrgcatggaagctctgtactccctcttcccataccttgccctatgcatctgttccattggtctgttcctgagttgcatatagtaaataaagtgttttttttt

SEQ ID NO: 337866 - DNA, 201 bp, Homo sapiens
catattaggacagttattttttcatcctttttaattgggcagtagcaacctccaactgaaatttttctatgcatactattcataaaatatatttttaaaarcattgaaacaaacttattctttatatcaaagtgataaatacaggtgtgcaaacttatttggattgtgtacaagtgtattttggtgggtgcattgctacct

SEQ ID NO: 337867 - DNA, 201 bp, Homo sapiens
atgtgtcacctgtatatctgttttgatgacttgtttatttgaattttttcccaatgtttttcttagaatctcatctcattgagttgtaaggttttttttttgtttttttttatattcttgatacaagacttttatctgttatacttggtaagttttcttccactaaatggcctgtcatttttctgccttataatttgtttt

SEQ ID NO: 337868 - DNA, 201 bp, Homo sapiens
aggaggctgaagtggattaatatgtgagatacaacacaggataggaagtagctacacagaagaacagaaatttgcacgagggtgaccttgagttggttggwgattgccaagatgtgctttcatttgataaaactcaacaaagccacaaaggaactaccagagaaagagaactgtaagcagactaattcccagagttcacac

SEQ ID NO: 337869 - DNA, 201 bp, Homo sapiens
ggtgatttctcaaaaaattaaactggaattactgtatgatccagcagtcccacgctgtatatattgaaagcagaattgaaagcagggtcttgaagagatayttgtatatccatgttcatagcagcattattcacaatagccaaaaggtagagcaacccaggtatccttccaggggtgaatggataagcaaaatgtggtata

SEQ ID NO: 337870 - DNA, 201 bp, Homo sapiens
agttagtgatgtaaaatttaccaaaatgttgcaaattatcttggtgcttaagaagagatcgattgaagggaacgtgatgtcatgaatttctttgatttgtyaagttcgaagctagctagatgtgtgatgtagagtctgttctctgaatgccttgctcactcaagtgcttgtactttttttcccctttaactaggaattgtg

SEQ ID NO: 337871 - DNA, 201 bp, Homo sapiens
ttacctggaggccttcactccaatttactagcccagccattccttccattgctctgttcaagatccacgctgaaggagagagagttgattggtctgacttragtcatgtgctcacgtcttggtcatatgggtgtgagtgagggttgggcaggagaagcctccagagacctctcagagccaccagggcaagcatctgagttc

SEQ ID NO: 337872 - DNA, 201 bp, Homo sapiens
tcatgcattagtatttttataaggtagtttgatcatattaggacagttattttttcatcctttttaattgggcagtagcaacctccaactgaaatttttcwatgcatactattcataaaatatatttttaaaagcattgaaacaaacttattctttatatcaaagtgataaatacaggtgtgcaaacttatttggattgtg

SEQ ID NO: 337873 - DNA, 201 bp, Homo sapiens
tatgcaatactcttttttttttttttttgggagacagggtcttactctgtcatctgcagtctcagctcactgcaacctctgcctctggggttcagtggatkcttgtgcttcgctttctcaagtagctgggattacaggcgtccgccaccacacccggctaatgtttttgcaattttagtagagatagggtttcaccatgtt

SEQ ID NO: 337874 - DNA, 201 bp, Homo sapiens
agtttttattagaaagaatattgtttagtatcaaatgactattaaaagtatatagtgcaataaaaagaaagacgtgaaggaatgtggaaacattaaaacawaatcgaacctccttaagtagtagttatatcagatgtaattaaaagatgggatgtaatttgactatcaaatacttgaaccaatgcttttatttgtaatata

SEQ ID NO: 337875 - DNA, 201 bp, Homo sapiens
caggtagctgggcctgggcccagggctggcaggagtcaggccctgcattagcttttgttccattcccagtttagtttgctacccccatctctgagtgaggkttcccccacatcaggctgggcccacggaggagagggagatgggacaagggatgagggtaggtcttccatcagtctgaattggggtcccagataggagact

SEQ ID NO: 337876 - DNA, 201 bp, Homo sapiens
ctcctgttctctcattgtgtttctctgcctatcaccccagatttgttgaatcctaatctcaaggataccgttatctgtgccatgaagataacccaagagcytcagggtctgggttactggtaagtaacttgggctggagccccgcagcggtggtatggttaggactggtgggcagcagcagggaacaaacccctttccttc

SEQ ID NO: 337877 - DNA, 201 bp, Homo sapiens
tgctcagtggggctttggatttatagaactttgtctccatccaaacttcgccccttcctagttataaaatcttgggcctcaggactaaataatccgtaacrtgtaatatggagcttacaataggttagttttcttcctgtctctggcctgggtggtgtgaagcaggatggggaaggagaggggctggtctcggggtcaggg

SEQ ID NO: 337878 - DNA, 201 bp, Homo sapiens
cacgccttttctcatttattcttccaacaatcatatgaggcaggtgttactcacgtcctcattttatagaggaagaaacaagcctcagggagggcccaaartcagagatggagcaaggagcagaggggggcttccaacccgaaccttgctgcaaagccatgacctcaaccactttgtcatcctcgggggcattcaaggtcc

SEQ ID NO: 337879 - DNA, 201 bp, Homo sapiens
tcggggtcagggtgatgctgatcaggaatgcaagggggctgatacgtgctgctggagcctggccttctgcccaccccttctctcctctcccctttcccagrggtgcactcaagccctgtttcttctccttctgtgagtggaccacggaggctggtgagctgcctgtcatcccaaagctcagctctgagccagagtggtggt

SEQ ID NO: 337880 - DNA, 201 bp, Homo sapiens
gagccctgatgctgtgacacccaggtgctaatgtcctctgtgatttgggggactggccacacacagccaatgatgacagggcagggaggtcaaaccagacrggcaggctgggcttccagggagaagggctttttgcaggttatggtttagaagtggtggtgggggtggaggagactctcgggacatcttggggtcttgtgt

SEQ ID NO: 337881 - DNA, 201 bp, Homo sapiens
gcaccctggtctggggtggctgtaaccatctgacccccaggcctatgctctgccctatgcaggggtctgccttgcttatttcacaagcggtttcaacgcarctgctttggactacgaggctgatgggagcaccaacaacgggatcttccagatcaacagccggaggtggtgcagcaacctcaccccgaacgtccccaacgt

SEQ ID NO: 337882 - DNA, 201 bp, Homo sapiens
caggtgttactcacgtcctcattttatagaggaagaaacaagcctcagggagggcccaaagtcagagatggagcaaggagcagaggggggcttccaacccraaccttgctgcaaagccatgacctcaaccactttgtcatcctcgggggcattcaaggtcccgtggaggttggagaccagggacaccaattggcacaaaca

SEQ ID NO: 337883 - DNA, 201 bp, Homo sapiens
gcagtcagcatgagacttgagggaaggcatttagaagatggagactgagaaagtctctacgagcaggggaaggaggagcaggaggggaacggtgctagcgygccgggagaggagggacaacggatggagcaaggcttggtgatgggaaggacaaatctagagcttagagggaagatgggcctgcatgagattggaggcccc

SEQ ID NO: 337884 - DNA, 201 bp, Homo sapiens
gaagggggcctccttggacccgcagagcagtttcagcgcgcggtgatggcagggaggccaattcaccaggttggaaaacaagcgggagggagaaagtggcrattttccccaggagtttgggcgagaagagggggaaagagacaagggagtagcagtcagcatgagacttgagggaaggcatttagaagatggagactgaga

SEQ ID NO: 337885 - DNA, 201 bp, Homo sapiens
cagagtcgaagggggcctccttggacccgcagagcagtttcagcgcgcggtgatggcagggaggccaattcaccaggttggaaaacaagcgggagggagaragtggcgattttccccaggagtttgggcgagaagagggggaaagagacaagggagtagcagtcagcatgagacttgagggaaggcatttagaagatggag

SEQ ID NO: 337886 - DNA, 201 bp, Homo sapiens
gtgccggatgtactgctcaggtagctgggcctgggcccagggctggcaggagtcaggccctgcattagcttttgttccattcccagtttagtttgctaccyccatctctgagtgagggttcccccacatcaggctgggcccacggaggagagggagatgggacaagggatgagggtaggtcttccatcagtctgaattggg

SEQ ID NO: 337887 - DNA, 201 bp, Homo sapiens
cgtggaaaccaggagaggcaagcctttcaacagcgggtggcggacggcatgagtacagctgagagctcccatgagacagagtcgaagggggcctccttggrcccgcagagcagtttcagcgcgcggtgatggcagggaggccaattcaccaggttggaaaacaagcgggagggagaaagtggcgattttccccaggagttt

SEQ ID NO: 337888 - DNA, 201 bp, Homo sapiens
gataaggaggagagtcagccagagagggaggaggaaacctgggagaagggagcatcgtggaaaccaggagaggcaagcctttcaacagcgggtggcggacrgcatgagtacagctgagagctcccatgagacagagtcgaagggggcctccttggacccgcagagcagtttcagcgcgcggtgatggcagggaggccaatt

SEQ ID NO: 337889 - DNA, 201 bp, Homo sapiens
tgccaggagactctcactggggaacacacctctgataagacccttcaagtatgagtcagagttaaccatgtagaggaaaggagagggtgaatgttctagaragcaaggtcattgtgagagaacaaggtggcactgctgaaacataacgtgtgaatgagggagtgggccgcagggctgggctgtgaagggtcgtgaagggcc

SEQ ID NO: 337890 - DNA, 201 bp, Homo sapiens
ggtgtctaccattatccctggataatcatctgaaagatctgttgggagaggaagtgtcatccctcagtgtagtgtgtgtgtgtgtgtgtgtgtgtgtgtgygcgcgcgcatgtgtgtatgtgtgtgtgtgtgtggggcagagatgtgcaagggggctgggattagatatcctgctctgcctctggaccctgagtggaaggg

SEQ ID NO: 337891 - DNA, 201 bp, Homo sapiens
gtctctaaccttggtccttgcaactccacctcctccctcagagtgagctttctatcttgtttctgccttgcatcctaggcccaatagcttttcttatcttatagggttaaagttcaagttccttgggttggtatacaaggtctttcatgaccaagactcagctgactgctacagattcaactctcacctgttcggaaactt

SEQ ID NO: 337892 - DNA, 201 bp, Homo sapiens
tggagcaaggagcagaggggggcttccaacccgaaccttgctgcaaagccatgacctcaaccactttgtcatcctcgggggcattcaaggtcccgtggagkttggagaccagggacaccaattggcacaaacaagagtttgtacaactctttcactttttgactctgtgaaggtggagagcaggtgtggaggcgcagaggt

SEQ ID NO: 337893 - DNA, 201 bp, Homo sapiens
aagttggaaaagctctgggaaaggcctggcacagtgttcaaagacttgacaaactccaccaggttggctgcctcctccttctcactcccctcgcggtgagragaaggtctcatgtccctgtggccacgccttttgtggacttgagtttcagaagcagccacagagcagctactccatgccagcaactctgcagataaataa

SEQ ID NO: 337894 - DNA, 201 bp, Homo sapiens
aagttaactttgtggtgggaaagactgacatctattccagcctcgtgtgacagaggatgtggaagatcgggtgtgtgagagtgtggggggtggtggcatgscaggagactctcactggggaacacacctctgataagacccttcaagtatgagtcagagttaaccatgtagaggaaaggagagggtgaatgttctagaaag

SEQ ID NO: 337895 - DNA, 201 bp, Homo sapiens
agttggaaaagctctgggaaaggcctggcacagtgttcaaagacttgacaaactccaccaggttggctgcctcctccttctcactcccctcgcggtgagargaaggtctcatgtccctgtggccacgccttttgtggacttgagtttcagaagcagccacagagcagctactccatgccagcaactctgcagataaataag

SEQ ID NO: 337896 - DNA, 201 bp, Homo sapiens
gtgaagaatgacattcatatttccagtttgggtaaatgtgtggcccatcatgttttaaagcacataaggaaagtcacaaggcagaagaaggcattgatggraacagtggttctgtttagatgtgctgggtttgaggtgcctgcagggcattcaagtggaagtgtcctgccagtagctgcctctgaggtcttggggaagatg

SEQ ID NO: 337897 - DNA, 201 bp, Homo sapiens
atgagacagagtcgaagggggcctccttggacccgcagagcagtttcagcgcgcggtgatggcagggaggccaattcaccaggttggaaaacaagcgggagggagaaagtggcgattttccccaggagtttgggcgagaagagggggaaagagacaagggagtagcagtcagcatgagacttgagggaaggcatttagaag

SEQ ID NO: 337898 - DNA, 201 bp, Homo sapiens
gctgggctaaaagtcaagaggcctgaggccagccccaacccatgctatttggtagctggatgggaccctgggtgagtcgctgtagacctctaagcctcgaytgattggtttgcaaagcaggtgggagggcacctgccccaatcaccttgatcaggcaggagaggctcggtggagccagcgtgggacctgtgcagtgagcac

SEQ ID NO: 337899 - DNA, 201 bp, Homo sapiens
agaagcagggatgaccagggcaggggagggactggctgagacacagaggaactggaggggactaggtctggggagatgaaggagccctgatgctgtgacayccaggtgctaatgtcctctgtgatttgggggactggccacacacagccaatgatgacagggcagggaggtcaaaccagacgggcaggctgggcttccagg

SEQ ID NO: 337900 - DNA, 201 bp, Homo sapiens
gcaactgcagctgatattatctctcctcttccctgttctccatcctcagggaggcctggaggcatcactgccagggaaaagacctcactgaatgggtggayggctgtgacttctaggatggacggaaccatgcacagcaggctgggaaatgtggtttggttcctgacctaggcttgggaagacaagccagcgaataaagga

SEQ ID NO: 337901 - DNA, 201 bp, Homo sapiens
tggtatggttaggactggtgggcagcagcagggaacaaacccctttccttcctcacttctggtttagagaccacactctccttcttgttcttctctgggcrgtgactggcaactgcagctgatattatctctcctcttccctgttctccatcctcagggaggcctggaggcatcactgccagggaaaagacctcactgaat

SEQ ID NO: 337902 - DNA, 201 bp, Homo sapiens
tggagccccgcagcggtggtatggttaggactggtgggcagcagcagggaacaaacccctttccttcctcacttctggtttagagaccacactctccttcytgttcttctctgggcggtgactggcaactgcagctgatattatctctcctcttccctgttctccatcctcagggaggcctggaggcatcactgccaggga

SEQ ID NO: 337903 - DNA, 201 bp, Homo sapiens
catctgctcagtggggctttggatttatagaactttgtctccatccaaacttcgccccttcctagttataaaatcttgggcctcaggactaaataatccgyaacgtgtaatatggagcttacaataggttagttttcttcctgtctctggcctgggtggtgtgaagcaggatggggaaggagaggggctggtctcggggtc

SEQ ID NO: 337904 - DNA, 201 bp, Homo sapiens
ttctgatggatgtgtatagaatagcttggaagagtggttgagacatgatacaagaagaccatgaaggaagccaggatggaggtgtgaacctaggaaaggayggtgctctcggagggaaggtggaatccacaggacattgggactgattggttggaactgggtgaaagatgtcatggggaaggagtgaagaatgacattcat

SEQ ID NO: 337905 - DNA, 201 bp, Homo sapiens
tgaatgagggagtgggccgcagggctgggctgtgaagggtcgtgaagggccgtgtggacctcgaaggggcagttatggtgggagccatccaaggtgtcacmgggctgggcttttcatttaacaaatttgttctgatggatgtgtatagaatagcttggaagagtggttgagacatgatacaagaagaccatgaaggaagcc

SEQ ID NO: 337906 - DNA, 201 bp, Homo sapiens
ctctaaccttggtccttgcaactccacctcctccctcagagtgagctttctatcttgtttctgccttgcatcctaggcccaatagcttttcttatcttatagggttaaagttcaagttccttgggttggtatacaaggtctttcatgaccaagactcagctgactgctacagattcaactctcacctgttcggaaactttt

SEQ ID NO: 337907 - DNA, 201 bp, Homo sapiens
cactgaatgggtggatggctgtgacttctaggatggacggaaccatgcacagcaggctgggaaatgtggtttggttcctgacctaggcttgggaagacaarccagcgaataaaggatggttgaacgtgaatatggctctcagctctcagtgtgtctgcaggtgccatgtcagagccagagcacctccgttttccctcacct

SEQ ID NO: 337908 - DNA, 201 bp, Homo sapiens
aaaggatggttgaacgtgaatatggctctcagctctcagtgtgtctgcaggtgccatgtcagagccagagcacctccgttttccctcacctcacctgtccrcttgggctgggtttccagtggactccagaaagcccagcaccagaggcttacctccatttctggtggcctgtgggcaggtgtttggggggggcaccagtgc

SEQ ID NO: 337909 - DNA, 201 bp, Homo sapiens
gctgggatcatgttgttggccctggtctgtctgctcagctgcctgctaccctccagtgaggccaagctctacggtcgttgtgaactggccagagtgctacrtgacttcgggctggacggataccggggatacagcctggctgactgtgagaacccctctccctggcgggccctgacttccccacacctccctccctctttc

SEQ ID NO: 337910 - DNA, 201 bp, Homo sapiens
ggatttatagaactttgtctccatccaaacttcgccccttcctagttataaaatcttgggcctcaggactaaataatccgtaacgtgtaatatggagcttrcaataggttagttttcttcctgtctctggcctgggtggtgtgaagcaggatggggaaggagaggggctggtctcggggtcagggtgatgctgatcaggaa

SEQ ID NO: 337911 - DNA, 201 bp, Homo sapiens
aatccacctgccttggcctcccaaagtgctgggattacaagcatgagccactgtgcccagtcagagttctcatgagatctaacggttttctaagcatctgrcatttcccctgcttgcacttctcttgcctgccaccatataagatttgcctacttcccgtttcaccatggtggcaagtttcctgaggcctccccagccatg

SEQ ID NO: 337912 - DNA, 201 bp, Homo sapiens
taggtgtctaccattatccctggataatcatctgaaagatctgttgggagaggaagtgtcatccctcagtgtagtgtgtgtgtgtgtgtgtgtgtgtgtgygcgcgcgcgcatgtgtgtatgtgtgtgtgtgtgtggggcagagatgtgcaagggggctgggattagatatcctgctctgcctctggaccctgagtggaag

SEQ ID NO: 337913 - DNA, 201 bp, Homo sapiens
cttgggctggagccccgcagcggtggtatggttaggactggtgggcagcagcagggaacaaacccctttccttcctcacttctggtttagagaccacactytccttcttgttcttctctgggcggtgactggcaactgcagctgatattatctctcctcttccctgttctccatcctcagggaggcctggaggcatcactg

SEQ ID NO: 337914 - DNA, 201 bp, Homo sapiens
tcagaagcagccacagagcagctactccatgccagcaactctgcagataaataagacatgcagataaataagaccagccgccgttcttcagaagttaactytgtggtgggaaagactgacatctattccagcctcgtgtgacagaggatgtggaagatcgggtgtgtgagagtgtggggggtggtggcatgccaggagact

SEQ ID NO: 337915 - DNA, 201 bp, Homo sapiens
tggagaaaaacaaggtggtggttagggtggggttatcctggcctggaagagtgaccagctgagagaggagagagagagagagagagaaactctggagctgytgtgaaatgctcaggatggaattccttttaagtcacttttctacaaaaaaaaaaaaaaaaaaaaaatcaaaaacagtccatgtgtagcagtcaatttagt

SEQ ID NO: 337916 - DNA, 201 bp, Homo sapiens
tttattgggccctactatgtgctgaacaatgagataatgggaagactgctgggctaaaagtcaagaggcctgaggccagccccaacccatgctatttggtrgctggatgggaccctgggtgagtcgctgtagacctctaagcctcgattgattggtttgcaaagcaggtgggagggcacctgccccaatcaccttgatcag

SEQ ID NO: 337917 - DNA, 201 bp, Homo sapiens
tgagccccctttcccttcttcctggggctgttaacaggggcgctgggttggtctggccagagaccaggtggagaaaaacaaggtggtggttagggtggggktatcctggcctggaagagtgaccagctgagagaggagagagagagagagagagaaactctggagctgttgtgaaatgctcaggatggaattccttttaag

SEQ ID NO: 337918 - DNA, 201 bp, Homo sapiens
agataatgggaagactgctgggctaaaagtcaagaggcctgaggccagccccaacccatgctatttggtagctggatgggaccctgggtgagtcgctgtasacctctaagcctcgattgattggtttgcaaagcaggtgggagggcacctgccccaatcaccttgatcaggcaggagaggctcggtggagccagcgtggga

SEQ ID NO: 337919 - DNA, 201 bp, Homo sapiens
actgctgctgctgccattgtcaccatggtctcagctctgcggggagcacccctgatcagtgagccccctttcccttcttcctggggctgttaacaggggcsctgggttggtctggccagagaccaggtggagaaaaacaaggtggtggttagggtggggttatcctggcctggaagagtgaccagctgagagaggagagag

SEQ ID NO: 337920 - DNA, 201 bp, Homo sapiens
atggatgtgtatagaatagcttggaagagtggttgagacatgatacaagaagaccatgaaggaagccaggatggaggtgtgaacctaggaaaggacggtgmtctcggagggaaggtggaatccacaggacattgggactgattggttggaactgggtgaaagatgtcatggggaaggagtgaagaatgacattcatatttc

SEQ ID NO: 337921 - DNA, 201 bp, Homo sapiens
ttttgagccactgctgctgctgccattgtcaccatggtctcagctctgcggggagcacccctgatcagtgagccccctttcccttcttcctggggctgttmacaggggcgctgggttggtctggccagagaccaggtggagaaaaacaaggtggtggttagggtggggttatcctggcctggaagagtgaccagctgagag

SEQ ID NO: 337922 - DNA, 201 bp, Homo sapiens
tggaccctgagtggaagggctcaggtgggctagtcaaagctctgtggtggcgctgtttgtggaagatgagctcacagagctggagttctagaaggccctcygttggcctggagcctgccttccccattgttctcttaacactgggtgcctggggccctggcaaggttgtgggggacatcttgagctgaagcagggttttga

SEQ ID NO: 337923 - DNA, 201 bp, Homo sapiens
gaaggccttagaaagcatatcagcgtttatggcctgggcagaagtgaattccacggaggataaggaggagagtcagccagagagggaggaggaaacctggsagaagggagcatcgtggaaaccaggagaggcaagcctttcaacagcgggtggcggacggcatgagtacagctgagagctcccatgagacagagtcgaagg

SEQ ID NO: 337924 - DNA, 201 bp, Homo sapiens
caacctcaccccgaacgtccccaacgtgtgccggatgtactgctcaggtagctgggcctgggcccagggctggcaggagtcaggccctgcattagcttttkttccattcccagtttagtttgctacccccatctctgagtgagggttcccccacatcaggctgggcccacggaggagagggagatgggacaagggatgagg

SEQ ID NO: 337925 - DNA, 201 bp, Homo sapiens
ccagggacaccaattggcacaaacaagagtttgtacaactctttcactttttgactctgtgaaggtggagagcaggtgtggaggcgcagaggtcaagagargcatgggaaggcttgtcagaggtggtgggcagtgggataggagctcacagaggtggggaaatgcgggtgaggacaagaagcagggatgaccagggcaggg

SEQ ID NO: 337926 - DNA, 201 bp, Homo sapiens
ctcaccccgaacgtccccaacgtgtgccggatgtactgctcaggtagctgggcctgggcccagggctggcaggagtcaggccctgcattagcttttgttcmattcccagtttagtttgctacccccatctctgagtgagggttcccccacatcaggctgggcccacggaggagagggagatgggacaagggatgagggtag

SEQ ID NO: 337927 - DNA, 201 bp, Homo sapiens
tggggaaggagaggggctggtctcggggtcagggtgatgctgatcaggaatgcaagggggctgatacgtgctgctggagcctggccttctgcccacccctyctctcctctcccctttcccaggggtgcactcaagccctgtttcttctccttctgtgagtggaccacggaggctggtgagctgcctgtcatcccaaagctc

SEQ ID NO: 337928 - DNA, 201 bp, Homo sapiens
gtaagggacatggactcttcctactttagagaaggctctgggagtccaccaggctccatgcaatctcacacaccttcctttatagattgagggagaagtgsacctcattgggatggtgaggctgacagaaaccaggcagccttttgtccctgagaacaatccagaaaggaaccactggcattatcgagacctggaagctat

SEQ ID NO: 337929 - DNA, 201 bp, Homo sapiens
  misc_feature (1)...(201): n = A,T,C or G
gtccctggaggacccattggagggcaaaccagagttactctgaggaacgagcatctgcagtacatcgtgacctggtgagtccccagcggccctctggcttnctccccttcagcctagcagcctgctaatgctggcttgctttcaacccctaggtatggactctctgcagctacatcctacctgtggtttaagaaattccta

SEQ ID NO: 337930 - DNA, 201 bp, Homo sapiens
gcgtaactctgggcccttgaccttgctgccatctgcttggccttatgctctgtcactgtaggtccagcgtcggaagtggaagctgaacctgattgcagagytggagtccagagttctggctgagcctgtccctctgccagccgagtgagtgcatggctgcccccctagggcctgttttacttgagttcaacagcagagccc

SEQ ID NO: 337931 - DNA, 201 bp, Homo sapiens
ggattcgttttccagccaaaccttgctcggccactgttcttatctccatgcagcccaatggaactgaaaaatctggagtataggccagtgaaggtcagggrgtgctttgaccattccaaggagctgtatatgatgccccggaccatggtggaccctgtccgggaggcccgggagggcggcctcatctcctcctcaactcag

SEQ ID NO: 337932 - DNA, 201 bp, Homo sapiens
aggcagccttttgtccctgagaacaatccagaaaggaaccactggcattatcgagacctggaagctatggccagaatcacaggcgcagagcccatcttcaytgatgccaacttccgtacgttgtggaccagcccatctcggaacaagtagcttttgtgaatactgtccttcctcctaaccctcattgcccagtcactactg

SEQ ID NO: 337933 - DNA, 201 bp, Homo sapiens
ccctgagaacaatccagaaaggaaccactggcattatcgagacctggaagctatggccagaatcacaggcgcagagcccatcttcattgatgccaacttcygtacgttgtggaccagcccatctcggaacaagtagcttttgtgaatactgtccttcctcctaaccctcattgcccagtcactactgtggcttatgttctc

SEQ ID NO: 337934 - DNA, 201 bp, Homo sapiens
cccctgttacagagaaggctcgagagttacttccgaacgtcccatccagctaatgggtggccagcccaggctgaaagcccagggctctgaaagtaaagcgyatctaaccaccgcggcttacgtgttcctctcagtgtgcagcacagggctgttttgccgtgtgtagagtgctgtgcaagcctgccccaggcctgccttttt

SEQ ID NO: 337935 - DNA, 201 bp, Homo sapiens
agatacccaggagattcaattccttgcatagtttaagtccctaattgtgacattgacttaatcttctcagccagctcatttatgactggataatttctgtrtgttgacctctgaagggaaaggagggattcgtgaaacaggggccctgcctctggagaactgtctagttgcccacacattagatgatggcaagctatgagg

SEQ ID NO: 337936 - DNA, 201 bp, Homo sapiens
ttctcagccagctcatttatgactggataatttctgtatgttgacctctgaagggaaaggagggattcgtgaaacaggggccctgcctctggagaactgtytagttgcccacacattagatgatggcaagctatgaggggccagcaagaggacttcaagagaaaggaccccagccctaccttgagggagtggaggcagggg

SEQ ID NO: 337937 - DNA, 201 bp, Homo sapiens
ccctgtccctggataatgcagtatttcaagactgcctttatgctggatcatgtgctactggtataaagttctggccttctaccttaaatgagctcatgacyggttcatcataaaatcctggcttggtttcagtccaaagaactttcccaaaacttgatactcaagttacatctctagggaacaaaatgcctggtttaagaa

SEQ ID NO: 337938 - DNA, 201 bp, Homo sapiens
ccgacgcgcccgcggagcagcccggcggaagccgctcgcagaacctggagccgggggcggggctctgggcgggactcagcggcgccccggatgcagatgcytcctgcgtcccggaagcgcccgcggggccgggtgcgatggcggcggtggctgcgttgcagctggggctgcgggcggcggggctgggacgggtgagcgccg

SEQ ID NO: 337939 - DNA, 201 bp, Homo sapiens
tcttccctctttacatttacgatgagttgtaaaaatggaaagctgttaagagagctctgtgagccattactgaattgatatatttttctacataacacaayaaccactagtgcctgactaagctacttagtaactgtagctgcttattttttattttttgagacagtttcgctcttgttgcccaggctggagtgcagtggc

SEQ ID NO: 337940 - DNA, 201 bp, Homo sapiens
tgacatatggaggaaagtcttattttgagtcctgggtgtcacccttttttcaggtatagtaaacttatcctccacagggcccaaggccctgtggctgaggrcagataatgtaggtctcaccgtgagggtggtcgtttgaaaaagtgccctgaatgatttgtctgctctctccctagaatatgccctacagagataggtata

SEQ ID NO: 337941 - DNA, 201 bp, Homo sapiens
gcaaagaacctaggcaagtactgagcggacaagggcggggatggtcacccaacgtaaaggccatacaggacttccaactggccacgcaaaaatgacagccwctaggaagtggtgcagaggctggcaggccagtagggggtggacttgagtctgctgtctccacagagagcacagtccctggaggacccattggagggcaaa

SEQ ID NO: 337942 - DNA, 201 bp, Homo sapiens
gtcagggtatactaatttacatcactatttccttcacaatccccaaccttggtaggaccctggggaacccaagatacccaggagattcaattccttgcatmgtttaagtccctaattgtgacattgacttaatcttctcagccagctcatttatgactggataatttctgtatgttgacctctgaagggaaaggagggatt

SEQ ID NO: 337943 - DNA, 201 bp, Homo sapiens
tctgggagtccaccaggctccatgcaatctcacacaccttcctttatagattgagggagaagtggacctcattgggatggtgaggctgacagaaaccaggyagccttttgtccctgagaacaatccagaaaggaaccactggcattatcgagacctggaagctatggccagaatcacaggcgcagagcccatcttcattga

SEQ ID NO: 337944 - DNA, 201 bp, Homo sapiens
agggggtggacttgagtctgctgtctccacagagagcacagtccctggaggacccattggagggcaaaccagagttactctgaggaacgagcatctgcagkacatcgtgacctggtgagtccccagcggccctctggcttcctccccttcagcctagcagcctgctaatgctggcttgctttcaacccctaggtatggact

SEQ ID NO: 337945 - DNA, 201 bp, Homo sapiens
gggattcgttttccagccaaaccttgctcggccactgttcttatctccatgcagcccaatggaactgaaaaatctggagtataggccagtgaaggtcaggrggtgctttgaccattccaaggagctgtatatgatgccccggaccatggtggaccctgtccgggaggcccgggagggcggcctcatctcctcctcaactca

SEQ ID NO: 337946 - DNA, 201 bp, Homo sapiens
gcctgagtgaccatgagtgactgtctttagtcaaaaaccctccccacctgaagtagcactttcattaccctagagtcaccatcctggtaaatagagggttygttcccaggaagaaagtgaatcctgaaacccggcagaaaggccaggtaagggacatggactcttcctactttagagaaggctctgggagtccaccaggct

SEQ ID NO: 337947 - DNA, 201 bp, Homo sapiens
acgtgttcctctcagtgtgcagcacagggctgttttgccgtgtgtagagtgctgtgcaagcctgccccaggcctgcctttttataaaaaaaaaaaaaaaaatagtatccgcaaggcccctggtgcttttcagcggatggaactcatcctctgagagcttaaaggcactttctgtgtacattcttccctctttacatttacg

SEQ ID NO: 337948 - DNA, 201 bp, Homo sapiens
gattgagggagaagtggacctcattgggatggtgaggctgacagaaaccaggcagccttttgtccctgagaacaatccagaaaggaaccactggcattatygagacctggaagctatggccagaatcacaggcgcagagcccatcttcattgatgccaacttccgtacgttgtggaccagcccatctcggaacaagtagct

SEQ ID NO: 337949 - DNA, 201 bp, Homo sapiens
tcaaaaaccctccccacctgaagtagcactttcattaccctagagtcaccatcctggtaaatagagggttcgttcccaggaagaaagtgaatcctgaaacscggcagaaaggccaggtaagggacatggactcttcctactttagagaaggctctgggagtccaccaggctccatgcaatctcacacaccttcctttatag

SEQ ID NO: 337950 - DNA, 201 bp, Homo sapiens
tacgtgttcctctcagtgtgcagcacagggctgttttgccgtgtgtagagtgctgtgcaagcctgccccaggcctgcctttttataaaaaaaaaaaaaaaaatagtatccgcaaggcccctggtgcttttcagcggatggaactcatcctctgagagcttaaaggcactttctgtgtacattcttccctctttacatttac

SEQ ID NO: 337951 - DNA, 201 bp, Homo sapiens
ttggggacatggcaggtaaagaccggcatctggtgtgcgtaactctgggcccttgaccttgctgccatctgcttggccttatgctctgtcactgtaggtcyagcgtcggaagtggaagctgaacctgattgcagagttggagtccagagttctggctgagcctgtccctctgccagccgagtgagtgcatggctgcccccc

SEQ ID NO: 337952 - DNA, 201 bp, Homo sapiens; identical to SEQ ID NO: 71094

SEQ ID NO: 337953 - DNA, 201 bp, Homo sapiens
taatcagaattttgtttatcccacagaagcagttgggctcgttgaaaaagaagttcaagagtcatcaccgcaaacccaagagcttcagctcctgtaaacarccaggttaataaaagcacatgccgtgaagtttcgagaaagccttcagatatttcccccgctcctgatcaaaccgtgtgtcctctgaatgatcggctgtcc

SEQ ID NO: 337954 - DNA, 201 bp, Homo sapiens; identical to SEQ ID NO: 71097

SEQ ID NO: 337955 - DNA, 201 bp, Homo sapiens
tgcttcccagccagccccttgtggaagccaggctctgtggaccacggtcaagaccactggtttgtgaggacaccctcctacctcagactatgagctgtggygtgtttgtccttacccctgggcacagggacctgattactagccaccacctttgcctttgccatcagggcaggagtggagacttccccgcctttggtagat

SEQ ID NO: 337956 - DNA, 201 bp, Homo sapiens
ccttacccctgggcacagggacctgattactagccaccacctttgcctttgccatcagggcaggagtggagacttccccgcctttggtagataagcaggascaaggccaaaagaggacaaggtcctaatgagtgtgtggcattgcactgtactcctctgaggccctgctgagcggggtctaatcctgcagctgttaaggaa

SEQ ID NO: 337957 - DNA, 201 bp, Homo sapiens
caccagaaaggaccttggaagcacggaggatggggatggcactgatgactttttgacagacaaagaggatgagaaggcaaagcccccaagagagaaggccmctgatgagggcaggagagagacgaccgtgtaccgagggctggtccagaagcgcgggaaggtgagctgtcacctcctctgttagtgtggcagtggcttccc

SEQ ID NO: 337958 - DNA, 201 bp, Homo sapiens
ggaccttggaagcacggaggatggggatggcactgatgactttttgacagacaaagaggatgagaaggcaaagcccccaagagagaaggccactgatgagrgcaggagagagacgaccgtgtaccgagggctggtccagaagcgcgggaaggtgagctgtcacctcctctgttagtgtggcagtggcttcccctagtgatg

SEQ ID NO: 337959 - DNA, 201 bp, Homo sapiens
tgagggaggacttcaggctgctggggagagggtggcatcactgccagcccgagttgcctttgagaggccatgccaagctcactggggcacagttggccttsggcctggtcagtgccctcctagccgtggcttcctaggcctggctagatcggggatgagtggtaaaggccccgtagacctctaccatcttcttgcctcctg

SEQ ID NO: 337960 - DNA, 201 bp, Homo sapiens
gctgctctggtttttgtccagggcggtggggctgtggggccctggccgagtgcagtcctcataagttagctgtggcccagaggaccgtggggggtgtggargtacccagcacgtgctggcttatctcccagatgaagaatgtcagaagcaaggggtggagtacgtgcctgcctgcctggtgcaccggaggaggaggaggga

SEQ ID NO: 337961 - DNA, 201 bp, Homo sapiens
acagggacacccgtgctggatgaaggagatggttgcaccgtggatctgggtgagcacccggcgagagtttagagaagggagagaggcctggtcctgagccycaggaagaggctggaagtcctcccgtggtactgaagggaagatgaggacagaaaaatgatagatttgataacacagaggcccctggcaaccttggtgagg

SEQ ID NO: 337962 - DNA, 201 bp, Homo sapiens
cagctgctctggtttttgtccagggcggtggggctgtggggccctggccgagtgcagtcctcataagttagctgtggcccagaggaccgtggggggtgtgraggtacccagcacgtgctggcttatctcccagatgaagaatgtcagaagcaaggggtggagtacgtgcctgcctgcctggtgcaccggaggaggaggagg

SEQ ID NO: 337963 - DNA, 201 bp, Homo sapiens
aggttttaagcttgagctgtattaggaaaggtgtgtattagggaagtatcgggcttttgaaacagggacacccgtgctggatgaaggagatggttgcaccrtggatctgggtgagcacccggcgagagtttagagaagggagagaggcctggtcctgagccccaggaagaggctggaagtcctcccgtggtactgaaggga

SEQ ID NO: 337964 - DNA, 201 bp, Homo sapiens
gccactgcactccagcctgggcaacaagagcgaaactgtctcaaaaaataaaaaataagcagctacagttactaagtagcttagtcaggcactagtggttrttgtgttatgtagaaaaatatatcaattcagtaatggctcacagagctctcttaacagctttccatttttacaactcatcgtaaatgtaaagagggaaga

SEQ ID NO: 337965 - DNA, 201 bp, Homo sapiens
tatacctatctctgtagggcatattctagggagagagcagacaaatcattcagggcactttttcaaacgaccaccctcacggtgagacctacattatctgycctcagccacagggccttgggccctgtggaggataagtttactatacctgaaaaaagggtgacacccaggactcaaaataagactttcctccatatgtca

SEQ ID NO: 337966 - DNA, 201 bp, Homo sapiens
actatttggggaacaactgaagaaatctgaatacagctagataccagaggatatgcaatcatcatccattctggttgtggtgatggacgaaggagaatgtsctcagagaggcaaactgacaagtacttccatgagttccactgccctcaaaataaaaagcttgggataaaagagttacatggactgagaatgggccggggc

SEQ ID NO: 337967 - DNA, 201 bp, Homo sapiens
aatccctcctttcccttcagaggtcaacatacagaaattatccagtcataaatgagctggctgagaagattaagtcaatgtcacaattagggacttaaackatgcaaggaattgaatctcctgggtatcttgggttccccagggtcctaccaaggttggggattgtgaaggaaatagtgatgtaaattagtataccctgac

SEQ ID NO: 337968 - DNA, 201 bp, Homo sapiens; identical to SEQ ID NO: 53565

SEQ ID NO: 337969 - DNA, 201 bp, Homo sapiens
tcaatgaagatgggctctgcgcctgtgattctggccatagcttccaggtctcgataatgccagtggttcctttctggattgttctcagggacaaaaggctrcctggtttctgtcagcctcaccatcccaatgaggtccacttctccctcaatctataaaggaaggtgtgtgagattgcatggagcctggtggactcccaga

SEQ ID NO: 337970 - DNA, 201 bp, Homo sapiens
cctcctcagccttcctggccttctctttcgcccgcagctcctttcgcttcctcttcttccggtcccgttcctgctttctccgccgccttttctccaaggckgcaggggacagctccttggcactgccctgggggaaagaggcacccactcattaaagttctctcgatcccagggtcccccagcctggcccatagtcgagaa

SEQ ID NO: 337971 - DNA, 201 bp, Homo sapiens
atgatggggttcggagagagatcatgaagctaacaaggggcaacgctgaggcctgaagccgacccagcccgcccaaggacccagctcccgctcaccttatkgaagatcagcccgggcggctcccgcggctccgtgcaggccccctctggggttgcctccaccacctcctgggcctccgtggcctcctcagccttcctggcc

SEQ ID NO: 337972 - DNA, 201 bp, Homo sapiens; identical to SEQ ID NO: 71107

SEQ ID NO: 337973 - DNA, 201 bp, Homo sapiens
agcagatcttcttggccaggctctgcaggtaggcgtccttggcgagtagagaggccatggcggagacccgggccgttcacgactcacaccttccccgctgygcgtgcgactctcaccacctccgccggaaaccaccacacgggcaggcgcggccaaacgaacgccgagccgccagcccgcgcgctcgattagccaagcctg

SEQ ID NO: 337974 - DNA, 201 bp, Homo sapiens
ccggcccggccctgtgcgttaccccgcgtgcgcgcctgctgttccggggccgaatgggagcagatcttcttggccaggctctgcaggtaggcgtccttggygagtagagaggccatggcggagacccgggccgttcacgactcacaccttccccgctgcgcgtgcgactctcaccacctccgccggaaaccaccacacggg

SEQ ID NO: 337975 - DNA, 201 bp, Homo sapiens
ccgaagagtccttccaattcgacccctctgcaccgcctacatccacgctttccttccactcccactcaggctgccccgctccagacctcatccctgcactscgggccccgctccctccagtctctgcgcggcagggaagaggtcctaaaaagtggtcattccaaccgggcgcggtggctcacgcctgtaatcccagcactt

SEQ ID NO: 337976 - DNA, 201 bp, Homo sapiens; identical to SEQ ID NO: 270592

SEQ ID NO: 337977 - DNA, 201 bp, Homo sapiens
  misc_feature (1)...(201): n = A,T,C or G
taggaatttcttaaaccacaggtaggatgtagctgcagagagtccatacctaggggttgaaagcaagccagcattagcaggctgctaggctgaaggggagnaagccagagggccgctggggactcaccaggtcacgatgtactgcagatgctcgttcctcagagtaactctggtttgccctccaatgggtcctccagggac

SEQ ID NO: 337978 - DNA, 201 bp, Homo sapiens
ctgagttgaggaggagatgaggccgccctcccgggcctcccggacagggtccaccatggtccggggcatcatatacagctccttggaatggtcaaagcacyccctgaccttcactggcctatactccagatttttcagttccattgggctgcatggagataagaacagtggccgagcaaggtttggctggaaaacgaatcc

SEQ ID NO: 337979 - DNA, 201 bp, Homo sapiens
cctcatagcttgccatcatctaatgtgtgggcaactagacagttctccagaggcagggcccctgtttcacgaatccctcctttcccttcagaggtcaacayacagaaattatccagtcataaatgagctggctgagaagattaagtcaatgtcacaattagggacttaaactatgcaaggaattgaatctcctgggtatct

SEQ ID NO: 337980 - DNA, 201 bp, Homo sapiens
aaaaaggcaggcctggggcaggcttgcacagcactctacacacggcaaaacagccctgtgctgcacactgagaggaacacgtaagccgcggtggttagatrcgctttactttcagagccctgggctttcagcctgggctggccacccattagctggatgggacgttcggaagtaactctcgagccttctctgtaacagggg

SEQ ID NO: 337981 - DNA, 201 bp, Homo sapiens
cccctgcctccactccctcaaggtagggctggggtcctttctcttgaagtcctcttgctggcccctcatagcttgccatcatctaatgtgtgggcaactaracagttctccagaggcagggcccctgtttcacgaatccctcctttcccttcagaggtcaacatacagaaattatccagtcataaatgagctggctgagaa

SEQ ID NO: 337982 - DNA, 201 bp, Homo sapiens
cctgcacagaaccaacatgccctgaagcctctcacctgcagggttccctgctgagctggaagcccaagctgcttcctctttggctgcctcaggcctcctgsccccagaggctgctggagatttctcccccaaggacttggccttgtgctcagcagccttctcttctcgcttccggaatttcttttgtgttttcttcctttt

SEQ ID NO: 337983 - DNA, 201 bp, Homo sapiens; identical to SEQ ID NO: 270577

SEQ ID NO: 337984 - DNA, 201 bp, Homo sapiens
agccccgccctgcacagaaccaacatgccctgaagcctctcacctgcagggttccctgctgagctggaagcccaagctgcttcctctttggctgcctcagscctcctggccccagaggctgctggagatttctcccccaaggacttggccttgtgctcagcagccttctcttctcgcttccggaatttcttttgtgttttc

SEQ ID NO: 337985 - DNA, 201 bp, Homo sapiens; identical to SEQ ID NO: 270579

SEQ ID NO: 337986 - DNA, 201 bp, Homo sapiens
gcccagccccagccccgccctgcacagaaccaacatgccctgaagcctctcacctgcagggttccctgctgagctggaagcccaagctgcttcctctttgsctgcctcaggcctcctggccccagaggctgctggagatttctcccccaaggacttggccttgtgctcagcagccttctcttctcgcttccggaatttctt

SEQ ID NO: 337987 - DNA, 201 bp, Homo sapiens; identical to SEQ ID NO: 71103

SEQ ID NO: 337988 - DNA, 201 bp, Homo sapiens; identical to SEQ ID NO: 270581

SEQ ID NO: 337989 - DNA, 201 bp, Homo sapiens
cctgctgctgctttttttttcttaagagcaaaggggaccaagcccaagcccagccccagccccgccctgcacagaaccaacatgccctgaagcctctcacytgcagggttccctgctgagctggaagcccaagctgcttcctctttggctgcctcaggcctcctggccccagaggctgctggagatttctcccccaaggac

SEQ ID NO: 337990 - DNA, 201 bp, Homo sapiens; identical to SEQ ID NO: 53592

SEQ ID NO: 337991 - DNA, 201 bp, Homo sapiens
gctgctccaggtcctcagagagacacagccttgccccctgacatcctgctagccatgtggcctggaatgccacacagttccttcggtcccatccaccctarcactcctgtgatctttgctcttggggaagtctcgtgctatccctgtgcgcctgctgctgctttttttttcttaagagcaaaggggaccaagcccaagccc

SEQ ID NO: 337992 - DNA, 201 bp, Homo sapiens; identical to SEQ ID NO: 270584

SEQ ID NO: 337993 - DNA, 201 bp, Homo sapiens
agaaaccccagggagagacaggagcaggcagagaggaaagccaggggaggggagagcaagacagaagcagagttaagaaaacacgaccacaccccagaccwgcctttccctttctccactcctgctccatctgtcccctgagttggcaggcctggcaaggagaggcggccagtggtgagagccaccctagcattctgaaag

SEQ ID NO: 337994 - DNA, 201 bp, Homo sapiens
caaaccacctcctccaaattttgtagcctgggccccagaacaagttggctctcacaaggcccctgcagagacctgagggcagggaagctcttcaagccaabctgctccaggtcctcagagagacacagccttgccccctgacatcctgctagccatgtggcctggaatgccacacagttccttcggtcccatccaccctag

SEQ ID NO: 337995 - DNA, 201 bp, Homo sapiens; identical to SEQ ID NO: 270586

SEQ ID NO: 337996 - DNA, 201 bp, Homo sapiens
acccaacgaagccctccccaatggcctttcccatccccgggccaacaagagccctacaccagcccaaacgagacctgtgcttcaggaacaagggcccagasccttgctcacctcttaggaaccacacactgtacctcgggatggcggaggagagtagctggggactgtcccccacacagcacgaggccttaaggaagggcc

SEQ ID NO: 337997 - DNA, 201 bp, Homo sapiens; identical to SEQ ID NO: 270588

SEQ ID NO: 337998 - DNA, 201 bp, Homo sapiens
ggcggctcccgcggctccgtgcaggccccctctggggttgcctccaccacctcctgggcctccgtggcctcctcagccttcctggccttctctttcgcccrcagctcctttcgcttcctcttcttccggtcccgttcctgctttctccgccgccttttctccaaggcggcaggggacagctccttggcactgccctggggg

SEQ ID NO: 337999 - DNA, 201 bp, Homo sapiens; identical to SEQ ID NO: 270589

SEQ ID NO: 338000 - DNA, 201 bp, Homo sapiens
gacccagctcccgctcaccttattgaagatcagcccgggcggctcccgcggctccgtgcaggccccctctggggttgcctccaccacctcctgggcctccrtggcctcctcagccttcctggccttctctttcgcccgcagctcctttcgcttcctcttcttccggtcccgttcctgctttctccgccgccttttctccaa

SEQ ID NO: 338001 - DNA, 201 bp, Homo sapiens
ggctctgagcaggcggcgctcggcgcgggccgccttcttcctgcgcaggttctgccgccgccggtcctggcgctgctgcatcttctccaccacgccggccrtgcgcttctcccaccggcgctgccgctgcgccctgcgcttctccttgcgcttcagggcctcctgcagcaggcgttcgtcgtcacggatcttcacgccctc

SEQ ID NO: 338002 - DNA, 201 bp, Homo sapiens
atgaagctaacaaggggcaacgctgaggcctgaagccgacccagcccgcccaaggacccagctcccgctcaccttattgaagatcagcccgggcggctccygcggctccgtgcaggccccctctggggttgcctccaccacctcctgggcctccgtggcctcctcagccttcctggccttctctttcgcccgcagctcctt

SEQ ID NO: 338003 - DNA, 201 bp, Homo sapiens
cacacaacaagagtcaaagcagccagcttggttttaaaaccaatggccactaaaatcatcagagctgtgcccacgatgttctggacaatctgcataggttsaaacgtaagaaattcaaaataaatgtgaggaaaagagatgctttataaacaaaagttccagctgctgcacgtcatgaagtctctatccatcaggctgatg

SEQ ID NO: 338004 - DNA, 201 bp, Homo sapiens
ggggggcagccatgcactcactcggctggcagagggacaggctcagccagaactctggactccaactctgcaatcaggttcagcttccacttccgacgctrgacctacagtgacagagcataaggccaagcagatggcagcaaggtcaagggcccagagttacgcacaccagatgccggtctttacctgccatgtccccaa

SEQ ID NO: 338005 - DNA, 201 bp, Homo sapiens
atagcttccaggtctcgataatgccagtggttcctttctggattgttctcagggacaaaaggctgcctggtttctgtcagcctcaccatcccaatgaggtscacttctccctcaatctataaaggaaggtgtgtgagattgcatggagcctggtggactcccagagccttctctaaagtaggaagagtccatgtcccttac

SEQ ID NO: 338006 - DNA, 201 bp, Homo sapiens
cagtagtgactgggcaatgagggttaggaggaaggacagtattcacaaaagctacttgttccgagatgggctggtccacaacgtacggaagttggcatcartgaagatgggctctgcgcctgtgattctggccatagcttccaggtctcgataatgccagtggttcctttctggattgttctcagggacaaaaggctgcct

SEQ ID NO: 338007 - DNA, 201 bp, Homo sapiens
gagaacataagccacagtagtgactgggcaatgagggttaggaggaaggacagtattcacaaaagctacttgttccgagatgggctggtccacaacgtacrgaagttggcatcaatgaagatgggctctgcgcctgtgattctggccatagcttccaggtctcgataatgccagtggttcctttctggattgttctcaggg

SEQ ID NO: 338008 - DNA, 201 bp, Homo sapiens
agttgtccatgatggacttaatgtcgtccttcagccgcttgttgtaggactgcagcagcgtctccttgctctggggcagggctctctgctgggccatggcygagcctcaagcagcgcagcggggagacctgggacctagagtgcagcacagacctctgagtgcaggcagagtctaccccagccaccctctatgccccaacc

SEQ ID NO: 338009 - DNA, 201 bp, Homo sapiens
cctctgacaaggttcaattccaccctctcttgttctggccatgggagacaacatgcacctttgctcaagacaaatagaggcaacccacgctgcttgctgtrctaggtgcagggatgggggcttatcttggcccggtctttttgggctgtgggagccctgtttggtaggaaccgttgtcacttgcttggcatttggtaaact

SEQ ID NO: 338010 - DNA, 201 bp, Homo sapiens
ctgacctccacaggttcatgtgtgagaattaagtgagaaaactgggatgtcagttctgcagggcaggccctcccctctcgtcagcctctggcttccactcytgcaggactggcctccagtccaattatgcaggtgtacattctgctcatgaaaaactcaaaccccacagataaaactgcgatcccattttgcctcctgccc

SEQ ID NO: 338011 - DNA, 201 bp, Homo sapiens
aggtcggacaccagcttcatcagggactcgccggctcggacctgtggccatcagaaccagggcgggcacagggtgaggggggacagcggccttgcctacargtagctgatgctgggcaagggatggcctctctaggagcctcagcttcctcatctgcaaagtgggactctacccctgacctccacaggttcatgtgtgaga

SEQ ID NO: 338012 - DNA, 201 bp, Homo sapiens
tcactaggggcaggagaaaagagaggtcatggcctgaggcttgggaccaccacaccccagttcctgcactggaaaattacaggctcattaaggacccagarccccttccagggccaccccgttggtagagaagggagaacttaagagtcttaaattacaatttgaaaaggtggctgctgatatatatattagaaacagaac

SEQ ID NO: 338013 - DNA, 201 bp, Homo sapiens
cctggtcgcttaaaggcaatgtacagaggagggcaactgcttctgccacaggggctgtgtgaggccccccagggggcgctggtgtggacaggaggcctgckggaggggacacaggctggcctggaagccccgctgggtgaagctgagggactgttgggggagggcatgggaagcctggcacagatgtcctgggtttgcgcc

SEQ ID NO: 338014 - DNA, 201 bp, Homo sapiens
gctttcccgcggcctgcctcgcccctggcttcctcccttgctcctgccctcagtgttcagtctcagaaccgtcctgggcacagagtggcatcccgaggaamgcaaaggagaggcagagccagaaagagcaactaacaagcagagagggggcaggcgagcacagaggcgcagctcatgcggaacagggcagggcagggcagg

SEQ ID NO: 338015 - DNA, 201 bp, Homo sapiens
aaagagcagcaatgcaaaaaagtggcggtgttttaatcaagtctcattacaacggcagaattaggaatgagtcccacctagcttccacatgcgtgggcagyagctgtcacacgggcctgtcgtggcactcagcccatggcacagacatatgtggctcagggcaagaaccagtggatggggctctgcacaggaacgctggcc

SEQ ID NO: 338016 - DNA, 201 bp, Homo sapiens
caaagtgctgggattacagcaggagccactgggcctgacctggtcctgttttagattttaagactccaaaataacaaccaaatgcaacacacaataaaaayaggcataaaagcctttcagctggaaccgccaccttccagtaattcgccaaaatgacgaacacaaagggaaagaggagaggcacccaatatatgttctcta

SEQ ID NO: 338017 - DNA, 201 bp, Homo sapiens
agtccatacctaggggttgaaagcaagccagcattagcaggctgctaggctgaaggggaggaagccagagggccgctggggactcaccaggtcacgatgtmctgcagatgctcgttcctcagagtaactctggtttgccctccaatgggtcctccagggactgtgctctctgtggagacagcagactcaagtccaccccct

SEQ ID NO: 338018 - DNA, 201 bp, Homo sapiens
aatcctgtcagctgtgccttcagagcacctccagaatctcagtggacccactcccatctcatcaccactttggtcctgttttatttattttttgaaatggrgagtctcactcttcctcccaggctggagtgcagtggtgtcatcttggctgactgcagtctccacctcctgggttctgcctcagtctcctgagtagatggg

SEQ ID NO: 338019 - DNA, 201 bp, Homo sapiens
tgagttgaggaggagatgaggccgccctcccgggcctcccggacagggtccaccatggtccggggcatcatatacagctccttggaatggtcaaagcaccycctgaccttcactggcctatactccagatttttcagttccattgggctgcatggagataagaacagtggccgagcaaggtttggctggaaaacgaatccc

SEQ ID NO: 338020 - DNA, 201 bp, Homo sapiens
tgaggcactaaaaagtgaaatctccatccaaatccatactgttagtaagggctggacgtgccattatttggtttgcttatctactgaccagctccctgtgsactgggtgcttcctgcctagaacactattcactcgcgctgctcagcccctggcctctcctgtctccaccccttctcagactctgctccccttggtgggcc

SEQ ID NO: 338021 - DNA, 201 bp, Homo sapiens
agcctggtggactcccagagccttctctaaagtaggaagagtccatgtcccttacctggcctttctgccgggtttcaggattcactttcttcctgggaacraaccctctatttaccaggatggtgactctagggtaatgaaagtgctacttcaggtggggagggtttttgactaaagacagtcactcatggtcactcaggc

SEQ ID NO: 338022 - DNA, 201 bp, Homo sapiens; identical to SEQ ID NO: 71109

SEQ ID NO: 338023 - DNA, 201 bp, Homo sapiens
agctacttgttccgagatgggctggtccacaacgtacggaagttggcatcaatgaagatgggctctgcgcctgtgattctggccatagcttccaggtctcrataatgccagtggttcctttctggattgttctcagggacaaaaggctgcctggtttctgtcagcctcaccatcccaatgaggtccacttctccctcaatc

SEQ ID NO: 338024 - DNA, 201 bp, Homo sapiens; identical to SEQ ID NO: 270591

SEQ ID NO: 338025 - DNA, 201 bp, Homo sapiens
ctataaaggaaggtgtgtgagattgcatggagcctggtggactcccagagccttctctaaagtaggaagagtccatgtcccttacctggcctttctgccgsgtttcaggattcactttcttcctgggaacgaaccctctatttaccaggatggtgactctagggtaatgaaagtgctacttcaggtggggagggtttttga

SEQ ID NO: 338026 - DNA, 201 bp, Homo sapiens; identical to SEQ ID NO: 270593

SEQ ID NO: 338027 - DNA, 201 bp, Homo sapiens
aagggctggacgtgccattatttggtttgcttatctactgaccagctccctgtgcactgggtgcttcctgcctagaacactattcactcgcgctgctcagsccctggcctctcctgtctccaccccttctcagactctgctccccttggtgggccaccccacccccaccttggcggtcttgatgatctcggtgaagttgtc

SEQ ID NO: 338028 - DNA, 201 bp, Homo sapiens
cgaagagtccttccaattcgacccctctgcaccgcctacatccacgctttccttccactcccactcaggctgccccgctccagacctcatccctgcactgsgggccccgctccctccagtctctgcgcggcagggaagaggtcctaaaaagtggtcattccaaccgggcgcggtggctcacgcctgtaatcccagcacttt

SEQ ID NO: 338029 - DNA, 201 bp, Homo sapiens
ccaccccgttggtagagaagggagaacttaagagtcttaaattacaatttgaaaaggtggctgctgatatatatattagaaacagaactgttgtatttgawacagaactaaactttcttcccctaacttctgccatgaggtgatttaaaaaaatttttttggccaggcgcagtggttcacgcctgtaatcccagcactttg

SEQ ID NO: 338030 - DNA, 201 bp, Homo sapiens
ggtggttccagagaccctgctgctctcctctcctcctgggcccagacagcactgacacgtccccgctgtcggcttccccacccgattatctacttcccttrtgcagcgtggtcaccaggccatgagaaccctaagcgcaggagccctctgccatcctcctcctccccacaccgcaccatgcccgtagtgaagggactgaaa

SEQ ID NO: 338031 - DNA, 201 bp, Homo sapiens
agagttaagtcccaatctcatggcccattcaataggcaggaaaggctcaccaaggctttgatcccaggaagatgccgaaagaggatcaggatcgggggccwgagacactgatcctagagctcagaaccacaaccttgacccagtagttctgcttgtgagaattcatcaggcacaaagatgaggcttcaaggacgttcatca

SEQ ID NO: 338032 - DNA, 201 bp, Homo sapiens
aatccctgtcccactgtggccactcatggatctgcagggcaattccagtaaattccactccaccgcttcaacctggactggttcctacaacatcctccagracaggtaactcagtgcctcacgaggtaggtcaccgtggtatgagaaaacacttcctacggtgcaagccaaaccacctcctccaaattttgtagcctgggc

SEQ ID NO: 338033 - DNA, 201 bp, Homo sapiens
caggaacaagggcccagagccttgctcacctcttaggaaccacacactgtacctcgggatggcggaggagagtagctggggactgtcccccacacagcacraggccttaaggaagggccccaggaaaagggtgggtaggggccaacacaggggagacagtaccattcagcacaaagagctgcattggtgcttcctgtgcct

SEQ ID NO: 338034 - DNA, 201 bp, Homo sapiens
ggttctgccgccgccggtcctggcgctgctgcatcttctccaccacgccggccgtgcgcttctcccaccggcgctgccgctgcgccctgcgcttctccttrcgcttcagggcctcctgcagcaggcgttcgtcgtcacggatcttcacgccctccgccttgtagaggaggttggtccacttcatcttcgcctccagctcct

SEQ ID NO: 338035 - DNA, 201 bp, Homo sapiens
ccccgctgtcggcttccccacccgattatctacttcccttgtgcagcgtggtcaccaggccatgagaaccctaagcgcaggagccctctgccatcctcctyctccccacaccgcaccatgcccgtagtgaagggactgaaagggtcttttcccactgactgaccattactcctgtctctactaaaaatgcaaaaaaaaaaa

SEQ ID NO: 338036 - DNA, 201 bp, Homo sapiens
acagcactgacacgtccccgctgtcggcttccccacccgattatctacttcccttgtgcagcgtggtcaccaggccatgagaaccctaagcgcaggagccytctgccatcctcctcctccccacaccgcaccatgcccgtagtgaagggactgaaagggtcttttcccactgactgaccattactcctgtctctactaaaa

SEQ ID NO: 338037 - DNA, 201 bp, Homo sapiens
atcttctcatgcagtcgctgtcgcagaacatccagagcaaagacagactcaggctcagtggccaggccatctgcagggaaggagacaggactgcagggggscctctcttcccctccccctccctccctagggccacgaatccctgtcccactgtggccactcatggatctgcagggcaattccagtaaattccactccacc

SEQ ID NO: 338038 - DNA, 201 bp, Homo sapiens
gggctctgctgttgaactcaagtaaaacaggccctaggggggcagccatgcactcactcggctggcagagggacaggctcagccagaactctggactccarctctgcaatcaggttcagcttccacttccgacgctggacctacagtgacagagcataaggccaagcagatggcagcaaggtcaagggcccagagttacgc

SEQ ID NO: 338039 - DNA, 201 bp, Homo sapiens
gaagaatgtcagaagcaaggggtggagtacgtgcctgcctgcctggtgcaccggaggaggaggagggaggaccagatggacggtgacgggcctcgcccgcrggaagccttctgggagcccacatccagtgatgaggggggagctgcaagtgatgacagcatgacagacctgtacccacgtaagcagaacgggccctgcttc

SEQ ID NO: 338040 - DNA, 201 bp, Homo sapiens
ctcgcccgcgggaagccttctgggagcccacatccagtgatgaggggggagctgcaagtgatgacagcatgacagacctgtacccacgtaagcagaacggsccctgcttctccctgaccctctactgtcagcagggagcagactgtggtgctgcctcccctgcaaaggtggcagcgaactcagcctaaaataactgtcagc

SEQ ID NO: 338041 - DNA, 201 bp, Homo sapiens
acggaggatggggatggcactgatgactttttgacagacaaagaggatgagaaggcaaagcccccaagagagaaggccactgatgagggcaggagagagaygaccgtgtaccgagggctggtccagaagcgcgggaaggtgagctgtcacctcctctgttagtgtggcagtggcttcccctagtgatggttttccatttgt

SEQ ID NO: 338042 - DNA, 201 bp, Homo sapiens
caggacgggcatgggtggctctctgcccagccctcctccaagtgccccacgtgaggacagtctcctgagaaatgatttgcccccacctcattctttaaagytgccgagtggtgaaaccaaagcatctctacatttgcctccttctgctccttctcgggggaagaagaccagaccagccccagagccccctccactccaccc

SEQ ID NO: 338043 - DNA, 201 bp, Homo sapiens
gcctcgcccgcgggaagccttctgggagcccacatccagtgatgaggggggagctgcaagtgatgacagcatgacagacctgtacccacgtaagcagaacrggccctgcttctccctgaccctctactgtcagcagggagcagactgtggtgctgcctcccctgcaaaggtggcagcgaactcagcctaaaataactgtca

SEQ ID NO: 338044 - DNA, 201 bp, Homo sapiens
ccgggtcggcctagggcggggtggtcaagtgcctctgcgacccgcactttcccgcgtctctcccacggcctggccctcccgccgcagtctctcttccccgscgcgccgcggtccgaaaacctagtcagccgccgcagcctctcggccccgcctcgatttttagctttataggaatgctgttgctttaaatccgaaatcccg

SEQ ID NO: 338045 - DNA, 201 bp, Homo sapiens
cgtaaatgtaaagagggaagaatgtacacagaaagtgcctttaagctctcagaggatgagttccatccgctgaaaagcaccaggggccttgcggatactatttttttttttttttttataaaaaggcaggcctggggcaggcttgcacagcactctacacacggcaaaacagccctgtgctgcacactgagaggaacacgt

SEQ ID NO: 338046 - DNA, 201 bp, Homo sapiens
gtaaatgtaaagagggaagaatgtacacagaaagtgcctttaagctctcagaggatgagttccatccgctgaaaagcaccaggggccttgcggatactatttttttttttttttttataaaaaggcaggcctggggcaggcttgcacagcactctacacacggcaaaacagccctgtgctgcacactgagaggaacacgta

SEQ ID NO: 338047 - DNA, 201 bp, Homo sapiens; identical to SEQ ID NO: 270594

SEQ ID NO: 338048 - DNA, 201 bp, Homo sapiens
gaatcagggctggaaggcaggtgagaaaatcctcacgcaaacaaggggcccgcggagttcaatgttccaccatgatgttccccaaaaagcaaatgaccccwaaagagagaagggacccccaaataagaatcacagcttccaattcccgggtgcttaccccgtgccaggatacattacgcacatggtttcaaatgtcataca

SEQ ID NO: 338049 - DNA, 201 bp, Homo sapiens
ttctccgccgccttttctccaaggcggcaggggacagctccttggcactgccctgggggaaagaggcacccactcattaaagttctctcgatcccagggtyccccagcctggcccatagtcgagaagaatcagggctggaaggcaggtgagaaaatcctcacgcaaacaaggggcccgcggagttcaatgttccaccatga

SEQ ID NO: 338050 - DNA, 201 bp, Homo sapiens
tttctccgccgccttttctccaaggcggcaggggacagctccttggcactgccctgggggaaagaggcacccactcattaaagttctctcgatcccagggkcccccagcctggcccatagtcgagaagaatcagggctggaaggcaggtgagaaaatcctcacgcaaacaaggggcccgcggagttcaatgttccaccatg

SEQ ID NO: 338051 - DNA, 201 bp, Homo sapiens
gatggcactgatgactttttgacagacaaagaggatgagaaggcaaagcccccaagagagaaggccactgatgagggcaggagagagacgaccgtgtaccragggctggtccagaagcgcgggaaggtgagctgtcacctcctctgttagtgtggcagtggcttcccctagtgatggttttccatttgtttaaaaaaagaa

SEQ ID NO: 338052 - DNA, 201 bp, Homo sapiens
ggtggtcaagtgcctctgcgacccgcactttcccgcgtctctcccacggcctggccctcccgccgcagtctctcttccccgccgcgccgcggtccgaaaasctagtcagccgccgcagcctctcggccccgcctcgatttttagctttataggaatgctgttgctttaaatccgaaatcccgtgccggtatcaactctcgc

SEQ ID NO: 338053 - DNA, 201 bp, Homo sapiens
acggacgcccgcaaggttcgcagcgcgggaggggaacggagtggcggagaagggcgcagttgggatgaggggctgaggggagggcaggggagaggagaggrcaggggagaggggagaggggagagcaggagagaggggagggcaggggagagggcgcggcgggatcaggggaggagagggaagggggcgcggcaggagggg

SEQ ID NO: 338054 - DNA, 201 bp, Homo sapiens; identical to SEQ ID NO: 71102

SEQ ID NO: 338055 - DNA, 201 bp, Homo sapiens
gcactttcccgcgtctctcccacggcctggccctcccgccgcagtctctcttccccgccgcgccgcggtccgaaaacctagtcagccgccgcagcctctcrgccccgcctcgatttttagctttataggaatgctgttgctttaaatccgaaatcccgtgccggtatcaactctcgcgatctccgaggccgcatacatatt

SEQ ID NO: 338056 - DNA, 201 bp, Homo sapiens
cccacagggtccgtgggtctctccctccctgtgtgcagcaatgagagagtgtagaaatacacacacaagacaaagagataaaagaaaaggcagctgggccygggagaccactactaccaatgctcggagaccggtagtggccccgaatgtctggctgcattgttatttattggatacaaagcaaaaggggcagggtaaaga

SEQ ID NO: 338057 - DNA, 201 bp, Homo sapiens
ggcagagccaggtgtacaggatggaacatgaaggcggactaggagcgtgaccactgaagcacagcatcacagggagacggttaggcctccagataactgcsggcaggcctgccggatgtcaggccctccacaagaggtggaagagcagagtcttctctaaactcctccagggaaagggacactccctttcccggtctgcta

SEQ ID NO: 338058 - DNA, 201 bp, Homo sapiens; identical to SEQ ID NO: 71108

SEQ ID NO: 338059 - DNA, 201 bp, Homo sapiens
agtagctgggactacaggcgcccaccactgtgcccggctaatttttgtatttttggtagagacggggtttcaccatgttgtccaggatggtcttgatcttytgatcttgtgatccgccctcctcagcctcccaaaattctgggattacaggcatgaggccgcacggccggacaatgtttacattttaaatgggagaaatca

SEQ ID NO: 338060 - DNA, 201 bp, Homo sapiens
atcttgtgatccgccctcctcagcctcccaaaattctgggattacaggcatgaggccgcacggccggacaatgtttacattttaaatgggagaaatcagtstaagtaaagtaggagctgaatcgttttaatgaaaaaaaaaaaaaatttcaaaaaggatgagaaagacagacggaagacatactaggtaatgagaaaattc

SEQ ID NO: 338061 - DNA, 201 bp, Homo sapiens
gccaggtgcccatatgccacacctcagggttgtcctctgttcgggtgagctgcggactaacgtggcccggcagcagaggccaccgtcttctgtcccgtggytcctgcgaacacaggcagtggggaacaggcagtgactgcccacccccaccgttcctcctccctgaccctgcaaacctcggggaagctttcaggcccggga

SEQ ID NO: 338062 - DNA, 201 bp, Homo sapiens
tcgcctccagctcctgcgccttcccctcatcctggccgcgcagctcgtccagccggctctgccgtgcctgcaggcgctccagcagctgccggtagttcctyccggtcagcggcgtgaggttccccttcaccctctgcctcttctcttttctgcgctgcgccttgctggccggctcgtcttcgctcacctccacctgggagg

SEQ ID NO: 338063 - DNA, 201 bp, Homo sapiens; identical to SEQ ID NO: 71098

SEQ ID NO: 338064 - DNA, 201 bp, Homo sapiens; identical to SEQ ID NO: 71101

SEQ ID NO: 338065 - DNA, 201 bp, Homo sapiens; identical to SEQ ID NO: 270578

SEQ ID NO: 338066 - DNA, 201 bp, Homo sapiens
agcagccaggagggatccagcccaatctgatgcagctgtagctgcagtggtcagcaggcttgcaggccccagtgctgaccgctccacctgcctggaggccmccccccacttctcccctcagtctgcttttctcctgctcattggctgtgtgccaggccccgaggtaactgttttacacagataaactcaccagtcatcaca

SEQ ID NO: 338067 - DNA, 201 bp, Homo sapiens
gcccctccagctcaaacggtcgaaggtttcagcttcttacggagccccacaagggtcaggatgatgggttttgacccttctgcatccctgggacccagcayggggcctggcacgtaggttggctccagctccgtggataaggctgagtgggtcacgaattggagctccaatggctttcaaggccattccctgcctgggctt

SEQ ID NO: 338068 - DNA, 201 bp, Homo sapiens
  misc_feature (1)...(201): n = A,T,C or G
cctcagaaccccctggaaaactctaggactgctgcagctcagcagtgccactgagcccagggcagggaaaccaagccccaggtcatgctggctctggatanctgtggctcccagcatggccaatgggcagaaaggagtattttaaatccaccaccaggaaggaaaggtttgtccaggagaaggcacaagatggacatggac

SEQ ID NO: 338069 - DNA, 201 bp, Homo sapiens
gctgctctgtgcaggggccctcagggacggtggctgcctcaaagagaccgacaaactgaacagctgtggaaggagatgcccagaagggtctgaaacacccyaggacccctctcagccaccctagtgtggaggaaatgctgcctcatgtctgctgagttaatgagtactggggaccaaagattccctcagaaccccctggaa

SEQ ID NO: 338070 - DNA, 201 bp, Homo sapiens
ccacctggctggccaggaaggcagcaaacagagatgatgactcggaatgatgggctattcggaaatggctagggaaacaactgtttccctactgtcctggygggacccaccctgggctaacgggcttcccaaggaagtcctagtggctctggggtcctgaagtccccaaatgggaacctaggctgagagaagcaaggctgt

SEQ ID NO: 338071 - DNA, 201 bp, Homo sapiens
ttacacactacgattccctcccccaccccggtgacggagtctccctctgtcgcccaggctggagtgcagtggcaagatctcggctcactgcaacctccacytcccgggttcaagcaattctcctgcctcagcctcccgagtagctgggattacagacgtgtaccaccacgcccagctaatttttgtatttttagtagagac

SEQ ID NO: 338072 - DNA, 201 bp, Homo sapiens
tttcttcccctaacttctgccatgaggtgatttaaaaaaatttttttggccaggcgcagtggttcacgcctgtaatcccagcactttgggaggccaaggcrggaggatcacttgagccctagagttggagaccagcctgggcaacatagtgaaaccctgtctccacacacaaaaaaatttaaaattagccaagcgtggtgg

SEQ ID NO: 338073 - DNA, 201 bp, Homo sapiens
gagcacctccagaatctcagtggacccactcccatctcatcaccactttggtcctgttttatttattttttgaaatggagagtctcactcttcctcccagsctggagtgcagtggtgtcatcttggctgactgcagtctccacctcctgggttctgcctcagtctcctgagtagatgggactataggcgtgtgccaccatg

SEQ ID NO: 338074 - DNA, 201 bp, Homo sapiens
gcagactagggggctctcagtgcttgctcctgagcgctaccctgtgagtctggacacatgcaacaatccaaggatcagtcccggagatgcatgacttgacrttaggccctctggggcagatcctatagggcagcagccctaacactctgctaccgtgatttcccccagtgcctcggcaggcaactacagtcttccaaggtg

SEQ ID NO: 338075 - DNA, 201 bp, Homo sapiens
ctaatttctttttcttttttctttttttttttgaggtggagtttcgctcttgttgcccaagctggagtgcagtggcccgatctcggctcactgcaacctcygcctcccgggttcaagcgattctcctgcctccgcctaccaagtagctgggattataggcatggaccagcacgcccggctaatttttgtatttttagtaga

SEQ ID NO: 338076 - DNA, 201 bp, Homo sapiens
cgattctcctgcctccgcctaccaagtagctgggattataggcatggaccagcacgcccggctaatttttgtatttttagtagagacagggtttctccatkttggtcaggctggtctggaactcccgacctcaggtgatctgcccgcctcggcctcccaaagtgctgggattacaggcgtgagccaccgcgcccggccaat

SEQ ID NO: 338077 - DNA, 201 bp, Homo sapiens
aatgcggggcagaaacaacatcaaagccactggtgtgattttaaaccagggagattaactgttttgaggtttggctgaaccacccaaaataatttagtagyttccgctaaaaatgtaaacttacaaataagagggagactgctttgaatgataataccaatgcgtctgctcacagtacagcttgaaggccccctcctgtac

SEQ ID NO: 338078 - DNA, 201 bp, Homo sapiens
atttgataacacagaggcccctggcaaccttggtgaggcacctgaagcttggcagggacacctggctagagtggagcgtaggctgcagcccatgagggcastgtccggccttaggcaggtgctgggtcaccagaaagcctttctggagtccagctaaggagggaaatggacagaggctggagcggacagattcaggttggt

SEQ ID NO: 338079 - DNA, 201 bp, Homo sapiens
cgtaggcccaagagagaactgcaaatggttatcagctgcttccccgtggagctctgctgccaaggccatgagctggagaggaaaaaaggtcagcagagcgrcttggctttaagaaggagaaataacttgattttcacatgggaatgatggtcctggccaagcagaaaatgaagctgatggcaggtcttatcgctcaggatt

SEQ ID NO: 338080 - DNA, 201 bp, Homo sapiens
gggcagggcagggagcggagcgccctttgggggaccagcaagaaggggcagaggaaactcggccaggacctggtcgcttaaaggcaatgtacagaggaggscaactgcttctgccacaggggctgtgtgaggccccccagggggcgctggtgtggacaggaggcctgcgggaggggacacaggctggcctggaagccccgc

SEQ ID NO: 338081 - DNA, 201 bp, Homo sapiens
ggaccagcaagaaggggcagaggaaactcggccaggacctggtcgcttaaaggcaatgtacagaggagggcaactgcttctgccacaggggctgtgtgagsccccccagggggcgctggtgtggacaggaggcctgcgggaggggacacaggctggcctggaagccccgctgggtgaagctgagggactgttgggggaggg

SEQ ID NO: 338082 - DNA, 201 bp, Homo sapiens
cggaggggaagtcattgaggatcaggaactgcttgaggtcggacaccagcttcatcagggactcgccggctcggacctgtggccatcagaaccagggcggrcacagggtgaggggggacagcggccttgcctacaagtagctgatgctgggcaagggatggcctctctaggagcctcagcttcctcatctgcaaagtggga

SEQ ID NO: 338083 - DNA, 201 bp, Homo sapiens
ttcatcagggactcgccggctcggacctgtggccatcagaaccagggcgggcacagggtgaggggggacagcggccttgcctacaagtagctgatgctggrcaagggatggcctctctaggagcctcagcttcctcatctgcaaagtgggactctacccctgacctccacaggttcatgtgtgagaattaagtgagaaaac

SEQ ID NO: 338084 - DNA, 201 bp, Homo sapiens
ggcccggtctttttgggctgtgggagccctgtttggtaggaaccgttgtcacttgcttggcatttggtaaactgttggatgagtgaagggatgatttaagttttttttcgcgaccatttcctgatcacttcccaggtgccaggctgtgtcatgcacttgaccaccattaacccatgccagtttcacagaagcctggcctgc

SEQ ID NO: 338085 - DNA, 201 bp, Homo sapiens
tcgggatgggagacccggcctgcccaacactgctcagagcccctcccaactctgacaacaggctcgggtcaggactccccgaaatcaggcaccctcctgcyccactgctgagatccccaacgggccagacctagcttggaaactttcttccacctggctggccaggaaggcagcaaacagagatgatgactcggaatgatg

SEQ ID NO: 338086 - DNA, 201 bp, Homo sapiens; identical to SEQ ID NO: 270580

SEQ ID NO: 338087 - DNA, 201 bp, Homo sapiens; identical to SEQ ID NO: 270582

SEQ ID NO: 338088 - DNA, 201 bp, Homo sapiens
tgtggggttctctggttcaggtggtgatgggtcagctgtgttcttacctgtccccaaggctggatcctgggctgtcacctcattcatacatcgggaaagaygatggcctcccccatgagaagatgaagcacatggatggtgctggaggaactggggtggggtgctcccccacacttcctgtggacgaactgtgctcccccc

SEQ ID NO: 338089 - DNA, 201 bp, Homo sapiens
gaggggggacagcagtccaggagacccccgagttcacacacagcctcccaactgctaacgatcatggaacaagacgcccagtgaatcctgaccacccgcaragccactcactcagctgtcccagcaagttgaggaagacgaaggacgaggccagcaggtagccgcagttccaggtggtgtcgatgtagtcgcgctgctcgc

SEQ ID NO: 338090 - DNA, 201 bp, Homo sapiens; identical to SEQ ID NO: 270585

SEQ ID NO: 338091 - DNA, 201 bp, Homo sapiens
acttctgaccacaagtgatccacccgctttggcttctcaaagtgctgggattacagcaggagccactgggcctgacctggtcctgttttagattttaagaytccaaaataacaaccaaatgcaacacacaataaaaacaggcataaaagcctttcagctggaaccgccaccttccagtaattcgccaaaatgacgaacaca

SEQ ID NO: 338092 - DNA, 201 bp, Homo sapiens
tttgccctccaatgggtcctccagggactgtgctctctgtggagacagcagactcaagtccaccccctactggcctgccagcctctgcaccacttcctagwggctgtcatttttgcgtggccagttggaagtcctgtatggcctttacgttgggtgaccatccccgcccttgtccgctcagtacttgcctaggttctttgc

SEQ ID NO: 338093 - DNA, 201 bp, Homo sapiens
gcgcgcggggcggggcgcacagcattgcgggccgaggacagccaatctccgcccggagtcggtgcagcagggcacccccggggcctggcctcagtgcctcwatcaccccggtcccgcacgtgttcctgtgctcccctcacccccaaccccgacacagcaggcgctcatgagtaggggcgaaatgaatgaatgaccagcagt

SEQ ID NO: 338094 - DNA, 201 bp, Homo sapiens
tttcttttgtgttttcttccttttcttttttgggggccctgcagtttctgagccttgagttttgccagctgaaatgcaaaataagaaagagttaagtcccmatctcatggcccattcaataggcaggaaaggctcaccaaggctttgatcccaggaagatgccgaaagaggatcaggatcgggggccagagacactgatcc

SEQ ID NO: 338095 - DNA, 201 bp, Homo sapiens; identical to SEQ ID NO: 53588

SEQ ID NO: 338096 - DNA, 201 bp, Homo sapiens
actcgccggctcggacctgtggccatcagaaccagggcgggcacagggtgaggggggacagcggccttgcctacaagtagctgatgctgggcaagggatgscctctctaggagcctcagcttcctcatctgcaaagtgggactctacccctgacctccacaggttcatgtgtgagaattaagtgagaaaactgggatgtca

SEQ ID NO: 338097 - DNA, 201 bp, Homo sapiens
gtgtacattctgctcatgaaaaactcaaaccccacagataaaactgcgatcccattttgcctcctgccccggggtaggattaacatggctgccagctgggsagagctcctgtgggacctttttccatgcattttgagccctggacgtgcacctgcggaattatctgcttgctgtgtttctcctgtgatccgaaggaatcca

SEQ ID NO: 338098 - DNA, 201 bp, Homo sapiens
gccaagcgaggctggatggggcttcccggcaggccttgcaaaggctcagttcggggtgggtgtcaggtaccctcagtggttaagacccagacttcgtgggytcaaatcctggctcagccagttgtgagctgagtgaccttgggcaagtcactaagtctcctgggcctgggtttcctcctgaaatgaagaggacaacagtgc

SEQ ID NO: 338099 - DNA, 201 bp, Homo sapiens
agataacctcacaacgtggcttgatacatggcaagcactaagtacatgctagcttccatcctcatcatcatcgcttatggagcctgccaggtctgcagcarccaggagggatccagcccaatctgatgcagctgtagctgcagtggtcagcaggcttgcaggccccagtgctgaccgctccacctgcctggaggccacccc

SEQ ID NO: 338100 - DNA, 201 bp, Homo sapiens
ctgaggcactaaaaagtgaaatctccatccaaatccatactgttagtaagggctggacgtgccattatttggtttgcttatctactgaccagctccctgtscactgggtgcttcctgcctagaacactattcactcgcgctgctcagcccctggcctctcctgtctccaccccttctcagactctgctccccttggtgggc

SEQ ID NO: 338101 - DNA, 201 bp, Homo sapiens
taagggctggacgtgccattatttggtttgcttatctactgaccagctccctgtgcactgggtgcttcctgcctagaacactattcactcgcgctgctcascccctggcctctcctgtctccaccccttctcagactctgctccccttggtgggccaccccacccccaccttggcggtcttgatgatctcggtgaagttgt

SEQ ID NO: 338102 - DNA, 201 bp, Homo sapiens
tcagcaaagattgagccactgcattccagcctgggtgacagagcaagactctgtcacacacacacacacacacacacacacacacacacacacacacacacacacaaagatgttacttgcaaaaggtggcggggggagggggttctgctactacaaaccaaaaatgaaaatgattatcattatattttatttttctaggta

SEQ ID NO: 338103 - DNA, 201 bp, Homo sapiens
ttcccacctggaaccagacatgagtcacctgacacagacatgggggaggtggggcttgggcacctacttatcctacgaggctattggtcaaaaaaaaaaaatggtagagcggagttacggaattttggttaaattctaaatatgcacatttaacgaatttaacacttaacacaaaagtactgcattctcgttatttggaga

SEQ ID NO: 338104 - DNA, 201 bp, Homo sapiens
tgttggtttaaaggacacagtgggaacagcggggaggccagtctgctagatgggagagacacttaagttgtcacctctgcccaccggcttgaagcacttgrgtgtggtgaggaacttgaagccgttcagaaggaagtgacagagatgctaatgttcaggcagcagcctttgctatggtgctcccgtgacggcactgtagag

SEQ ID NO: 338105 - DNA, 201 bp, Homo sapiens
cctctgaaacagggtcactgactaagggcctggtaccactgtcgtatctgctctagagggtgccaagggcagagccgttcttcatccttttttttttttttagacagggtcttgctctgtcacccaggctggagtgcaatggcataatcttggctcactgtaactgccacctcccaggctcaggcaatccttccaccttag

SEQ ID NO: 338106 - DNA, 201 bp, Homo sapiens
gcctgtgatcccagctccttgggaggccaaggtgggaggatcacttgatcccaggaggttgaggctgcagtgagctgtgattgcactactgcctccagccygggtgacggagcaagactctcaaaaaaacaagtgaaaagaataaaccctgtgctggccacccacgtggggtggaccgggagtcagtggccttctctgaat

SEQ ID NO: 338107 - DNA, 201 bp, Homo sapiens
aatgaaaatgattatcattatattttatttttctaggtactatttcttgatcatccaaaaaagaagattcgggacacacagaaatataaacctttcaagartcaagtaaaggtacttagaatgagtgtgactcaagatactgtatttctgttttgctggtcacttcattgtttctggtcactggtggctgacttgttggtt

SEQ ID NO: 338108 - DNA, 201 bp, Homo sapiens; identical to SEQ ID NO: 71143

SEQ ID NO: 338109 - DNA, 201 bp, Homo sapiens
ctagggcaacacatctctacccatttttgtgggggcagttttgtttttatttccatttgggaaattgtcaagtaaatcatgaggttgaataggcagaaccrcgctgccaggcggctctaaaagtttctcagtgcctacactcaacatatgctctcctccagccatgagccgactttgcagactgtgtggagcactttattc

SEQ ID NO: 338110 - DNA, 201 bp, Homo sapiens; identical to SEQ ID NO: 71146

SEQ ID NO: 338111 - DNA, 201 bp, Homo sapiens
tggtgggcgtgggccctaagggggaggagagcatggccgcccgtgtgtccatcgtgaaccagtatgggaagtgcgtttatgacaagtacgtcaaaccaacygagcccgtgacggactataggacagcggtcagtgggattcggcctgagaacctcaagcagggtatgtcatccacagctcaggaacttagaagggaaagta

SEQ ID NO: 338112 - DNA, 201 bp, Homo sapiens
cacccctgttcggggggtacaagtggggttggtggtggggtggtccccagaagcaggcaaggctgcctctggagcccagggcctagggcaacacatctctrcccatttttgtgggggcagttttgtttttatttccatttgggaaattgtcaagtaaatcatgaggttgaataggcagaaccacgctgccaggcggctcta

SEQ ID NO: 338113 - DNA, 201 bp, Homo sapiens
aagatagcgaggaaacagttgggtcagagcgagggcagcgtcagcctcagcctcgtgaaagagcaggccttcggcgggtacgctggtctcagggagtgggrtctgctggggatgcttagccgtggagggcggggcttcttcaaggaagaggatgctttcctctccctgaggtgaatgaggcaagcacctcccagggtcctg

SEQ ID NO: 338114 - DNA, 201 bp, Homo sapiens
gatggtgggcgtgggccctaagggggaggagagcatggccgcccgtgtgtccatcgtgaaccagtatgggaagtgcgtttatgacaagtacgtcaaaccarccgagcccgtgacggactataggacagcggtcagtgggattcggcctgagaacctcaagcagggtatgtcatccacagctcaggaacttagaagggaaag

SEQ ID NO: 338115 - DNA, 201 bp, Homo sapiens
gctggaattacaggcatgacccactgcacctggccttctaaaaaatatttttaaaaaattagctggtcccacttggctcgggccacccttggtctaatcasccctgttcggggggtacaagtggggttggtggtggggtggtccccagaagcaggcaaggctgcctctggagcccagggcctagggcaacacatctctacc

SEQ ID NO: 338116 - DNA, 201 bp, Homo sapiens
tactaattgagctcctaaaaatgtgcactctgccatgtgctctatgccatgcgtgttgcaatccccacaataagactgtgaggtggacacttccatcatckctattgtacagatgaggaaataggctggaaaagtttaaatagatcatctaagattgcggctgggaaccaggtggctgactctggagtccatgcttttaag

SEQ ID NO: 338117 - DNA, 201 bp, Homo sapiens
tacgctggtctcagggagtggggtctgctggggatgcttagccgtggagggcggggcttcttcaaggaagaggatgctttcctctccctgaggtgaatgargcaagcacctcccagggtcctgctaagaaccaggaccacacagagcttgtcacgtgggtgcaaatgagtgaggggcagagagcttttctctgctgacact

SEQ ID NO: 338118 - DNA, 201 bp, Homo sapiens
tagcagacatgtgatggggttctagcgacacttacggtcttgaagtaaatactaattgagctcctaaaaatgtgcactctgccatgtgctctatgccatgygtgttgcaatccccacaataagactgtgaggtggacacttccatcatcgctattgtacagatgaggaaataggctggaaaagtttaaatagatcatctaa

SEQ ID NO: 338119 - DNA, 201 bp, Homo sapiens
tgacatttaaccttagcccaagagacagattccccaggcaggtgttacgtgcctgtgtgagcttcctagtacggagggcaaggggttctgtgtttccatcwtacaggcattctgtctgtctgtttcctaagtgttcaataatgaacgtgttaccttcataattaaaatgttagcactcattacacttgggtggtgggttat

SEQ ID NO: 338120 - DNA, 201 bp, Homo sapiens
aacaagagggacgtgtccattcagtggggccaggaatggcttttctaaggaaatgacatttaaccttagcccaagagacagattccccaggcaggtgttaygtgcctgtgtgagcttcctagtacggagggcaaggggttctgtgtttccatcttacaggcattctgtctgtctgtttcctaagtgttcaataatgaacgt

SEQ ID NO: 338121 - DNA, 201 bp, Homo sapiens
taagtgtggtcaggataaatctagtgaggagaaggtattgggcgcctggaacaagagggacgtgtccattcagtggggccaggaatggcttttctaaggamatgacatttaaccttagcccaagagacagattccccaggcaggtgttacgtgcctgtgtgagcttcctagtacggagggcaaggggttctgtgtttccat

SEQ ID NO: 338122 - DNA, 201 bp, Homo sapiens; identical to SEQ ID NO: 71139

SEQ ID NO: 338123 - DNA, 201 bp, Homo sapiens; identical to SEQ ID NO: 71140

SEQ ID NO: 338124 - DNA, 201 bp, Homo sapiens
tggtgcaccccagctgggggcttccacctggagggaggcctggtttgctgaaggcgctgctgtcactcaccaggctggaggtgaagcgctccttgatctcytggagcagggccttcatactactggacaccagctccggcaggatctcctctgcaggtggagcaggaaggtcctgaggccagagtccttcctgtgcccctt

SEQ ID NO: 338125 - DNA, 201 bp, Homo sapiens; identical to SEQ ID NO: 71141

SEQ ID NO: 338126 - DNA, 201 bp, Homo sapiens
caaaagtactgcattctcgttatttggagaaaaagttgccaaataattacaaagggtccccccacccccgcagccctccagccctgccctgcccggccctrctgagcagctggctctgcctctgtggagcagtcaccccctgccaacgtggcctcagtgctttgggccctttttgcccatctgcttggtccttgtgcccct

SEQ ID NO: 338127 - DNA, 201 bp, Homo sapiens
ttcaccttacaccatgatgggaagcttccttcggcctcaccagaagcagatgctggcaccatgcttcttgtacaacctgcaaaaccatgagctacataaaygttttttctttataaattaccaaacacaggtattcctttatagcagtgcacaatgaactaatacagatggggtttcactttgttgcccaggctggtcttc

SEQ ID NO: 338128 - DNA, 201 bp, Homo sapiens
gcaaatgagcccacctgctggaaatgggagggtccccagcagcccaggagaaagccacaggcaaggattccggccacacagaggggagggcatcttgcccrggggtgacgctggtgcatcctcaggagagccagcccgaggagtggagcggagtgagagggggccttggtgactgggaatctggtcagtatggaatgggac

SEQ ID NO: 338129 - DNA, 201 bp, Homo sapiens; identical to SEQ ID NO: 71144

SEQ ID NO: 338130 - DNA, 201 bp, Homo sapiens
gaaccaggtggctgactctggagtccatgcttttaaggctgtgttgtacctgctgtctccctagtgacctgcacttctgtagaggttgcctgctctctccyagacactcttccacgtgcgtcactcatacattcttaccacatcccttggagctcccttggagctacctcctgttaggatcatagctcactgctgcctggg

SEQ ID NO: 338131 - DNA, 201 bp, Homo sapiens
acaggaaacaagtttatcctggcagatgccctgtggcccatgttcaggttacgcttgcctaaccatcaccctggccctgggagcttgcctttgccttcttyctggcgtcccgaggaaaatcccgcctggggcagcccctggttcttcagatggaaagtgcaaattcagacaccaccaccgtgggaaacaagttcaaagaca

SEQ ID NO: 338132 - DNA, 201 bp, Homo sapiens
aggaccacacagagcttgtcacgtgggtgcaaatgagtgaggggcagagagcttttctctgctgacacttagtccatggatccctggggctctgacctggwgccctgtggcctgccgtgtttattaaactacagcctttggttacccttcagcctgacaagagccttagccttggactgtgagatggtgggcgtgggccct

SEQ ID NO: 338133 - DNA, 201 bp, Homo sapiens
ccacccctcccagccccaggggcccagggcgcccacccagctcacccagcagggacagcagccagaagactccgcagctggcttccgccatttccccatcygcagggtaggtggccaacacctggctgatgaggtccgggaccttctccaagggggccttgttcacaatgatacctggaacgaggacagggatggaagggg

SEQ ID NO: 338134 - DNA, 201 bp, Homo sapiens
gctgtgccatgaggcccacccctcccagccccaggggcccagggcgcccacccagctcacccagcagggacagcagccagaagactccgcagctggcttcygccatttccccatccgcagggtaggtggccaacacctggctgatgaggtccgggaccttctccaagggggccttgttcacaatgatacctggaacgagga

SEQ ID NO: 338135 - DNA, 201 bp, Homo sapiens
tgatgcagcctgcagaaaggggccgggctgccttgtgcctgctgtgccatgaggcccacccctcccagccccaggggcccagggcgcccacccagctcacmcagcagggacagcagccagaagactccgcagctggcttccgccatttccccatccgcagggtaggtggccaacacctggctgatgaggtccgggaccttc

SEQ ID NO: 338136 - DNA, 201 bp, Homo sapiens
gaagtaaatactaattgagctcctaaaaatgtgcactctgccatgtgctctatgccatgcgtgttgcaatccccacaataagactgtgaggtggacacttycatcatcgctattgtacagatgaggaaataggctggaaaagtttaaatagatcatctaagattgcggctgggaaccaggtggctgactctggagtccatg

SEQ ID NO: 338137 - DNA, 201 bp, Homo sapiens
gtttgaggctcccctgggaactagagccaggaacagccagtggcactgacaaggggacggagtccaaggcgttattgggccacctgacagctggacagaaraggggcagacacaccgaggatgcgatttaaaataaatgcagatgtttacttggaatggagcctgtggaggctcagtgttgactctcatctagaatggtct

SEQ ID NO: 338138 - DNA, 201 bp, Homo sapiens
gtgctcccgtgacggcactgtagagatcccttgaatccattgaagatgctggaggtgttcatgcttgtttacagagggtgaaactgaggtgagaacccccygggcagtgtcctcacagaaaggtcttctgtgtgctcctgctgtaccccctcagagactgctgccgtggggactcgtccttccctcctgactctgactcca

SEQ ID NO: 338139 - DNA, 201 bp, Homo sapiens
tccctcttgaggcttattgtcaagtgcagtagacagactgtaaactgcagctgttgattaagtgtggtcaggataaatctagtgaggagaaggtattgggygcctggaacaagagggacgtgtccattcagtggggccaggaatggcttttctaaggaaatgacatttaaccttagcccaagagacagattccccaggcag

SEQ ID NO: 338140 - DNA, 201 bp, Homo sapiens
tggttgctggttaactgttgactgtttttctcctacttccttgatttcaagattttgtttttattgtctctgactgttgggcatcagcttaagtcagtgcrataaatttccttctggagttgaaattcatatcagtgccttgtttccatgtgtgtgtgacacacttggattccctacaagatgttacttgcagggcagccg

SEQ ID NO: 338141 - DNA, 201 bp, Homo sapiens
tatggtgctcccgtgacggcactgtagagatcccttgaatccattgaagatgctggaggtgttcatgcttgtttacagagggtgaaactgaggtgagaacyccccgggcagtgtcctcacagaaaggtcttctgtgtgctcctgctgtaccccctcagagactgctgccgtggggactcgtccttccctcctgactctgac

SEQ ID NO: 338142 - DNA, 201 bp, Homo sapiens
tcagaaggaagtgacagagatgctaatgttcaggcagcagcctttgctatggtgctcccgtgacggcactgtagagatcccttgaatccattgaagatgcyggaggtgttcatgcttgtttacagagggtgaaactgaggtgagaaccccccgggcagtgtcctcacagaaaggtcttctgtgtgctcctgctgtaccccc

SEQ ID NO: 338143 - DNA, 201 bp, Homo sapiens
ataggggtgtatcaccagcccatcatgctataaatggcagctggtggctaccaccctaagtgccatgagcacctctccactgagaggcaaactgtaggtcrcttgggtgaggttcagtagccaaccgctccctgcttggtggggtgaccctctttgggccgagcctgcagaggcccccacccgcctcttccccctttgcag

SEQ ID NO: 338144 - DNA, 201 bp, Homo sapiens
agagcgagtacgtgtgtatttacaggagaacagggtgggggtcactttgagtttatgggcaaatgcctggatgttggtttaaaggacacagtgggaacagyggggaggccagtctgctagatgggagagacacttaagttgtcacctctgcccaccggcttgaagcacttgggtgtggtgaggaacttgaagccgttcaga

SEQ ID NO: 338145 - DNA, 201 bp, Homo sapiens
tcacccaggctggagtgcaatggcataatcttggctcactgtaactgccacctcccaggctcaggcaatccttccaccttagcctctgaagtagctgggaytgcaggcatatgccaccacccctggctaatttttttatttttatttttttagagatagggtcttgctgtgttgccctggctattctcaaactcctgggtt

SEQ ID NO: 338146 - DNA, 201 bp, Homo sapiens
gagggtgccaagggcagagccgttcttcatccttttttttttttttagacagggtcttgctctgtcacccaggctggagtgcaatggcataatcttggctsactgtaactgccacctcccaggctcaggcaatccttccaccttagcctctgaagtagctgggactgcaggcatatgccaccacccctggctaattttttt

SEQ ID NO: 338147 - DNA, 201 bp, Homo sapiens
tgtaaactgcagctgttgattaagtgtggtcaggataaatctagtgaggagaaggtattgggcgcctggaacaagagggacgtgtccattcagtggggccrggaatggcttttctaaggaaatgacatttaaccttagcccaagagacagattccccaggcaggtgttacgtgcctgtgtgagcttcctagtacggagggc

SEQ ID NO: 338148 - DNA, 201 bp, Homo sapiens
tgtaatcccagctactcgggaggctgaggcaggagaatcacttgaaacctggggtcggaggttgcagtcagcaaagattgagccactgcattccagcctgsgtgacagagcaagactctgtcacacacacacacacacacacacacacacacacacacacacacacacacacaaagatgttacttgcaaaaggtggcgggg

SEQ ID NO: 338149 - DNA, 201 bp, Homo sapiens
tctcaaaaaaacaagtgaaaagaataaaccctgtgctggccacccacgtggggtggaccgggagtcagtggccttctctgaatggttcagctggaggtgaygtgttcataagttacagctggcttcatgttgcctgggtgttcaggacacagtcgctgatggctgaggaatgagccatttgggggcctccctgtgttgtgc

SEQ ID NO: 338150 - DNA, 201 bp, Homo sapiens
atcacttgatcccaggaggttgaggctgcagtgagctgtgattgcactactgcctccagcccgggtgacggagcaagactctcaaaaaaacaagtgaaaasaataaaccctgtgctggccacccacgtggggtggaccgggagtcagtggccttctctgaatggttcagctggaggtgacgtgttcataagttacagctgg

SEQ ID NO: 338151 - DNA, 201 bp, Homo sapiens
gtggtagtcatggtggcatcataaggagattgtgaggttggcactcttggctcagtgcctggtgattacttcaaccctgtgatggagccaggtgtggtggytgttgcctgtgatcccagctccttgggaggccaaggtgggaggatcacttgatcccaggaggttgaggctgcagtgagctgtgattgcactactgcctcc

SEQ ID NO: 338152 - DNA, 201 bp, Homo sapiens
gtgctgaagccagaaagacccaagtatgaggcctgtccctgcttctcgccagttgggtggtttggggcaagtttctgacgtcctctgtgccttgtggtagkcatggtggcatcataaggagattgtgaggttggcactcttggctcagtgcctggtgattacttcaaccctgtgatggagccaggtgtggtggctgttgcc

SEQ ID NO: 338153 - DNA, 201 bp, Homo sapiens; identical to SEQ ID NO: 71150

SEQ ID NO: 338154 - DNA, 201 bp, Homo sapiens
cagtgcacaatgaactaatacagatggggtttcactttgttgcccaggctggtcttcaactcctgacctcaagcaatcctcccacctcagcctccccgagygcttcttgaacctcctaatactctgcacagtatctcagtgcagacattcctgtcttaacacacaggaccagtcaaattcccgtgggcagccccagggttc

SEQ ID NO: 338155 - DNA, 201 bp, Homo sapiens
cattgtggggttgactgtgggctgcggctatgcctcgtcacctgctgggatgtttcatgtcgtctagattcaggatgcccaggcagcaatgaggctgtacrtcatggtgaagaaggagtgggagagcatggcccgagacaggcgccccctgctgactgctccagaccactgcagtgacgacgcctagcagtcctgccctgc

SEQ ID NO: 338156 - DNA, 201 bp, Homo sapiens
gccatgtgctctatgccatgcgtgttgcaatccccacaataagactgtgaggtggacacttccatcatcgctattgtacagatgaggaaataggctggaaragtttaaatagatcatctaagattgcggctgggaaccaggtggctgactctggagtccatgcttttaaggctgtgttgtacctgctgtctccctagtgac

SEQ ID NO: 338157 - DNA, 201 bp, Homo sapiens
ccgagcccgtgacggactataggacagcggtcagtgggattcggcctgagaacctcaagcagggtatgtcatccacagctcaggaacttagaagggaaagyagtaactggattcgttttctcccttttgttcccttttctgtctgagaccactcactgcagctggttttgatgcgtcttgtctccttttggggcgatgggt

SEQ ID NO: 338158 - DNA, 201 bp, Homo sapiens; identical to SEQ ID NO: 71145

SEQ ID NO: 338159 - DNA, 201 bp, Homo sapiens
gggtcagagcgagggcagcgtcagcctcagcctcgtgaaagagcaggccttcggcgggtacgctggtctcagggagtggggtctgctggggatgcttagcygtggagggcggggcttcttcaaggaagaggatgctttcctctccctgaggtgaatgaggcaagcacctcccagggtcctgctaagaaccaggaccacaca

SEQ ID NO: 338160 - DNA, 201 bp, Homo sapiens; identical to SEQ ID NO: 71149

SEQ ID NO: 338161 - DNA, 201 bp, Homo sapiens
acaaaagtactgcattctcgttatttggagaaaaagttgccaaataattacaaagggtccccccacccccgcagccctccagccctgccctgcccggcccygctgagcagctggctctgcctctgtggagcagtcaccccctgccaacgtggcctcagtgctttgggccctttttgcccatctgcttggtccttgtgcccc

SEQ ID NO: 338162 - DNA, 201 bp, Homo sapiens
tgctgctccttgatgcagcctgcagaaaggggccgggctgccttgtgcctgctgtgccatgaggcccacccctcccagccccaggggcccagggcgcccayccagctcacccagcagggacagcagccagaagactccgcagctggcttccgccatttccccatccgcagggtaggtggccaacacctggctgatgaggtc

SEQ ID NO: 338163 - DNA, 201 bp, Homo sapiens
agcaaagattgagccactgcattccagcctgggtgacagagcaagactctgtcacacacacacacacacacacacacacacacacacacacacacacacacacaaagatgttacttgcaaaaggtggcggggggagggggttctgctactacaaaccaaaaatgaaaatgattatcattatattttatttttctaggtact

SEQ ID NO: 338164 - DNA, 201 bp, Homo sapiens
agatgtaactgatgggggctgattcttgcccccacctctaggtggcagcctcgtcctgtccccaggctcacctgacaccttcaccaggctggccagtcccyggtaggcattgttcaccagcagggctctgtcctggcacagccggatgctttgcaggagcagcgccaccacttgttcaaactgctgctccttgatgcagcc

SEQ ID NO: 338165 - DNA, 201 bp, Homo sapiens
tttgattttttttactttatctttttctctctgttctctagttcattggtttccactctaatatttattaatttcccttcttctcactttgggtttaattygttctgtcttttcttattgtagttacttacaatggaagcttacacacttgatttaagattttttttctaatgtagacatttacagctataaatttccctt

SEQ ID NO: 338166 - DNA, 201 bp, Homo sapiens; identical to SEQ ID NO: 71154

SEQ ID NO: 338167 - DNA, 201 bp, Homo sapiens
agaacgtgacttcggctcttgccaggtggagtgttctagagatgtcagttggtgtccagtgatgtcaagtcatttgtatctactgattttctttctaattwttctatccattactgagagtggggtaggattttggtgtccaattattgtttttttgtttttttttttttgtttgtttgtttttttttttgaggtggagtc

SEQ ID NO: 338168 - DNA, 201 bp, Homo sapiens
gactgccccattttacattcccatcagcagtgtataacggttctaattttcttttcctttttcttttcttgagacaaggttttgctctgtcacccaggctrgagtgcagtggcatgatcttggctcactgcagcctcaatctcttgggctcaattggtcctcccacctcagcctcctgagtagctgggactacaggtgagt

SEQ ID NO: 338169 - DNA, 201 bp, Homo sapiens; identical to SEQ ID NO: 71158

SEQ ID NO: 338170 - DNA, 201 bp, Homo sapiens
gacatgttctgaaactccactctgcccggccttggcttcgacgtgtctggtgaatgtgtgggctgtgaggctccccgaacgtagacctcagactgcaacgytggccgttacagggtctggcacacgggcccacgtcaggcccatcgccacagtgatggttgttctgtgactgtttctggtggcctctgctccacactccag

SEQ ID NO: 338171 - DNA, 201 bp, Homo sapiens
ggtctggcacacgggcccacgtcaggcccatcgccacagtgatggttgttctgtgactgtttctggtggcctctgctccacactccaggctgacgctgtgycccttccactgggaccctcgggtggcttccatgcacttgtgccctaaatcctgctcctagactaaacttcatctcctgtgttctcattctgcagcatggc

SEQ ID NO: 338172 - DNA, 201 bp, Homo sapiens
tttataagggcactggcttttaatatttaatttaaccactcagtcagtactgaaacagttgttagggaggcctgcgttagtgagacctgacctgccacaamacatcttactcggaatgctgcccataacttcaaaaaatcagctttgacggagccctactgaacacacctagcatctctcttccttcagcttagggtcaag

SEQ ID NO: 338173 - DNA, 201 bp, Homo sapiens
gcacgcctctctccatgtgcagtaggaaggatgtcctcgtggtgaccccttggctggctcccattgtctgggagggcacattcaacatcgacatcctcaaygagcagttcaggctccagaacaccaccattgggttaactgtgtttgccatcaagaagtaagtcagtgaggtggccgagggtagagacccaggcagtggcg

SEQ ID NO: 338174 - DNA, 201 bp, Homo sapiens
ggaagggtggtcagaggaggcagaagctgagtggagtttccaggtgggggcggccgtgtgccagaggcgcatgtgggtggcaccctgccagctccatgtgrccgcacgcctctctccatgtgcagtaggaaggatgtcctcgtggtgaccccttggctggctcccattgtctgggagggcacattcaacatcgacatcctc

SEQ ID NO: 338175 - DNA, 201 bp, Homo sapiens
ctgaattacaaggcgggacaggtaaagtggggcaggtgagagaaggagggtgagtgatgtgatttttctactcctgttttccaggaaaaccaaaatgccaygcacttcgacctatgatccttttcctaataatgcttgtcttggtcttgtttgggtaagacacatttgaccatcgaggctggcctggtttggggagaagtg

SEQ ID NO: 338176 - DNA, 201 bp, Homo sapiens
tctggaagggtggtcagaggaggcagaagctgagtggagtttccaggtgggggcggccgtgtgccagaggcgcatgtgggtggcaccctgccagctccatrtgaccgcacgcctctctccatgtgcagtaggaaggatgtcctcgtggtgaccccttggctggctcccattgtctgggagggcacattcaacatcgacatc

SEQ ID NO: 338177 - DNA, 201 bp, Homo sapiens
ggttggtttcccggggaagggcggctgcctctggaagggtggtcagaggaggcagaagctgagtggagtttccaggtgggggcggccgtgtgccagaggcrcatgtgggtggcaccctgccagctccatgtgaccgcacgcctctctccatgtgcagtaggaaggatgtcctcgtggtgaccccttggctggctcccattg

SEQ ID NO: 338178 - DNA, 201 bp, Homo sapiens
gatgtaaatctcagttggggctgcttcgttctctcctctcagattctcctgacatctgaattcagaggcccacatggctgtcctctttccctttgctttcwctgacttgcgtctcttgtttcctgtccctttgttctccaaagcccctgcaaaggcctgataggtacctcctacctggggaggggcagcgggggttgggtg

SEQ ID NO: 338179 - DNA, 201 bp, Homo sapiens
ccagcgccttccgggttcttccctgtccctcctttgtggtctttgttttcccttttttgtcttaatatgtttcaacggatgtatacaataaaccgcacatraaaggtacagctggatacatcttgacccagtcaagatgatgaacacagctgccaccccaggagtctgtcctgccccacgggttatgctgtcttagttggt

SEQ ID NO: 338180 - DNA, 201 bp, Homo sapiens
ggagtttccaggtgggggcggccgtgtgccagaggcgcatgtgggtggcaccctgccagctccatgtgaccgcacgcctctctccatgtgcagtaggaagkatgtcctcgtggtgaccccttggctggctcccattgtctgggagggcacattcaacatcgacatcctcaacgagcagttcaggctccagaacaccaccat

SEQ ID NO: 338181 - DNA, 201 bp, Homo sapiens; identical to SEQ ID NO: 71152

SEQ ID NO: 338182 - DNA, 201 bp, Homo sapiens; identical to SEQ ID NO: 71153

SEQ ID NO: 338183 - DNA, 201 bp, Homo sapiens
agataattaagtctattagcaacattagaaaatttaagttaaaatttaaatgactctagcaagaattagcctttaggtgccctgggtccccctccccacckccccccaccccgccgccttctgagaagcgttttgtaatttttcttatttataaaatgggtttgattcaaaactgacttttcctcttcacagtctcacagg

SEQ ID NO: 338184 - DNA, 201 bp, Homo sapiens
gagggagggctgggaatgatttgcccggttggagtcgcatttgcctctggttggtttcccggggaagggcggctgcctctggaagggtggtcagaggaggmagaagctgagtggagtttccaggtgggggcggccgtgtgccagaggcgcatgtgggtggcaccctgccagctccatgtgaccgcacgcctctctccatgt

SEQ ID NO: 338185 - DNA, 201 bp, Homo sapiens
gtggggtggcggccagccttgtcctcccagagggtagatgggaaaggtcattcatgcagcatcttactgagctcatgtgggctcgtgggctcgtgggctcrccaggtcggtaaaacccagctccttctccagaggctgcgtctcacccagggatggtggcttctgctgccccctcctctctgtaactgtggccggccgtca

SEQ ID NO: 338186 - DNA, 201 bp, Homo sapiens; identical to SEQ ID NO: 71157

SEQ ID NO: 338187 - DNA, 201 bp, Homo sapiens; identical to SEQ ID NO: 71160

SEQ ID NO: 338188 - DNA, 201 bp, Homo sapiens
cctttgctttctctgacttgcgtctcttgtttcctgtccctttgttctccaaagcccctgcaaaggcctgataggtacctcctacctggggaggggcagcrggggttgggtgctggggagggtttgttcctatctctttgccagcaaagctcagcttgctgtgtgttcccgcaggtccaatgttgagggagggctgggaat

SEQ ID NO: 338189 - DNA, 201 bp, Homo sapiens
tggcgggagggtcaatgcccagtcatggttcagcggctgtgcacacccctgcttacctgcatcccacgctttccatgcaaactcacgtggcggcgctttgygcttgcaggatggtctacccccagccaaaggtgctgacaccgtggtgagtaaagttactgacactgaaactgaacgcagctcaaggggctgttctgaagg

SEQ ID NO: 338190 - DNA, 201 bp, Homo sapiens
gatgtatacaataaaccgcacataaaaggtacagctggatacatcttgacccagtcaagatgatgaacacagctgccaccccaggagtctgtcctgccccrcgggttatgctgtcttagttggtctcatgtcagggagccttggaggaccagggtcgggcagttggtctctatactcctggggttctggcactggctctgg

SEQ ID NO: 338191 - DNA, 201 bp, Homo sapiens
tggagcagcatttgcgctccgatccaattggccatccctttcaccttggcatttcaacaaccagacaggaagcaggtaacccaaaggaaaagagaaacccytcacgggtcctttgacctctcatatttacatagacagtatcggggttgcgctggggggtacaaaatgaattcaaagctcgaaaccaaatagccaccaggt

SEQ ID NO: 338192 - DNA, 201 bp, Homo sapiens
tcaggcttgttggggcgggcaggagagcagggtagtggagtcagagggagtgatcccccgaaaggcaggaagaggacatgagagagccttggagatgacgrtgaggatgtggttggtgggcggtgagctgggtgtcatgtgctggctccttagagaatgctcagctccttcacacccatcataatccctggaggactgaga

SEQ ID NO: 338193 - DNA, 201 bp, Homo sapiens
gtcaggcttgttggggcgggcaggagagcagggtagtggagtcagagggagtgatcccccgaaaggcaggaagaggacatgagagagccttggagatgacsgtgaggatgtggttggtgggcggtgagctgggtgtcatgtgctggctccttagagaatgctcagctccttcacacccatcataatccctggaggactgag

SEQ ID NO: 338194 - DNA, 201 bp, Homo sapiens
tatcgctgagttctcaggaaggaacggtaaatacttcccgggtcattctttcacccacgggaaaacaggtttggagagatctgggacagtgctctggtccyaggcaggaagggctgagtggggcctgggactcaggtctgactgcaaacacctgcctcctccctgtgctgccagcgccttccgggttcttccctgtccctc

SEQ ID NO: 338195 - DNA, 201 bp, Homo sapiens
tggttcagcggctgtgcacacccctgcttacctgcatcccacgctttccatgcaaactcacgtggcggcgctttgtgcttgcaggatggtctacccccagycaaaggtgctgacaccgtggtgagtaaagttactgacactgaaactgaacgcagctcaaggggctgttctgaaggtattagagggcggtttccttgatgt

SEQ ID NO: 338196 - DNA, 201 bp, Homo sapiens
  misc_feature (1)...(201): n = A,T,C or G
gataaggcatactgaggcctgacttggtgagggctcctgccccggaggtgcagccctggaggagcgggaggcagaggagtggaaaattcatgaagaaaacngggtatggtgtaggtcgaggccctgccctcagtaatgctcaccatttgtcagtgtttactgtgaggcagcactgtgttcaatatcgctgagttctcagga

SEQ ID NO: 338197 - DNA, 201 bp, Homo sapiens
gcaggccagtgaaccccaacgccaaaggccagggagagccgggtggggtacccagagccagcacacagccctttaatttagaggagtgctgtgtacacatytggggagagatgttttactttgatttggaatcaggtggcggataaggcatactgaggcctgacttggtgagggctcctgccccggaggtgcagccctgga

SEQ ID NO: 338198 - DNA, 201 bp, Homo sapiens
ttaagtcaagtggaaagcaatggcccctgaggtcacttagtccctcttgccagtttgtaagtgctgaatcagagactctgagctttggccctttcccgagktcccgggattatgagctgacacagcccccaagcaaccacagtgattccagcctgggagtgtggccttggcgggagggtcaatgcccagtcatggttcagc

SEQ ID NO: 338199 - DNA, 201 bp, Homo sapiens
acctgtccttaattttcttggcgccagaagatgaattgagtatttacccagacaacaacgtcgcttcagagggagggatgcagaacgcagggccacggggygcaggctgcaggccagtgaaccccaacgccaaaggccagggagagccgggtggggtacccagagccagcacacagccctttaatttagaggagtgctgtg

SEQ ID NO: 338200 - DNA, 201 bp, Homo sapiens
acgtccctcccagccttaagtcaagtggaaagcaatggcccctgaggtcacttagtccctcttgccagtttgtaagtgctgaatcagagactctgagcttyggccctttcccgagttcccgggattatgagctgacacagcccccaagcaaccacagtgattccagcctgggagtgtggccttggcgggagggtcaatgcc

SEQ ID NO: 338201 - DNA, 201 bp, Homo sapiens
gcccacagtgaattgagacacaaccccttacgtccctcccagccttaagtcaagtggaaagcaatggcccctgaggtcacttagtccctcttgccagtttrtaagtgctgaatcagagactctgagctttggccctttcccgagttcccgggattatgagctgacacagcccccaagcaaccacagtgattccagcctggg

SEQ ID NO: 338202 - DNA, 201 bp, Homo sapiens; identical to SEQ ID NO: 71167

SEQ ID NO: 338203 - DNA, 201 bp, Homo sapiens
acagttaaaatggccccggctcatgtctcctgagcctctacaatcctttaggtggggacagtactgcggcccacacgtccccacaggctgcgtgtgacacytgacagtgctttgtgccactgtggagcaggtgtcactctcccacttctcagagaggaagccgggctctggaagccagcagcccacaaggaggcccagcag

SEQ ID NO: 338204 - DNA, 201 bp, Homo sapiens
ctctcagattctcctgacatctgaattcagaggcccacatggctgtcctctttccctttgctttctctgacttgcgtctcttgtttcctgtccctttgttstccaaagcccctgcaaaggcctgataggtacctcctacctggggaggggcagcgggggttgggtgctggggagggtttgttcctatctctttgccagcaa

SEQ ID NO: 338205 - DNA, 201 bp, Homo sapiens
ataggtacctcctacctggggaggggcagcgggggttgggtgctggggagggtttgttcctatctctttgccagcaaagctcagcttgctgtgtgttcccrcaggtccaatgttgagggagggctgggaatgatttgcccggttggagtcgcatttgcctctggttggtttcccggggaagggcggctgcctctggaaggg

SEQ ID NO: 338206 - DNA, 201 bp, Homo sapiens
aggccaagctggccacactgcttttgattttttttaaattgtgatgaaatacgcttaacataaaatttgccatcttagtcattttggagtgttcagtagckttaagtccattcacattgctgtgcagccatcaccaccatccatctccagaactcttttcatcttgccaacctgaagctctgtccccataaaatagcaact

SEQ ID NO: 338207 - DNA, 201 bp, Homo sapiens
cccataacttcaaaaaatcagctttgacggagccctactgaacacacctagcatctctcttccttcagcttagggtcaaggggctggggttgatggcaccrttgaaagaaacagctttattgccgtgtcattgatatgccataaaattcacctgtttcaaatgaattattttcagttagtttacagagttgtgaaataaat

SEQ ID NO: 338208 - DNA, 201 bp, Homo sapiens; identical to SEQ ID NO: 71169

SEQ ID NO: 338209 - DNA, 201 bp, Homo sapiens; identical to SEQ ID NO: 71170

SEQ ID NO: 338210 - DNA, 201 bp, Homo sapiens
ggaaattatctccagaccaactcaaaattacaaagttttccagagcttatataccttctaagctatatgtctatgtgtaagtgtgcattcatctcaagacrtaagtaattgacttatgttaatctataactaaggtctgagtcctgaagaccttcctctggatcctcagtaaatttacttaatctaaaacccttatcttgt

SEQ ID NO: 338211 - DNA, 201 bp, Homo sapiens; identical to SEQ ID NO: 71171

SEQ ID NO: 338212 - DNA, 201 bp, Homo sapiens
gtcccggctctcctccattctggtgggtctcaccagagattggccaagaagagatcaaactgttcctggaccaaactgagggtggggctgctatctctcgyggcccaataacgagatgcagatgaactggggagaaagagactttttatttctgtaaccagttacaaggagaagacctggaaattatctccagaccaactc

SEQ ID NO: 338213 - DNA, 201 bp, Homo sapiens; identical to SEQ ID NO: 71172

SEQ ID NO: 338214 - DNA, 201 bp, Homo sapiens
gaaaattcatgaagaaaaccgggtatggtgtaggtcgaggccctgccctcagtaatgctcaccatttgtcagtgtttactgtgaggcagcactgtgttcartatcgctgagttctcaggaaggaacggtaaatacttcccgggtcattctttcacccacgggaaaacaggtttggagagatctgggacagtgctctggtcc

SEQ ID NO: 338215 - DNA, 201 bp, Homo sapiens; identical to SEQ ID NO: 71174

SEQ ID NO: 338216 - DNA, 201 bp, Homo sapiens; identical to SEQ ID NO: 71173

SEQ ID NO: 338217 - DNA, 201 bp, Homo sapiens; identical to SEQ ID NO: 71175

SEQ ID NO: 338218 - DNA, 201 bp, Homo sapiens
ttcccgggtcattctttcacccacgggaaaacaggtttggagagatctgggacagtgctctggtcccaggcaggaagggctgagtggggcctgggactcargtctgactgcaaacacctgcctcctccctgtgctgccagcgccttccgggttcttccctgtccctcctttgtggtctttgttttcccttttttgtcttaa

SEQ ID NO: 338219 - DNA, 201 bp, Homo sapiens
tagcaggagggggacacctgtttgctgtccttggaccctagaaagaggatgctggcagagccgtggtcacttctctgtcagatgtaggtggggcaggcaargcagttggccccagacaccaaaggaagtggctgacccacaaggccctgggactctgggccaggccagagagggagctagccaggcaaccgcagacacata

SEQ ID NO: 338220 - DNA, 201 bp, Homo sapiens; identical to SEQ ID NO: 71177

SEQ ID NO: 338221 - DNA, 201 bp, Homo sapiens
tttgttctccaaagcccctgcaaaggcctgataggtacctcctacctggggaggggcagcgggggttgggtgctggggagggtttgttcctatctctttgycagcaaagctcagcttgctgtgtgttcccgcaggtccaatgttgagggagggctgggaatgatttgcccggttggagtcgcatttgcctctggttggttt

SEQ ID NO: 338222 - DNA, 201 bp, Homo sapiens
gtgggctcgccaggtcggtaaaacccagctccttctccagaggctgcgtctcacccagggatggtggcttctgctgccccctcctctctgtaactgtggcyggccgtcatgctgagccaccccctcaatacaaggctccagatgtttcctgctcactgaccagagatagcaggagggggacacctgtttgctgtccttgga

SEQ ID NO: 338223 - DNA, 201 bp, Homo sapiens; identical to SEQ ID NO: 71178

SEQ ID NO: 338224 - DNA, 201 bp, Homo sapiens
cgtgggctcgtgggctcgccaggtcggtaaaacccagctccttctccagaggctgcgtctcacccagggatggtggcttctgctgccccctcctctctgtractgtggccggccgtcatgctgagccaccccctcaatacaaggctccagatgtttcctgctcactgaccagagatagcaggagggggacacctgtttgct

SEQ ID NO: 338225 - DNA, 201 bp, Homo sapiens
cgctgctggccgcaccatgcactttttggaggaagggaccaacaggcagtcttcgttctgtgtcctgagtcttggcacacttcctttctgcagttacgggktcctaagccccagaagtctaatgccaggaagcctggaacgggggttctggtgagtgcagggaagagcaggtggagcatccatgctggccggggtgctggc

SEQ ID NO: 338226 - DNA, 201 bp, Homo sapiens
tcacgctgctggccgcaccatgcactttttggaggaagggaccaacaggcagtcttcgttctgtgtcctgagtcttggcacacttcctttctgcagttacrgggtcctaagccccagaagtctaatgccaggaagcctggaacgggggttctggtgagtgcagggaagagcaggtggagcatccatgctggccggggtgct

SEQ ID NO: 338227 - DNA, 201 bp, Homo sapiens
gtgggacgtggcgaggcgcctgagctttgctgagaacttgccctacctgcctcgaggccttgcagcttcaccgggaactcttgtgctcacgctgctggccrcaccatgcactttttggaggaagggaccaacaggcagtcttcgttctgtgtcctgagtcttggcacacttcctttctgcagttacggggtcctaagcccc

SEQ ID NO: 338228 - DNA, 201 bp, Homo sapiens
tctatgctctgcccagtgtagacatgctcaactctgtggccttgaagggtcacctggatacctctggagtcagccttgacctcccttctgacctccagtcyccaactccaggcttacccagagttcccatgcatggtctctgctcccccatccccacccctcctccaccagccatcctcaactctccctttgctctcaccc

SEQ ID NO: 338229 - DNA, 201 bp, Homo sapiens
caagacagagtggggtggcggccagccttgtcctcccagagggtagatgggaaaggtcattcatgcagcatcttactgagctcatgtgggctcgtgggctygtgggctcgccaggtcggtaaaacccagctccttctccagaggctgcgtctcacccagggatggtggcttctgctgccccctcctctctgtaactgtggc

SEQ ID NO: 338230 - DNA, 201 bp, Homo sapiens
ggtctctccttgtgttcaagacagagtggggtggcggccagccttgtcctcccagagggtagatgggaaaggtcattcatgcagcatcttactgagctcaygtgggctcgtgggctcgtgggctcgccaggtcggtaaaacccagctccttctccagaggctgcgtctcacccagggatggtggcttctgctgccccctcc

SEQ ID NO: 338231 - DNA, 201 bp, Homo sapiens
ccttgcagatacgtggctttcctgaagctgttcctggagacggcggagaagcacttcatggtgggccaccgtgtccactactatgtcttcaccgaccagcyggccgcggtgccccgcgtgacgctggggaccggtcggcagctgtcagtgctggaggtgcgcgcctacaagcgctggcaggacgtgtccatgcgccgcatg

SEQ ID NO: 338232 - DNA, 201 bp, Homo sapiens
aacgagcagttcaggctccagaacaccaccattgggttaactgtgtttgccatcaagaagtaagtcagtgaggtggccgagggtagagacccaggcagtgkcgagtgactgtggacattgaggtctctccttgtgttcaagacagagtggggtggcggccagccttgtcctcccagagggtagatgggaaaggtcattcat

SEQ ID NO: 338233 - DNA, 201 bp, Homo sapiens
aattctgggtcccaagctgttagtcgcttccagacacagaaggtcccagaaccaagagtgaagtcacctgtcacctctactggggcatctctggacacggyctggaaacactccctgacgtggcctcagggactgcactgatcaaggcactggtggcggggggtgagggagctggggctctggagctccagcaggtgccca

SEQ ID NO: 338234 - DNA, 201 bp, Homo sapiens
ggtcccagaaccaagagtgaagtcacctgtcacctctactggggcatctctggacacggtctggaaacactccctgacgtggcctcagggactgcactgaycaaggcactggtggcggggggtgagggagctggggctctggagctccagcaggtgcccatacgtgagcaatatcccagggaccaccctcctgcccacctc

SEQ ID NO: 338235 - DNA, 201 bp, Homo sapiens
ttgatcttttcagagaactgacatttgattttttttactttatctttttctctctgttctctagttcattggtttccactctaatatttattaatttcccytcttctcactttgggtttaatttgttctgtcttttcttattgtagttacttacaatggaagcttacacacttgatttaagattttttttctaatgtagac

SEQ ID NO: 338236 - DNA, 201 bp, Homo sapiens
cgggccggggtgggggcgcccagggctgcgaggcttcaggccggccgccgccccagcctccgagaccctgcgtcctggggagccggcgggcaggtgggctyggccgcgctgtgggtgcctgggacccgcagggaggatgggcgcggtggcgcggcctggcggggggctcgtctccggggtccccgggtcctggtgagagcg

SEQ ID NO: 338237 - DNA, 201 bp, Homo sapiens
atggtttcatttttataaggataaattagagtttataaaaattaacacttcccttcaaaagaaaaattaaggaaaaatgaataaataagccaccgactgaragaaaatatttgttttctaagaagtattttgtttttcattttatgggttcatagtaggtgtatatatttatggggtccctgagatattgtggttcagtca

SEQ ID NO: 338238 - DNA, 201 bp, Homo sapiens
cctcggccccgggtgcccgcgagggagccgctaccgcagggaatgcggggtgcacccgacagccgggccggggtgggggcgcccagggctgcgaggcttcrggccggccgccgccccagcctccgagaccctgcgtcctggggagccggcgggcaggtgggctcggccgcgctgtgggtgcctgggacccgcagggaggat

SEQ ID NO: 338239 - DNA, 201 bp, Homo sapiens
ctggccggtgagtgcaggcctcggccccgggtgcccgcgagggagccgctaccgcagggaatgcggggtgcacccgacagccgggccggggtgggggcgcycagggctgcgaggcttcaggccggccgccgccccagcctccgagaccctgcgtcctggggagccggcgggcaggtgggctcggccgcgctgtgggtgcct

SEQ ID NO: 338240 - DNA, 201 bp, Homo sapiens
aagggagagataaggctcactagccacagaaaaacagccagttaatttttaaaggactccagccctttctcttcctcaaggggaattggttttttacatayaactgagtttttgcttacacagtttttaatttcttttaattcctgttctagtattttggggctaggttgtcaggtatgtatatatttctgtttgttatat

SEQ ID NO: 338241 - DNA, 201 bp, Homo sapiens
gagggagggggccgctccttccccagtctctaccctgacttggccctcgtcctgcagccactcagagagcacgatggagctggagcttcagttttgaccaratgcgtgtcgccggcttttgtgtgtgtgtgtgtgtgatggagtctcgctctgtcgcccaggctggagtgcattggcaccatctctgcccactgcaacctc

SEQ ID NO: 338242 - DNA, 201 bp, Homo sapiens
acatgtgtgccatgtgggagctggggcaggtcctctttcctcctgtggctccgagggagggggccgctccttccccagtctctaccctgacttggccctcrtcctgcagccactcagagagcacgatggagctggagcttcagttttgaccaaatgcgtgtcgccggcttttgtgtgtgtgtgtgtgtgatggagtctcgc

SEQ ID NO: 338243 - DNA, 201 bp, Homo sapiens
gcctcccttcagtggctcccatgtcacagaattgtcctgcagccctggcacatgtgtgccatgtgggagctggggcaggtcctctttcctcctgtggctcygagggagggggccgctccttccccagtctctaccctgacttggccctcgtcctgcagccactcagagagcacgatggagctggagcttcagttttgacca

SEQ ID NO: 338244 - DNA, 201 bp, Homo sapiens
catctcctgtgttctcattctgcagcatggctgttagggaacctgaccatctgcagcgcgtctcgttgccaaggtataatgtcagtgcctcccttcagtgsctcccatgtcacagaattgtcctgcagccctggcacatgtgtgccatgtgggagctggggcaggtcctctttcctcctgtggctccgagggagggggccg

SEQ ID NO: 338245 - DNA, 201 bp, Homo sapiens
tccatgcacttgtgccctaaatcctgctcctagactaaacttcatctcctgtgttctcattctgcagcatggctgttagggaacctgaccatctgcagcgygtctcgttgccaaggtataatgtcagtgcctcccttcagtggctcccatgtcacagaattgtcctgcagccctggcacatgtgtgccatgtgggagctgg

SEQ ID NO: 338246 - DNA, 201 bp, Homo sapiens
ttccatgcacttgtgccctaaatcctgctcctagactaaacttcatctcctgtgttctcattctgcagcatggctgttagggaacctgaccatctgcagcrcgtctcgttgccaaggtataatgtcagtgcctcccttcagtggctcccatgtcacagaattgtcctgcagccctggcacatgtgtgccatgtgggagctg

SEQ ID NO: 338247 - DNA, 201 bp, Homo sapiens
gcttcgacgtgtctggtgaatgtgtgggctgtgaggctccccgaacgtagacctcagactgcaacgctggccgttacagggtctggcacacgggcccacgycaggcccatcgccacagtgatggttgttctgtgactgtttctggtggcctctgctccacactccaggctgacgctgtgccccttccactgggaccctcgg

SEQ ID NO: 338248 - DNA, 201 bp, Homo sapiens; identical to SEQ ID NO: 71159

SEQ ID NO: 338249 - DNA, 201 bp, Homo sapiens; identical to SEQ ID NO: 71161

SEQ ID NO: 338250 - DNA, 201 bp, Homo sapiens
gtgggaggagggccagatctggactgggtttggagatgctcaggtggggctcagagcatcacctgtggggcagagggaccatcttggcagatgaaggcccrtcgcagggtgtgatgcctgaattacaaggcgggacaggtaaagtggggcaggtgagagaaggagggtgagtgatgtgatttttctactcctgttttccag

SEQ ID NO: 338251 - DNA, 201 bp, Homo sapiens; identical to SEQ ID NO: 71162

SEQ ID NO: 338252 - DNA, 201 bp, Homo sapiens
tttaccttatttgggaaggtttaagcattagcctgtcggggtcagcttagattatgcggcccaaccccagccaataggggaaggacacagaaacagaaacwgccttaccccagccaataggggaaggacacagaaacagaaactgcgttaccccagccaataggggaaggacacagaaacagaaactgcgttaccccagcc

SEQ ID NO: 338253 - DNA, 201 bp, Homo sapiens
gatctggactgggtttggagatgctcaggtggggctcagagcatcacctgtggggcagagggaccatcttggcagatgaaggcccgtcgcagggtgtgatrcctgaattacaaggcgggacaggtaaagtggggcaggtgagagaaggagggtgagtgatgtgatttttctactcctgttttccaggaaaaccaaaatgcc

SEQ ID NO: 338254 - DNA, 201 bp, Homo sapiens
ggtttggagatgctcaggtggggctcagagcatcacctgtggggcagagggaccatcttggcagatgaaggcccgtcgcagggtgtgatgcctgaattacraggcgggacaggtaaagtggggcaggtgagagaaggagggtgagtgatgtgatttttctactcctgttttccaggaaaaccaaaatgccacgcacttcga

SEQ ID NO: 338255 - DNA, 201 bp, Homo sapiens
cgccatctcaactcactgcaacctccgcctcccaggtttaagtgattctcctgcctcagtttcctgagtagctgggactacaggcacccaccaccacgccyggctagtttttgtatttttaaactttttttttcttttttctttttcttcttttttttttttttgagatggagtctcgctctgtcgcccgggctggagtgc

SEQ ID NO: 338256 - DNA, 201 bp, Homo sapiens
gactttagcctttcacacaatacacaaaaattatggaattctgaagaaaataagagaaaatgttcatgaacttggggtaggcaaaaatttaatagatgagscaaaaaaaaaaaaaggcccaaaccataaaaatggtttcatttttataaggataaattagagtttataaaaattaacacttcccttcaaaagaaaaattaa

SEQ ID NO: 338257 - DNA, 201 bp, Homo sapiens
ccctgccagctccatgtgaccgcacgcctctctccatgtgcagtaggaaggatgtcctcgtggtgaccccttggctggctcccattgtctgggagggcacrttcaacatcgacatcctcaacgagcagttcaggctccagaacaccaccattgggttaactgtgtttgccatcaagaagtaagtcagtgaggtggccgagg

SEQ ID NO: 338258 - DNA, 201 bp, Homo sapiens
acagcagctggagtgatctttccagaacataaggtaggaggctctccatgatctgatcctgccttcctgacctccccagcctcatctctccctcctctgcyctcgccctctgtgctccagccaacgtggcctgtcactcgtccacctgccatactgtcctgactccaggcctttgcctgtgctatggcctctgttgggacc

SEQ ID NO: 338259 - DNA, 201 bp, Homo sapiens
ggcctccctcggtgggttcgacagtgacctcgacgtgctcatttcagtgtggttcattccggtctcccaggggaagggggtgctgagtggaaggaggtcamtgggaagccggggtggctctcagagtctgcaggagcagtcgggctgatgagctgggaggagcagaccgcctccctcttctctgagtgggaggagggccag

SEQ ID NO: 338260 - DNA, 201 bp, Homo sapiens
aaccatttttgccacattgaaggaaaattatttccaccaagatttccctacagccaaacgatctaccaactacaaaaatggaaaaaataatttaggacatrtaaagttcaaatgttttgcctcccacgtttcggtttcaagaagctattcgagataaatcgctccgtggtcacaggacttagaaaggtggaggtaaacaca

SEQ ID NO: 338261 - DNA, 201 bp, Homo sapiens
gcggattaacaatggcgtgcttctcagaaatgaaaaagaacgaacgattgatacacgtgacaatataggtgaatcttcaaaacagcatgcggtgtgatgcrgccagacataaaagagcatgtatcagaggattccgtgtatgggaaacgccagggaatcagatccatggttgtcagggtcaggagggaccttactggggtg

SEQ ID NO: 338262 - DNA, 201 bp, Homo sapiens; identical to SEQ ID NO: 71176

SEQ ID NO: 338263 - DNA, 201 bp, Homo sapiens; identical to SEQ ID NO: 71181

SEQ ID NO: 338264 - DNA, 201 bp, Homo sapiens; identical to SEQ ID NO: 71182

SEQ ID NO: 338265 - DNA, 201 bp, Homo sapiens
ccctagcaaatgaattagccgagaactctggaatagatgacccctttgcaggtgtcatggagaaatggtttggaaaatggaagggactcatgacctaaatmtttacctcccttgcaacagttacaggtgtactcatccttgtgggctgctgtatcataccttgtattcgtgggttaacccaaaggctcatagaagcagctc

SEQ ID NO: 338266 - DNA, 201 bp, Homo sapiens
atgggagggggcctcatggtttgtagacatgttctgaaactccactctgcccggccttggcttcgacgtgtctggtgaatgtgtgggctgtgaggctcccygaacgtagacctcagactgcaacgctggccgttacagggtctggcacacgggcccacgtcaggcccatcgccacagtgatggttgttctgtgactgtttc

SEQ ID NO: 338267 - DNA, 201 bp, Homo sapiens
tggagatgctcaggtggggctcagagcatcacctgtggggcagagggaccatcttggcagatgaaggcccgtcgcagggtgtgatgcctgaattacaaggygggacaggtaaagtggggcaggtgagagaaggagggtgagtgatgtgatttttctactcctgttttccaggaaaaccaaaatgccacgcacttcgaccta

SEQ ID NO: 338268 - DNA, 201 bp, Homo sapiens
cctgcttagcttggttgggaggctccaagaccaacatcccaagaaagatgagacagaagccagatcacctttttgggcctggcttcagaagtcacccagcrtcacttctgctgcatttatttcttagaaacacagaatatcagaccccatctcttgatgggagggggcctcatggtttgtagacatgttctgaaactccac

SEQ ID NO: 338269 - DNA, 201 bp, Homo sapiens
tgaattacaaggcgggacaggtaaagtggggcaggtgagagaaggagggtgagtgatgtgatttttctactcctgttttccaggaaaaccaaaatgccacrcacttcgacctatgatccttttcctaataatgcttgtcttggtcttgtttgggtaagacacatttgaccatcgaggctggcctggtttggggagaagtga

SEQ ID NO: 338270 - DNA, 201 bp, Homo sapiens
tggggtcactgcaaagacttccctgcatctctggcagttgatgctggctgtcatctgagacacctacccagggcctctccctggggcctgggctcctgctyagcttggttgggaggctccaagaccaacatcccaagaaagatgagacagaagccagatcacctttttgggcctggcttcagaagtcacccagcatcactt

SEQ ID NO: 338271 - DNA, 201 bp, Homo sapiens
gcactttgggaggtcaaggtggccagatcacttgagcccagaagtttgagaccagcctgggtgacatagtgagaccctgtctctacaaaaaaaaaaaaaaattagctgggcatggtggcatgcacctgtagcccctgctactcaggaggctgaggtgagaggatgacttgagcccagtaggcagagattgcagtgcattcc

SEQ ID NO: 338272 - DNA, 201 bp, Homo sapiens
agcctcagacttgtctccccatccccatcagccctgtcccccttcttctcacagcagctggagtgatctttccagaacataaggtaggaggctctccatgwtctgatcctgccttcctgacctccccagcctcatctctccctcctctgccctcgccctctgtgctccagccaacgtggcctgtcactcgtccacctgcca

SEQ ID NO: 338273 - DNA, 201 bp, Homo sapiens
tgatccttccacctcagcctcctgggaccagaggcatgcaccactatgcccagctaattgttttttttttttttttcttgatagaaatgagttctcactaygttgcccaggctggtctagaactcctggcttccagcaattctgctggctcagcctcccaaagtcctgggattataggcacgagccacgatgcctgtcctc

SEQ ID NO: 338274 - DNA, 201 bp, Homo sapiens
ggaggccaagataggtagatcacttgaggccaggagtttgagagcagcctggcccacatggcaagactccatctttacaaaaatacaaaaaaaaaaaaaaagttgagtgtggtggtgcgcctgtaatcccacctacttgggaggctgaggcatgagaattgcttgaacccaggagggagaggttgcagtgactggagatca

SEQ ID NO: 338275 - DNA, 201 bp, Homo sapiens
acgtcctgctccagggctccggtggggctgccctcatctctgtgacagcctcagacttgtctccccatccccatcagccctgtcccccttcttctcacagyagctggagtgatctttccagaacataaggtaggaggctctccatgatctgatcctgccttcctgacctccccagcctcatctctccctcctctgccctcg

SEQ ID NO: 338276 - DNA, 201 bp, Homo sapiens
tggcttactgcagccttcacctcctaggctcaagtgatccttccacctcagcctcctgggaccagaggcatgcaccactatgcccagctaattgttttttktttttttttcttgatagaaatgagttctcactatgttgcccaggctggtctagaactcctggcttccagcaattctgctggctcagcctcccaaagtcct

SEQ ID NO: 338277 - DNA, 201 bp, Homo sapiens
cctgtcctcaaaatattttactgtactgtactcacctattattggcctttggttgaccatgggtaactgaaactccagcaagcgaaggtgtggataagggmactactgtacgtgactttaatatacataaaatcaccttaaagacaatgattgtttccagaacatgagcctctgagacagcagggagatactaggggaagt

SEQ ID NO: 338278 - DNA, 201 bp, Homo sapiens
ctccgatccaattggccatccctttcaccttggcatttcaacaaccagacaggaagcaggtaacccaaaggaaaagagaaacccctcacgggtcctttgayctctcatatttacatagacagtatcggggttgcgctggggggtacaaaatgaattcaaagctcgaaaccaaatagccaccaggtttgagtctgtattatt

SEQ ID NO: 338279 - DNA, 201 bp, Homo sapiens; identical to SEQ ID NO: 71185

SEQ ID NO: 338280 - DNA, 201 bp, Homo sapiens
tggatcacctgaggtcaggagttcaagactagcctggcgaacatggtgaaaccccgtctctactgaaaatacaaaaaaattagccagccatgatggtgtgygcctgtaatcccagctacttgggaggctgaggcacgagaattgcttgaacccgggaggctgaggttacagtcagccaagatcgtgccactgcactccaac

SEQ ID NO: 338281 - DNA, 201 bp, Homo sapiens
tccaccaagatttccctacagccaaacgatctaccaactacaaaaatggaaaaaataatttaggacatgtaaagttcaaatgttttgcctcccacgtttckgtttcaagaagctattcgagataaatcgctccgtggtcacaggacttagaaaggtggaggtaaacacacacaagcattataagataagaagtaacagatg

SEQ ID NO: 338282 - DNA, 201 bp, Homo sapiens
aatcagaataggttgatattaggatagacagatagttcaatggaatagaatgcagagtttagaaatagacctacacagaaatagtccattgattttttaakagttgctttttgataagggtgctaaggtaatgtgatagagaaaggaaagtattttcaattcaaatggctgaaatgactggatatccattgagggaagaaa

SEQ ID NO: 338283 - DNA, 201 bp, Homo sapiens
gctgcgggataattaaggaatcagagagaccgatggggttgaggaggaattatttaattatttaggcgcaccgacccaatcagattaacatccaaaggacygggccccaaacaaagagtcaagctaccttttaagcattttgtggggtggggggagatttgtgcagggggaagagtattacagaagcgagaaacaaagaca

SEQ ID NO: 338284 - DNA, 201 bp, Homo sapiens
gaagccctacgggacagcccccaagggccattcgacttccagctcttgatgccaattttacctcatgtctctcatggcaaggggaaaatctgacgttcctsggaaacctgatgggatgtactgggcctaaacctttccaagagctaaccagtcagtcagccctaatccatccccaagcagatgtacagtggtattgtgggg

SEQ ID NO: 338285 - DNA, 201 bp, Homo sapiens
aaattttacatagtaatcagaataggttgatattaggatagacagatagttcaatggaatagaatgcagagtttagaaatagacctacacagaaatagtcmattgattttttaagagttgctttttgataagggtgctaaggtaatgtgatagagaaaggaaagtattttcaattcaaatggctgaaatgactggatatcc

SEQ ID NO: 338286 - DNA, 201 bp, Homo sapiens
aaggcactggtggcggggggtgagggagctggggctctggagctccagcaggtgcccatacgtgagcaatatcccagggaccaccctcctgcccacctccmggtgtgggacgtggcgaggcgcctgagctttgctgagaacttgccctacctgcctcgaggccttgcagcttcaccgggaactcttgtgctcacgctgctg

SEQ ID NO: 338287 - DNA, 201 bp, Homo sapiens
ctaaactgtcacttctccccagatggatctacagagtccacataatctcacttaaaactccagaagaaatttttgtaaagttgacagctgattctaaaatkttacatagtaatcagaataggttgatattaggatagacagatagttcaatggaatagaatgcagagtttagaaatagacctacacagaaatagtccattg

SEQ ID NO: 338288 - DNA, 201 bp, Homo sapiens
actgcagcccccacctcccaaggcttaggtcacctcagcctcctgagtagctgcaactacaggcaagtaccatcatgcctagctgatttttgcattttttrtagacagggttttgccatgttacttaggctggtcacgaactcctgggctcaagtgacccacccacctcggcctcccaaagtgctgggattacaagcgtga

SEQ ID NO: 338289 - DNA, 201 bp, Homo sapiens
tggagaaatataccatgctcatggattggaagacttacattgctaaactgtcacttctccccagatggatctacagagtccacataatctcacttaaaacyccagaagaaatttttgtaaagttgacagctgattctaaaattttacatagtaatcagaataggttgatattaggatagacagatagttcaatggaataga

SEQ ID NO: 338290 - DNA, 201 bp, Homo sapiens
tgggaggctgaggcatgagaattgcttgaacccaggagggagaggttgcagtgactggagatcacaccactgcactccagactgggcaacagggcaagacwcagtctaaaaaaaaaaaaaaaagaaaaaagaaaaacaagaataaatcaattatttttctataatacttgccacaatcaattgaaccatgaaaaattttaa

SEQ ID NO: 338291 - DNA, 201 bp, Homo sapiens
tgcccacaattgcgtggctgggggtggggaaggcaattctgggtcccaagctgttagtcgcttccagacacagaaggtcccagaaccaagagtgaagtcayctgtcacctctactggggcatctctggacacggtctggaaacactccctgacgtggcctcagggactgcactgatcaaggcactggtggcggggggtgag

SEQ ID NO: 338292 - DNA, 201 bp, Homo sapiens
aattgcgtggctgggggtggggaaggcaattctgggtcccaagctgttagtcgcttccagacacagaaggtcccagaaccaagagtgaagtcacctgtcasctctactggggcatctctggacacggtctggaaacactccctgacgtggcctcagggactgcactgatcaaggcactggtggcggggggtgagggagctg

SEQ ID NO: 338293 - DNA, 201 bp, Homo sapiens
gatcacttgaggccaggagtttgagagcagcctggcccacatggcaagactccatctttacaaaaatacaaaaaaaaaaaaaaagttgagtgtggtggtgygcctgtaatcccacctacttgggaggctgaggcatgagaattgcttgaacccaggagggagaggttgcagtgactggagatcacaccactgcactccaga

SEQ ID NO: 338294 - DNA, 201 bp, Homo sapiens
tggggtaagctgaagcttccagtatcccacgtgggcattctgttgctgagggcaaccgcccctccctgcaagggaggggaaggagcaggcaggcacacccktcctccctccacatttcactggagttgacctgtgtcctactgtggttgcacctggaccagcccagagggactggagtgactcttcccgcaggtagggcac

SEQ ID NO: 338295 - DNA, 201 bp, Homo sapiens
agatcacttgaggccaggagtttgagagcagcctggcccacatggcaagactccatctttacaaaaatacaaaaaaaaaaaaaaagttgagtgtggtggtrcgcctgtaatcccacctacttgggaggctgaggcatgagaattgcttgaacccaggagggagaggttgcagtgactggagatcacaccactgcactccag

SEQ ID NO: 338296 - DNA, 201 bp, Homo sapiens
caaggtctcaagatacaaagtcaatgaataaatcaggctgggtgtggtggctcacacctgcaatcccagcactttgggaggccaagataggtagatcactygaggccaggagtttgagagcagcctggcccacatggcaagactccatctttacaaaaatacaaaaaaaaaaaaaaagttgagtgtggtggtgcgcctgta

SEQ ID NO: 338297 - DNA, 201 bp, Homo sapiens
ttactcttgatttcttcctgtatattcaagttattgtctggtgacctttccttgctccagtatatataataacttcattgcctccttgctcctttatgctrttattgtcatatatattatatatgtttatgctgtgagcccatcagctaagtcagcttagcaaggtctcaagatacaaagtcaatgaataaatcaggctgg

SEQ ID NO: 338298 - DNA, 201 bp, Homo sapiens
tcagtaagacaagtaaggagaaaaacacttttcaagtcttttatattacactgtatatttatcactgactttactcttgatttcttcctgtatattcaagytattgtctggtgacctttccttgctccagtatatataataacttcattgcctccttgctcctttatgctattattgtcatatatattatatatgtttatg

SEQ ID NO: 338299 - DNA, 201 bp, Homo sapiens
aaaaattatttagtctgacgttagcatttctcctcaagctcccttacggttgtttgcatagcaaatctactatccttttgctttgacctatttgtatcttwgtttctaaagtatgtatgtctctcacaggcagcatatagtcaaagcttaaaaaaaaaatccagtctaacgatctctgccttttgattggcatgttcattc

SEQ ID NO: 338300 - DNA, 201 bp, Homo sapiens
tttacatacaactgagtttttgcttacacagtttttaatttcttttaattcctgttctagtattttggggctaggttgtcaggtatgtatatatttctgtytgttatattttcgtgatgtattcactttatatcatggcagaatgtttctctttagtaagatttttgatcttaaaaaagttggccagatggggtggctcat

SEQ ID NO: 338301 - DNA, 201 bp, Homo sapiens
ggctcttgccaggtggagtgttctagagatgtcagttggtgtccagtgatgtcaagtcatttgtatctactgattttctttctaattattctatccattaytgagagtggggtaggattttggtgtccaattattgtttttttgtttttttttttttgtttgtttgtttttttttttgaggtggagtctcactttgtcacc

SEQ ID NO: 338302 - DNA, 201 bp, Homo sapiens
tgtgttctctctctctctggtcaatgtagctaaagctttgtcaattctcttgatcttttcagagaactgacatttgattttttttactttatctttttctytctgttctctagttcattggtttccactctaatatttattaatttcccttcttctcactttgggtttaatttgttctgtcttttcttattgtagttactt

SEQ ID NO: 338303 - DNA, 201 bp, Homo sapiens
gtctcctcttttagtcctgattttagttatttgtgttctctctctctctggtcaatgtagctaaagctttgtcaattctcttgatcttttcagagaactgmcatttgattttttttactttatctttttctctctgttctctagttcattggtttccactctaatatttattaatttcccttcttctcactttgggtttaa

SEQ ID NO: 338304 - DNA, 201 bp, Homo sapiens
caaagatttaatcttatattttcttctaaccgctttctagtttatgtgtaagaatctgtccattttacctaagttgcataatttgttggcaaacagttgtwcatagtatttccttgaaatccttttaatctctgtaagattggaattgctgtctcctcttttagtcctgattttagttatttgtgttctctctctctctgg

SEQ ID NO: 338305 - DNA, 201 bp, Homo sapiens
ctcctttgttcagttttgagagttctttacatacacagtatcatatatatatatatatatatatatatataccagatatatgatttgcaaatattttcaaycatcaatagtttgtcttaacacttttttattggtgttttgaagtagaaaagttttacattttgatccattccaatttattaactttttcttttattgtgt

SEQ ID NO: 338306 - DNA, 201 bp, Homo sapiens
ctctccctccaggccctttcctgtgtcctcgggcccctcgggtccctgcaccaggccagcagcaatcgggtgtcagaggttcaagtccaggctgactcctsggacgcaccgactttgcccaggagggctggggagagggcagccccaaagtgtcatctttgattattctttgtccccaaagccagccttgggcatgtgccc

SEQ ID NO: 338307 - DNA, 201 bp, Homo sapiens
ggctgagggttccactgtctgtacgtctgcagcaatacataccattcttgtgggtaaaaggtggtatctcattatagttttgatttgcatttccccaaggwcaaatgatggcaagtggcttttcttgtgctttttagccatttgtatatgtttttggtgaaatgcctgttgaaatgttttgcctttttaaaaattgagttg

SEQ ID NO: 338308 - DNA, 201 bp, Homo sapiens
aaactcctgggctcaagtgatctgcccacctcggcctccccaagtcctgggattataggtgtgagccgctgcgcctggctgagggttccactgtctgtacrtctgcagcaatacataccattcttgtgggtaaaaggtggtatctcattatagttttgatttgcatttccccaaggacaaatgatggcaagtggcttttct

SEQ ID NO: 338309 - DNA, 201 bp, Homo sapiens
cactgcactccaacctgggtgatagagtgagactctgtctcaaaaaaacaaaaaaattatttagtctgacgttagcatttctcctcaagctcccttacggytgtttgcatagcaaatctactatccttttgctttgacctatttgtatcttagtttctaaagtatgtatgtctctcacaggcagcatatagtcaaagctta

SEQ ID NO: 338310 - DNA, 201 bp, Homo sapiens
aggacagggcaggagaacgtggtgcatctgctgctctaagccttccaatggccgctggcgggcgggtgcaggacgggcctcctgcagcccaggggtgcacrgccggcggctcccccagcccccgtccgcctgccttgcagatacgtggctttcctgaagctgttcctggagacggcggagaagcacttcatggtgggccac

SEQ ID NO: 338311 - DNA, 201 bp, Homo sapiens
tgccatcaagaagtaagtcagtgaggtggccgagggtagagacccaggcagtggcgagtgactgtggacattgaggtctctccttgtgttcaagacagagwggggtggcggccagccttgtcctcccagagggtagatgggaaaggtcattcatgcagcatcttactgagctcatgtgggctcgtgggctcgtgggctcgc

SEQ ID NO: 338312 - DNA, 201 bp, Homo sapiens
gtcaggagttcaagactagcctggcgaacatggtgaaaccccgtctctactgaaaatacaaaaaaattagccagccatgatggtgtgtgcctgtaatcccwgctacttgggaggctgaggcacgagaattgcttgaacccgggaggctgaggttacagtcagccaagatcgtgccactgcactccaacctgggtgatagag

SEQ ID NO: 338313 - DNA, 201 bp, Homo sapiens
tcaggacagggcaggagaacgtggtgcatctgctgctctaagccttccaatggccgctggcgggcgggtgcaggacgggcctcctgcagcccaggggtgcrcggccggcggctcccccagcccccgtccgcctgccttgcagatacgtggctttcctgaagctgttcctggagacggcggagaagcacttcatggtgggcc

SEQ ID NO: 338314 - DNA, 201 bp, Homo sapiens
gccaaggcaggtggatcacctgaggtcaggagttcaagactagcctggcgaacatggtgaaaccccgtctctactgaaaatacaaaaaaattagccagccrtgatggtgtgtgcctgtaatcccagctacttgggaggctgaggcacgagaattgcttgaacccgggaggctgaggttacagtcagccaagatcgtgccac

SEQ ID NO: 338315 - DNA, 201 bp, Homo sapiens
ggccaaggcaggtggatcacctgaggtcaggagttcaagactagcctggcgaacatggtgaaaccccgtctctactgaaaatacaaaaaaattagccagcyatgatggtgtgtgcctgtaatcccagctacttgggaggctgaggcacgagaattgcttgaacccgggaggctgaggttacagtcagccaagatcgtgcca

SEQ ID NO: 338316 - DNA, 201 bp, Homo sapiens
ttggaattcagcaaagctgaccagcatgaacattaacacagaccttaagtctgattagtggcatttacaatctatactctctgaagcgtgctacctggagkcttcctttgcatgataaaactttggtctccacaaccccttatcataacctagacactcctttctagtgataataactctttcaaccaattgccaataaaa

SEQ ID NO: 338317 - DNA, 201 bp, Homo sapiens
tataagcatgagccactgcacctggccccaacatcatttattgaacagactgtcgtttccacattgtgtttcttggcatttctgtcaaaaatcagttgacygtaaatgcatggattcacttccgggctctctattctgtttcattggtctgtttgtttttatgccaataccatgatgttttgattattatagctttatagt

SEQ ID NO: 338318 - DNA, 201 bp, Homo sapiens
attttcgtgatgtattcactttatatcatggcagaatgtttctctttagtaagatttttgatcttaaaaaagttggccagatggggtggctcatgcctgtratcccagcactttgggaggccaaggcaggtggatcacctgaggtcaggagttcaagactagcctggcgaacatggtgaaaccccgtctctactgaaaata

SEQ ID NO: 338319 - DNA, 201 bp, Homo sapiens
acatccaaaggaccgggccccaaacaaagagtcaagctaccttttaagcattttgtggggtggggggagatttgtgcagggggaagagtattacagaagcragaaacaaagacagttattcagttaagacatgcattacattatttcttacttttcaaggaacaacacgttttatgactcaagattatctgtttagtgacc

SEQ ID NO: 338320 - DNA, 201 bp, Homo sapiens; identical to SEQ ID NO: 71168

SEQ ID NO: 338321 - DNA, 201 bp, Homo sapiens
acttaggctggtcacgaactcctgggctcaagtgacccacccacctcggcctcccaaagtgctgggattacaagcgtgagtcaccatgcctggcccaaccrttactggtgaattgactgtttcacccttcaattctgtgagtttttgcttcatgtattgctgcgggataattaaggaatcagagagaccgatggggttgag

SEQ ID NO: 338322 - DNA, 201 bp, Homo sapiens
ggtgctggtggtcccccatcgctgggaagaggatgaagtgagtcgcagcccgaggactcgctcaggacagggcaggagaacgtggtgcatctgctgctctragccttccaatggccgctggcgggcgggtgcaggacgggcctcctgcagcccaggggtgcacggccggcggctcccccagcccccgtccgcctgccttgc

SEQ ID NO: 338323 - DNA, 201 bp, Homo sapiens
tatttactcaagggaaatgaaaacacaggtccacaaatacctgcacatgagtgtttacagaagctttgttgctagtggccccgaacagtgaaaaaaccacrgtgtctgtcaataggagacagaataaatgaattgtggcggattaacaatggcgtgcttctcagaaatgaaaaagaacgaacgattgatacacgtgacaat

SEQ ID NO: 338324 - DNA, 201 bp, Homo sapiens
tccgaggcgggtggatcacttgaagtcaggagatcgagaccagcctggccaacatggtgaaacctgtctctactaaaaatacaaaaaattagccaggcgtrgtggtgggcgcctgtaaacccagctactcgggaggctgaggcaggagaattgcttgaacccgggaggcggaggctgtagtgagccgaaggtgcccctttg

SEQ ID NO: 338325 - DNA, 201 bp, Homo sapiens
aggcaaccgcagacacatacttgacttctcggcagctgtgggcagctgggccagcgacagtggcggaggccaggaatgacttactcttaggaataggtgcrgttcaagcctggagggaggaagctctagggtgcagaggcgggtgtgtggaggcctcgcgtgcagcttataatgagggagcacgtggccggcctggccata

SEQ ID NO: 338326 - DNA, 201 bp, Homo sapiens
acgcagcactgctatgaacatttgtgtacaagactttgtgtgaacatgttttcatttctcttgggttgatacccagcagaggaattgctgggtcatacagraagtctgatttaacattttaagaaactagcaaactgttttccaaagtgactgccccattttacattcccatcagcagtgtataacggttctaattttctt

SEQ ID NO: 338327 - DNA, 201 bp, Homo sapiens
acctgtttcaaatgaattattttcagttagtttacagagttgtgaaataaattttataacttttccatccccagcccaccaaaactccctggaactcctcygcagtcattccccattcccacctggcctcagacaatcactttctgtctctccagtcttgccttttctggacagttcctatgaatggagtcctgtgttaca

SEQ ID NO: 338328 - DNA, 201 bp, Homo sapiens
tagaactgggttatggagcaacttcaacaaagaataatcaacgtgtggggaaatgacaggacccaggagagcggttttaggcttccaagtttgggaaaccrgcaaggtgagtattgggaggaaactaaggcggaagtttcattcacagagccctagggtgccttctttcctctggctgatgcgtctctctcctataatttc

SEQ ID NO: 338329 - DNA, 201 bp, Homo sapiens
gatttcatgcttcaaaacaggtgtcgggtggaaaggcgaggcagtcttgctggatcttggggattgcaactggccctgtattcccatgcaaggaagttagytagttctcatctttttgaagtagtcggatatattaacagtgctctaccctggagaaaactggtccatggaatcattgctgttccttaaacaatctgtccg

SEQ ID NO: 338330 - DNA, 201 bp, Homo sapiens
tgccgttgcacaatcacagctcactgcaacttcttttattatttgtagagatgaagtcttgctctgttacccaggctggtctcgaagtcctaagctcaagygatccccctgcctcagcctcccaaagagctggcataacaggcgtgagccactgtgcctggccagtattttcactttttaaaaattaaatttcagcaacct

SEQ ID NO: 338331 - DNA, 201 bp, Homo sapiens; identical to SEQ ID NO: 71223

SEQ ID NO: 338332 - DNA, 201 bp, Homo sapiens
gaggggttgcagccaagaaggttgctgggggagtgcagagcatgtcttcttcagtggtacttgcatagccgctcgtgcttgagctccttgtaggaaaggcrgtagatgaagagcatgtaccctgccagcaccatggtaaaccccgagatgctccccttcttcacgttgatgtacttgttgtagtaccagtagtaacctctt

SEQ ID NO: 338333 - DNA, 201 bp, Homo sapiens
ggtatggtgatagctcactgcaacctcaaactcttgagctcaagcaatcctgcctcagcctcccaagtagctaggactacaagcatgtatcaccatgccckactgatggtttaatatttgtagagacggggtctagctttgttgcccgggctggtctcgaactcctgggatgaaacaatccccctgcctcagcctcccaaa

SEQ ID NO: 338334 - DNA, 201 bp, Homo sapiens
gcctcagcctcccaaagagctggcataacaggcgtgagccactgtgcctggccagtattttcactttttaaaaattaaatttcagcaacctgtggtcccarctactctgaatcctgaggcaggaggattgcttgaggccagcagtaggaggcagcagtgagctatgattgtacctgtgactagccactgcactctaacctg

SEQ ID NO: 338335 - DNA, 201 bp, Homo sapiens
ggcgggggacggctgcggccggaacgcagacatgcgcttccggggtggggcctgccgcccgcaagcacgctcacctccgttgcgcctgcgccgtggcctcyccggattctgttaacggtagtggtggcttgttgggatccgttgagtgatgggagagtgtgctctttaacttcggagagagatgcgctctcgtgtagccgt

SEQ ID NO: 338336 - DNA, 201 bp, Homo sapiens; identical to SEQ ID NO: 71222

SEQ ID NO: 338337 - DNA, 201 bp, Homo sapiens
ttgattatgtttatgaattacagaaacaaatctcttctaaatttatatataaaatataattttaaattattcctcagtttcccttttacagaactatgtgyatttagttaattgcctcagcagggaacagtattcagcaagtatgtttgagcacatgctgtatgtagttccaagacttaatgtcatgaagtatgtatacct

SEQ ID NO: 338338 - DNA, 201 bp, Homo sapiens
gctgacagagaactcctttacaagaaagaaaaatcttcatagaaaggtgctgttgatatttcagagatagacttgggaaactaaaaatatgggtttgtttrttcttaatgttagtgtgctcggtttctaacataaactctaaataataaatttagtgcatgtagtctaagtatttttcagtttttttagaatctggccaca

SEQ ID NO: 338339 - DNA, 201 bp, Homo sapiens
tgggatttctgtgtggcctggttatttggaaactatgcagtcctcattggaacaactttattcgaagtaagaattgtattttcattaaagagtgtatttaytcaagagtttttgattatgtttatgaattacagaaacaaatctcttctaaatttatatataaaatataattttaaattattcctcagtttcccttttaca

SEQ ID NO: 338340 - DNA, 201 bp, Homo sapiens
acactgagctcagtgagagcagagaatgcatctttatcgtcttcgtgggcccagtgcctaccacaggcctggtacagagtgggtgctttgtaaaatgaaaytttacttttgtattctgattgtgtaagtctaaaatatgtactcaggaggctgaggcaggagaatcacttgaacctgggaggcagaggttgcagggagctg

SEQ ID NO: 338341 - DNA, 201 bp, Homo sapiens
aaaatgggatttctgtgtggcctggttatttggaaactatgcagtcctcattggaacaactttattcgaagtaagaattgtattttcattaaagagtgtakttattcaagagtttttgattatgtttatgaattacagaaacaaatctcttctaaatttatatataaaatataattttaaattattcctcagtttcccttt

SEQ ID NO: 338342 - DNA, 201 bp, Homo sapiens
taggcatgtaccaccatgcctggccaaattaatttctttctgccaaacatctaagtggagaaatctggggggcagctgaatatgttactacatggtgtttktatgacctcagctaacttctgttttcacacagaaaattataactgttaagaaactgtttgttaatacttgtgttatatttaaacttgtgttatatttaaa

SEQ ID NO: 338343 - DNA, 201 bp, Homo sapiens
tggtgatagctcactgcaacctcaaactcttgagctcaagcaatcctgcctcagcctcccaagtagctaggactacaagcatgtatcaccatgcccgactratggtttaatatttgtagagacggggtctagctttgttgcccgggctggtctcgaactcctgggatgaaacaatccccctgcctcagcctcccaaaatgc

SEQ ID NO: 338344 - DNA, 201 bp, Homo sapiens
ggttttttttttgttttttttttttcacaagtaccagtcatcttttatttggaggttaattcccattaggatatgaaaggattcagcaacaatcgagattktgttgcttatggaggggttgcagccaagaaggttgctgggggagtgcagagcatgtcttcttcagtggtacttgcatagccgctcgtgcttgagctcctt

SEQ ID NO: 338345 - DNA, 201 bp, Homo sapiens
tgaagagcatgtaccctgccagcaccatggtaaaccccgagatgctccccttcttcacgttgatgtacttgttgtagtaccagtagtaacctctttgaaaygctccatcaaggccactagggctgaagtcccacatcaagatccagcttggcagctcccctagtttgacctccagaagtttcttgtccttcactggtacaa

SEQ ID NO: 338346 - DNA, 201 bp, Homo sapiens
gtgcttgagctccttgtaggaaaggcagtagatgaagagcatgtaccctgccagcaccatggtaaaccccgagatgctccccttcttcacgttgatgtacytgttgtagtaccagtagtaacctctttgaaacgctccatcaaggccactagggctgaagtcccacatcaagatccagcttggcagctcccctagtttgac

SEQ ID NO: 338347 - DNA, 201 bp, Homo sapiens
aggccctttgctacccggggacagtgccttcaggttagtttctgcagaaactctacgcgaaatcttgcaagacaaagagctgagtaaggaacagctagtarcatttcttgagaacgtattaaaaacttctgggaaactacgggagaaccttcttcacggtatgcttcacgatttcatgcttcaaaacaggtgtcgggtgga

SEQ ID NO: 338348 - DNA, 201 bp, Homo sapiens
gaagtttttctatttctttctaggtttgtcaagggctatttaatgagttactagaaaatgggatttctgtgtggcctggttatttggaaactatgcagtcytcattggaacaactttattcgaagtaagaattgtattttcattaaagagtgtatttattcaagagtttttgattatgtttatgaattacagaaacaaatc

SEQ ID NO: 338349 - DNA, 201 bp, Homo sapiens
agagaaggaagagaaaaggatctgcaagtagttgaatgaagctccgggaccatagtttggacttaatttctaaaagataaaatttacaaaatgactggccyctgcgagaagggcatattaccctgtgtaatatgctgttctctggtgatctagagactctggagcatgccctagagaaatactccctcctgactctattga

SEQ ID NO: 338350 - DNA, 201 bp, Homo sapiens
aggccaggtgtatttcttacatacacagactggtgtgagcacatggcatgatccaagagtgcccaggtaagaacgtattttaagcactctttagaccatcraagagccatttcacctaggatttctttgatttttaagaaatttttaccttttaaaaatagtttatgtaaaagtttgactcttctgatagttacttcagtt

SEQ ID NO: 338351 - DNA, 201 bp, Homo sapiens
agagactctggagcatgccctagagaaatactccctcctgactctattgaagagtaaaaattttatgcttattctcaaaaagattaatgttgctgaaatayttcatttttattaaaattttcctgggtagtgcctaacgagtatatatactgttttcaatttcaggaacatttatcctatttccactttgttggacgaata

SEQ ID NO: 338352 - DNA, 201 bp, Homo sapiens
caatcagtgaactgtttggtatttgtcaatgctaagaaggtggggctaatttaataatttgatcccaaattttagattcctcaggcagttgggggttagartctgatttcatccatcaagctacttctgttctttatgacacattaacatatgatcattgaaatgggctgtatggtaacactatcaacttcaactactgtt

SEQ ID NO: 338353 - DNA, 201 bp, Homo sapiens
tttgctttaagttaataccatattagtattttaaatttatagagtacctttgatttcaagatgctgtataaactttagttacttgataataactttattgkggaattgcccctttgctgaaaggtataaacatttcttacatggtgatgcacacactcacacacacacactcacacactcatacacactctctctgaagaa

SEQ ID NO: 338354 - DNA, 201 bp, Homo sapiens
aatgacttctttccctctgggttaatacctagtagtgggattgctagatcaaacagtagatctacttttagttctttaaggaatctccacactgttttccrtagtggttgtactagtttacattactaccagccgtgtaaaagtgttcccttttcactgcatccatgccaacatctgttatttttaaattttttgattatg

SEQ ID NO: 338355 - DNA, 201 bp, Homo sapiens
ctgattcccatcctcaaggcaactgctttaataactttggctgtttattctggtattttcatctgtttctagatatgtattttattttatagcatcacagttttctttttttagttttaggtaatttttttttttttttgagacagtcttgctctgtcacccaggttggagtgcagtggcaccatctcggctcactgcaat

SEQ ID NO: 338356 - DNA, 201 bp, Homo sapiens
tgctgagttgttttatttctagatgtaattagttcactttatgtaatattcttctctcagactgactttaaaaacaaagttttatcattttcattgtattwgtatttattacagagtgttttagctttgatattctttgtattttcattcatttgttacatgagctttatcagtaacatctgtataaatggtttttaaaaa

SEQ ID NO: 338357 - DNA, 201 bp, Homo sapiens
tgattcccatcctcaaggcaactgctttaataactttggctgtttattctggtattttcatctgtttctagatatgtattttattttatagcatcacagttttctttttttagttttaggtaatttttttttttttttgagacagtcttgctctgtcacccaggttggagtgcagtggcaccatctcggctcactgcaatc

SEQ ID NO: 338358 - DNA, 201 bp, Homo sapiens
gattcccatcctcaaggcaactgctttaataactttggctgtttattctggtattttcatctgtttctagatatgtattttattttatagcatcacagttttctttttttagttttaggtaatttttttttttttttgagacagtcttgctctgtcacccaggttggagtgcagtggcaccatctcggctcactgcaatct

SEQ ID NO: 338359 - DNA, 201 bp, Homo sapiens
attcccatcctcaaggcaactgctttaataactttggctgtttattctggtattttcatctgtttctagatatgtattttattttatagcatcacagttttctttttttagttttaggtaatttttttttttttttgagacagtcttgctctgtcacccaggttggagtgcagtggcaccatctcggctcactgcaatctc

SEQ ID NO: 338360 - DNA, 201 bp, Homo sapiens
ttcccatcctcaaggcaactgctttaataactttggctgtttattctggtattttcatctgtttctagatatgtattttattttatagcatcacagttttctttttttagttttaggtaatttttttttttttttgagacagtcttgctctgtcacccaggttggagtgcagtggcaccatctcggctcactgcaatctct

SEQ ID NO: 338361 - DNA, 201 bp, Homo sapiens
tgttggtaaggccaggcatgtggctcatgctgtaatcccagcactttgggaggctgaggttggagaatcacttgagcctaggagttcaagaccaacctggscaacatgtgagtcctattctcttcaaaaaatttttttaaaattagctggtcatggtggtgcgcacctgtggtcccagctactcaggacaccgaggtggga

SEQ ID NO: 338362 - DNA, 201 bp, Homo sapiens; identical to SEQ ID NO: 71228

SEQ ID NO: 338363 - DNA, 201 bp, Homo sapiens
tttttagtaagaagagaacattctattgaacttgttttaatgtttaatgctttacagctttaaaatctatgctaattgagaaaaaacagaatgagcaatgktagtgtaacactggaaaaagggagaaattgttaccttactcatgaggcacttagtagccttatatggtatttagggtgtcttgaattgacctggagggaa

SEQ ID NO: 338364 - DNA, 201 bp, Homo sapiens
gaatcccataaaatatattacagagttctaaaataagttgaaaaaattatatattctgtgaattgatacttcgggttggcattcccgatttgtaacagcasatgtcttactggcttgcttgttgcactgtgtccaagtttcctattaatgccttatcactcaatatttttatttaagctgggaagaaaggagaaccgcctc

SEQ ID NO: 338365 - DNA, 201 bp, Homo sapiens
tgctttggtttatatttatttacaaaagagtatgagtgataatagcatactcataaactgttgagaggatcaaatgaaataattcaggtaaggcactttarcacagtgtcttgcataaaataagcgcttagtaaataattagctactattatttctattgctactattattgttaccctcaaaaactaagagagaagttat

SEQ ID NO: 338366 - DNA, 201 bp, Homo sapiens
gtggtttccgtactgcctatgatacattataagaatttataattaaagtttattaagaggaaagattatgcttatattttaggggaagggggaatattgarctacatttatagtgattttgtttcaggtttttctgaggaattttaaataccctgtgtcctcttaatagtaaaaacagtttgaggtatctgagtttcttac

SEQ ID NO: 338367 - DNA, 201 bp, Homo sapiens
gttttctcttaaaatttgacaaatattaaaaacattgtccttccttctttggttacagtggagtctcttctgttttgccaggaaagttaacatattttttyttccatttttgttcatcatttataaattagatggtatagattttagcaaatagatctcaagagctggattcaattagcagctttttaggacataaacatt

SEQ ID NO: 338368 - DNA, 201 bp, Homo sapiens
tttgtttttgcagggatcttagcaacatcaattgtgaagagcttggtccattgcctcctggatgggagatccgtaatacggcaacaggcagagtttatttygttgaccataacaacagaacaacacaatttacagatcctcggctgtctgctaacttgcatttagttttaaagtaagtttttgaaacaatacatgttaaaa

SEQ ID NO: 338369 - DNA, 201 bp, Homo sapiens
aacctggtgaaaaaggattttttccgtaagtaaattaactttaaatcttgtgtattgtatgtagatctttgggaacagcgttttcagaattctctggtttrggggtttctctattcagaagtattgtcagtgttattttattatgaatgcttcggttcagagccatttggcatcacattttttttttagaaggttttgtgc

SEQ ID NO: 338370 - DNA, 201 bp, Homo sapiens
tattaaaaacattgtccttccttctttggttacagtggagtctcttctgttttgccaggaaagttaacatattttttcttccatttttgttcatcatttayaaattagatggtatagattttagcaaatagatctcaagagctggattcaattagcagctttttaggacataaacattaaagggttagatggaaaagattg

SEQ ID NO: 338371 - DNA, 201 bp, Homo sapiens
ttcctgctgccctttggtagtatgtgtggattcattagcattcccctatccccagatcctgtggttaacttaccagttttattcttaagattttggagacwaatgcacgcacctgcagtgatttcatccacatttccttcatttgcaggtgctgcaggcccgagactctttaccatacaccagattgatgcctgcactaac

SEQ ID NO: 338372 - DNA, 201 bp, Homo sapiens
tatggatagctggcctgtggccctcatcatttgtaaaattgtttccaagagacagaacaaatgatttgtaaagcccttttttgataataaataaaatagaytggtaatttggagatttttccctattagtatatcatcttagtgtatataactgtctttgatctggacactctgaatgtttttgttatcagtgtttattaa

SEQ ID NO: 338373 - DNA, 201 bp, Homo sapiens
ggctgtttaatttgttcagccaataagtatttatcatttttgatctgtgacagatattatttttattacgtggtgccataaatgcagatataagaaattargaaaagcctagattgggccctgtagttttcctttcagaatttctattatgaaccttacattttaaaattattagtctttttcatctcttactgatgtgat

SEQ ID NO: 338374 - DNA, 201 bp, Homo sapiens
aggcgttgccaggtatggacttgcttgccagcttatgacatatggatctttgtacttacaaatttaagctacttcctgtggtgtaactttctcatcgacawttattttttgttattccctaatgtttgtatcactgaggatatcctaatagatatattcataatgaggttagggtggcactgctaccggacaagtattctg

SEQ ID NO: 338375 - DNA, 201 bp, Homo sapiens
ggtagagggtgtagtgagctgagatcgcgccactgtactccagcctgggcgacagagtctctatctaaaaaaaaaaaaaaactctctgtcagcggggcacratggctcacgcctgtaatcccagcgctttgggaggccgaggtgggtggatcacaaggtcaggagtttgagaccagcctggccaatatggtgaaaccccgt

SEQ ID NO: 338376 - DNA, 201 bp, Homo sapiens
atcgacaggtcatgaaaatgagaccaaaagatctctggaagcgattaatgataaaatttcgtggagaagaaggccttgactatggaggcgttgccaggtawggacttgcttgccagcttatgacatatggatctttgtacttacaaatttaagctacttcctgtggtgtaactttctcatcgacatttattttttgttatt

SEQ ID NO: 338377 - DNA, 201 bp, Homo sapiens
gcatattaccctgtgtaatatgctgttctctggtgatctagagactctggagcatgccctagagaaatactccctcctgactctattgaagagtaaaaatkttatgcttattctcaaaaagattaatgttgctgaaatatttcatttttattaaaattttcctgggtagtgcctaacgagtatatatactgttttcaattt

SEQ ID NO: 338378 - DNA, 201 bp, Homo sapiens
cctgttaatgaagaaaataaaaaagaatatgtcaggtaaacactcctgtgttctcaaggctgaattttttaaaatgttctagaatgttagtatgaacaaasttaaatatttagatagtactacttagtgttacaaaatccgcttcaggagaatttagtggcttatttagaacagacattttattatttctcacaattccat

SEQ ID NO: 338379 - DNA, 201 bp, Homo sapiens; identical to SEQ ID NO: 71226

SEQ ID NO: 338380 - DNA, 201 bp, Homo sapiens
gggaggatggtttgagcccagcaggcagaggttgcagtgagccaagattgtgccactgcactccaggagtttgagaccagcctgggcgatatggtgaaacmccatctccactaaaaatataaaaattagccaggcttggtggcgcgcacctataatccagctacttaggaggctgaggcaggagaatcgcctgaacccagg

SEQ ID NO: 338381 - DNA, 201 bp, Homo sapiens
tcacttacagcctggaactcctaggctcaagcagtcttcctgcttcagcctcctgagtagctaggacaatagttgctcaccactgtgcctggctaattaaraaaaaaagtttttaaggactgggtctcactgttgcccaggatggtcttgaactctgggtttcaagcagtcctctcacctcagcctccctggtagctggaa

SEQ ID NO: 338382 - DNA, 201 bp, Homo sapiens
tgcttgtggtcccagctacttgggacgtggaggtgggaggattgcttgaacataggtggtggaggttgcagtgagccaagatcgtgcccgtgcactctaacctgggtgatagaatgagactctgtccccaaaaaaaaaaaaatattggccaagcatggtggctcaccactgtaagcccaacactttggaaggccaaggtgg

SEQ ID NO: 338383 - DNA, 201 bp, Homo sapiens
ggatttctcggttgtgttcgtcttctttccaatgccatcaaccgcctcaaagacactggttgtgagtagatacgagtgcttttccaattaaaaaacatatrtgtgtgtgtgtgtatatgtatttgtgcatatacatatatacatgcactatatatgtatcctcaaatatatatttaaaaataatatatatatttgagtatg

SEQ ID NO: 338384 - DNA, 201 bp, Homo sapiens
ttgaagcggctcctgcctcagcctcttgagtagctggaattacaggcgcctgccaccatgcctggctaatttttgtgtatatgtatatttttagtagagayagggtttcaccatgagacagcttcccaagtagctgggatcacaggcacgccaccatgcccagctaatttttgtctttttggtagagttggagtttcgcca

SEQ ID NO: 338385 - DNA, 201 bp, Homo sapiens
gaggcaggcatgattcgtgctgtatggagtttaccacctccgcaattataagcaacattccaaacttaaacgagaacagtaaaatgtgataagtgtttataaaagtatgagcttctgtgaaaatacaagcggggaaagcttgagagaaacatgttctaaaaggcatccttcccttttgagaccaggagatgagtaggtgaa

SEQ ID NO: 338386 - DNA, 201 bp, Homo sapiens
cttccttctttggttacagtggagtctcttctgttttgccaggaaagttaacatattttttcttccatttttgttcatcatttataaattagatggtatakattttagcaaatagatctcaagagctggattcaattagcagctttttaggacataaacattaaagggttagatggaaaagattgttttgactgactggat

SEQ ID NO: 338387 - DNA, 201 bp, Homo sapiens
ttcattaaatttttaaattcaagtcacgggctatgtgtgctgtttgatttcatgtgatagtagatgattttcaggggcttgattaaaagaaataagatatatatatatatatatatatatatatatatatatattctttttagagacaggatcttgccctgtcacccaggctatagtagagtggcacagtcatagctcact

SEQ ID NO: 338388 - DNA, 201 bp, Homo sapiens
tgactggataaatgacagggctgtgtttgatgtgcgtccaggaattggtctggagctggtgcccaacttctcagtccatcttgagaagccaaataaaatayttaacctaggcctcattttgtttaaaaaaaaaaaaaaaaaaagttgattctttgtgaagaccttaagaaatgtttggcatacctttagactaagtgttta

SEQ ID NO: 338389 - DNA, 201 bp, Homo sapiens
tcattaaatttttaaattcaagtcacgggctatgtgtgctgtttgatttcatgtgatagtagatgattttcaggggcttgattaaaagaaataagatatatatatatatatatatatatatatatatatatattctttttagagacaggatcttgccctgtcacccaggctatagtagagtggcacagtcatagctcactg

SEQ ID NO: 338390 - DNA, 201 bp, Homo sapiens
ctgatattatatttactacaagaattcttttctatgtgtgaaaattcgttttatataaatggagaaacactgtagctctgtattgaaatgttccaaggatyattgtggtaattctgctttccctaatcttaaatccaaccaaaattatgttttcaataattcccattaattgttatttagcattacatgtgtgtatttgta

SEQ ID NO: 338391 - DNA, 201 bp, Homo sapiens
ttgaactcctgggctcaagcagtcctccagcctcagcctcttgagtagctgggtctacaggcatttgccaccaaaccttgctagtttttaatttttttaattttttttttttttttttgtagaggcctggcatggtggcgtgcgcctgtaatcccagctacttgggaggctgaggcaggagaatggctggaacctgggagg

SEQ ID NO: 338392 - DNA, 201 bp, Homo sapiens
cattaaatgacaagatatttacttaaaagcagggctaatatgattgttgaggtaaattactatatctgttgaaagaggagaattctgaatcttttgcagarcacccttctgtaacctagttttcaattaaccgttttgtgaacctgtgtcaccaataattgctttaactggactaagattttttttttttttttttttttt

SEQ ID NO: 338393 - DNA, 201 bp, Homo sapiens
aaaaagtgcttgctattggcttttactatttattcttctcatttttggtatgaggattctctacctcctcttctcccgtaggcctccctcaaatagaaacaaaacacccaacacattcaaattacatttgcaagtaaaatcagaaaaataagtcatttttgagtgaaagagctctttattctagttattggcatgtatgct

SEQ ID NO: 338394 - DNA, 201 bp, Homo sapiens
ttagtttgtttatggatagctggcctgtggccctcatcatttgtaaaattgtttccaagagacagaacaaatgatttgtaaagcccttttttgataataartaaaatagattggtaatttggagatttttccctattagtatatcatcttagtgtatataactgtctttgatctggacactctgaatgtttttgttatcag

SEQ ID NO: 338395 - DNA, 201 bp, Homo sapiens
ttttgcagcatgaatgaaatgaattgcctaaaattccttcattaaatgacaagatatttacttaaaagcagggctaatatgattgttgaggtaaattactrtatctgttgaaagaggagaattctgaatcttttgcagagcacccttctgtaacctagttttcaattaaccgttttgtgaacctgtgtcaccaataattgc

SEQ ID NO: 338396 - DNA, 201 bp, Homo sapiens
cagtgtttattgagcacttgctgtgtaccaggtactggtctcatgttctctgtgtttcaatttgtttaatctttaaaacaacaccatgaggtggctcttaktatccttctgtcctcatgtttacagatgagctatctgaagcaaagagaagttaagtagtttttagggtcacaagttcataagggatagcaccaggttcaa

SEQ ID NO: 338397 - DNA, 201 bp, Homo sapiens; identical to SEQ ID NO: 71229

SEQ ID NO: 338398 - DNA, 201 bp, Homo sapiens
cctcccgagtagctgggattacaggcgcatgctaccacgcccggctaatttttgtatttttaatagagacagggtttcaccatgttggccagcctggtctygaactcctaacctcaggtgatctgcctaccttggcctcccaaaatgctagcctcccaaaatgctggaattacagacgtgagacaccgtgccagccaatag

SEQ ID NO: 338399 - DNA, 201 bp, Homo sapiens
tgagcctgggcaacatggcaagaccccatctctgcaaaaaaattttagacattagcaaggcatggtggtgtgcgcctgtagtcccaggtactcagaggttragatgggaggatctcttgagcccagaaaatttaactggagtctgcagtgagtcgtgtttgcgccactccattccagcctaagtgacagagtgagatcatc

SEQ ID NO: 338400 - DNA, 201 bp, Homo sapiens
ttagtagtttaccacttttcatcaacattgaactgtgtcacacctcagggttcatttatccccattagtctgagatttattgttagacttgaggctaaacygttaatgttagatgcttgtaagatgcggtgttgctaaagtagagatttataataataattaccagatctgaaaatacatgtgattatacgaaatcctgcc

SEQ ID NO: 338401 - DNA, 201 bp, Homo sapiens
aggcaggcatgattcgtgctgtatggagtttaccacctccgcaattataagcaacattccaaacttaaacgagaacagtaaaatgtgataagtgtttataaaagtatgagcttctgtgaaaatacaagcggggaaagcttgagagaaacatgttctaaaaggcatccttcccttttgagaccaggagatgagtaggtgaag

SEQ ID NO: 338402 - DNA, 201 bp, Homo sapiens
gtaagaacgtattttaagcactctttagaccatcaaagagccatttcacctaggatttctttgatttttaagaaatttttaccttttaaaaatagtttatrtaaaagtttgactcttctgatagttacttcagttttaacgtttagtagaaagtcctgcctactgctctgcaatcccacctcagttctcccctccctcacc

SEQ ID NO: 338403 - DNA, 201 bp, Homo sapiens
aatgtattggttcattaattgtgacaaatgtcccatattaatgttagatgttcatgataggataagtgagtgtggatatgtgggaacactgtactaacttwgtaacttttctgtaaatctgaaactattctaaaataaaaagtttattacatttatgaattccctattaacccaggaattatttcaaaaatatatagttgt

SEQ ID NO: 338404 - DNA, 201 bp, Homo sapiens
actgttaattgatagaaaatgatttgtctgtatccttgaaagattgtactgtattatttaaaaaaaaaccctctaatcttcccatttgacaaatgtgacaraaggctgtgatgaatcagtagcatttaaagtactgacacatacctgtattttgcaggaaggagactctaattttggattccttggtggaggaaaataaaa

SEQ ID NO: 338405 - DNA, 201 bp, Homo sapiens
tgtctaaaacaaatggataatttgatggattattttaacgaaaacataagtgtaactgtcttgcaggtcaagaatctgactccacactctctccctccccsagaggtcctagccagaaactaccctgacttttatggaaatcatttccttcttttctatagtttttatcccctaaatataaatccctaattgacatagttt

SEQ ID NO: 338406 - DNA, 201 bp, Homo sapiens
cagagcaggtcaggcaggacgaggccaggaggctttggttcgacacagttgatccagaagttggcacagctggcgtgatactggtgccctccataggccarcttgaaactgtctgtttctgagttgaatgcctgccagaaataaacagagatgtggggcaagtcaggctttttctgcatctcagagcttttcagcaaccaa

SEQ ID NO: 338407 - DNA, 201 bp, Homo sapiens
caggggaacaaaggtgctgtattctttgcagagttgtgcgtgtgtctggaagctccactcccttgagctgcgatttggttattgttagttgttgtggactyataaaggcccccagtcttggttcccttgagaaatgcagggaaggaggcacccccacagtgaacgcctcttcttcgccagagacgcctgagaattcacatc

SEQ ID NO: 338408 - DNA, 201 bp, Homo sapiens
agtcaatgcttcacagaggagttgttcagagcaggtcaggcaggacgaggccaggaggctttggttcgacacagttgatccagaagttggcacagctggcrtgatactggtgccctccataggccagcttgaaactgtctgtttctgagttgaatgcctgccagaaataaacagagatgtggggcaagtcaggctttttct

SEQ ID NO: 338409 - DNA, 201 bp, Homo sapiens
aattttaaaagaccctcagagtcacacagcaaatgagccctcaaatgcccgtgtcccgcctgcgctccggagaacccctgccctgcctcggggactcgggmggtgggtgtgggctccgagactcggacggcaccttggcgtggcgagagcaggtggagatgcgcacggaggttgcatgttcacctccgggtctcgggcgcc

SEQ ID NO: 338410 - DNA, 201 bp, Homo sapiens
tcagcccggcttctacagggaacctgggctcctttgcctcaggaaggcaagtggcttcccagacagcgtaatttgggaggatgcatcgctctgccacccakgctggagtgcaatggcgcgatctcagctcactgcagcctcttcctcccgggttcaagcgattctcttggctcagcctccctactagctgggattataggc

SEQ ID NO: 338411 - DNA, 201 bp, Homo sapiens
acacctggtgcctcagtcttccagggggaatgcagacagagccacagcactcacctctgcagcagttctcagacgtgcccccgacccgcagcctcacctcraaggcaactcttcgagccccactctggagggacggaatcagaagctggggaaaggtccagcagtctgtgcgcacagccctctgggggattctgaggcatg

SEQ ID NO: 338412 - DNA, 201 bp, Homo sapiens
agtcttccagggggaatgcagacagagccacagcactcacctctgcagcagttctcagacgtgcccccgacccgcagcctcacctcaaaggcaactcttcsagccccactctggagggacggaatcagaagctggggaaaggtccagcagtctgtgcgcacagccctctgggggattctgaggcatgctcaggtttgagag

SEQ ID NO: 338413 - DNA, 201 bp, Homo sapiens
gccctaaccgcaaccccgcgccgcgccgcgccggtaggggacccgcaggcccgggggtgggggttgtggggaaggtgttggggtggggcgggagggcgggwcttcgcgcttcgggtccctgggcgcagggggacccagaggcccgcgcgaccccgcctctggaaactttgtgccggcgcccccacctgctccccggcggtc

SEQ ID NO: 338414 - DNA, 201 bp, Homo sapiens
ggaacttcctgattggctgtgtccttgcctccttgtcttcccgcagatttgatttgtatccactgtcaccagcactgctcacttaggactttctggatccrgacccaggcagcgcacactggactcttgaggaagtgagtaccccaccactgcctgcctgttgaacccggggaggctcttgtctgactgaaatcactgcag

SEQ ID NO: 338415 - DNA, 201 bp, Homo sapiens
gggcgggtcttcgcgcttcgggtccctgggcgcagggggacccagaggcccgcgcgaccccgcctctggaaactttgtgccggcgcccccacctgctcccyggcggtccttgactcttcggggcggcccgcggaggagaggcccgagaccctccgcagcgcaccctcgccggccctgagcgtgcgccccctgccgctcccc

SEQ ID NO: 338416 - DNA, 201 bp, Homo sapiens
tgataaaacgggcagcaccgctcatcatcatcagatacatggtagaaggtgaatgagctcgcccctgtcccactcctgggacactcctgggcactttccaygtgcccccaagtaaccactgtcctagggcgtgcctttcttctgcatggagggcatcctgggcgtctgcccgtgcaatgggaacccgctgcggcactgctc

SEQ ID NO: 338417 - DNA, 201 bp, Homo sapiens
cgcgcgaccccgcctctggaaactttgtgccggcgcccccacctgctccccggcggtccttgactcttcggggcggcccgcggaggagaggcccgagaccytccgcagcgcaccctcgccggccctgagcgtgcgccccctgccgctcccccgccgcgccgcgccgcccccgcgaccctgtccctgtgccccggggctcca

SEQ ID NO: 338418 - DNA, 201 bp, Homo sapiens
tggatgttgccagtggtaccagccagtgttatggtaactgggcatcccagaggctagggaaggaggagcgacttacaaatgcagttttaccatgcagagatttttttttttttaaaaccaccttgtactttctatccagcaggacctccggacatttagtgtgtgttaactcgttagctgttcattatcgttttataagag

SEQ ID NO: 338419 - DNA, 201 bp, Homo sapiens
cgcctcggcctcccaaaatgctgggattacaggcgtgagccaccgcacccagcctttaaatcttttaaatgtatttttctccaaattttcctttgcctgaraaagtagaagtagcttagagcagagtttttgtcgtttttgttcattttctttgtaagagatggagtctagcagtgtggctcaggctggccttgaactgct

SEQ ID NO: 338420 - DNA, 201 bp, Homo sapiens; identical to SEQ ID NO: 71232

SEQ ID NO: 338421 - DNA, 201 bp, Homo sapiens; identical to SEQ ID NO: 71235

SEQ ID NO: 338422 - DNA, 201 bp, Homo sapiens
taaatacagctgtggacttttgcgagctttttattggatatttcacacccgaagaccatcttgtaccaccaacagtttaggattcttagagattactcccyagactgtagacgtaaagcacaatcacgtcgacctgaccttatgttccttaactcctttcttgctgcagtttcccgccccctccccgccccagccagtgaa

SEQ ID NO: 338423 - DNA, 201 bp, Homo sapiens
atagtcgacacacatcttgccctgcattctgacatttgctggaatggtctacagcaggctacaatgctcccttctgaatggcaaatgtctgaaaatgtcaaagtttattaactgttcacaaaggcaggcatttgaccttgaaggtgttaaagggaattttttatttttgagacagagtttcgctcttgttgcccaggctgg

SEQ ID NO: 338424 - DNA, 201 bp, Homo sapiens
accgtcctccctgacattctacagatcacttaagagtcagagaggccgaggccagccggcagctccatgcctgagactcagctctgccacaaagttaagtmacactggacaagtcacagtttctctccgctcatttccttcctgctctctaaaaccaggggaacaaaggtgctgtattctttgcagagttgtgcgtgtgtc

SEQ ID NO: 338425 - DNA, 201 bp, Homo sapiens
gcatgctattttaaaagatttatccatatcgttgcctatgcctgtagtttttgtgttttaatttttttagagacaaggtctcactatattgcccaggctgrtcttgaactcctgggctcaagggatcctcctgcctgggcctcccaaagtgctgggattacaggtgtgagccaccacacccagcccagttagtacattttt

SEQ ID NO: 338426 - DNA, 201 bp, Homo sapiens
ccatgttgaaacctcagtggacgagaaggttcttttgaagttcatatgcaactgctgggtttacttctgtctttgtcccagaacagtttcagcatcaatgrcctagggcaagtttttttgtttgtttgtttgtttgttttgactcctatgtctttgagtgtgtgggtacatatgagaaaactccctaactagagcatgctg

SEQ ID NO: 338427 - DNA, 201 bp, Homo sapiens
taaacacccatggcctctccgtgtggtagctctgttgagctagtttgggcttcctcacagcatggcagctgggttccaagggcaagtcctaagagaacaargtagcagtgtgcgacatgtttgtgctctggcctcggaagcatcatttctactgtatttttttgtttgtttgttgctttaaagacagcgtcgttctgtcgc

SEQ ID NO: 338428 - DNA, 201 bp, Homo sapiens
cagaacagcatgggggaaaccgcccccacctggtcctgcccttgacacgtggggattatgggaattacaattcaaggtgagatttgagtggggacacagarcctaaccatatcagttggcaaactttcttttttttattttttaaatttttttattttaagagatggggtctcactgtttggctcagtctggagtacagtg

SEQ ID NO: 338429 - DNA, 201 bp, Homo sapiens
gagccaccgcacccggcctagattgtatcttaaatccaaatgactactgtattatatgaaagtaatcagtttttttttttttttacaaaaattacacttayggagtttcttattccatttatcctcctagaaagtacaggagatattttttccacaatatcagattactcttaataatatttttagattccttctaaaaag

SEQ ID NO: 338430 - DNA, 201 bp, Homo sapiens
acccgaccctctagaagtgtttttgtttgtttgtttgttttttgttttttgagacagagtttcgctctttcacgcaggctggagtgaactggcgcgatctyggctcactgcaacctccatccccccgggttcaagcgattctcctgcctcagcctcctgagtagctgggattataggtgcccaccaccacacctggctaat

SEQ ID NO: 338431 - DNA, 201 bp, Homo sapiens
gcacccggcctagattgtatcttaaatccaaatgactactgtattatatgaaagtaatcagtttttttttttttttacaaaaattacacttacggagtttyttattccatttatcctcctagaaagtacaggagatattttttccacaatatcagattactcttaataatatttttagattccttctaaaaaggtacttac

SEQ ID NO: 338432 - DNA, 201 bp, Homo sapiens
tttgtttgtttgttttttgttttttgagacagagtttcgctctttcacgcaggctggagtgaactggcgcgatctcggctcactgcaacctccatcccccygggttcaagcgattctcctgcctcagcctcctgagtagctgggattataggtgcccaccaccacacctggctaatttttatatttttagtagagacgggg

SEQ ID NO: 338433 - DNA, 201 bp, Homo sapiens
gaggcaggagaatctcttgaacctgggaggtggaggttgcagtgagctgagattgcgccactgcactccagcctgggtgacagagccagactccatctcaatatatatatatatatatatgtatgtataaataaatatatatgtatatttataaacttttttttttcaaaaaccattttaaaatgttaaacatacgtgtca

SEQ ID NO: 338434 - DNA, 201 bp, Homo sapiens
aggcaggagaatctcttgaacctgggaggtggaggttgcagtgagctgagattgcgccactgcactccagcctgggtgacagagccagactccatctcaatatatatatatatatatatgtatgtataaataaatatatatgtatatttataaacttttttttttcaaaaaccattttaaaatgttaaacatacgtgtcat

SEQ ID NO: 338435 - DNA, 201 bp, Homo sapiens
ctttcatcaatcttttttttttttttttggaacagatgagtagttacaggaaattttaaatatgcaaaatgaagtactaaaaataagtggctagtacctaratgttttttaaggctcttgaatgaatcctgcctctggtgaatgcttccattgtgcccagccctaaatgtgtaggacagtgtagtgtgcaggaacccaggc

SEQ ID NO: 338436 - DNA, 201 bp, Homo sapiens; identical to SEQ ID NO: 71234

SEQ ID NO: 338437 - DNA, 201 bp, Homo sapiens
catagtcgacacacatcttgccctgcattctgacatttgctggaatggtctacagcaggctacaatgctcccttctgaatggcaaatgtctgaaaatgtcaaagtttattaactgttcacaaaggcaggcatttgaccttgaaggtgttaaagggaattttttatttttgagacagagtttcgctcttgttgcccaggctg

SEQ ID NO: 338438 - DNA, 201 bp, Homo sapiens
ataacataaatgaataaaatagggccaacatggaaaagaaaacaaaatgaaggaaaatgtcaaattgccatcctgaacaccagcaccgcctgtaattagcrttcctggctgcagccacatctgcggtcctgctcctcatgaagccgtcctccgtgccatgtcccggccatgcctgtccttagcttcctggtgcacactgtc

SEQ ID NO: 338439 - DNA, 201 bp, Homo sapiens
ccactgcactccagcctgggcaacagagtaagactctgtctcaaaaaaaaaaaaaaaaaagaaaagaaaattattgaaagcaaattaaccagcatcataaytcaccattcaaaaatcattgctcatactttatcttttataatgcttagaaattaagtattatcaagtcaaagcttccttgggccatttctcttcccttcc

SEQ ID NO: 338440 - DNA, 201 bp, Homo sapiens
ggcctcccaaagtgctgggattacaggcgtgagccaccgcacccggcctagattgtatcttaaatccaaatgactactgtattatatgaaagtaatcagtttttttttttttttacaaaaattacacttacggagtttcttattccatttatcctcctagaaagtacaggagatattttttccacaatatcagattactct

SEQ ID NO: 338441 - DNA, 201 bp, Homo sapiens; identical to SEQ ID NO: 71233

SEQ ID NO: 338442 - DNA, 201 bp, Homo sapiens
ccatcaggtctcatgcaactcactcaaaatcaccagaacagcatgggggaaaccgcccccacctggtcctgcccttgacacgtggggattatgggaattayaattcaaggtgagatttgagtggggacacagagcctaaccatatcagttggcaaactttcttttttttattttttaaatttttttattttaagagatggg

SEQ ID NO: 338443 - DNA, 201 bp, Homo sapiens
ttcaagcctccaggtggtattgatgctgctggggcttggatcacacttgctaaatggtgagggctgtagaaaagggctgtattctccattccaatggagartagcccccattccaagtctaaaacaggaggctcttttttttttagatggagtttctcatcacccaggctggagtgcaatggagcaatctcggctcactgc

SEQ ID NO: 338444 - DNA, 201 bp, Homo sapiens
ggcccatgcctgtaatcccagcagcactttgagaggccaaggtgggcagatcacctgaggtcaggagtttgagaccagcctggccaacatggtgaaacccygtctctactaaaaatacaaaaattagccaggtgtggtggtgtatgcctgtaatcccagctactcgggaggctgaggcaggagaatcacttgaacccggga

SEQ ID NO: 338445 - DNA, 201 bp, Homo sapiens; identical to SEQ ID NO: 71230

SEQ ID NO: 338446 - DNA, 201 bp, Homo sapiens
tctgaagcactgttgtggccattttctgctgttgactgaacatgaaaagaaaagccgtagatagaatttcagttaactgctgattctggtggttgtcatctttttttttttttttttttttaaagaaaagtaacctccgtggcattaggatggatgctgtctctgattaggccatgaccccatgtagcaattctgagtgtc

SEQ ID NO: 338447 - DNA, 201 bp, Homo sapiens
ggagcgcgccgccgctttttgcatctccccgaggtttctggtgcatggatagaagcaacttgactttcagcgatgccaagtgtccaacttgagtctttctytgcggtggtagatgggtgtgcgcggtgctaacatctgtctttttatttctcctaagtacccttgctccggagcgaagttgagttgttgtttgtaaagagg

SEQ ID NO: 338448 - DNA, 201 bp, Homo sapiens
ccgtatttcagaaaatcttaagtagagataagtgagcaagcttctggtgccacgtgcagtttgggtgggacaattttacctgaagtcctgcagactggccrtggggatgacgggggccccgtcccttgcggtgttcttcatatcgattcagggaagcgaactgtgcagtgctcgcattctatttattggtccctgtcaccc

SEQ ID NO: 338449 - DNA, 201 bp, Homo sapiens
tttcccgccccctccccgccccagccagtgaaatgtacattttggtagactttgaatggatggatccattgtggtccaattgtatgactgagccacaaatrgacaactcatggaaggacggttctggtcccagtggggctactaattttcaatgtagagtctgggaaagcttcttaacctccatttacctctgattctctg

SEQ ID NO: 338450 - DNA, 201 bp, Homo sapiens
agagaacaaggtagcagtgtgcgacatgtttgtgctctggcctcggaagcatcatttctactgtatttttttgtttgtttgttgctttaaagacagcgtcrttctgtcgcctaggttggagtgcagtggcgccatcgtagccccctacaaccttgaactcctgagctgaagcggtcgtcctgcctcagcctcccaaagtgc

SEQ ID NO: 338451 - DNA, 201 bp, Homo sapiens
tctcactgtgttgcccaggctggtcttctggtcttgaactcctgggcttaagcaatcctcccacctcagcctcccaaagtgctgggattacatgtatgagycaccatgcccagccacccccccccaccccacttttttttttttttttttttttggacaatcaccagagagctgaattttacattgatttcacatgtttgt

SEQ ID NO: 338452 - DNA, 201 bp, Homo sapiens; identical to SEQ ID NO: 71236

SEQ ID NO: 338453 - DNA, 201 bp, Homo sapiens
tcttgaactcctgggcttaagcaatcctcccacctcagcctcccaaagtgctgggattacatgtatgagccaccatgcccagccacccccccccaccccasttttttttttttttttttttttggacaatcaccagagagctgaattttacattgatttcacatgtttgtgtcttaggtgacttttcccaactgttaattg

SEQ ID NO: 338454 - DNA, 201 bp, Homo sapiens
acattgatttcacatgtttgtgtcttaggtgacttttcccaactgttaattgatagaaaatgatttgtctgtatccttgaaagattgtactgtattatttaaaaaaaaaccctctaatcttcccatttgacaaatgtgacagaaggctgtgatgaatcagtagcatttaaagtactgacacatacctgtattttgcaggaa

SEQ ID NO: 338455 - DNA, 201 bp, Homo sapiens
tgaggcacaagaatcgcttgaacctgagaagcagttgttgtagtgagccaagatggtgccactgtactccagcctgggcggcagagggagattctgtttcaaaaaaaaaaaaaaggaattttatattttaggtgtgtcacccttttcaaatttaatgatacatggtcttagcatttttataaaataatgaagcttcaactg

SEQ ID NO: 338456 - DNA, 201 bp, Homo sapiens
gaggctgaggcaggagaatggcttgaacctgggaggcggaggttgctgtgagccgagatcgcgccattgcactcaagcctgggcaacaagagcgaaactcygtctcaaaaaaagataaaagtggaattactttggttgaactttaatggttcaatttatgtgtagagcccaggacccgccggtatctggcagtgccctttc

SEQ ID NO: 338457 - DNA, 201 bp, Homo sapiens
ttttttatttatttacttattttttgagacagagtctcggtctgtcgcccaggctggagtgcagtggtgtgatctcggctcactgcaacctccgcttcccrggttcaagtgattcttctgccccagcctcccgaacagctgggattacaggcatgcaccacctcgcctggctaatttttgtatttttggtagggacggttt

SEQ ID NO: 338458 - DNA, 201 bp, Homo sapiens
caccactgcactccagcctgggcaacagtctaagaccctgtctcaagaagactctgtctcaagaagaccctgtctcaagaaaaaaaagaaaaatccgaacycaaatataaaatagtatattccaaaatatgtatttagaagagacatgtatttagaggctagctgagtgtgatggctcatacctgtaatcccaacacttta

SEQ ID NO: 338459 - DNA, 201 bp, Homo sapiens
ctttaaaacagaaaaacatattaagaagttaaaaatcaacggagggcaggcgtggtgactcacacctgtaatcccagcactttgagaggctgaggtgggcrgatcacttgaggtcaggagttcgagaccaaccttgccaacatgttgaaaccccgtctctactaaaaatacagaaattaggcgggcgtggtggtgcatgcc

SEQ ID NO: 338460 - DNA, 201 bp, Homo sapiens
ctttcagaatgtatttcaaatgtatactgcaagtgaagcagtatccaaggaaaaataaggaagttccgtgatccctaattggtacttactcatattttatkgaaataagcagaaatgtttggttcagaaagagagagagagaagactcatatcttagaactgtcttgtctcatgtatgttgtgagatctcaatgcacatgc

SEQ ID NO: 338461 - DNA, 201 bp, Homo sapiens
gacggagtttcgctgttgtcacccaggctggagtgcagtggcgtgatctcggctcactgcaacctccccctcctgcgttcaagtgattctcctgcctcagcctcctgagtagctgggattaggcgcccaccaccacatccagctaattttttatttttagtagaggtggggtttcaccatgttggccagtctggtcttaaa

SEQ ID NO: 338462 - DNA, 201 bp, Homo sapiens
gggttttgtggatctatcaaggtatttaagcacaaaaatagttttatatactcagatttttgtttgaaatttggaaattattcaaaggaaatacttttgayatgaggataacaggtatgctgctttttaaactcattgataaacatagccaatgtgttgtcactgtgtgctcatggtatttttatgtggttcatgtggaca

SEQ ID NO: 338463 - DNA, 201 bp, Homo sapiens
agaagaagtgtcctgggccacacataaaatacattaacgatagctgatgagctaaggaataaaaaacaaacaaactcataatgtcttaaaaaagtttacgratttgtattgcgctgcattcaaagccgtcctgggctgcatgtgactcacgagcgacaggttggataagcttggcctaatgcttcctggttgcttacttta

SEQ ID NO: 338464 - DNA, 201 bp, Homo sapiens
cacttttgtttgttcctagggagtcatcaagctttggtgtatgtgttggccggttctgaagtcttgaagaagctctgctgaggaagaccaaagcagcactmgttgccaattagggaatggaccgtttgggttcctttagcagtaagtacagtgggaacaagtctcaggtgacttattattattttttttttgagatggact

SEQ ID NO: 338465 - DNA, 201 bp, Homo sapiens
gtcatagagtaaatgattgtttaacttttaaataaacgattggcaagttttccaaagcatttatatcattttacacctctgtcgacaatatatgagagttytgattgcttcatgtgcttgccaacatttggcattgtcagtttcattcattttagctattttagtcagtgcagtgtggtattgtggtattacaattttttt

SEQ ID NO: 338466 - DNA, 201 bp, Homo sapiens
tgaggcaggtggatcccctgaggtcaagagttcaagaccagcccggtcaacatggttcaacatggtgaaatcccatctccacaaaaataaaaaaaaattakctgggcatgatggcgggtgcctgtaatcccagctacttgggaggctgaggcaggagaatcttttttttttttttgagacgaagtctcgctgtgtcaccag

SEQ ID NO: 338467 - DNA, 201 bp, Homo sapiens
aaattctgttgtgaatgtttctagctcagtgtctggcatctcatagcagctctagtaaagaaatgtttatgttaagtgtttggtaaaccgtaaaatattakgcaaaataaaactatatttctgtatattttgaatgttctgaagtcacttcttattatttacagcaattatttctgtagggcctagctcacaggaaaattt

SEQ ID NO: 338468 - DNA, 201 bp, Homo sapiens
aaatacaagtaccacttctctctttttcccacaatcctctaggcaggatgtagccaatcaaatgtgcaccaagaccaaggaggagtgtgagaagcactatrtgaagcatttcatcaataaccctctgtttgcatctaccctgctgaacctgaaacaagcagaggaagcaaaaactgctgacacagccattccatttcactg

SEQ ID NO: 338469 - DNA, 201 bp, Homo sapiens
cagtagcagataaagagtgatttgatgacttggacagctaatgatatcacggaagataggaggagttagtatggcagctattgagagtcaggatcgacccrgcatggtggcttgtgcctgtaatcccagcaccttgggaggctgaggcgggtaaatcacttgaggccaggagttcaagaccagcctggccaacatggcgaa

SEQ ID NO: 338470 - DNA, 201 bp, Homo sapiens
gcctgtgttccagtaaaactttatgtacaaaaacagacagtaggctgaatagtagtttactgattcctgtactatatccacaagtatataaagaatgatgratgtgtataaaaactatatgttccttgctcagctatggaattaaaagacatgtgaatgtagccacaagtctcttgatttatcatctaattcacaacttga

SEQ ID NO: 338471 - DNA, 201 bp, Homo sapiens
tcaagtttattaaccctttattgaatttgaatgatggttaaaaagcctcactcggccacacatggtggctcacgcctgtaatcccagcactttgggaggcygaggcaggcagatcacgaggtcaagagattgagaccatcatggccaacatggtgaaacgccatctctactgaaaatacaaaaattagctgggcatggtgg

SEQ ID NO: 338472 - DNA, 201 bp, Homo sapiens
ctattttttcttttttttcttttccacgacagagtcttgctctatcacccaggctggagtgcagtggcgtgatctcggttcactgcaagctgtgcctctcrggttcaagggattctcctgcttcaagggattctcctgcttcaacctcccgagtagctgtggttacaggtgcatgccaccattcccagctaattttttata

SEQ ID NO: 338473 - DNA, 201 bp, Homo sapiens
atcccttgaacccgggaggcagaggttgcagtgagccaagcgcccctgcactccagcctgggcaacagagcgagactccatctcaaaaaaagaaatgagtsgaaaggtaggcataatcaagacaataaatagtcttgtgtaacatgcaagagtttgaactgtacgtggatgggaagccactgaagaattataagcaaggga

SEQ ID NO: 338474 - DNA, 201 bp, Homo sapiens
atgcctctcctacaagatagcatgaagatgacaggagagacaagatgcctgagctagggaataggattagggatgaagggatgaatttgagagatgtaagygttaagtgcagtgtggctaagactcatcgactatggaggagaaggaggaagaatccagattgagttctgtcttggatagctatctttactctgatgcagt

SEQ ID NO: 338475 - DNA, 201 bp, Homo sapiens
tactttttgagagtggaaatatgagcaattcttactttctttgtacttttctgttggtttttttccccttatttcttacagatagaaaaggaatacaaatrtttaatatttaatacttagtattaagaaaaggatttcagactagggaaaatctacttgggtcttggagaaataattgtgaaagcagttttgcaaaggaaa

SEQ ID NO: 338476 - DNA, 201 bp, Homo sapiens
cccacacaaagatttttgccttgaatcatggaatttgtttaataaatttggtttgcatggttcattatagagacctgggacacaatggagggataattgtrttgcagccataccagaaggctttcagaatgtatttcaaatgtatactgcaagtgaagcagtatccaaggaaaaataaggaagttccgtgatccctaattg

SEQ ID NO: 338477 - DNA, 201 bp, Homo sapiens
agataacttgcctgagatcatacagccagcaagaggtagagtcatccccaagtctgtgttcttaatactgtacaatacttagctgtctttacaatcttgatttttttttttttttttgagacagggtcacgccctgttgcccatgctggagtgcagtggcacaatcatggctcactgcagcctcaacctcctgggctcaaa

SEQ ID NO: 338478 - DNA, 201 bp, Homo sapiens
ttaatgtagcatagtgccaagttttgcattactcatattttcttctagcgttgttactatctggcattcatttcttaaccctagaggtcttctggttattaaaaaaaaaaaaaaaacctgtgggagttttttgcttctgaagtttgtttttttgtttgtttgtttgtttgtttgtttgtttttttgagacggagtctcact

SEQ ID NO: 338479 - DNA, 201 bp, Homo sapiens
tctcttgatttatcatctaattcacaacttgaaagatagtttggccaaatgcggtagcttacacctgtaaatcccagcactttgggaggctgaggcaggcrgattgcttgagctcaggagtttgagaccagcctgggcaacatggcaaaacgctgtttcttcaacaacaacaacaaaaaaaacccgaaaccaaaaattaac

SEQ ID NO: 338480 - DNA, 201 bp, Homo sapiens
ggacttgagagacattgattttgttgaagatgactcggacattttacatggtaacagtttattttgtcaaatgtttatcgagcgccaactgtgtgatgacrctgtcttgggtgctaggaattgaaggatgaatagaacatgtcccctgcccttatagaattcagaaatctagtggttaagttgctgaacttactgtgttgt

SEQ ID NO: 338481 - DNA, 201 bp, Homo sapiens
cttgtgtaacatgcaagagtttgaactgtacgtggatgggaagccactgaagaattataagcaagggaattacaccattacattgtgctttaaaatatttytcaagtaccatttggaagaggtgagttacagtaaggcaagaatggagtcgataagtgagtaatgatgcctctcctacaagatagcatgaagatgacagga

SEQ ID NO: 338482 - DNA, 201 bp, Homo sapiens
ataataatagcaactatcatctattgagcacttaccatgtgctactctactaagtgctttatgtaaataaaattaattttttgtaaacctaaagtaacttytacatgaaaatagatatttcctattagaatggctgccttgaaaagttctatacttattccaacaacataatcattatttaaaacatttttgtaaattgtc

SEQ ID NO: 338483 - DNA, 201 bp, Homo sapiens
acccagtctcaccggggcttttggaaatcaccttgtttgatatgacctaagtttaaattcctcttcttcgttgtagtgattccggcctgagtccttccatkccaatggcttcgaattcaggtaattatttctcaggccagaacaagtcttaattgtgaagtttgcatcgtaggggttatagtgacccagcaatcttccttc

SEQ ID NO: 338484 - DNA, 201 bp, Homo sapiens
cctaccaccattcctcttttggggaaagcacatgtggtatgtagatgacataataatagcaactatcatctattgagcacttaccatgtgctactctactragtgctttatgtaaataaaattaattttttgtaaacctaaagtaacttttacatgaaaatagatatttcctattagaatggctgccttgaaaagttctat

SEQ ID NO: 338485 - DNA, 201 bp, Homo sapiens
gaaaaaaaaaaatagctgtcataaatgaaagtctgtatcgttagtccaagagtagatagaactaacctaattactgattgaaacgacccaagtagcagttsgagagttactgactgctccaatctaccagttattgttagtcagttttactctccatcttctttgcagatacatctttggattagttgtttggtcagtagt

SEQ ID NO: 338486 - DNA, 201 bp, Homo sapiens
tcaccatgttggccaggctggtctcgaactcctgacctcaagtgatccttccgcctcggcctcccaaagtgctgggattacaggcgtgagccaccacgccyggccctactatttttttattttttgagatggcgtttctttcgcccaggctggagtgcaatggcgccatctcaacacactgcaacttctgcctcccaggtt

SEQ ID NO: 338487 - DNA, 201 bp, Homo sapiens; identical to SEQ ID NO: 71262

SEQ ID NO: 338488 - DNA, 201 bp, Homo sapiens
gagacaggaaaattgcttgaacctggggaggcagaggttacagtgagctgagatcacaccactgcactccagcctgggccacagagcaagactccatctcaaaaaaaaaaaaaagacagtgaggtggctgggcgcggtggctcatgcatgtaatcccagcactttgggaggccgaggcgggtggatcacctgaggtcaaga

SEQ ID NO: 338489 - DNA, 201 bp, Homo sapiens
tatccatgttggtcaggctgatctcgaactcctgacctcaggtgatccacccacctcagcctcccaaagcgctgggattacaggtgtgagccaccacgccyggcaatagttggcttcttaacacagccctgtgggtgcaacatagccttatggatgtaagttcagcctagtataatggctctttaacagtggaaaccattt

SEQ ID NO: 338490 - DNA, 201 bp, Homo sapiens
gccatacgctatctgatgatccttggtgattggtaatcgatgactgggaattgggggaggtatgtctcagtagattcagaatctgggtctcagatttgtcygcgttagggacttttttttttttgagatggagtctcgctctgtcacccaggctggagtgcagtgacgcgatcttggctcactgcaacctctgccttccgg

SEQ ID NO: 338491 - DNA, 201 bp, Homo sapiens
tgaggcaggagaattgcttgaacacaggaggcagaggttgcagcgagctgagatcacgccactgtgctccagcctgggcaacaaagtgagactctgtctcaaaaaaaaaaaaacaaaaaaaaacctttaatgtctggctttgtactttgcagtctgcctgtctaatctgcagtagtcttttgaggaggtggcaccggatat

SEQ ID NO: 338492 - DNA, 201 bp, Homo sapiens
cagttagagttcttgggagccaactaactagccttcctctcccatctctaaacaatttcagtcttttaatggcttcagtaattgtaagacttggaataaawtttttccccctttaaatgcaaaaatgaagggttaggagactgttcaaagtagctgtggatttgagttaatttcaccaaggttatcaggtcttcagaaagc

SEQ ID NO: 338493 - DNA, 201 bp, Homo sapiens
gaagcactatatgaagcatttcatcaataaccctctgtttgcatctaccctgctgaacctgaaacaagcagaggaagcaaaaactgctgacacagccattycatttcactgtaagtgcctccctatcttgataagatatacttagctcatccttgggccctgtttcagtagcagataaagagtgatttgatgacttggaca

SEQ ID NO: 338494 - DNA, 201 bp, Homo sapiens
ggctgaagcaggagaatcaacttgaacctgggaggcagaggttgcagtgagctgagatggcgccactctagcctgggtgaaagagcaagactccgtctcaraaaaaaaaaaaaaaaaaaaaaaaacttgtcaagaagtggtgtggtggcccacacctgtaatcttagcactttgggagactgaggtacaaggatcccttga

SEQ ID NO: 338495 - DNA, 201 bp, Homo sapiens
gctgaagcaggagaatcaacttgaacctgggaggcagaggttgcagtgagctgagatggcgccactctagcctgggtgaaagagcaagactccgtctcagaaaaaaaaaaaaaaaaaaaaaaaacttgtcaagaagtggtgtggtggcccacacctgtaatcttagcactttgggagactgaggtacaaggatcccttgag

SEQ ID NO: 338496 - DNA, 201 bp, Homo sapiens
ttcaaacaattctcctgcctcagcctcctgagtagctgagattacaggtgcccaccaccacacctggctaatttttgtatttttagtggagatggggtttygccatgctggtcaggttagtcttgaactcctgagctcaagtgatcaacccgcctcagcctcccaaagtgctgggattataggtttgagccaccgtgccta

SEQ ID NO: 338497 - DNA, 201 bp, Homo sapiens
ctggctaatttttgtatttttagtggagatggggttttgccatgctggtcaggttagtcttgaactcctgagctcaagtgatcaacccgcctcagcctccsaaagtgctgggattataggtttgagccaccgtgcctactctctctatcttcttaaaaacaaataaagagaacagtgatcttcacttggaagagggaaagg

SEQ ID NO: 338498 - DNA, 201 bp, Homo sapiens
gttttgtggatctatcaaggtatttaagcacaaaaatagttttatatactcagatttttgtttgaaatttggaaattattcaaaggaaatacttttgataygaggataacaggtatgctgctttttaaactcattgataaacatagccaatgtgttgtcactgtgtgctcatggtatttttatgtggttcatgtggacagt

SEQ ID NO: 338499 - DNA, 201 bp, Homo sapiens
tgaggcgggagaatgatgtgaacccgggaggcagagcttgtattgagccaagattgtgccactgcactccagcctgggcaacagagtgagactccgtctcaaaaaaaaaaaaaaaagaaaaagaaaaattttgtagacaggggtctaggggcctttctatgttattcaggcgtctaggggtctttctgtgttattcaggct

SEQ ID NO: 338500 - DNA, 201 bp, Homo sapiens
ctttggtgtatgtgttggccggttctgaagtcttgaagaagctctgctgaggaagaccaaagcagcactcgttgccaattagggaatggaccgtttgggtycctttagcagtaagtacagtgggaacaagtctcaggtgacttattattattttttttttgagatggactctccctctgttgcccaggctggggtacagtg

SEQ ID NO: 338501 - DNA, 201 bp, Homo sapiens
aattattctccaagctaaaaattaccagggtgaaaaaaatcacttcagaaaagctaaagataaattaaccttttgtagaattaacatttattagtccactwctatgtgtttattgtattcctcctgtatgcttggcattttaaaagcatacagataggtatccgatatagtctctgctttcacttatttattatttatttt

SEQ ID NO: 338502 - DNA, 201 bp, Homo sapiens
ctatgcagtttcagcaggtacaagatctaccccagacacaagaggcgctatgccaggaccgatgggaaggttttctagttccttagtgcaaaatgcgaggrcattactttctttctttctttttttttttttttttttggagtcttgctctgttgcccaggctggagtgcagtggcgtgatctcggcttactgccatctcc

SEQ ID NO: 338503 - DNA, 201 bp, Homo sapiens
gctgatgttgctatcaaatcttttgttttataatgccctttcattaaacatgcacaatatttatttctagtaccgccagtgttgtgtgaatgcacagttgwaaatgttgaatatgtgatcatggtgccctttagcagatttctctaaaatggctgttctcaattatttccacaagctgaatagattaactttatgacatgg

SEQ ID NO: 338504 - DNA, 201 bp, Homo sapiens
agctgaatagattaactttatgacatggacagagattcctttcggtttcatcttaagtgacagacatgtgtttttcagcatttgtgagtggttattgattsattcattcgttcagcaaatagtcatggagagtctactatgcccaacaagaggaaaaacccgtgatgcctgagagtctaaaattgggttagtgattcactg

SEQ ID NO: 338505 - DNA, 201 bp, Homo sapiens
agcagtatccaaggaaaaataaggaagttccgtgatccctaattggtacttactcatattttattgaaataagcagaaatgtttggttcagaaagagagakagagaagactcatatcttagaactgtcttgtctcatgtatgttgtgagatctcaatgcacatgcttagtgtagttccttcttgctgccatctctttcccc

SEQ ID NO: 338506 - DNA, 201 bp, Homo sapiens
acagggtcacgccctgttgcccatgctggagtgcagtggcacaatcatggctcactgcagcctcaacctcctgggctcaaactatcctcccacctcagctrcctgagtagctgggactccaggcgtgcaccatcacacctggctaatttttaaaatttttttgtagagacagggtctcactatgttgctcaggctcaacct

SEQ ID NO: 338507 - DNA, 201 bp, Homo sapiens
aatacagttttacaaatgacagtctcttcaactaatgtgtgtgttgtcatatttacatgtcttttggtacttgctgaattgagagtgattatgaatttagwatagatatagactctgaaatttctctgttggatttcataatacctcatgtgctagatatattcgtagtacgtgctcagatgaaaatgtgttgcttattgg

SEQ ID NO: 338508 - DNA, 201 bp, Homo sapiens
ttattttttttttacttgttattatagaaaagttcagatatacacaagagagaatgatgtttggttatctattgctatgtaacagctacctcaaaacctcwtgcttaaaaatgaccattttattatctcccacagttttgtgggtcaggcattcagattaggcacagtgagggtggctcttggctccacatgatgtactta

SEQ ID NO: 338509 - DNA, 201 bp, Homo sapiens
atggtaataaatttccgtttacccatcactaactcttaaaattattgactcgtggccaatcttactttatctaaaccatcaccttttcttttatcttttcttttttttttttttgagacagagtcttgccctgtcgcccaggctggagtccagtgggttgatttcggctcactgcaacctccgactcctgggtccaagcga

SEQ ID NO: 338510 - DNA, 201 bp, Homo sapiens
caaaacccaaaaccggtttcttggtcagttaggaagcccttcagttctgctgcattgtcattgtggtcattgtgttttctatacccccaggtgccagaacstacgatcacctcaagaagacacgggaggaagagcgccttaaacgcactatgctctcagaagttctccagtatatccaggacagtagtgcttgccagcagt

SEQ ID NO: 338511 - DNA, 201 bp, Homo sapiens
catttcataaaggcttaatatctaaaaccctgctgccttttttacccttgaaacaatcactgttctgatttttttttttatcagcgtagattggttttgcrtattctagaactgcatatatatggaatcatactgtatgtacacttctgttgtttctggtttctttcactcagcttttttatttatttatttatttttttt

SEQ ID NO: 338512 - DNA, 201 bp, Homo sapiens
gttgatttcggctcactgcaacctccgactcctgggtccaagcgattctcccgcctcagcctcctgagtagctcagattacaggcacacaccaccgtgccyggctaatttttgtagagacagggtttcaccatgttgtccaggctggtcttgaactcctgacctcaggtgatctgcccacctcggccacccaaagtgctgg

SEQ ID NO: 338513 - DNA, 201 bp, Homo sapiens
gttttgcatattctagaactgcatatatatggaatcatactgtatgtacacttctgttgtttctggtttctttcactcagcttttttatttatttatttattttttttttgtgacagtcttgctctattgcccaggctggagtgcaattgcacaatctcggctcactgcaacctccgcctcccgggttcaagcagttctcc

SEQ ID NO: 338514 - DNA, 201 bp, Homo sapiens
ttgcatattctagaactgcatatatatggaatcatactgtatgtacacttctgttgtttctggtttctttcactcagcttttttatttatttatttatttwttttttgtgacagtcttgctctattgcccaggctggagtgcaattgcacaatctcggctcactgcaacctccgcctcccgggttcaagcagttctcctgc

SEQ ID NO: 338515 - DNA, 201 bp, Homo sapiens
ccagcactttgggaggctgaggcaggcggattgcttgagctcaggagtttgagaccagcctgggcaacatggcaaaacgctgtttcttcaacaacaacaamaaaaaaaacccgaaaccaaaaattaacttgagtgtgatggcacatgcctgtagacccagctgcttgagaggctgaggcaagaggatcacttgagcctggg

SEQ ID NO: 338516 - DNA, 201 bp, Homo sapiens
tcagagacaggctcttgctctgtttcccaggcagtcttgaactcctggtctcaagtgatttttccacctaaatctcctgagtagctgggattataggtgcatgctactgtgcccagctcagactaattttagtttttagagcagtatgtttagcttcattcctaaactcataactattccaattttttgttgtcactactg

SEQ ID NO: 338517 - DNA, 201 bp, Homo sapiens
attttagaataattattttttaaattttcttcttaaaaatatagggaaatagaaatagagttttgccatgttgtccagggtggtcttaaactcctggactsaagggatcctcccaccttggcctcccagagtgctaggattacaggtgtgagccaccgtgcccagccatttttgggtttactgaagttgcaaatgtagtat

SEQ ID NO: 338518 - DNA, 201 bp, Homo sapiens
catttatagaggaccaggtaccatgctacattacttatatggattatgatatttgattataacatttaattctcacaactttggaaggtaggcactgttayacccactacagaggaagaaacaggttttcagaggtggaataatttttcaacattacaaagctaagatgtggcagagctgagtatgttgcatatcttctct

SEQ ID NO: 338519 - DNA, 201 bp, Homo sapiens
caagagtagatagaactaacctaattactgattgaaacgacccaagtagcagttcgagagttactgactgctccaatctaccagttattgttagtcagttktactctccatcttctttgcagatacatctttggattagttgtttggtcagtagtgatccccagagttgctgctctggtgtctctgcatgatatttgcatg

SEQ ID NO: 338520 - DNA, 201 bp, Homo sapiens
ctgctctggtgtctctgcatgatatttgcatgacagttgtcaaataaaacttcattagcagtaaattaagttgtagtagttaatttagtttggagaaaggyaaaatgacccatatgaaggatgaaaaaaatacttaccttgcttgaggatgtgtaggtgggacatgcaagaaatcacactttttctcagctaatgggaaat

SEQ ID NO: 338521 - DNA, 201 bp, Homo sapiens
ataggaaaggggtagaatataagtttgcaactgaagggcatgtgagtaaattatatgcagtaggaactggagcttaaaatagataccgagtttgaaattaygcattttgatggtacttggacccatagaagtagaggaatttataggactaaggtgaggggtaaaaaggaattagaacagaatctttggaactctgaagat

SEQ ID NO: 338522 - DNA, 201 bp, Homo sapiens
catgatctgccttgatttccatctaatttctctcatttgctgtgctccagccacactggtcttgccctttctccatgccaaacaaatccccatttcagggycactgcacttgctgcttctcttctaggatagtttccctctagaaatccatgttgctccttctctcattaaatgatcagatatttatgtgcctccttagct

SEQ ID NO: 338523 - DNA, 201 bp, Homo sapiens
gaaataactgacctcctagaatcatactttactactttgatcctattttttaaaatgagtgtattttcccccagccttctacccatgacttcaactctctyttcatacctagattttcactggggaatcatgtttgtatcccttccccttgagtggtgttagtggtgttctagattacaagctcttcttaacaaatctgag

SEQ ID NO: 338524 - DNA, 201 bp, Homo sapiens
cactttgggaggccgaggcgagcagattgcctgagctcagtagttcaagaccagcctggccaacatggtgaaacctcgtctctactaaaatacaaaaaatyagtcgagcatggcggtgtgcctgtaatcccagctacttgggaggctgagacaggaaaattgcttgaacctggggaggcagaggttacagtgagctgagat

SEQ ID NO: 338525 - DNA, 201 bp, Homo sapiens
agagttctgattgcttcatgtgcttgccaacatttggcattgtcagtttcattcattttagctattttagtcagtgcagtgtggtattgtggtattacaawtttttttttttttttttttttttttttactttttgcagtttgtttaattcagatacaaataagattcacacatttcaattttccaattggttgcctttta

SEQ ID NO: 338526 - DNA, 201 bp, Homo sapiens
agtagatgtgggagatgagtagtgctcagtggtggagatgatctccagtgttaacaacatccctgtgggatagttgctatggtgctgtcattatgattagygttttgcattcttggctttcctgtttgcttcctgtcatggataagttagtcatatgaggttatgaataatgttcttccattttactaattgtaaaaaaaa

SEQ ID NO: 338527 - DNA, 201 bp, Homo sapiens
tgttcattgtttgttcctagcctgtgttagcctttctcaccccttatatttaggctgaggagatctcttgctctcctttatgttctgagttcttaaggcawctatgtattggaagcctggcatctttgattgtagcctagcctctggtgacttttgtgaggaaccaaatggttttatctccctttttgaggatttggaata

SEQ ID NO: 338528 - DNA, 201 bp, Homo sapiens
tcccctttctctgccccacttgaaaagcaacctctataaaacttcgacattttctttgcttaactcagtctatccattcccagctgaataccaatccctartacacattcaaaacaaaaccaaaaaagttttgctcatcaagcttcccctcctggccagtgacctcctacttgggtttctttctcaggtgtgtgagttgac

SEQ ID NO: 338529 - DNA, 201 bp, Homo sapiens
atcaaagcgatcatacttatgaaataatggtaatgatgaagttgctgggaatttctgttcactttttttaagaattagactgggaagtagtttttcttttmcatttttctttaagctctcttggacttcagggaattagttttcttaatctctgagtatctttaccttttctccccttcggaaataggtaattgttatcca

SEQ ID NO: 338530 - DNA, 201 bp, Homo sapiens
cttctgcctcccaggctcaagcgattctcgtgcctcagcctctggcatagctgggattagcgccaccatgcccagctaatttttatatttttagtagagasagggttttgccatgtttgcaaggctggtctcaaactcttggcctcaactgatctgcccacctctgcctcccaaagtgctgggattacaggggttagccac

SEQ ID NO: 338531 - DNA, 201 bp, Homo sapiens
cctaatgagaagaatcagaaaagtactttttgggtgttgtttcctcttcaacaattcgtgttttttttgagatggagtcttgctgcattacccaggctggwgtgcagtggcatgatctcggcttactgcaacctccacctcccgggttcaagcaattctccgtctcagcctcccgagtagctgggagtataggcgtctgcc

SEQ ID NO: 338532 - DNA, 201 bp, Homo sapiens
ggaagttgatcaaggaagaaaaataaacgatgaagttaagcaataaagccctttgactctgattctaagggaattatgagtatcaaaataaaatcaattaatacatattgattacccattgaacacatgacacaaacatatgaccctgggtcttacaagaaaatgaagcagccgggcgtggtggctcacgcctgtaatccc

SEQ ID NO: 338533 - DNA, 201 bp, Homo sapiens
tggaagttgatcaaggaagaaaaataaacgatgaagttaagcaataaagccctttgactctgattctaagggaattatgagtatcaaaataaaatcaattaatacatattgattacccattgaacacatgacacaaacatatgaccctgggtcttacaagaaaatgaagcagccgggcgtggtggctcacgcctgtaatcc

SEQ ID NO: 338534 - DNA, 201 bp, Homo sapiens; identical to SEQ ID NO: 71258

SEQ ID NO: 338535 - DNA, 201 bp, Homo sapiens
gtggaagttgatcaaggaagaaaaataaacgatgaagttaagcaataaagccctttgactctgattctaagggaattatgagtatcaaaataaaatcaattaatacatattgattacccattgaacacatgacacaaacatatgaccctgggtcttacaagaaaatgaagcagccgggcgtggtggctcacgcctgtaatc

SEQ ID NO: 338536 - DNA, 201 bp, Homo sapiens
ggaggttgcagtgagctgagatcatgccactgcactccagcctgggagacagagcgagactccatctcaaaaaaaaagatcctgaaatatggtaagtactyagtgtgttttagctatcattattgtatttgtttccctttctggctttaactgttgacttcctaatccttcctttctcttaagagatagagtccactataa

SEQ ID NO: 338537 - DNA, 201 bp, Homo sapiens; identical to SEQ ID NO: 71259

SEQ ID NO: 338538 - DNA, 201 bp, Homo sapiens
tgctttttcgagtgttgatcagtccctattgactgtgcatcctttactggacgtctgtttttgtttttgttttttgagagggagtttcacacttgttgctyaggccagagtgcaacagcgcgttctcagcccaccgcaacctccacctcccgggttcaagcagttctcttgcctcagcctcccaagtagctggattacagg

SEQ ID NO: 338539 - DNA, 201 bp, Homo sapiens
tgccttaaatcttggacctgacagtattgaattatttttagtttgtgggcaggataaggaaaagtaaaccaatgtttaaatatttgaacttgttagaaatraacaaaaagaatccatggtagttaatttttcttttttaccctaaacttttaaaaatactgcatttcctcccttcttcagattatccagataggacttagg

SEQ ID NO: 338540 - DNA, 201 bp, Homo sapiens
gtagagatggggtttcgctgtgttggccaggttgatctcgaactcctgacctcaggttatctgcccacctgggactcccaaagtgctgagattacaggcgygagccaccgcacccggcctcctactgtgctttttcgagtgttgatcagtccctattgactgtgcatcctttactggacgtctgtttttgtttttgttttt

SEQ ID NO: 338541 - DNA, 201 bp, Homo sapiens
gagagagagaaaagaaaaagagagtatcttaagggcaggtagcagtgagatgcacagtaatgagtcagtatgtggtatcagaatttatctctattatcagrgttattaacagtgcatcagcattgtacattgctcaatttttgtttgctttcatgtaataaaagaaattattgattctaatgagccatcgtattctgttct

SEQ ID NO: 338542 - DNA, 201 bp, Homo sapiens
cgagggcattactttctttctttctttttttttttttttttttggagtcttgctctgttgcccaggctggagtgcagtggcgtgatctcggcttactgccrtctccgcctcccgcgttcaagcaattctctgcctcagcctcctgagtagctgggattacaggcgcctgctaccacatccggctaatttttgtatttttag

SEQ ID NO: 338543 - DNA, 201 bp, Homo sapiens
ttttgcattttattcttaagattttgaagtttatttttatttttattttttgagacggagtcttgcttgttgcccacgctggggttcagtgctatgatctyggctcactgcagcctccaccttccagttcaagcgattctcctgcctcagcctcccgagtagctgggactacaggtgcgtgccaccatgtccggctaattt

SEQ ID NO: 338544 - DNA, 201 bp, Homo sapiens
tgatccgccctcctcgacctcccaaagtgctgggattacaggcgtgagccactgtgcccggcctatttttgatttttgagacagagtcttgttgtgacgcycaggctgaagtgtggtggtgtgatctcagctcactgcaacctctgcttccgcagttcaagtgattctcctgcctcagcctcctgagtagctgggactaca

SEQ ID NO: 338545 - DNA, 201 bp, Homo sapiens; identical to SEQ ID NO: 71257

SEQ ID NO: 338546 - DNA, 201 bp, Homo sapiens
gctccacaactcgggagcctgcgcctttcctcctcccaacgtggactcctgcccggcgaagtgcctcacttccttctcccggtaactgattcgaatttggygattgttagtttggagctagcgccagtgtttccacggaagttggtgtcagaatgtggtctcttgtgaaagggggagaaagaagattctgcagactgcaat

SEQ ID NO: 338547 - DNA, 201 bp, Homo sapiens
aggcaggtgggtcacttcagtccaggagttcgagaccagcctgaccaacatggtgaaaccctacctctactaaaaataaaaaaactagccaggcgttgtgrtgcacacgtttaatcccaactactcgggaggctgaggcacaagaatcgcttgaacctgagaagcagttgttgtagtgagccaagatggtgccactgtact

SEQ ID NO: 338548 - DNA, 201 bp, Homo sapiens
ctcagatttttgtttgaaatttggaaattattcaaaggaaatacttttgatatgaggataacaggtatgctgctttttaaactcattgataaacatagccratgtgttgtcactgtgtgctcatggtatttttatgtggttcatgtggacagtggtgtttttgttgagcagttcattcccttgccttggggaaattagtta

SEQ ID NO: 338549 - DNA, 201 bp, Homo sapiens
actgcagtctccacctcctggattcaggtgattgtcctgcctcagcctcctgagtagctggaattacaggtgtctgccaccacacctggctaatttttgtrtacgggatttcaccatgttggccaggctggtcttgaactcctgatctcaggtgatccacccgccttggcctcccaaagtactgggattacaggcacaagc

SEQ ID NO: 338550 - DNA, 201 bp, Homo sapiens
tgctctatcacccaggctggagtgcagtggcgtgatctcggttcactgcaagctgtgcctctcgggttcaagggattctcctgcttcaagggattctcctrcttcaacctcccgagtagctgtggttacaggtgcatgccaccattcccagctaattttttatatttttggtagagatggggttttctcatgttggccatg

SEQ ID NO: 338551 - DNA, 201 bp, Homo sapiens
agtgaacacagcaaatgaattaatacataaaatcactgaagaggcagactggtttataagcttgaataaaacttggctatagcttaattgtaatgccacayttaaagaaggaataagagtgttcgtagtgtccttccaagccctggccatgggagtgggtggtttaataagccaaagtgaatatccagtctgcttgacggg

SEQ ID NO: 338552 - DNA, 201 bp, Homo sapiens
ggagtcttgcttgttgcccacgctggggttcagtgctatgatcttggctcactgcagcctccaccttccagttcaagcgattctcctgcctcagcctcccragtagctgggactacaggtgcgtgccaccatgtccggctaatttttgtatttttagtagagacgaggtttcatcatgttggccagccttgtcttgaactc

SEQ ID NO: 338553 - DNA, 201 bp, Homo sapiens
gggattacaggtgtgagccaccactcccggccttcaggtgattattaatagcaaactagagtggaagttgatcaaggaagaaaaataaacgatgaagttargcaataaagccctttgactctgattctaagggaattatgagtatcaaaataaaatcaattaatacatattgattacccattgaacacatgacacaaacat

SEQ ID NO: 338554 - DNA, 201 bp, Homo sapiens
gaagttgatcaaggaagaaaaataaacgatgaagttaagcaataaagccctttgactctgattctaagggaattatgagtatcaaaataaaatcaattaatacatattgattacccattgaacacatgacacaaacatatgaccctgggtcttacaagaaaatgaagcagccgggcgtggtggctcacgcctgtaatccca

SEQ ID NO: 338555 - DNA, 201 bp, Homo sapiens
tatgagtatcaaaataaaatcaattaatacatattgattacccattgaacacatgacacaaacatatgaccctgggtcttacaagaaaatgaagcagccgkgcgtggtggctcacgcctgtaatcccagcactttgggaggccgaggcaggcagatcacgagatcaggagatggagaccatcctggctaacacagtgaaat

SEQ ID NO: 338556 - DNA, 201 bp, Homo sapiens
tttatttttaagagatggggtctcactgtgtcacccaggctggactgcagtgacacaatcatagcccactggagccttgaattcctaggctcaagcgatgyccccaccttggcctcccagtgtgttggtattataggcataagccaccatgcctggcccaatctttactattaaggttgcaaaaagatgattcccccccca

SEQ ID NO: 338557 - DNA, 201 bp, Homo sapiens
taaggcagatttagaatatagcataaacacagagaaagtaaacatttagacaatttcagtgtttttcctacttaatactctggaaccagactgcttatttytggatccctgctgtgtacttaacagctgtgtgatcttgggccatttgttttgtatgcatggtgtatagggcatatgcgggagtgataggaaacaagaatg

SEQ ID NO: 338558 - DNA, 201 bp, Homo sapiens
ttaatagaaaggagaattttttttaacttttattttaaattcaggggtacatatgcaggtatattgcataggtaaacttgtatcatagggtttgttatacmgattattgcatcatccaggtattaagcctggtacccattagttatttttcctgatcctctccctcctcccaccctccaccctctgataggccctagtgtg

SEQ ID NO: 338559 - DNA, 201 bp, Homo sapiens
ttcatttttctgactgcagaaagcagaatttataatctgagtaatgccataagatatataaatagcggaaaaataactttacttattgatagacaaattcwttatgctggaatatttttatgttttctagactagtgagtgtggagtaattagcaatatgaggttcaaagtttgggtaaaagatttatttttgtcttggtt

SEQ ID NO: 338560 - DNA, 201 bp, Homo sapiens
catcttttgaccttggagaagactcttaccctccttagacctcaatttttccttctctcaattgaggatagtaattcctgtgttatttttatatcctctgyccttatcctttattgacgttatgatgaacaatgaataatatgggtacactgttttaagctatttgaagtaaaagaacaagataaaataaaggcatcaaga

SEQ ID NO: 338561 - DNA, 201 bp, Homo sapiens
gaggcaagaggatcacttgagcctgggggttcgaggctgcagtgagccaagatcacaccactgcactccagcctgagtgacagagtaagaccctgtttccaaaaaaaaaaaaaaaaaagaatgaattgactttatttatttatttcagagacaggctcttgctctgtttcccaggcagtcttgaactcctggtctcaagtg

SEQ ID NO: 338562 - DNA, 201 bp, Homo sapiens
atagcccactggagccttgaattcctaggctcaagcgatgtccccaccttggcctcccagtgtgttggtattataggcataagccaccatgcctggcccartctttactattaaggttgcaaaaagatgattccccccccaccccctgccaaatctagtgctctctccacatttactagttagcatttttagtttttattt

SEQ ID NO: 338563 - DNA, 201 bp, Homo sapiens
tgacctcctagaatcatactttactactttgatcctattttttaaaatgagtgtattttcccccagccttctacccatgacttcaactctctcttcatacmtagattttcactggggaatcatgtttgtatcccttccccttgagtggtgttagtggtgttctagattacaagctcttcttaacaaatctgaggaattttt

SEQ ID NO: 338564 - DNA, 201 bp, Homo sapiens
agtttgcatcgtaggggttatagtgacccagcaatcttccttcctctgtggtgtcagggtgcttaggcagagtaacagtaatcaagtgttagcccaatatrtaaacatcagtatgttttcagaaccttcatggccagacagagactatcctcagagtgacagtatagagtatagacagtatagagacaggggaaaaaagaa

SEQ ID NO: 338565 - DNA, 201 bp, Homo sapiens
gaagtagtttttcttttccatttttctttaagctctcttggacttcagggaattagttttcttaatctctgagtatctttaccttttctccccttcggaartaggtaattgttatccaataagttttttagggttttgtggatctatcaaggtatttaagcacaaaaatagttttatatactcagatttttgtttgaaatt

SEQ ID NO: 338566 - DNA, 201 bp, Homo sapiens
tttcagtcttttaatggcttcagtaattgtaagacttggaataaaatttttccccctttaaatgcaaaaatgaagggttaggagactgttcaaagtagctktggatttgagttaatttcaccaaggttatcaggtcttcagaaagctggtttatttttcccaaattaatgcgagaatacctagagccagaatacaaattta

SEQ ID NO: 338567 - DNA, 201 bp, Homo sapiens
ctgttggatttcataatacctcatgtgctagatatattcgtagtacgtgctcagatgaaaatgtgttgcttattggtagtgtaatctcacaaatcatgacyttttttttgtcattaacaaaaggtataacaagttctaagtgcctgtgtaatctgaagacctcctgtgtggtcttcagattattttttttttacttgttat

SEQ ID NO: 338568 - DNA, 201 bp, Homo sapiens
ttatttgtaatgagctcatcttgtctccatgaacttttcagcttagctcactacttgtgtggtcatttggggattttcacctttttgcacttaagataacygtaaggtggtctgaaatgtgcatttgttttctgtttgttctagatgatccctctgataagccaccttgccgaggctgctcctcctacctcatggagcctt

SEQ ID NO: 338569 - DNA, 201 bp, Homo sapiens
tgataaaaatacatatagtgatttttaaaataaatgccacctttgaccttactgtggttttttgttgttgtttgttttttaagagacaggttcttgcactrttgcccaggatggagtgcagtggtgtgatggtatcttgctgcagccttgaactcctgggtgcaagtgatcctcccacctcagcctccttattacaggctc

SEQ ID NO: 338570 - DNA, 201 bp, Homo sapiens
aaatctatattttttaaaaatatagccatcatcataagtatgttacattttaggtcctttattatttatttattttttgagacagggcctcactccagttrtccaggctggagtgcagtggctcagctcactgcagtctccgcctcccaggctcaggtgattctcccacctcagcctcccaagtagctccatctctactaa

SEQ ID NO: 338571 - DNA, 201 bp, Homo sapiens
ttcctcaagagtttttaggcccaaatggggaatttcttgtttctcaggactgttgaattttcaacactgctggattcttttttatgtttgtttttgagacrgagtctcactctgttacacaggctggagtgcagtggcgcgatcttggctcactgcaacctctgtctcccaggttcaagggattctcctgcctcagcctcc

SEQ ID NO: 338572 - DNA, 201 bp, Homo sapiens
cacacctataatcctagcactttgggaggccgaggctggctgatcacttgaggccgagagttcaagaccagcctgggcaacacagtgagaccctgtctctaaaaaaaaaaacctttaaaacaaatttttaaaatattattattgtttttcctcctcctcctccctgctttttatttttacctatatatttattttttacag

SEQ ID NO: 338573 - DNA, 201 bp, Homo sapiens
agcctggtctctgtatattcacctactggcagttcctttcacttatagtgatttcactgtttttttttttattttttttgagacggagtctcgctctatcrcctaggctggagtgcagtggcgcgatcttggctcgctgcaagctccgcctcccgggttcacgccattctcctgcctcagcctcccgagtagctgggacta

SEQ ID NO: 338574 - DNA, 201 bp, Homo sapiens
aatattttagtattaaaagtagttttaaaaatgaggacagagatggatagcttgtggagatagtacttccatcgatctcttgcctttctgtggtatttctrtgagagctctacatagttaccatttgatttttcactataaaaaattaaaagttgttatgaggccgggcgtggtggctcacacctgtaatcccagcacttt

SEQ ID NO: 338575 - DNA, 201 bp, Homo sapiens
tcactgtttttttttttattttttttgagacggagtctcgctctatcacctaggctggagtgcagtggcgcgatcttggctcgctgcaagctccgcctccygggttcacgccattctcctgcctcagcctcccgagtagctgggactacaggcacccgccaccatgcctggctaattttttgtattttttagtagagacgg

SEQ ID NO: 338576 - DNA, 201 bp, Homo sapiens
ttgcctttctgtggtatttctatgagagctctacatagttaccatttgatttttcactataaaaaattaaaagttgttatgaggccgggcgtggtggctcrcacctgtaatcccagcactttgggaggccaaggcaagaggattgcttgagtcgaggagttcgagaccaatctgggcaacatagtaaaactccatctctac

SEQ ID NO: 338577 - DNA, 201 bp, Homo sapiens
gataacttgcctgagatcatacagccagcaagaggtagagtcatccccaagtctgtgttcttaatactgtacaatacttagctgtctttacaatcttgatttttttttttttttttgagacagggtcacgccctgttgcccatgctggagtgcagtggcacaatcatggctcactgcagcctcaacctcctgggctcaaac

SEQ ID NO: 338578 - DNA, 201 bp, Homo sapiens
ctctacaaaaatacaaaagttagccaggcatggtagtgcacacctgtagtctcagctactttggaggctgaggtgggaggattgcttgaacccgggtagcmgaggttgcggtgagctgagatcacaccactgcactccagcctgagcgacagagtgagaccctgtttcaaaacaaaatatgttggtatggcagtaaggcct

SEQ ID NO: 338579 - DNA, 201 bp, Homo sapiens
caatgtgttacccaggctggtctcaaaactcctggcctcaagcgatcctcccacctcagcctcccaaagtctgggattacaggtttttttgttttttggctttttttttttttttgagacgccctctgtagcccaggttggagtgcagtggtgcaatcttagctcaccacagcctctgcctcccaggctatagcaatcctc

SEQ ID NO: 338580 - DNA, 201 bp, Homo sapiens
caaaactcctggcctcaagcgatcctcccacctcagcctcccaaagtctgggattacaggtttttttgttttttggctttttttttttttttgagacgccytctgtagcccaggttggagtgcagtggtgcaatcttagctcaccacagcctctgcctcccaggctatagcaatcctcccacctcagcctcccaagtagct

SEQ ID NO: 338581 - DNA, 201 bp, Homo sapiens
gtgcttaggcagagtaacagtaatcaagtgttagcccaatatataaacatcagtatgttttcagaaccttcatggccagacagagactatcctcagagtgmcagtatagagtatagacagtatagagacaggggaaaaaagaacttcagagaggtaacttctttattttaccaatgttcatgagcagttagtttactgcag

SEQ ID NO: 338582 - DNA, 201 bp, Homo sapiens
gcagatcacctgaggtcaggagtttgagatcagcctggccaacacggtgaaaccccgtctctactaaaaatacaaaaattagccagacatggtggtgggcwcctgtaatcccagctacttgggaggcaggggcaggagaattgcttgagcctgggagacagaggttgcagtgagccaagactgcgctgttgcactccagcc

SEQ ID NO: 338583 - DNA, 201 bp, Homo sapiens
acagtaatcaagtgttagcccaatatataaacatcagtatgttttcagaaccttcatggccagacagagactatcctcagagtgacagtatagagtatagmcagtatagagacaggggaaaaaagaacttcagagaggtaacttctttattttaccaatgttcatgagcagttagtttactgcagttgtgtctaccactaa

SEQ ID NO: 338584 - DNA, 201 bp, Homo sapiens
cattactcatattttcttctagcgttgttactatctggcattcatttcttaaccctagaggtcttctggttattaaaaaaaaaaaaaaaacctgtgggagttttttgcttctgaagtttgtttttttgtttgtttgtttgtttgtttgtttgtttttttgagacggagtctcactctgtcgcccaggctggagtgcagtgg

SEQ ID NO: 338585 - DNA, 201 bp, Homo sapiens
gctgcctcagcctcctgagtagctgggactacaggcgcccgccaccatgccaggctaattttttatatttttagtagagatggggtttcaccatgttagcyaggatggtcttgagctcctgaccttgtgacccacctgcctcggcctcccaaagtgctgggatcagaggcatgagccactgcgcctggccgcttacgaggt

SEQ ID NO: 338586 - DNA, 201 bp, Homo sapiens
aggacacacaaaaaagtcaatttttattagaatgtattgagcattgtaggatacctagaatccctgttttaggggcctgcagaatgccagtggggcactgrtcattgtggcaacaaaaaggtacctcctcagatttccaaatggctccctaggggggagttgagtacaattaggttatataatataattaatacaatggaa

SEQ ID NO: 338587 - DNA, 201 bp, Homo sapiens
aaaaagtcaatttttattagaatgtattgagcattgtaggatacctagaatccctgttttaggggcctgcagaatgccagtggggcactggtcattgtggmaacaaaaaggtacctcctcagatttccaaatggctccctaggggggagttgagtacaattaggttatataatataattaatacaatggaatgttatttat

SEQ ID NO: 338588 - DNA, 201 bp, Homo sapiens
tcttggctccacatgatgtacttaggctgaaagtcccaagagggttatgaatttagtataggcatagactccaaaatttctctcttggatctcataatacmtcatgtgctaggcatattcatagtacgtgctcagatgaaaatgtggttgtcattgtaaccaactactacataatggtaataaatttccgtttacccatca

SEQ ID NO: 338589 - DNA, 201 bp, Homo sapiens
tattccactttttctttttcttttttttttttgagacggagtttcgctgttgtcacccaggctggagtgcagtggcgtgatctcggctcactgcaacctcyccctcctgcgttcaagtgattctcctgcctcagcctcctgagtagctgggattaggcgcccaccaccacatccagctaattttttatttttagtagaggt

SEQ ID NO: 338590 - DNA, 201 bp, Homo sapiens
ttgtacgaacataatacagttttttatccattctccctttgatggacacctgggccttgcccacgtttaggctattgtgaataaagctgcaatgagtattyttatataaagctttctatgtacatatgttttcactgttttttggataaatacctaggagtgaaattgctgggtcatagagtaaatgattgtttaactttt

SEQ ID NO: 338591 - DNA, 201 bp, Homo sapiens
acagttttttatccattctccctttgatggacacctgggccttgcccacgtttaggctattgtgaataaagctgcaatgagtattcttatataaagctttytatgtacatatgttttcactgttttttggataaatacctaggagtgaaattgctgggtcatagagtaaatgattgtttaacttttaaataaacgattggc

SEQ ID NO: 338592 - DNA, 201 bp, Homo sapiens
gctcaagtgatcctcccacctcaaccctcaacctcctaaagtgctgggattacaggtgtgagccaccacagcaggcacctcaactatgtataaggactcaygtggattacattgggcctatcagggtaatccaggatagtctctctactttaaggtcagctgattagtaacctttattccatctgtaaagtcctttcccag

SEQ ID NO: 338593 - DNA, 201 bp, Homo sapiens
gagtttcgctgttgtcacccaggctggagtgcagtggcgtgatctcggctcactgcaacctccccctcctgcgttcaagtgattctcctgcctcagcctcytgagtagctgggattaggcgcccaccaccacatccagctaattttttatttttagtagaggtggggtttcaccatgttggccagtctggtcttaaacccc

SEQ ID NO: 338594 - DNA, 201 bp, Homo sapiens
tgttagttgtagatgccctagtcatttaagtgaatcagactttagctagatggtcatacgtaagattcaagtttcacagacttcctgatagcattctctgyttttagctttcaaacacctacctgccttagtccaaaaccggcggaattgaatagcacttattgctgttgacctagggggcagcaccacttaatactacca

SEQ ID NO: 338595 - DNA, 201 bp, Homo sapiens
gttccttgctcagctatggaattaaaagacatgtgaatgtagccacaagtctcttgatttatcatctaattcacaacttgaaagatagtttggccaaatgsggtagcttacacctgtaaatcccagcactttgggaggctgaggcaggcggattgcttgagctcaggagtttgagaccagcctgggcaacatggcaaaacg

SEQ ID NO: 338596 - DNA, 201 bp, Homo sapiens
cctgaccaacgtgatgaaaacccatctctcctgaaaaaaaaatataaaaattagctgggtgtggtggtacacatctgtaatcccagctactccagaggctraggcaggagaatcgcttgaatccgggaggcagaggtttcagtgagccaagatcgcaccattgcactccagcctgggtgacagagttaagaccatctcaaa

SEQ ID NO: 338597 - DNA, 201 bp, Homo sapiens
tttagcattaactaaatccattgtatttgttcagtcttccgtgtcagtctcgtcaatcccagtgactcatgttatcttttctcacctcttgtggtgttccytttgaaggtagtatgcagactgccattcatagacaccagctttaattgaaatggtattgttttctggcttgtatctttcttatagaatgccagactactc

SEQ ID NO: 338598 - DNA, 201 bp, Homo sapiens
tgaagtaggaaatgtaatccccaaagcagggactactgctttatgctgacactaaaaacaatgtgatgcagccttgagaatccaagtgtctgtgcattctkcccccactgtgccccatggctcttccctgaccattggtgctgggactgtacctgggcatttagtgtttgactcctgaaagagccaggctgctcctcagga

SEQ ID NO: 338599 - DNA, 201 bp, Homo sapiens
actagtgagtgtggagtaattagcaatatgaggttcaaagtttgggtaaaagatttatttttgtcttggttttatttatttatataatatatatatgataygtatatatagtatatgtatgaatttatttgtagctctgaagatggctgtggtagatatctatcattccaggttaaaggagagacaaagacgaaaaaagta

SEQ ID NO: 338600 - DNA, 201 bp, Homo sapiens
ctaaggtgggcggatcacgaagtcaggagttcaagaccagcctgaccaacatggtgaaacagtctctactaaaaatacaaaaattagctgagtgtggtggyacacgcctgtaatcccagctactcaggaggctgaggcaggagaattgcttgaacacaggaggcagaggttgcagcgagctgagatcacgccactgtgctc

SEQ ID NO: 338601 - DNA, 201 bp, Homo sapiens
gaactcctagactcaaggcatcctactgccttggcctcccagagtgctggaattacaggtgtgagccactgcactcggactgttaggcttttttattttatttttattttttattttattattattacttttgagatggtcttgctccgtcacccaggctggagtgtaatggcgcgatctcagctcactgcagcgtctgcc

SEQ ID NO: 338602 - DNA, 201 bp, Homo sapiens
ttgaacccaggaggtaaaggttgcagtgagccgagatcacgccagtgcactccagcctgggcgatagagcaagacttagtctcaaaaataaataaataaattaagcaaataaataaatgtattaatttgtagtcaataaaacttgtattaaaattcttttttaaaaatttgtatagtaattacagtgtgaatattaatgaa

SEQ ID NO: 338603 - DNA, 201 bp, Homo sapiens
gatagttagagcagggaaacttggttgttaaaaaaattatattttgcccagtgcggtggctcattcctataatgccagctactttggaaggccgaggcggrtggatcacctgaggtcaggaattcgagaccaacctggccatcatggcagaaccccatctctactaaaaatacaaaaattagccgggtgtggtggtagatg

SEQ ID NO: 338604 - DNA, 201 bp, Homo sapiens
taatcccaactactcgggaggctgaggcacaagaatcgcttgaacctgagaagcagttgttgtagtgagccaagatggtgccactgtactccagcctgggyggcagagggagattctgtttcaaaaaaaaaaaaaaggaattttatattttaggtgtgtcacccttttcaaatttaatgatacatggtcttagcattttta

SEQ ID NO: 338605 - DNA, 201 bp, Homo sapiens; identical to SEQ ID NO: 71281

SEQ ID NO: 338606 - DNA, 201 bp, Homo sapiens
tatacatcttgtccaagtatgttagcagctaatgtttttaatctttttttttttagattcacagagagttaataaaaatttctgagggaacaggattcagratacacatgatccacaaagcagcagtggcagccaagaaatttggacctaaatcatctaaaaagtttggtaaggaattcatacatgggatgtagatagagc

SEQ ID NO: 338607 - DNA, 201 bp, Homo sapiens; identical to SEQ ID NO: 71284

SEQ ID NO: 338608 - DNA, 201 bp, Homo sapiens
tgctccatccctcctctggtttcttatagaagaactggggtgttgtaggacactgagtggggttttctgtttttatcctttcagtaagaactgagtagaarccatagttaaaaagtactgaggtgtcagcactggacaatacaagaaatctcctaagccctgcccctggaatttagtcttgtttagagggataaaataaat

SEQ ID NO: 338609 - DNA, 201 bp, Homo sapiens
tccgacgctgcccggggcctgggaagtagtctgcgcaggcgccgtagaactgtggcgctttctgggtaaagatggacgtccacgatctctttcgccggctsggcgcgggggccaaattcgacacgagacgcttctcggcagacgcagctcgattccaggtactgtgcccaagggaccgagggccgagtaactgagaaggag

SEQ ID NO: 338610 - DNA, 201 bp, Homo sapiens; identical to SEQ ID NO: 71286

SEQ ID NO: 338611 - DNA, 201 bp, Homo sapiens
aagtacaaattccatttgtacttattcagttttgggaatgcttcacaatcacatttactttttttttttttgagatggagtcttgctctgccaccctgtcrcccaggctggagtgcagtgtcgcaatctcggctcactgcaacctccacctcccaggttcaagtgattctcgtgcctcagcctcctgggtagctgggatta

SEQ ID NO: 338612 - DNA, 201 bp, Homo sapiens
attttttgtctttggagcttgctgtttgccaccttcagtcagtgttggcactgagaataatggttttttaaaaaaattcatagaaaagaaatggaacctcrtatctttgaggctattggaataggtacattaagctatgtttatcttccttttacctttttcctgctgtgttagtccgttttcatgctgctctaaacagct

SEQ ID NO: 338613 - DNA, 201 bp, Homo sapiens
aaatatacagctatgtactgtaaccattgtggcaacaaatgtatttaggccgtagatctatgataaatgtgtaggcatgtatcaattttttttttttttttgagactgagtctcactctgtggctggggctggagtgcagtggcgcgatcttggcacactgcaagctctgcctcctgggttcacgccattctgctgcctca

SEQ ID NO: 338614 - DNA, 201 bp, Homo sapiens
agctcgattccaggtactgtgcccaagggaccgagggccgagtaactgagaaggagcaggagcccgggaatgaacccgctgctgggggaggccggcgcacwtggacacccgtggcctggctctcgccacccttggggtattttgcttccttttgtgttcggcttgcctgcacggctgctcggttcaagccttttgaataag

SEQ ID NO: 338615 - DNA, 201 bp, Homo sapiens
ccttttttctttttttttttttttgagacaaggtttttctctgttacccaggctggaatgcagtggcatgatcacagctgtctgcagcctcaacctcccargctcaaatgatcctccccactcagcctcctaagtagctgggactacaggcttgcaccaccacccacccttgactaatttttaatttttttttgaagagac

SEQ ID NO: 338616 - DNA, 201 bp, Homo sapiens
atatccatggtggcctctttacttcacttttcagataaacttcttgcggaataaacacaaaattcacgtccaaggaaccgatcttcctgacccaattgctrcatttcagcaacttgaccaggaatataaaatcaattctcgactacttcagaacattctagatgcaggtttccaaatgcctacgccaatccaaatgcaagc

SEQ ID NO: 338617 - DNA, 201 bp, Homo sapiens
caagtacctggtgactatagaatggtttgctttagtggttaagaccatggactcaggagccaggctacttgggtagttctagctccaccactatagctttrcacaacttaacctctcttccacattttccttgtctgtaaaatgggataataatatctacctcatagagctgttttactattaattcattagtacaagcat

SEQ ID NO: 338618 - DNA, 201 bp, Homo sapiens
cctagtgcctcattatttgatacacagtaggtttcagtaaatgtttattaaactggtggtagggttatggaaagtaaatatacgtagaattttttattcamtttttcttactttgctctttacaggaaaaaggtcactggtcagaacagcaagaagaaagtagctcttgaagacaaaagttaaaaacagactttaaaaata

SEQ ID NO: 338619 - DNA, 201 bp, Homo sapiens
atgttttcttatttgtagtttcaatttgttatattaaaatctttgaccctgtgaaattttatttggtataaggagtgaatagggaactaaaatttttttcwgatgtctgaataattgtcttaataacataattgtcttaataccatatgttggtgttttatcttatgttgactaattgtcttaataccatatgttgataat

SEQ ID NO: 338620 - DNA, 201 bp, Homo sapiens
atggatgatgttaggaaagcagatatgacttgaaagattagattcattatgtaaaattgtatttgtttttttctatggctggtagcgttatttgaccaggstctgaaaaatttatgtactttctttgtagtatttaatataccctatgtttttagggtcgggaacttctggcttctgctccaactggatctggaaaaacat

SEQ ID NO: 338621 - DNA, 201 bp, Homo sapiens
aagagacaggaaaatatacatcttcaggaagacttgtacacaaattttcatagcaacattgcttatagccaaaagctggaaatgacccaaatgtccctcawcaggtgaatgatgaactgtacatccattacaatggaatactacctagtaataaaacggtaagttgttgatacatggtgcaacataggtgaatttcaaaac

SEQ ID NO: 338622 - DNA, 201 bp, Homo sapiens
ttctagagttttatatgagtggaatcacacattaatcttttatttctggtttctttcactttgcgtaatgctttgagattcttctgtattacatagagcawtagtttgttaccaagtagtattatgttgtatgaatataccacaatttgttatccagtcacttgttgatagaggtatggattaacttaggttttcggacgt

SEQ ID NO: 338623 - DNA, 201 bp, Homo sapiens
aagtgttgaaagctgaggtaggtcaaaagcgaggcctcttacaccagttaactaagttgtgaatgcagaggaaaagttcttgaaggaaattaaaagtcctrttccaggaaacacaaatgttaagaaagtaaaacagctttattgctgatattgaaaaagggtgagtggtctggatagaagattaaaccacccttaacattc

SEQ ID NO: 338624 - DNA, 201 bp, Homo sapiens
tagtactgtattctgaaaacaatacaaaataggttagttttatctctgggaactagtttattccacctgaagaaattattgaatcttattaggcattgaartttcaaaatgctgagatttcaggttaatctacagattgttatgagtttaatttcagatattcatgggttggtaatagatttatttcattaatcatgtaaa

SEQ ID NO: 338625 - DNA, 201 bp, Homo sapiens; identical to SEQ ID NO: 71282

SEQ ID NO: 338626 - DNA, 201 bp, Homo sapiens
tcctgttgtagacctagttgggcctggcacggaaaccctctttcctccctcttattcaaagcaaagttggaatcctcctttcaaaaggaactttttctccraacctagaggaaaggaatttcgaaaacagaaacaaccaaagatggagaaaacagattctcttactatagtctccccaagtttggcttggcatgcgtatag

SEQ ID NO: 338627 - DNA, 201 bp, Homo sapiens
ctagcccaagaaatttggccaagaaagtacactaaattgaattgggttcttaaaagctacaatcaaattatgaaataatgaccaattgtattcttgattgwgttatgtatgccaatttttgtcttcttttagggtttcaatccacctgttcttgtttttgttcagtccattgaaagggctaaagaactttttcatgagctc

SEQ ID NO: 338628 - DNA, 201 bp, Homo sapiens
cattaaatttatgaagtacctgttttcattctaaaacaatttaatatatattctgttaaccagagagataacacagtccacagtttcagagcaggaaaaayctgggttctgatttgtacagccttgctagcaagagggattgattttaaaggtgtgaacttggtgatcaactatgactttccaactagctcagtggaatat

SEQ ID NO: 338629 - DNA, 201 bp, Homo sapiens
ctgggtaaagatggacgtccacgatctctttcgccggctcggcgcgggggccaaattcgacacgagacgcttctcggcagacgcagctcgattccaggtaytgtgcccaagggaccgagggccgagtaactgagaaggagcaggagcccgggaatgaacccgctgctgggggaggccggcgcacttggacacccgtggcct

SEQ ID NO: 338630 - DNA, 201 bp, Homo sapiens
ttaaaaaataaatacttcgtgtaagccagtttctggctggagaagaaacatatgtaataattcccttctatttgttttttctttttcttttgtcttgtttktttttttttttttttttttttttgagaggaagtcttgctctgttgcccaggccagagtgcggcggcgtgatctcgacccgctgcaacctctgcctcctgg

SEQ ID NO: 338631 - DNA, 201 bp, Homo sapiens
gaagtagtctgcgcaggcgccgtagaactgtggcgctttctgggtaaagatggacgtccacgatctctttcgccggctcggcgcgggggccaaattcgacrcgagacgcttctcggcagacgcagctcgattccaggtactgtgcccaagggaccgagggccgagtaactgagaaggagcaggagcccgggaatgaacccg

SEQ ID NO: 338632 - DNA, 201 bp, Homo sapiens
cttgggctttctagacttaaccggatatgttggagggagggctttaaaaatctgttcacaaagctggaggactgtttccaaggggggtgtgtgtgtggackatttgtctcttccccttttagagtgtcctgtcctctttatttccttaacccgcgacaaacagcaggaacatctaaagacctctgaattagtaatggtctt

SEQ ID NO: 338633 - DNA, 201 bp, Homo sapiens
aatttttaaattttgtagagacgaggtcttgcttgttgtccagttgggttttttagacttttttttttttttttttttggagatggagtcttgctctgttkcccaggctggagtgcagtggcatgatctcggctcactgcaacctctgactcctgggttcaagtgattctcctgcctcagcctcccgagttgctgggacta

SEQ ID NO: 338634 - DNA, 201 bp, Homo sapiens
aaattagctctatgtctgccatattatgtttacaaatatgtttccagattgtcatatgtcacttgtcttatttatttactttttggccttctgcgcattaygtttttttaaaattctaggctgggtgcagtggctcacttctgtaatcccaacactttgggaggcggaggcgggctgaccacttgaggtcgggagtttgag

SEQ ID NO: 338635 - DNA, 201 bp, Homo sapiens
tcttttttttttttttttttttttttgagatggagttttgctctgtcgccctggctggagtgcaacggcgtgatcttggctcactgcaacctctgcctccygggttcaagcgattctcctgcctcagcctcctgagtaactgggattacaggtgcccgccaccacaccaggctaatttttgtatttttagtagagacaggg

SEQ ID NO: 338636 - DNA, 201 bp, Homo sapiens
tggaaccccttcaaaccacagcctctggctctgatttggtctggtcccttaactctcttttttctaggctcaagattcccagctctggccccaagacatgmctgaagtaagggatgattcccaggatgtgggaagcccctctcagctccttccttggaaggaagcagaattatgtaaaggaaagtgaaagagacttcaagc

SEQ ID NO: 338637 - DNA, 201 bp, Homo sapiens
attcataaaaaccagtgttcctggcctgcttctctcattggccctgggggcaaggggcgtgccccgcgggtggagcgcgcccggggcccagcagagtgggyagatccacgcttaggtggagcgagggggcgttccttggctttctaggctggactttctcttccccttgctgcgtccctcctctcccccggggtgggcatg

SEQ ID NO: 338638 - DNA, 201 bp, Homo sapiens; identical to SEQ ID NO: 71300

SEQ ID NO: 338639 - DNA, 201 bp, Homo sapiens; identical to SEQ ID NO: 71302

SEQ ID NO: 338640 - DNA, 201 bp, Homo sapiens
ccctctggccatgctagcctcatccttctctgagcctctgctgttcttgatgtctgtatccctggattctcacttaattgcatactgctttgactttgagkgtgtcagggttttttttcatctccctgatgagattataagcctcctgtttcttttgcatgtacaacactttctccccttgtgttctcctcctcccacaca

SEQ ID NO: 338641 - DNA, 201 bp, Homo sapiens; identical to SEQ ID NO: 71304

SEQ ID NO: 338642 - DNA, 201 bp, Homo sapiens
aaggtatagtaaaatgattttaggagtcagaaccaaattgccaatatgctccatggctcctaaaggaaaataaaatggaagtttttattttgcggcttcayttcttaccgtgtagtaaccttactacaattacagattttcaggagttgtttgctagtctctttcagtcaggtactaaaaaaaaaacaaaaaacaggctgg

SEQ ID NO: 338643 - DNA, 201 bp, Homo sapiens
tttttttttttttttgagatggagttttgctctgtcgccctggctggagtgcaacggcgtgatcttggctcactgcaacctctgcctcccgggttcaagcrattctcctgcctcagcctcctgagtaactgggattacaggtgcccgccaccacaccaggctaatttttgtatttttagtagagacagggttttgccatgt

SEQ ID NO: 338644 - DNA, 201 bp, Homo sapiens
aaggtgggcgaattttccacttcacctttacagctgtaagaaatatagctgactttttttttttttttttttttttttgagatggagtttcactcctgtcrtccaggctggagtgcaatggcgcgatctcggctcactgcaacctctgcctcccaggttcaagtgattctcctgcctcagcctcccgagtagctgggatta

SEQ ID NO: 338645 - DNA, 201 bp, Homo sapiens
ggtaggtcacctgaggtcaggagttcgagaccagcctggccaacatggtgaaaccctgtctctactaaaaaatacaaaattagatgggcatggtgatgtgsgcctatagtcccacctactctggaggctgaggcaggagaatcgcttgaacctgggaggcggaggttgcagcgagctgagatcacgccattgcactccagc

SEQ ID NO: 338646 - DNA, 201 bp, Homo sapiens
gtttgacttcaaagagaactgggtggggcatggtggcttatgcctgtaatcccagcactttgggaggccaaggcaggtaggtcacctgaggtcaggagttygagaccagcctggccaacatggtgaaaccctgtctctactaaaaaatacaaaattagatgggcatggtgatgtgcgcctatagtcccacctactctggag

SEQ ID NO: 338647 - DNA, 201 bp, Homo sapiens
tcaccatgttggccaggctggtctcgaactcctgacctcagtcagggtgatccacctgcctcggcctcccaaagtactgggattacaggcaggagccaccktgcccagccctgtatgtgctatttattagattctagcactgtttactagaagacggggtagataaggcagataggccacttcctttccaagaagacattc

SEQ ID NO: 338648 - DNA, 201 bp, Homo sapiens
ccttttgtccttccaacaactgtgtatgtgtttttgttgttgttattggtgttgttttgagacagtttcactcttgttgcccaggctgtagtgcagtggcrcgatcttggctcactgcaacctctgcctcccgggttcaagtgattctgctgcctcaggctcctgagtagctgggattacaggcacccaccaccacgcccg

SEQ ID NO: 338649 - DNA, 201 bp, Homo sapiens
caggcctggccctgcttttatcaggagggtccaagtggggcagtggccagacatttactactgctcactttaatctattacagccgggcgcagtggctcaygcctgtaatcccagcactttgggaggccgaggtgggtggatcacgagctcaggagatcgagactatccaggctaacatggtgaaaccctgtctctactaa

SEQ ID NO: 338650 - DNA, 201 bp, Homo sapiens
agctgagttaaaaatttcctaggctgggccaggtgcagtagctcacatctgtaatcccagcattttgggaggctgaggcaggcagatcacgaggtcaggarttcgagaccagcctgaccaacatggtgaaaccccatctttactaaaaatacaaaaattagcagggcatggtgacatgcgcctgtaatcccagctactcag

SEQ ID NO: 338651 - DNA, 201 bp, Homo sapiens
agacggagtctggttctgtcacccaggctggagcacagtggcatgaactcggctcactgcaagctccgccttgtgggttcacgccattctcctgcctcagyctcccgagtagctgggactacaggtgcccgccatcatgctccgttaatttttttttgtatttttttttagtagagacggggtttcactgtgttagccagg

SEQ ID NO: 338652 - DNA, 201 bp, Homo sapiens
ggcctatggaagtgagaccctgtctcaatcaatcaatcaaggaattttcatctccagtagatcagcatagagtgaactcattgcttttttttttttgagayggagtctggttctgtcacccaggctggagcacagtggcatgaactcggctcactgcaagctccgccttgtgggttcacgccattctcctgcctcagcctc

SEQ ID NO: 338653 - DNA, 201 bp, Homo sapiens
cttcctttctgaccacacagtgggatgtttttcatttgaggggaggagaagtgaatttggtattttctaaatcattgaaattccttgaccttcctttttartaagaattcatggcccaggaagcctttttccaatgaggctttgacttattttccaaaacagatacattttcccttatggacactggtttaaaaacatttg

SEQ ID NO: 338654 - DNA, 201 bp, Homo sapiens
agggagaagagagccctgggggagcttcttagggaggggttggtcctctctggtaatggcagctgcttctgatcaccaagcagtgggactctcctgcaacygtatttctgtgagctgaaatgcctactttaaaaaagaaaaaaggagccatgaaggctcatcgctgactgactcccagttggaaagtgttcacgcactggc

SEQ ID NO: 338655 - DNA, 201 bp, Homo sapiens; identical to SEQ ID NO: 71306

SEQ ID NO: 338656 - DNA, 201 bp, Homo sapiens
ggttgcttccaccttgtagctgttgggaataatgctactgtgaacatgggtgtcataaacttcgttttgctaggaagcgtttccttagtcacccccaactmtgttctttccttattctgcctttcatcatctgacattatttgtcctgagtctttgtccttctcccttttctaccctctccccctactgtggttctgagaa

SEQ ID NO: 338657 - DNA, 201 bp, Homo sapiens
atggtgtggaaacctacatggtggttaccaggaacgtgttcagccatcggctcactgtgcatcgcaagtatgacctcaaggtaaagggctctgtgtttgcyggagctgtgcctcccctctatctgagccccgaaggggccactactccaacttccatgtaattgggaagctggagcctatgtgttggcatggacagggaac

SEQ ID NO: 338658 - DNA, 201 bp, Homo sapiens
acagacacacccagaataatgcttgaccaagtgtctgggcactcaggcccagtccagctggcatatacaattagccatcacacttaggttgcttccacctygtagctgttgggaataatgctactgtgaacatgggtgtcataaacttcgttttgctaggaagcgtttccttagtcacccccaactatgttctttccttat

SEQ ID NO: 338659 - DNA, 201 bp, Homo sapiens
ccctttttcttctcttcaggccttctgctgattggatgatgcccatccacactggggagggccatctgctttactcagtccaccagttcaatgctcatttyacccagaaaccctcacagacacacccagaataatgcttgaccaagtgtctgggcactcaggcccagtccagctggcatatacaattagccatcacactta

SEQ ID NO: 338660 - DNA, 201 bp, Homo sapiens
tgaaagacaggctattttatttcaaaaaaagaaaaaaaagtgggctctgggaacagggttagtccattcgggccttcagtgtcctggtggtgattttgtcyttctcgctgcagagggagaaaatcacaagaaaacatctctacccatctggaccgtgactgtgactagctctcctggccctcagcaccaagccctcaagcc

SEQ ID NO: 338661 - DNA, 201 bp, Homo sapiens
ctgagcaggaatggaagggtcgcttggagtcagaaacaactcctgtcggccatcctgtccctcgcccaccccagcccctagcccagctcccagacatgccrtctgtcaacatgaaatgccgtgtgtcatgaatcacctgtctgtccttgtgctaggcctagaccttggtctctggtcttttacctctgccctcactacgtt

SEQ ID NO: 338662 - DNA, 201 bp, Homo sapiens
tgctcctcttcccaggatttcacatctgctgtctggaatagtctccttctctctctccacccactccttcccccacctaattgcttcctccttacccttcygagctcagcccaaatactacttccaggaagtaggtaggccctggccactgtccctccccaggccgggcccgtgtggtttgtgctttcagagtgtcctgtc

SEQ ID NO: 338663 - DNA, 201 bp, Homo sapiens
aatcagctcagtctgcatctttgtgttcctgatgaggaaatgcaggggtagagaagttaaatggctcacccaaggtcatagtgcgtgtgagagtccagatkagactcagccccctccatcagaggcagaattttagttggtaggatagctatctgggatcaggatggaaactttcacagtcagtcctcttcccatcctaga

SEQ ID NO: 338664 - DNA, 201 bp, Homo sapiens; identical to SEQ ID NO: 71307

SEQ ID NO: 338665 - DNA, 201 bp, Homo sapiens
actccgtctcaaaaaaaaaaaaaaaagaaaaaatcttcagagatggctgggagcagtggcttacgcctgtgatcccagcactttgggaggccgaggcaggyggatcacttgaggtcaggagtttgacaccagcctggccaacatggcgaaaccctgtctctactaaaaatacaaaaatttgccgggtgtggtggcatgcgc

SEQ ID NO: 338666 - DNA, 201 bp, Homo sapiens; identical to SEQ ID NO: 71310

SEQ ID NO: 338667 - DNA, 201 bp, Homo sapiens; identical to SEQ ID NO: 71311

SEQ ID NO: 338668 - DNA, 201 bp, Homo sapiens
cacttgaacctgggagacggcggttgcattgagccaagatggcggcattgcactccagcctgggtgacgagcaaaactccgtctcaaaaaaaaaaaaaaaagaaaaaatcttcagagatggctgggagcagtggcttacgcctgtgatcccagcactttgggaggccgaggcaggcggatcacttgaggtcaggagtttga

SEQ ID NO: 338669 - DNA, 201 bp, Homo sapiens
ttcattgagttgtctttttcatttttcttttttttttttttttttttttttgagatggagttttgctctgtcgccctggctggagtgcaacggcgtgatcbtggctcactgcaacctctgcctcccgggttcaagcgattctcctgcctcagcctcctgagtaactgggattacaggtgcccgccaccacaccaggctaat

SEQ ID NO: 338670 - DNA, 201 bp, Homo sapiens
tatcctattcattgagttgtctttttcatttttcttttttttttttttttttttttttgagatggagttttgctctgtcgccctggctggagtgcaacggygtgatcttggctcactgcaacctctgcctcccgggttcaagcgattctcctgcctcagcctcctgagtaactgggattacaggtgcccgccaccacacca

SEQ ID NO: 338671 - DNA, 201 bp, Homo sapiens
agagttccagtatctgcatccttgtcaacacttgttattgtctttttaaagttattaaagccattctgttgggtgtgaattcgtatctcattgtgattttktttgtttgtttgtttttgtgatggagtctcactccgtcacccaggctggagtgcagtggtgcaatctcggctcaccgcaacctccacctcccgggttcaa

SEQ ID NO: 338672 - DNA, 201 bp, Homo sapiens
gccttctgaccatttctttatgaatccccacactaggaatgagcagaggaagtaaaaggacccgaaacaccaacttcactaactagaattttggaataagsaggatcaagcttgggtttcctgtggatttcagttctttaggttcacttgtgagtgcttgaaattgctcacaagaccaagcgatgacaaagagggccagca

SEQ ID NO: 338673 - DNA, 201 bp, Homo sapiens; identical to SEQ ID NO: 71312

SEQ ID NO: 338674 - DNA, 201 bp, Homo sapiens; identical to SEQ ID NO: 71313

SEQ ID NO: 338675 - DNA, 201 bp, Homo sapiens
aatgtctcttgtgagcacggggtcacagaacctcacctgacaagaggccagaggaagctgggtaggctgccagttaccagccatagggaggcatggacttytgctcacccaggactgccaaaagcacctttcttatctcacacctgaccagggggctgggaaaatggggtgtatgctcgtggagaagggagagaggcaggg

SEQ ID NO: 338676 - DNA, 201 bp, Homo sapiens; identical to SEQ ID NO: 71301

SEQ ID NO: 338677 - DNA, 201 bp, Homo sapiens
gccgcgttgccacctccccactgcctttcttctacttcggtgcaggcctggggttataaatcacaggagtggggccaggacagttcaggacttgtatgccwcttcctgaggtggtctgctcagtcttggtggggttgggggtggtattcagctctgatactgagtaagaggcttctgaataccctggctccccccatgtgc

SEQ ID NO: 338678 - DNA, 201 bp, Homo sapiens
ctgtattgcccaggatgttctcaaacttctggcctgaagcaatcctcccaactagagttttagctctttctttcttcttcttctttttttttttttaattktattgtggtcagaacatttaacataagatgtactctcatgacaaaattttaagtgtacgattatgttattgatgaccatgggaacagtgtcatagtgcag

SEQ ID NO: 338679 - DNA, 201 bp, Homo sapiens
tcactctaccaggcctctctctgctggttctgtttctcacagaaagcaacctgtctgtagagaactggtagaggcctgagagtcaggagtattacagctarctgcaatgaaccttgggtcccttattttacacatgaagaaaaggaggcctcaggtggaggattagcttgcctgtggttacagcaagagatgtcgcttatt

SEQ ID NO: 338680 - DNA, 201 bp, Homo sapiens
ccccctcttccttcttccctgctctccttgtccctccaggttcccccaagaaggaggtgtatttcatggccatcattgatatcctcacgccatacgatacmaagaagaaagctgcacatgctgccaaaacggtgaaacacggggtgagtcctctccatcttcatccagggcccagctgggtcggtgcatctgtgcttaccc

SEQ ID NO: 338681 - DNA, 201 bp, Homo sapiens
tgtagcagtgcccagctgctgtctgcccttctcctgccccctcttccttcttccctgctctccttgtccctccaggttcccccaagaaggaggtgtatttyatggccatcattgatatcctcacgccatacgatacaaagaagaaagctgcacatgctgccaaaacggtgaaacacggggtgagtcctctccatcttcatc

SEQ ID NO: 338682 - DNA, 201 bp, Homo sapiens
ctcttcctttctgaccacacagtgggatgtttttcatttgaggggaggagaagtgaatttggtattttctaaatcattgaaattccttgaccttccttttwaataagaattcatggcccaggaagcctttttccaatgaggctttgacttattttccaaaacagatacattttcccttatggacactggtttaaaaacatt

SEQ ID NO: 338683 - DNA, 201 bp, Homo sapiens
ctttgacctctttctgcctccagattcccatccagggtcaccacctgaacctggggctcctcctctgccaggctttcctatacttccctgcttgtcctggytgactgaagagtggttctgctctggttcatgagatgaaccaaactttattcatactgtcctgtcagccccacagagtgactgtgaagatccaataagata

SEQ ID NO: 338684 - DNA, 201 bp, Homo sapiens
cctttgacctctttctgcctccagattcccatccagggtcaccacctgaacctggggctcctcctctgccaggctttcctatacttccctgcttgtcctgrctgactgaagagtggttctgctctggttcatgagatgaaccaaactttattcatactgtcctgtcagccccacagagtgactgtgaagatccaataagat

SEQ ID NO: 338685 - DNA, 201 bp, Homo sapiens
ccatcggctcactgtgcatcgcaagtatgacctcaaggtaaagggctctgtgtttgccggagctgtgcctcccctctatctgagccccgaaggggccactrctccaacttccatgtaattgggaagctggagcctatgtgttggcatggacagggaactctggagtggatatgcctgattcttgtggaccaaaggcagttt

SEQ ID NO: 338686 - DNA, 201 bp, Homo sapiens
gtctgaggcaggaggttgccaggcatgttcttggtctgggatgccgccaggctcttttctgtctggctggtgtatgagcaacaggcagagcatggggctcragggcactatccagagtagcacttcccatttttgtctgctgtcgcttcttggattagcaccagtgtctgaaggttgtctcagatattgttggaaacacta

SEQ ID NO: 338687 - DNA, 201 bp, Homo sapiens
tcgttatgtgcctctcatcctagtattgtcgtctcactctattatcagcctacctccggtggcccttggggcatgtggctgggcccagggtgattcatctrgagccagctcaggtggcagtgagctgctctggagctgaggtattcagtgtgaggctgtagcagtggccccatcttggtcttagtctgaggcaggaggttg

SEQ ID NO: 338688 - DNA, 201 bp, Homo sapiens
tcttcttcttctttttttttttttaattgtattgtggtcagaacatttaacataagatgtactctcatgacaaaattttaagtgtacgattatgttattgmtgaccatgggaacagtgtcatagtgcagctctgtagagcgtattcatctcgcttgaatgaaactttatgcctaccaattaactccccatttcccccgccc

SEQ ID NO: 338689 - DNA, 201 bp, Homo sapiens
acaaaaaaattagctgggcgtggtgatgtgcacctgtagtcccagctacttggggggctggtgtgggcagattgcttgagtccaggaggtgaaggctgcamtgagccattgtcatgccactgcacttcagcctgggtgacagaatgagaccctgtctcaaaaaaacaaaaaaagacagagagggaaacttggacatgcttt

SEQ ID NO: 338690 - DNA, 201 bp, Homo sapiens
gaactggccctgctttattttattttcttttttgagacaagatctcactcttgcccaggctagagtgcagtgcagtggtgcagtcagctcactgtaacctsaaactcctggcctcaagcaatcctcccacctcagcctcctgagtagctaggatgataggtgtacacgactatgcctggctaatgtgtttaattttttttt

SEQ ID NO: 338691 - DNA, 201 bp, Homo sapiens
aaagcaagatatggaaaggaggagtaaacaccggtagatttattggctcctgtggccctctcttcctctctggagttgcagttcttgctttggacctcctyggtcctgtgagtgtatttctagcatgtcatgttttctgatggtggcaggtaacaagtgattgctggtggtggccagcccactgctgaaccgacagcagag

SEQ ID NO: 338692 - DNA, 201 bp, Homo sapiens
ccaggaggcagaggttgcagtgagcggagattctgccactgcactccagcctgggcaacagagcaagactcgatcttctgacctcgtgatccgtccccttmggcctcccaaagtgttgggattataggcgtgagccactgcgcccagccgagccctgaactctttgtctctgttttccctttaagtctcggagccaggctt

SEQ ID NO: 338693 - DNA, 201 bp, Homo sapiens
tgaagtttcttttagcaggccttcccacctcacagggagcagtgggactcaaacagcaggagaaggagaaagcaagatatggaaaggaggagtaaacaccrgtagatttattggctcctgtggccctctcttcctctctggagttgcagttcttgctttggacctcctcggtcctgtgagtgtatttctagcatgtcatgt

SEQ ID NO: 338694 - DNA, 201 bp, Homo sapiens
ggactccactggtccttttctcagccccaacatgataaggatggagctgagccttgtgtctgggggttgtagcagtgcccagctgctgtctgcccttctcytgccccctcttccttcttccctgctctccttgtccctccaggttcccccaagaaggaggtgtatttcatggccatcattgatatcctcacgccatacgat

SEQ ID NO: 338695 - DNA, 201 bp, Homo sapiens; identical to SEQ ID NO: 71308

SEQ ID NO: 338696 - DNA, 201 bp, Homo sapiens
acccaaagcctgggactagaggctcctgcactgctgatttagcaggttgagggtcggtacactgacaacccctccttcccctttctgtatagttgctcccrgcagaacagttgggtgtccctggggtgaattaatcaggcttacccagcctaactgctgttgctctcctaggccaaggacttgccaacattcaaagacaat

SEQ ID NO: 338697 - DNA, 201 bp, Homo sapiens
aactaaggcttggcaaggggagtcacatgatgctaggggaggactttcccccagcaccacacagcctcttttgaccttcagggaatgggttgagaatattrgttggttctggctgccattcttgtatggttttgtgttcccttttccttttttttctatttttacctgggctgaaaagtcgatgacatagttttttcagac

SEQ ID NO: 338698 - DNA, 201 bp, Homo sapiens
atgccaccaacgtaccatgttgggctcccagagggactcacacattccgtacatttgttcggcgcaggtgccactgaccacaaagtcatcagtcaccatgkggcagccgatgaggtctagagagcaaatgaagggcttaaaggtcttcgggtccaacccggcaatgactggctcagtgtagtaagggccaaacctgtgggg

SEQ ID NO: 338699 - DNA, 201 bp, Homo sapiens
cagggtgtctgcagagcttctagacttctcccagcccatactcacatgatgtggacaatgactcccatgcctgacactgcatcccggtccacagcattcakcatggcttgggagatggtttcaaacaggtgatccggatcctgccaacagagtggaaccccttcaaaccacagcctctggctctgatttggtctggtccct

SEQ ID NO: 338700 - DNA, 201 bp, Homo sapiens
ttctaaaagttttatagttctagctcttttttttttttttttttttttaatgaattggggtttctctgtattgcccaggatgttctcaaacttctggcctsaagcaatcctcccaactagagttttagctctttctttcttcttcttctttttttttttttaattgtattgtggtcagaacatttaacataagatgtactc

SEQ ID NO: 338701 - DNA, 201 bp, Homo sapiens
gcctaacccaaggtcatgaagatttactcctttgttttcttctaaaagttttatagttctagctcttttttttttttttttttttttaatgaattggggtytctctgtattgcccaggatgttctcaaacttctggcctgaagcaatcctcccaactagagttttagctctttctttcttcttcttcttttttttttttta

SEQ ID NO: 338702 - DNA, 201 bp, Homo sapiens; identical to SEQ ID NO: 71299

SEQ ID NO: 338703 - DNA, 201 bp, Homo sapiens
ttctggaattttccatttaatatttttggactgtagttgaccacaggtaactgaaaccattgtggataagggtggactactgcatttaatttaaagaaatyctagttccagcccactacattgggtttaggactcataatgggttgaaattttgatctgaaatatattgttgtgtcatatccatcgctccatcctcttcca

SEQ ID NO: 338704 - DNA, 201 bp, Homo sapiens
ggtgaccctccagcttgggcaacatgttatgaatgaaactccatctcaaaaaataaaaaaaaaaaaaggaagcaaacagcagttgtccttttgtgactctsttattttgcttagcataatgtcttcagggttcatccatactgtatcatgtgtcagaatttttttctttttattatttatttatttgttttgagacagagt

SEQ ID NO: 338705 - DNA, 201 bp, Homo sapiens
atttgaggggaggagaagtgaatttggtattttctaaatcattgaaattccttgaccttcctttttaataagaattcatggcccaggaagcctttttccartgaggctttgacttattttccaaaacagatacattttcccttatggacactggtttaaaaacatttggttccaggtggagtcactcgaaagttatctatg

SEQ ID NO: 338706 - DNA, 201 bp, Homo sapiens
aattgcttcctccttacccttctgagctcagcccaaatactacttccaggaagtaggtaggccctggccactgtccctccccaggccgggcccgtgtggtwtgtgctttcagagtgtcctgtctcctccctgtaccactgagcaccgtggtagtgaatgaactaatgacttgtggaaccactgctgaatatctgtctcccc

SEQ ID NO: 338707 - DNA, 201 bp, Homo sapiens
caagcagtccagcccctgagggaagactcagcgaaagtcagaattctgttcccctgccaagcccagccttcttttgtctcgattatcagaattcagtgacrcgcagcgcccccatcaacagtgacagccagggtcggtgtggcacgcgtttcctcaccacctacgaccggcgctttgtcatcaagactgtgtccagcgagg

SEQ ID NO: 338708 - DNA, 201 bp, Homo sapiens
gcagcaggtgggtgggcgcggggcccattcataaaaaccagtgttcctggcctgcttctctcattggccctgggggcaaggggcgtgccccgcgggtggakcgcgcccggggcccagcagagtgggcagatccacgcttaggtggagcgagggggcgttccttggctttctaggctggactttctcttccccttgctgcgt

SEQ ID NO: 338709 - DNA, 201 bp, Homo sapiens
tcctattcattgagttgtctttttcatttttcttttttttttttttttttttttttgagatggagttttgctctgtcgccctggctggagtgcaacggcgygatcttggctcactgcaacctctgcctcccgggttcaagcgattctcctgcctcagcctcctgagtaactgggattacaggtgcccgccaccacaccagg

SEQ ID NO: 338710 - DNA, 201 bp, Homo sapiens
tgagactcttaaggaaaaaacaaacaaaacaccacagcaccagagccaatctgcctgttagctgttactaccatgcacatggaagaatggacaaccccccsccgcccccccgcctccagctgtgtagaacgaactctggctaggagccactcacctgacataactttgaacatgtcacctctgtgcacctcatctactgca

SEQ ID NO: 338711 - DNA, 201 bp, Homo sapiens
catggcctctttttttaaaacaagagacagggtctcactctgttccccaggcttgagtgcaatagtgccgtcatagcttactgcagcctcaaattcctggsctcacgcgatcctcccacttgagcctcccaagtaggtaggactacaggtgtgcactgccacgcccagccaatttttaaatttttttgtagagatggggtc

SEQ ID NO: 338712 - DNA, 201 bp, Homo sapiens
agctctgaccctttgcggggagaacaggcagcaggtgggtgggcgcggggcccattcataaaaaccagtgttcctggcctgcttctctcattggccctggrggcaaggggcgtgccccgcgggtggagcgcgcccggggcccagcagagtgggcagatccacgcttaggtggagcgagggggcgttccttggctttctagg

SEQ ID NO: 338713 - DNA, 201 bp, Homo sapiens
taaaaccaaatcctacaaacaaacttgggaaaaaaaattttttttaattgtggtaaaatacatataataataggtgttttttttgtttgtttgtttgtttygtttttttttaggagattctcgttctgtccccaggctggagtgcagtgcagtggcacgatctcggctcactgcaacctccgcctcctgggttcaagtgat

SEQ ID NO: 338714 - DNA, 201 bp, Homo sapiens
ttgttccttacagccggctgccagctctgtcaagtagcagtggtctgcccaaatagtcctctctttctgatcgtttggttgttgtggctgctcaaattctyccatcctccaggcctccttacctttgaatgtagaactccaccctgggtttccttttttttccctcttgaacaagatgtatcaactggagaagcacaggct

SEQ ID NO: 338715 - DNA, 201 bp, Homo sapiens
tgggaggctgaggcaggaggattgcttgatctcaggagttctagaccagcctgggaaacatggcgaaactacatctctacaaaagctacaaaaataagccrggcatgttggtgcacacctgtagtcccagctacttggtaggctgaggcgggaggatcacttgagcccaggaggtagaggctgcagtgagctgagatctca

SEQ ID NO: 338716 - DNA, 201 bp, Homo sapiens
ttgttactcggtcttcctgctgtcccaggggtcatctgacaacatttctagggaaactgggtgatcagaatatgaaccccatgtccctttctggaagtcartccttgattttgttctgcatcctgcttctcactctaccaggcctctctctgctggttctgtttctcacagaaagcaacctgtctgtagagaactggtaga

SEQ ID NO: 338717 - DNA, 201 bp, Homo sapiens
ggcgagaggatcccttgagcccaggagttcaaggctgcagtgagctatgatcgcaccactatactccagtttgggtgacagcaaaacaccatctttaaaaraaaaaaaaaaggctgggcacagtagctcacacctgtaatcctagcactttgggaggctgaggcaggaggattgcttgatctcaggagttctagaccagcc

SEQ ID NO: 338718 - DNA, 201 bp, Homo sapiens
tgactttagttttccccatgaaggtggtcctcacttctccaccagggttttctgaggaggtattaggggaaagtaaagagtaggatcctgatcagccgggmatggtggtgcatgcctatagtcccagctgctcaggaggccgaggcgagaggatcccttgagcccaggagttcaaggctgcagtgagctatgatcgcacca

SEQ ID NO: 338719 - DNA, 201 bp, Homo sapiens
ctacatggtggttaccaggaacgtgttcagccatcggctcactgtgcatcgcaagtatgacctcaaggtaaagggctctgtgtttgccggagctgtgcctyccctctatctgagccccgaaggggccactactccaacttccatgtaattgggaagctggagcctatgtgttggcatggacagggaactctggagtggata

SEQ ID NO: 338720 - DNA, 201 bp, Homo sapiens
gccacagaggaggacaaagccaagaactacgaggaggcgctgcggctgtaccagcatgcggtggagtacttcctccacgctatcaagtgtgagtcacacgmggggtcctcaggctgccgcactccagaggggagcggaggagagggggtggcgcacgagcctcacaggggcccctctgtgttccctttcacagatgaggcc

SEQ ID NO: 338721 - DNA, 201 bp, Homo sapiens
cgcccaccacggtgatcccagtcatatgaacacaaatgctggtggtatctcggaggcgtgggaggggaagtgagggggtcccccaggcaggagaggggtgrgtggtgtcagctgcctcaccagaggcgaggcctcctcctggatggagggtctgcaccacgttcccatccgcagagggagaggtctggcgaggcaggggtg

SEQ ID NO: 338722 - DNA, 201 bp, Homo sapiens
cagggcgggttataggagtgtttgctgggggggtcctgaagtgagctgctgagagcattggcccaaatgtccctgaagtacttgcttgagtcacacggcaytgttaagccaggaaggcttcgttccttaaccagtgtgcaggcagcggagcctggacttgctgggagcacctctgtgctccaggctgaagggccagcttgt

SEQ ID NO: 338723 - DNA, 201 bp, Homo sapiens
gtgttgtaagtgcagagctagcgcatggggctcctgggattgaggctctgcgtttggggctgacaccaaggtgtgctcctcctcttggtgcagtgtggccygagggctcctcaccaccacgttttccgcaattccggcatgaccgtggcctgcgcctccctgtgggaagggtgagaagagggaagtgccgggagcccaggc

SEQ ID NO: 338724 - DNA, 201 bp, Homo sapiens
cgcaggccaggaagccggcgacgctctcgcagccctcgggaaaggtgaccaggcggctgtcaagcactcgcaggctggggttcacgaacacgcgcaggggraagggctccatttggcggagcgcgcgctggcggggcgggcactcccgacacagcgcctcggggagctccagcgccagcacctgccgcggcacccccagct

SEQ ID NO: 338725 - DNA, 201 bp, Homo sapiens
tgactccatgctcaccaggggacccaggagccatggagatgacttggatggatgtccctggggacaaactcttagagcctgtggtttgcatggtaagtgasttgacaggggagggaagagggctgcacagagcccagaaaattgagggtttgggtccagaataaaaacggtcttctccaggccaggcatggtagctcacgc

SEQ ID NO: 338726 - DNA, 201 bp, Homo sapiens
cgtccgtttcactcaaatcttcgtgcctccccttccgtgaataccattccatcatccgctgtcaactcctgccgtgtgctgggctctctaggtttgaaaarcgaatttatatccccttgccggaggaagctgcccgcgcccagatgttccggttgcatctcgggagcactccccacaacctcacggatgcaaacatccacg

SEQ ID NO: 338727 - DNA, 201 bp, Homo sapiens
tctccacaggggtggggaataacaatgatgggactctggttcttggagccacaaacatcccatgggtgttggattcggccatcaggaggaggtgagtcttycccaggagaagccagggctggaggcttcctcccaccatggtcacggtccgcctgctgctggcagcccgggtgcagcctggccccttttccctggagtctt

SEQ ID NO: 338728 - DNA, 201 bp, Homo sapiens
ccggccctgtcctaagtgctgggaagatatgagtgaccaacagacaaaaatcctagaccttccgttgttggtggggagacagtcaacacagtcagtgagtktctcagaggatggagatggagcagggttaggagagaggtgtctcgggcatggagggaagggcagatggcactggggtgatgcctgagacaggaggtgaag

SEQ ID NO: 338729 - DNA, 201 bp, Homo sapiens
gggtaaggcagtcaggcgggtgttcaccactgccttttcttcctctgagcgtgagaacactgaacccagccactgcccctgggtccctgtcctggaaatgrtctaataaatccttttcccttcttgagctacccaagtgatctcatctttccttgactcttaactgagactctgaagggccacccttgcttccaattaaaa

SEQ ID NO: 338730 - DNA, 201 bp, Homo sapiens
ggctcgcggccctgtggcagcggcaggggatgagagtgggtccgctgctgggttggctcatgccccttggccgggcccgggcccgggccggcctccctctygcaggtgccgtcgtgatggagaagcccaacatacggtggaacgacgtggccgggctggagggggccaaggaggccctcaaagaagctgtcattttgccaa

SEQ ID NO: 338731 - DNA, 201 bp, Homo sapiens
attttcatgctgctgataaagacatacccgagactgggaagaaaaagaggtttaattggccttacagttccacatggctagggaggcctcagaatcatggyaggagaccaaaggcacttcttacatgctggtggcaagagaaaatgaagaaacaaaagtggaaacccctgataaacccatcagatctcgtgagacttcacc

SEQ ID NO: 338732 - DNA, 201 bp, Homo sapiens
aggcgctgcggctgtaccagcatgcggtggagtacttcctccacgctatcaagtgtgagtcacacgaggggtcctcaggctgccgcactccagaggggagsggaggagagggggtggcgcacgagcctcacaggggcccctctgtgttccctttcacagatgaggcccacagcgacaaggccaaggagagcattcgagcca

SEQ ID NO: 338733 - DNA, 201 bp, Homo sapiens; identical to SEQ ID NO: 71320

SEQ ID NO: 338734 - DNA, 201 bp, Homo sapiens
attacgggcacccgcaaccacgcccggctaatttttgtatttttagtagagaccgggtttcaccgtgttggccaggctggtctcgaactcccgacctcagrtgatctgcccacttcggcctcccagagtgctgggattacaggtgtgagccacgggtctggcctaaacacagctttattaaggtataacttgcgtgcttac

SEQ ID NO: 338735 - DNA, 201 bp, Homo sapiens
agctgcttttgtgccatcaaggtagagttgagtcgttgctacagagattatctggctggcaaatcctaaattatttaccatctggtcctttacagtaagcrtttgccagcccccattagcactcttttctttcatcctcatcttttgccatacgtgttactagagatgcggcggggctggcagtttctcaccttaccctcc

SEQ ID NO: 338736 - DNA, 201 bp, Homo sapiens
acctgagatattaggtcaggtttccacttgctgaaatccagagcgtggcttttaaccgtctgagcttattgtgaagatggccggctggttttcaaagcctyctttgaaggcctttctagccgatgttgaaaaagtaggccaatgaaatggcccgcaagcaataaatccacaggcccagcggcatccctcgtcacgtttcat

SEQ ID NO: 338737 - DNA, 201 bp, Homo sapiens
agcgtggcttttaaccgtctgagcttattgtgaagatggccggctggttttcaaagcctcctttgaaggcctttctagccgatgttgaaaaagtaggccawtgaaatggcccgcaagcaataaatccacaggcccagcggcatccctcgtcacgtttcatccccatgcctgtgaccccagggactttccacctctccgagg

SEQ ID NO: 338738 - DNA, 201 bp, Homo sapiens
aggtcaggtttccacttgctgaaatccagagcgtggcttttaaccgtctgagcttattgtgaagatggccggctggttttcaaagcctcctttgaaggccyttctagccgatgttgaaaaagtaggccaatgaaatggcccgcaagcaataaatccacaggcccagcggcatccctcgtcacgtttcatccccatgcctgt

SEQ ID NO: 338739 - DNA, 201 bp, Homo sapiens
gcttttaaccgtctgagcttattgtgaagatggccggctggttttcaaagcctcctttgaaggcctttctagccgatgttgaaaaagtaggccaatgaaayggcccgcaagcaataaatccacaggcccagcggcatccctcgtcacgtttcatccccatgcctgtgaccccagggactttccacctctccgaggaagcac

SEQ ID NO: 338740 - DNA, 201 bp, Homo sapiens
cctttgaaggcctttctagccgatgttgaaaaagtaggccaatgaaatggcccgcaagcaataaatccacaggcccagcggcatccctcgtcacgtttcakccccatgcctgtgaccccagggactttccacctctccgaggaagcactgagccatttgctttgcctttccagaaagccattgatctggtgacgaaagcca

SEQ ID NO: 338741 - DNA, 201 bp, Homo sapiens
tggtgaatcccgtctctattaaaaatacaaaaaaataggccgggcgcggtggctcacgcctgtaatcccagcactttgggaagccgaggcgggcggatcaygaggtcaggagattgagaccatcctggctaacacggtgaaaccccgtctccactaaaaatacaaaatattagccgggcgtggtggcgggcacctgtagtc

SEQ ID NO: 338742 - DNA, 201 bp, Homo sapiens
ggtggcgggcacctgtagtcccagctactcaggaggctgaggcaggagaatggcgtgaacccgggaggcggagcttgcagtgagccgagatcgagccactrcactccagcctgggcgactgagtgcgactctgtcttaaaaaaaaaattagccaggcattgtggcatgtgcctgtaatcccagctactcgggaggctgacg

SEQ ID NO: 338743 - DNA, 201 bp, Homo sapiens
ctgcttatgtggattcttttccacactgctttcatttttaagtataaagacttagaaaactagaataatgcttttacaaataattaaaagtatgtgatgtkctgggttttttccttctttttagaaccctgtatttaaacaagccttctttttaagtcttgtttgaaatttaagtctcagatcttctggataccaaatcaa

SEQ ID NO: 338744 - DNA, 201 bp, Homo sapiens
tctggcgaggcaggggtggaggccagggatctccaataaggattaaatcaagttttgaggatgacagattccatccagggaggaagtagccctggggtgavagtggctgcgttctccccaggagttccctttcgatttcggttttgctttctcctctgtccttcggcagtggctgctttggagtcaggggcacatgctgtc

SEQ ID NO: 338745 - DNA, 201 bp, Homo sapiens
aatgaaaatgtgtaacttaagggtattatatatataaatacatatatacctttgtaacctttatactgtaaataaaaaagttgctttagtcacgtgggttkttttttttttccaatttttaaaatgctgaaatagttttgaacctacaggaaagttacaaaaacaatacaaatcttcttcacccaaaccttccagttgtta

SEQ ID NO: 338746 - DNA, 201 bp, Homo sapiens
ctttccgtctcccttcccagcagtgacagtgacagtgaaggggataatccggagaaaaagaaactgcaagaacagctgatgggtaagtggctcgcggcccygtggcagcggcaggggatgagagtgggtccgctgctgggttggctcatgccccttggccgggcccgggcccgggccggcctccctctcgcaggtgccgtc

SEQ ID NO: 338747 - DNA, 201 bp, Homo sapiens
tgttaggaaatgtccactcctttgggggtgatttttctcctcaagttgtagccaacattttgtccgtaactgatttcagggcaaacatttctgacatcttmctccagctcagtctgccatgccttggcaatccagtttcctgtcatatgcgagccatccaagttgatgccaagtaagatttgcccagctcaaagtgaaagt

SEQ ID NO: 338748 - DNA, 201 bp, Homo sapiens
attgttaggaaatgtccactcctttgggggtgatttttctcctcaagttgtagccaacattttgtccgtaactgatttcagggcaaacatttctgacatcwtcctccagctcagtctgccatgccttggcaatccagtttcctgtcatatgcgagccatccaagttgatgccaagtaagatttgcccagctcaaagtgaaa

SEQ ID NO: 338749 - DNA, 201 bp, Homo sapiens; identical to SEQ ID NO: 71317

SEQ ID NO: 338750 - DNA, 201 bp, Homo sapiens
cacccagcctgggctgtgagagccactgcaggtggcctcccagagtatgaggtgtgagtcaccgcacctggcctgggctgctctttaagtccagctgaagsacatttcccttacggccttcaggagagggccgacccggattcccatctgctccgcgaagaaacagggcgggttataggagtgtttgctgggggggtcctg

SEQ ID NO: 338751 - DNA, 201 bp, Homo sapiens
tgttaatctattttcatgctgctgataaagacatacccgagactgggaagaaaaagaggtttaattggccttacagttccacatggctagggaggcctcaraatcatggtaggagaccaaaggcacttcttacatgctggtggcaagagaaaatgaagaaacaaaagtggaaacccctgataaacccatcagatctcgtga

SEQ ID NO: 338752 - DNA, 201 bp, Homo sapiens
gtttgcatggtaagtgacttgacaggggagggaagagggctgcacagagcccagaaaattgagggtttgggtccagaataaaaacggtcttctccaggccrggcatggtagctcacgcctgtaatcccagcactttgggaggccagggtgggcagatcacaaggttaggagttcgagaccagcctagccaatatggagaaa

SEQ ID NO: 338753 - DNA, 201 bp, Homo sapiens
tagccgacatgatgtaagactgtagccaagctgaaacaatgaaaagcagaggaaacttccttccctatgaaacaggtaacaaaacacagtgacaccagcakccctctcatcccatttattaaagaaacagtaagaaaagatacaatgcaggaaaaccaccaaccatccttgcacaccaggccgaacaaagcacagtgattt

SEQ ID NO: 338754 - DNA, 201 bp, Homo sapiens
gcattttggtttttcctcattgagaattcaaatcctcttttgtattgtttctacaataatttgtaaacatatttatttttacctgctttttttttttttttaattttcaggtcaagttttttatactgcacttatttgtcaaaataaagattctcacatatgccggttatctcgaaactactactttgtatttaatgaaag

SEQ ID NO: 338755 - DNA, 201 bp, Homo sapiens
cgcattttggtttttcctcattgagaattcaaatcctcttttgtattgtttctacaataatttgtaaacatatttatttttacctgctttttttttttttttaattttcaggtcaagttttttatactgcacttatttgtcaaaataaagattctcacatatgccggttatctcgaaactactactttgtatttaatgaaa

SEQ ID NO: 338756 - DNA, 201 bp, Homo sapiens
cctcaaagatgccttgaggttagtcctgcaacccacattttacagatgacgtaagggggcacagacatcaagtggcagagctgggatctgaaccccagtaktctggcttctgagtctaccaagtcttatgctcagtaagcggtaacggttttgatcagtgggtcatgtccactagtaacagagaacacccatgctcccacg

SEQ ID NO: 338757 - DNA, 201 bp, Homo sapiens
cctatgtgacgggctaccagttcatccacacggaaaagcactacctgtccttcggcctgtacggcgccatcctgggcctgcacctgctcattcagagcctktttgccttcctggagcaccggcgcatgcgacgtgccggccaggccctgaagctgccctccccgcggcggggctcggtggcactgtgcattgccgcatacc

SEQ ID NO: 338758 - DNA, 201 bp, Homo sapiens
ctgggcggcaccgagcaggccggcttctttgtgtggcgcagcaacttccatgaggcaggcgagggtgagacggaggccagcctgcaggagggcatggaccrtgtgcgggatgtggtgcgggccagcaccttctcgtgcatcatgcagaagtggggaggcaagcgcgaggtcatgtacacggccttcaaggccctcggcgat

SEQ ID NO: 338759 - DNA, 201 bp, Homo sapiens
gaaggggtcatgtctctcaggcagtgagcagcctggcagtggggtgggggacagggtgtgcaggtctgaggtcagaatgggctgacgacgcactccctctrcaggtgtgcgactctgacactgtgctggatccagcctgcaccatcgagatgcttcgagtcctggaggaggatccccaagtagggggagtcgggggagatg

SEQ ID NO: 338760 - DNA, 201 bp, Homo sapiens
ggatgacctacgagtcagtggtcacgggtttcttccccttcttcctcattgccacggttatacagcttttctaccggggccgcatctggaacattctcctyttcctgctgacggtgcagctggtgggcattatcaaggccacctacgcctgcttccttcggggcaatgcagagatgatcttcatgtccctctactccctcc

SEQ ID NO: 338761 - DNA, 201 bp, Homo sapiens
acacagcttattgccaggacctgttcagtgagacagagctagccttccttgtctctggggctatactgtatggctgctactgggtggccctcctcatgctrtatctggccatcatcgcccggcgatgtgggaagaagccggagcagtacagcttggcttttgctgaggtgtgacatggcccccaagcagagcgggtaaagt

SEQ ID NO: 338762 - DNA, 201 bp, Homo sapiens
caggtagagcccagttctgccacccaccagccagatgtcacgtgaccctctgggccttggcttgtctaccccagtgctacactaagggctttgtatgtgtmgcccatttaaccctcaaagatgccttgaggttagtcctgcaacccacattttacagatgacgtaagggggcacagacatcaagtggcagagctgggatct

SEQ ID NO: 338763 - DNA, 201 bp, Homo sapiens
ctactgggtggccctcctcatgctatatctggccatcatcgcccggcgatgtgggaagaagccggagcagtacagcttggcttttgctgaggtgtgacatrgcccccaagcagagcgggtaaagtgcaatgggtaagggagggaaggggaatggaagagaaaagacagggtgggagggaggagggagtgctgtgttttagt

SEQ ID NO: 338764 - DNA, 201 bp, Homo sapiens
gcctttttgccttcctggagcaccggcgcatgcgacgtgccggccaggccctgaagctgccctccccgcggcggggctcggtggcactgtgcattgccgcrtaccaggaggaccctgactacttgcgcaagtgcctgcgctcggcccagcgcatctccttccctgacctcaaggtggtcatggtggtggatggcaaccgcc

SEQ ID NO: 338765 - DNA, 201 bp, Homo sapiens
tctttacagccctgggatcactgcataaggttgccctgggccagagccagtgagcgcttgctggatctcagcctgtcttctaaccgcctgctgcggaggtmtctctccctcctaggcagaactctgcccgagccagtggggaaacccaggcagcacgagagctcttctttccctaaccttgctcagttagaaagacatcca

SEQ ID NO: 338766 - DNA, 201 bp, Homo sapiens
cagcagccctctcatcccatttattaaagaaacagtaagaaaagatacaatgcaggaaaaccaccaaccatccttgcacaccaggccgaacaaagcacagkgatttcttcccttcatcccccacccccaccctaattcccatattcccatccacatcagtttaaattttgaggttctttgattgattgggagtaccagtga

SEQ ID NO: 338767 - DNA, 201 bp, Homo sapiens
agatcgaggccttgaggtccagccattcttaagttaagaccagatcctgtgcccaagaggccacctgctctggcatctagattagggcctgggcccaggcyacttggtcttgggttgggcccaaggcctgggcctggaaacacacctgacctgggggcagggtttgtccctaaaaagcctgatctcagattggggtttggt

SEQ ID NO: 338768 - DNA, 201 bp, Homo sapiens
tgcttgaaggtgcagtggctgtcctgccagcccacctgtgtaccaactcagtctgctgacagcattttgagtcccctaatacgatttttctctggtgtacmcacctaaaattagctcactcagattgcgtgtctggcttttttgacagttgtctctgcatgagggttgatatgtttatctttttctggcttcctaggccca

SEQ ID NO: 338769 - DNA, 201 bp, Homo sapiens
cagactgtagctccacaactacccttttacctaagacagcccctgccaagaaccacagtgcctagaaaccaaggtggtcctggagggaaaatggtgtttawgggggcaacattccatttgggtacattgcagccattggaccccctggtctggggaaagcagctgggtttgtgccagggaggctccccactctaggaaatg

SEQ ID NO: 338770 - DNA, 201 bp, Homo sapiens
acgcattttggtttttcctcattgagaattcaaatcctcttttgtattgtttctacaataatttgtaaacatatttatttttacctgctttttttttttttttaattttcaggtcaagttttttatactgcacttatttgtcaaaataaagattctcacatatgccggttatctcgaaactactactttgtatttaatgaa

SEQ ID NO: 338771 - DNA, 201 bp, Homo sapiens
gtggatgattttcccatacaggatatgatgccccacgatcagcacagggattccctttggcagaacaagaacgagattcctgaggttccggggcaaggccrtaacactcaggcgcctcctaaagctgctcttggcaggctatgctggcacctccaatccctggtctggctctgccattgttgagcagccacactggaccac

SEQ ID NO: 338772 - DNA, 201 bp, Homo sapiens
cagggattccctttggcagaacaagaacgagattcctgaggttccggggcaaggccataacactcaggcgcctcctaaagctgctcttggcaggctatgcyggcacctccaatccctggtctggctctgccattgttgagcagccacactggaccacccacccatgtgccctttttactttctagccccacataggagaat

SEQ ID NO: 338773 - DNA, 201 bp, Homo sapiens
aaattcctgacctcaagtgatccacccaccttggcctccaaaagtgctagaattaaaggcatgagcaactgcacctagccacgttgatgatgatgatgatkattattattattattattattatttagagatggagtcttgctctgtcacccaggctggaatacagtggtgatcacagctccctgcagcctccaactcctg

SEQ ID NO: 338774 - DNA, 201 bp, Homo sapiens
tgtaaacgaatgggtaaatgtctcattttaattttgcttttcctgacaggtcacgcagagcatctttttttttttttttgagacggagtctcccattgtcrcccaggctggagtgcaatggtgcaatcttggctcactgcaacctccccctcccgagttcaagtgattctcctgcctcagcctcccaagtagctgggatta

SEQ ID NO: 338775 - DNA, 201 bp, Homo sapiens; identical to SEQ ID NO: 71336

SEQ ID NO: 338776 - DNA, 201 bp, Homo sapiens
gtggtttggagtccctgccattctgaaaggctggtttgagcgagtgttcataggagagtttgcttacacttacgctgccatgtatgacaaaggacccttcygggtaggtggatggttctgaatgctctgacagccagcttctgggtggtctgtcctgatgcaggggtgtttgtttgtttgtttgtttgagatggagcttcc

SEQ ID NO: 338777 - DNA, 201 bp, Homo sapiens
gtagctgggactacaggtgtgtgccaccacacccagctaattttttttggtcagagcagaagaacttgaaacccagctaattaaaaaaaaaaaaaattttkgctgggagtggtggctcattcctgtaatcccagcacttttgggaggctgaggcgggaggactgcttgaggccaggagttcaagaccaagattcagctcaa

SEQ ID NO: 338778 - DNA, 201 bp, Homo sapiens
tctgggtggtctgtcctgatgcaggggtgtttgtttgtttgtttgtttgagatggagcttccctcttgttgcccaggctggagtgcagtggcgggatctcrgctcactgcaacctccacctcctgagttcaagcgattctcctgcctcagcctcccgagtagctgggattataggcatatgccaccatgcccggctaattt

SEQ ID NO: 338779 - DNA, 201 bp, Homo sapiens
taatctcactctgagattggacagtactaagatttagaaagctgttgcctcatctggggcagaatcctgcgttttgtaatttccttccctgtggacctggkcctgcctctaaaaatgcgcctgtacacaaagaagcccatcttggtcaaagtgagtggaggaacagactgcccttgcagttgacaaactgaaattatcagg

SEQ ID NO: 338780 - DNA, 201 bp, Homo sapiens
tagagacagggtttcaccatgttggccaggatggtcttgatctcttgacctcgtgacctgcccgcctcagcctcccaaagtgctgggattacaggctcgarccaccgtgcctggccaactcattcttgttaacagcaaaatatcctgtagtgtggatgtacccataatttcttaaaatgttccccatagacaatcaggtta

SEQ ID NO: 338781 - DNA, 201 bp, Homo sapiens
cccaggctggagtgcagtggcgggatctcggctcactgcaacctccacctcctgagttcaagcgattctcctgcctcagcctcccgagtagctgggattayaggcatatgccaccatgcccggctaattttgtatttctagtagagacggggtttctccatgttggtcaggctggtcttgaactcctgacctcaggtgatc

SEQ ID NO: 338782 - DNA, 201 bp, Homo sapiens; identical to SEQ ID NO: 71331

SEQ ID NO: 338783 - DNA, 201 bp, Homo sapiens
gattggcctggcacggtggctcacacctgtaatcctagctactggggatgctgaggcaggagaatcgcttgaacctgagaggcggaggttgcagtgagccragttcatgccactgcactccagcctgggcaacagagtgagactgtcaaaaaaaaaaaaaagtttaatgtgatcactgcacatttttccccctcataccaa

SEQ ID NO: 338784 - DNA, 201 bp, Homo sapiens
ccgcctcccgggttcaagcgattctcccatctcagcctcccgagtagctgggattacaggagtgcgccatcatgcgcggctaatttttatatttttagtasagacgggtttcgccaagttggccagcgcggtcttgaactcctgacctcaggtgatccacccacctcagcctccccaagtgctgagattactgacgtgagc

SEQ ID NO: 338785 - DNA, 201 bp, Homo sapiens; identical to SEQ ID NO: 71332

SEQ ID NO: 338786 - DNA, 201 bp, Homo sapiens; identical to SEQ ID NO: 71335

SEQ ID NO: 338787 - DNA, 201 bp, Homo sapiens; identical to SEQ ID NO: 71339

SEQ ID NO: 338788 - DNA, 201 bp, Homo sapiens
ctgaattttggagggggacacgtttaaaacatagcaggttgtcctgacaaaggaagaaagtgcaggccgggcgtggttgctcacacctataatcccaacaytgtaggaggctgaggcaggcaaaattgccccagcctgggcaacacggctccaaatttgaccagcctgggcaacatggcaaatccctgtctctacaaaaaa

SEQ ID NO: 338789 - DNA, 201 bp, Homo sapiens
ggcggtggtaatgaggtgaaaagggaagacttggatcttgtataattagttttagctgtacccagctaaccaaatcttgaggttaactaaagcatccaggwtttttgtttgcaactaatagatgcatctgatttgcactcatgttccctggagcactcaagtgagaagagaaggcagaaggagaatgcatgaaactgatac

SEQ ID NO: 338790 - DNA, 201 bp, Homo sapiens
ctgatcaatatacactccttcatttttcttatagcactgaattatgggataaaccaggttggttgtcctgtagaatgtcccacactgtgatttgactgatrtttccccatgattttaacttctatctcctgtgtttcccaatcaacccacttgggtttttgttttttctttttgtttttagatagggtgtcactgtgctgc

SEQ ID NO: 338791 - DNA, 201 bp, Homo sapiens
tctactttttaaaaatggactttgttgaggaataacatgcatacaataaaatgcttgtatttaaaatgtacttttcagcggattttaataaatacatacayctgtgtaactaccgccaccatcaagtcgctctcttcttcacagcccccactctgtctcctctcatcatgctttcccaacctacatcaatccctcagactc

SEQ ID NO: 338792 - DNA, 201 bp, Homo sapiens
gtttatagtacaactgcatggaattggttgacttacctctctgtgctttctgtatcctcagagtggcattctgcatttctgtggcttccaagtcttagaayctcaactgacatatagcattgggcacactccagcagacgcccgaattcaaatcctggaaggatggaagaaacgcctggagaatatttgggatgagacacc

SEQ ID NO: 338793 - DNA, 201 bp, Homo sapiens
gaagtcctttattttacccacaggcctgttgctaagaatcaaagccacatgccactagccagtaccccaaaggacggctttaaaaaaaaattaaattggaracaaggtctcacggtcacccaggatggagtgcagtggcatgatctctgctcactgctgcctcaacctcctgggctcaaatgatcctcccacctcagtctc

SEQ ID NO: 338794 - DNA, 201 bp, Homo sapiens; identical to SEQ ID NO: 71337

SEQ ID NO: 338795 - DNA, 201 bp, Homo sapiens
tgaactttgtcccttacctctcctaacacactaatgccattgtaccctgaagaggttatccgtgtgtgcatcttgtggcctctctcagggtaaactctaayagtctaactcctcccaggtcatgttgctcagctagttaagtggcaggaagggaaaatgaaccctccagggcccagaaaacttttaaattgcctattcaca

SEQ ID NO: 338796 - DNA, 201 bp, Homo sapiens
ttacatttccactgctagtattaaggaaagacagcagtggtgatttttataaagtgagtatacatttatttttattctgatatgtgaatttttctttcacsagttaattaactggtaatttgtaaacagtgggaagaagattagaacaattatggaggtactgaattacacaaggagattaaaatgaaatgaatcaatcta

SEQ ID NO: 338797 - DNA, 201 bp, Homo sapiens
ctgccaccacacccagctaatttttgtatttttagtagagacagggtttcaccatgttggccaggctggtctcaaactcctgacctcaggtgatctgcccrccttggcctcccaaagtgctgggattacagttatgagccacagagcccagttgtcaacattatttattaaatcagccactgatttaaatgcttcctttaa

SEQ ID NO: 338798 - DNA, 201 bp, Homo sapiens
ccgagttcaagtgattctcctgcctcagcctcccaagtagctgggattacaggtgcctgccaccacacccagctaatttttgtatttttagtagagacagsgtttcaccatgttggccaggctggtctcaaactcctgacctcaggtgatctgcccgccttggcctcccaaagtgctgggattacagttatgagccacaga

SEQ ID NO: 338799 - DNA, 201 bp, Homo sapiens
gaagggaaaatgaaccctccagggcccagaaaacttttaaattgcctattcacaagcatctttttgtttgtttgtttgagacagaggcttgctctgttgcrcaggctggagtgcaatggtgcgatctcggctcattgcaacctccgcctcctggattcaagcaattctcctgcctcagcctcccgattagctgggattaca

SEQ ID NO: 338800 - DNA, 201 bp, Homo sapiens
tgctgcctctgacaaccttgttaatataaaagaggcccatttcccttctacctgtacctctttgccatttcttataaaggaagctgagctgttaatagttyaatgtgattggcctggcacggtggctcacacctgtaatcctagctactggggatgctgaggcaggagaatcgcttgaacctgagaggcggaggttgcagt

SEQ ID NO: 338801 - DNA, 201 bp, Homo sapiens
tggcgtgatcttggctcattgcaatctccacttcccaggttcaaacgattcttgtgctgcagcctcccaagtagctgggattacaggcgcccaccaccacrcccagctaattgtgtatttttagtagagacggggtttcaccatgttggccaggctggtctctagctcctgacctcaagtaatccacccgcctcggtctcc

SEQ ID NO: 338802 - DNA, 201 bp, Homo sapiens
atgatgtacagtccttgagcttgctttcttccaggtacttagtctccccttcagttagcgattccttcagttagcgattccttcagttagcgaatcctgcrgttagcgattcctgttggactctctcaaaatttgcagttctcctcctttctccataagaatcccaaatactttgtagaataatccatgagacattgactt

SEQ ID NO: 338803 - DNA, 201 bp, Homo sapiens
gggttttccctgtgtgctttgtgtgtgtctctgtaggcagaagagcactgatcgtactggctcactcagagaggacgtccttcaactatgccatgaaggargctgctgcagcggctttgaagaagaaaggatgggaggtggtggagtcggacctctatgccatgaacttcaatcccatcatttccagaaaggacatcacag

SEQ ID NO: 338804 - DNA, 201 bp, Homo sapiens
gatggaatgcaataacctaatgtcaaacaaagccgccccctcctttacagactgcaactcccctgtagctgaaggtttgctggttggtaatgggttttccstgtgtgctttgtgtgtgtctctgtaggcagaagagcactgatcgtactggctcactcagagaggacgtccttcaactatgccatgaaggaggctgctgca

SEQ ID NO: 338805 - DNA, 201 bp, Homo sapiens
cggagaccagaaccggctccaggctgccaggcacaggttttgttttgttttgttttgttttgtttgagacggagttttgctcttgtcgcccaggctgtagygcaatggcgctatctcagctcagcgaaacttccgcctcccgggttcaagcgattctcccatctcagcctcccgagtagctgggattacaggagtgcgcca

SEQ ID NO: 338806 - DNA, 201 bp, Homo sapiens
ggattggtagcccagcatgagttactggcagagacagcagggaatagattctgacagctgagaggcttgccgcatacacggtggttgctgtttcccttgtrtttcattcttcagcgtcgaggcactggcaccctctcctccaatactagggcaggaactatttcctgacttttcaatcttacagaatgttctgtatttacg

SEQ ID NO: 338807 - DNA, 201 bp, Homo sapiens
aaccacgagcccagccaatcagcgccccggactgcaccagagccatggtcggtgagtgctgcaaagggcggggtgcttggcggtcgtctctcgagcactgstgcctgtggaggaggttgtaggggcttggccctgaattttgttccttgactcaaaacccacaaagggaagagattagggacctgggatgagccttgatcg

SEQ ID NO: 338808 - DNA, 201 bp, Homo sapiens
caactgcagggattgagagctgtttcccaaataatctcactctgagattggacagtactaagatttagaaagctgttgcctcatctggggcagaatcctgygttttgtaatttccttccctgtggacctggtcctgcctctaaaaatgcgcctgtacacaaagaagcccatcttggtcaaagtgagtggaggaacagactg

SEQ ID NO: 338809 - DNA, 201 bp, Homo sapiens
ttgaggcctctgtcacacacacccctacaatcccctcccccagccccgagagacttttcttgacttccaccagttgctccggcgggtgagagtggagaggsccctccttcatcccccaggctccctcccttcctggagctgcagcctcagcatcctccgcccagcaccccaggattcaggcgttgggtcccgcccttgtag

SEQ ID NO: 338810 - DNA, 201 bp, Homo sapiens
cagtgtgccttctgaagtaataccggttttggttttcgtcttctagagtagaagctgagatttctctccacacgcttccccatcttgattatgcctccactgttttttttttccccctaatctgagttgaccttgaggccagaaactcataaatcaaccctttttttttgtttttgactcatgttttgtcatttttcttaa

SEQ ID NO: 338811 - DNA, 201 bp, Homo sapiens
agtgtgccttctgaagtaataccggttttggttttcgtcttctagagtagaagctgagatttctctccacacgcttccccatcttgattatgcctccactgttttttttttccccctaatctgagttgaccttgaggccagaaactcataaatcaaccctttttttttgtttttgactcatgttttgtcatttttcttaaa

SEQ ID NO: 338812 - DNA, 201 bp, Homo sapiens
gtgtgccttctgaagtaataccggttttggttttcgtcttctagagtagaagctgagatttctctccacacgcttccccatcttgattatgcctccactgttttttttttccccctaatctgagttgaccttgaggccagaaactcataaatcaaccctttttttttgtttttgactcatgttttgtcatttttcttaaat

SEQ ID NO: 338813 - DNA, 201 bp, Homo sapiens
tttctctccacacgcttccccatcttgattatgcctccactgttttttttttccccctaatctgagttgaccttgaggccagaaactcataaatcaaccctttttttttgtttttgactcatgttttgtcatttttcttaaatattcaagactgttttatttaatcttcaagtctgttgcattacatctcattttaaaaat

SEQ ID NO: 338814 - DNA, 201 bp, Homo sapiens
actaacctgtttcaaccacatgctgatatagccagagacatcactaatgtgccaaggtttctcttggagcttgagctgcagctctttacctgcagttttgttttttttgttttgttttttgagacaaggtcttactttcacccaggctggagtgcagctcactgcagcctcagtctcctggggtcaagtgatccttctatt

SEQ ID NO: 338815 - DNA, 201 bp, Homo sapiens
agacagagtctcgttctatcacccaggctggagtgcaatggcgcgatctcagcccactgcaacttccacctcccgggttcaagcgattctccctgcctcarcctcctgagtagctgggattacaggcacctgccaccacatctggctaatttttgtagttttaatagagacggggttttgccgtgttggccgggctggtct

SEQ ID NO: 338816 - DNA, 201 bp, Homo sapiens
atgggagctcgatcttggctcactgcaacctccgcctcctgggttcaagcgattcgactgcctcagcctcccgaatagctgggactacaggtgcccgccaycaggcccagctaattttggtatttttagtaaagatgatgtttcactatgttggccaggatggtctggaactcctgacctcatgatccgcccacgttggcc

SEQ ID NO: 338817 - DNA, 201 bp, Homo sapiens
tatagtttctaaatttttggtaatgaaaattattacttttgtaaagaaagttataaaaatactaacaattaaatataaaaatgcagggtgcttggatctcaagaaaataggagcttactgtgattaaaagtcagactgcatataataattagttataattaataatgctttttctttctttgtttacatgaaatctttcag

SEQ ID NO: 338818 - DNA, 201 bp, Homo sapiens
attctatgtttggctttttgaggaacctccaaactgtttcccacagcagctgcactattttatattcccaccagcaatgtacaaagatcccatttttcgattttttttttttaattgtagccatcctagcaggtgtaaagtggtgtctcgttatggtttgattttcatttctttttttttggtgtggggagtccctttctg

SEQ ID NO: 338819 - DNA, 201 bp, Homo sapiens
atagtttctaaatttttggtaatgaaaattattacttttgtaaagaaagttataaaaatactaacaattaaatataaaaatgcagggtgcttggatctcaagaaaataggagcttactgtgattaaaagtcagactgcatataataattagttataattaataatgctttttctttctttgtttacatgaaatctttcaga

SEQ ID NO: 338820 - DNA, 201 bp, Homo sapiens
ttttttttgtggagaacaaggtcttgcttggttgcccaggttggtcttgaattcctggcctcaagcaatcttcctgccttggcctcccaaagtgttgggawtacaggtgtgagccactgtgcctagctatcctttttttttttttttttttaaattctgagagtctctagctcaaacacaagttagcaggttaaggactac

SEQ ID NO: 338821 - DNA, 201 bp, Homo sapiens
tgtccagtggaattaacattataattaaatttaattaattaatttatttgtttttgagacggactctcactgtgtctcccaggctggagtgcagtggcgcsgtctcagctcattacaacctctgcctcccgggttcaagcaattcttctgcctcagcctcccgagtacctgggattacaggtacccgccaccacacctggc

SEQ ID NO: 338822 - DNA, 201 bp, Homo sapiens
caagcaattcttctgcctcagcctcccgagtacctgggattacaggtacccgccaccacacctggctaattttttgtgtttttaatagagacagggtttcmccatgttggtcaggctggtctcaaactcctgacctcaggtgatcctcctggctcagcctcccaaatgctgggattacagaagcgagccactgtgcctggc

SEQ ID NO: 338823 - DNA, 201 bp, Homo sapiens
tgtgagcagtgtgtgtgctcactcccagctcccattatgttccaggcaccatgctgtgttctaaaacagccatgaatgggacaggcgtggtctctgttccygatggagtttatctagtctgatggagaagaaagatattaaataaataattgcaattgtgatacataaatatcatgaaggtacatatggcattgtgagaat

SEQ ID NO: 338824 - DNA, 201 bp, Homo sapiens
atgtttctagatttcattttccaagtcaggtgatctctagtatatctccattgttatatttttattacatcactatggaatttccacctacagataatttrtgtaattttttttccaacaagatttttattctgtaactgccattcttcacattctcctctattctgcccatcagtcccctatttccatagaattagtaat

SEQ ID NO: 338825 - DNA, 201 bp, Homo sapiens
cttaataaaaagtagggaggaatttttgagtgtctagtagatttgaatagtacagacaactaatctagactactgagcataacccccccaatacacttctrtcttgttttgttaggattcagacaaaagcacatttttagtttatattaattatagatatataaacctaactttactctttcttttattgtggtgaaatat

SEQ ID NO: 338826 - DNA, 201 bp, Homo sapiens
ggaatcaaataatatttgtcattttgtatttggcttctttcacttagcataatgtgttttgttttatttttatttaccattttattaattgttaagcatayagttcaatggcattaagtacattcatgttgctgtgcaatcatcagtaccatctatctccagaatttttcattactccaaactgaaactctgtacttatta

SEQ ID NO: 338827 - DNA, 201 bp, Homo sapiens
tataaatggaatcaacaatatttgtccagttgtatctggcttattttacttagcataatgtcttcaaggttcattcatgttgtagtatgtatcagaatttsattcatttttaaggctgaataatattttatgtatataccacattttgtgtatctattcatctgtttataggcatgggttgtctaccatttggctgttgtg

SEQ ID NO: 338828 - DNA, 201 bp, Homo sapiens
atttctttttttttggtgtggggagtccctttctgacagaattcatttcctgaatgactactgatattgcacatcttttcatcttcttattggtcatttgwgtatttactttgaagaaatgtctactagagttctttgcctttttgtaaatttgaatgtgagaaggagagagagcgagagagctctttgcccacttttaaa

SEQ ID NO: 338829 - DNA, 201 bp, Homo sapiens
tctcatttgtaacattttgcaagactttagtatggtatcacaaccaggatattgacattaatcagtccacagatattattctgatttcccagttttacttytctcttttttttttttttttttgagatggagtcttgctctgttgcccaggctggagtgcagtggcacaatctcagctcactgcaacctccgcctcccgcg

SEQ ID NO: 338830 - DNA, 201 bp, Homo sapiens
ttgtatttttagtagagatggggtttcaccatgttggccaggctggtctcgaactcctgacctcaggtgatccacctgccttggcctctcaaagtgctggrattacaggcatgagccaccagctactgcacctggcttatttcccattttcatatacacttatattttgtaacataatcttttgaaagaaagcatagaatg

SEQ ID NO: 338831 - DNA, 201 bp, Homo sapiens
aattcctgtgcaaccctcacctagatgtctgccagcagttgatctctctgccttcttaaaaagttatgtaaactcttatctagaatatctggggtttttarttcaactgactggacatatacagtatagaaactcattttttttcagtgggtttgataatattctcaactctagatcaagaacttcccattacttaacctg

SEQ ID NO: 338832 - DNA, 201 bp, Homo sapiens
aatttttgtatttttagtagagatggggtttcaccatgttggccaggatgatcttgatctcctgacctcgtgatccgcccaccttggcctctcatgtaatycatgcctgggattacaggcatgagccaccgcgactggcctttttgtcattctcttaatcttatcaaattgggtcagtgcttatggtgcgacaaggatctg

SEQ ID NO: 338833 - DNA, 201 bp, Homo sapiens
tgcccaggttggtcttgaattcctggcctcaagcaatcttcctgccttggcctcccaaagtgttgggattacaggtgtgagccactgtgcctagctatcctttttttttttttttttttaaattctgagagtctctagctcaaacacaagttagcaggttaaggactactccaagttctggcagagctaatttttactact

SEQ ID NO: 338834 - DNA, 201 bp, Homo sapiens
ggaggctgaggcaggagaatcgcttgaacttgggaggcagaggttgcagtgagccgagattgtgccactgcattccagcctgggcaacagagtgagactcygtctcaaaacaaacaaacaaacaaacaacaacaacaaaaaacagagggtcagtggaaataggaccttggttgcaacaatgcctgagtatgtcaatgttga

SEQ ID NO: 338835 - DNA, 201 bp, Homo sapiens
aatcctatttttctggaatttggactcagtatcatctcaggaataaaagaatagctgagtcttgaacagtaggaaacattttgctaatgcctttatacgctttttttttttaactgaaactccaaagctatgccctgtgtggttttgaaagaaattagtttatgggttcagttgtggaaaaatatcttacttttacattat

SEQ ID NO: 338836 - DNA, 201 bp, Homo sapiens
aatgccctgttttttggggtttttgttttgttttgttttgtttttgagacagagtgtcactctgttgcccaggctggagtgcagtggcacgatcttggttsactgcaacctccgcctcttgggttcaagtgattctcctgcctcagcctctcaagtagctgggactacaggtgtgtgccaccacacccagctaattttttt

SEQ ID NO: 338837 - DNA, 201 bp, Homo sapiens; identical to SEQ ID NO: 71352

SEQ ID NO: 338838 - DNA, 201 bp, Homo sapiens; identical to SEQ ID NO: 71353

SEQ ID NO: 338839 - DNA, 201 bp, Homo sapiens; identical to SEQ ID NO: 71355

SEQ ID NO: 338840 - DNA, 201 bp, Homo sapiens; identical to SEQ ID NO: 71356

SEQ ID NO: 338841 - DNA, 201 bp, Homo sapiens; identical to SEQ ID NO: 71358

SEQ ID NO: 338842 - DNA, 201 bp, Homo sapiens; identical to SEQ ID NO: 71357

SEQ ID NO: 338843 - DNA, 201 bp, Homo sapiens; identical to SEQ ID NO: 71360

SEQ ID NO: 338844 - DNA, 201 bp, Homo sapiens; identical to SEQ ID NO: 71359

SEQ ID NO: 338845 - DNA, 201 bp, Homo sapiens
gtcctcactgtaatccccatatgatgcatttttgaccacagtatcacagaagttatgctgtgttcttcccattgcatcctgtcaggcaccacacaatgtcmatttgttccattatttctattaaagggagaaaggaagaagggggtatgggaaagtaacttgttggtttgcttttcagagaaccctcggttcagtaaatat

SEQ ID NO: 338846 - DNA, 201 bp, Homo sapiens
gacatagcttgatcaagaaaatgtacatgtgctatgttaatcttctttctttttgtttgttatttttgaatttttttttttttttatttcaggacccttcmaaaaatgatacatgcaaaaggttagtatctccttaacagctttccatacgttcaaggtaatgtctggcaagagactcttccataagtatatgtatgtaac

SEQ ID NO: 338847 - DNA, 201 bp, Homo sapiens
gtgacagagcaagacttcatctcaaaaaaaaaaaaaaaaaaaatcattgtaatgggtgtgtaatggtatataattgtggttttaacttgcattttcctgaygactaatgatgttgtatctttccatgggcttattggccatttatatatgcctttttatgaagtatctggtcttgccctttgtaaaattgggttgtttgtt

SEQ ID NO: 338848 - DNA, 201 bp, Homo sapiens; identical to SEQ ID NO: 71354

SEQ ID NO: 338849 - DNA, 201 bp, Homo sapiens
gatgcagaacgttaatgttcattacctcctcctaccccaagagaaatggattcagacatgtcttgtctcaacaagaaattgatttttttttaaactatctyattctgttgccaaatatcacagaagtaatgaggagtttagttacatttggctgttgtgctctgaaagagccaggtttggaatttgtgggggtgatctagg

SEQ ID NO: 338850 - DNA, 201 bp, Homo sapiens
actttctgagactcaggagaaagccacagcgatgggaagggaagcagaacactggagaccctaaaggcccacaggctgagagaagtggtacctctcctgargtgacacctgtcagcacgcctcttttgggcgccagtccaaaaatcgcggtatctgattggcgaggttggagggggctgaacgaccctaattggttagttg

SEQ ID NO: 338851 - DNA, 201 bp, Homo sapiens
tcaagaaaatgtacatgtgctatgttaatcttctttctttttgtttgttatttttgaatttttttttttttttatttcaggacccttcaaaaaatgatacrtgcaaaaggttagtatctccttaacagctttccatacgttcaaggtaatgtctggcaagagactcttccataagtatatgtatgtaacataacttatgag

SEQ ID NO: 338852 - DNA, 201 bp, Homo sapiens
attaaaaagtatcttcagcctatgggagagagttttcatttccattttccttcttctccttcttctactccctgtctgaactgcaccatccctactgcccsccaagaaagaaacactcaaaatgttgctattccaaagtgtaagtcagtaaccattccctaattcttttagaaaacacctttcatattacttttataacac

SEQ ID NO: 338853 - DNA, 201 bp, Homo sapiens
accattgttttattgttagatggatagtacctgagttgaaggcccagaattaatatactaaaaacgtaaagacttaaaaacttaaagatgtagcaacagatttttttttaacccgcttcaatcaaaaataactaactagaattaaaaaccatttgtctttgtgaatctcttccttgctggattaaccctcatgctgagagc

SEQ ID NO: 338854 - DNA, 201 bp, Homo sapiens
agatgaagttctggtatcagttacagggttgacatagcttgatcaagaaaatgtacatgtgctatgttaatcttctttctttttgtttgttatttttgaatttttttttttttttatttcaggacccttcaaaaaatgatacatgcaaaaggttagtatctccttaacagctttccatacgttcaaggtaatgtctggcaa

SEQ ID NO: 338855 - DNA, 201 bp, Homo sapiens
caaatcagccctccaatgttataacaaatttttcacttcttaagtcctgatagagatcatcctgtgaatgtgttaattttttttcttgagtgaggtgttayatattttatcacaatgagttcttaagagagtttatagcaatttgttttaggggctgtttttcatctttgaattttgccatatctacagggaaattttttt

SEQ ID NO: 338856 - DNA, 201 bp, Homo sapiens
gactgttctttcctccactgaatagacttggcatccttgtgaaaaatcaaatgggagctcgatcttggctcactgcaacctccgcctcctgggttcaagcsattcgactgcctcagcctcccgaatagctgggactacaggtgcccgccaccaggcccagctaattttggtatttttagtaaagatgatgtttcactatgt

SEQ ID NO: 338857 - DNA, 201 bp, Homo sapiens
ggctggagtgcagtggcatgaactctgctcactgtaacctccacctcctaggttcaagtgattttcctgcctcagcctcctgagtagctggaattataggwgcgggccaccacacccagctaatttttgtattttcagtagagataaagtttcaccatgttggccaggctagggtcaaattcccaacctcaagtgatccac

SEQ ID NO: 338858 - DNA, 201 bp, Homo sapiens
atagggacttggtgtctaggatgtaggtatctctcttctccatactttatctggtttaaacattcaccattaagaaatggaaatggagttcatttcattgsttaccttcctttctcttggttcatggtttctgaatctttatgaagaagtgatttttaaaagtcaaattaaaaagtatcttcagcctatgggagagagttt

SEQ ID NO: 338859 - DNA, 201 bp, Homo sapiens
gatcctcctgcctcagcttcccaaagtcctgggattataggcctcagccactgcacctggcccatcttaaacatttttaagtgtacaattcaattgttttraatattgaatattgaatattgttgtgaatcagatctctagaacttttacatcttacaaaaatgagactatactcattaaacaaattccctttttttcctt

SEQ ID NO: 338860 - DNA, 201 bp, Homo sapiens
ctttttataaatggaaatttcacagtatatattcttttgtgtctggtttcttcagttcaacatgttgcattctcatgtgttgtgtatgtggcagtggttcrttctttttcattgcagattaggattccattgtatgattatatctcattttgtacatactctgctgtagatgtttgggctgtttccagtttgggactgtaa

SEQ ID NO: 338861 - DNA, 201 bp, Homo sapiens
attatgcaaatttcatctacctgttgatacagaaatggtaccctgccacttccctggacatttattccagacagaaaaattcctgtgcaaccctcacctasatgtctgccagcagttgatctctctgccttcttaaaaagttatgtaaactcttatctagaatatctggggtttttagttcaactgactggacatatacag

SEQ ID NO: 338862 - DNA, 201 bp, Homo sapiens
tgatcctgaaagttccctagatgggaaatagatctggcagtatgtcagggtcactaattttccctggatagtattaaaatatatagaaggtttgctacttytcctggccctggataatctgtctgaaaagagtttgtgtgaatgaagttttcacgtatttgctcttcatgtcatcctgtaggctcagaatgaacaatacag

SEQ ID NO: 338863 - DNA, 201 bp, Homo sapiens
tagtttctaaatttttggtaatgaaaattattacttttgtaaagaaagttataaaaatactaacaattaaatataaaaatgcagggtgcttggatctcaagaaaataggagcttactgtgattaaaagtcagactgcatataataattagttataattaataatgctttttctttctttgtttacatgaaatctttcagaa

SEQ ID NO: 338864 - DNA, 201 bp, Homo sapiens
tggggtgggattgggggagggctttagtttgcatgcatttccagtcagctccgagttctggtgccttatgtaatatcatgtattacttatgtgtcgagcayttgctgtgtgctcagctaaactctaagccatcattatctttattttacagaaagggaaactgaggctcacaggttgaggactctcagggccatagagtta

SEQ ID NO: 338865 - DNA, 201 bp, Homo sapiens
agtgactcatgcctgcaatcccagcacttttggaggcacaggcgggcagatcacctgagttcaggagttcgagaccagtctggccaacacggcgaaacctygtctctactaaaaatacaaaaataagccaggcttggtggcacctgtgatctcagctacttgggaggctaaggtaggagaatcgcttaaacctgggaggtg

SEQ ID NO: 338866 - DNA, 201 bp, Homo sapiens
ctttcctggaacctaggtaatttttttcattttttaagtaggtcaaacaggtatatagtaaaaagccaccttcccctctgcccagtttcactgcctcctamagttaactcccattgtttgtgtatccctctagtttctttttgcctgtacaagccaaagtgaatgtagtttctctttttttacacaaaagataacatacta

SEQ ID NO: 338867 - DNA, 201 bp, Homo sapiens
taacctccatgttttattttgatgaggtaatgtgtttggctagaggacccccttttcatcactaggcctaattttgcacttcctcaatcttaatgtttctrgatttcattttccaagtcaggtgatctctagtatatctccattgttatatttttattacatcactatggaatttccacctacagataatttgtgtaattt

SEQ ID NO: 338868 - DNA, 201 bp, Homo sapiens
taatcttcaagtctgttgcattacatctcattttaaaaattatttttgagaccatggtgcaactaattttttttttaaggaaacaggatagacttctaaawatttaaaactttattgaggtgtaatgtacatacgtaaattgtgcctatctaaaatgtacattttgatgagttttgaaaaatgtattcatccatgttaaga

SEQ ID NO: 338869 - DNA, 201 bp, Homo sapiens
attttgatgaggtaatgtgtttggctagaggacccccttttcatcactaggcctaattttgcacttcctcaatcttaatgtttctagatttcattttccawgtcaggtgatctctagtatatctccattgttatatttttattacatcactatggaatttccacctacagataatttgtgtaattttttttccaacaagat

SEQ ID NO: 338870 - DNA, 201 bp, Homo sapiens
ttgaggtgtaatgtacatacgtaaattgtgcctatctaaaatgtacattttgatgagttttgaaaaatgtattcatccatgttaagacataaaccatttcyatcattctaaaaagcttcctttccctttgcagtcattctctcccaaccccaggcaactagtgatatgcagccgctaaagattggtttgaagctttgattt

SEQ ID NO: 338871 - DNA, 201 bp, Homo sapiens
atttaaaagtttcccccaaagaacattatttttaataaatcttaatagtgaacaataatttaacaaactcagaatttactaacttcttgcatttgtatggkgtatggcattttatgcttttaaaagtgctttccggtcgggcgcggtggctcacgcctgtaatcccagcactttgagaggccgagacgggcggatcacgac

SEQ ID NO: 338872 - DNA, 201 bp, Homo sapiens
ttcatcgtgaaatccacacccattgacccccacatcctttctatgtggttgccagttgagacatttctttgttgttctctttttttttttttttttttggkggggggacgaaatctcactcttgtcaccaggctggagtgcaacggtgtgatctcggctcactgcaacctctgcctcccgggttcaagcgattcttctgcc

SEQ ID NO: 338873 - DNA, 201 bp, Homo sapiens
acctttttctaaggctcaccctacttagcagagatccagggcttttgattgtaaaagaggctaaaagctttgaaatttagagaatccatttatatgaagtrtatgatttttactctaattatagattaaacatcataatacatatattatgctgtgatgctctcatataagcctttcaaattatcccttttaaaaatagta

SEQ ID NO: 338874 - DNA, 201 bp, Homo sapiens
tttgtggagattatatagagctagccattctattttttggacatctcgaagtatttcagagaaagaaaatatgtctttttttcccataaagtatcagatcyattacttgaggtaacggacacagtataaaaaattacaaactattagtaaatttagtttccttaatattaagggcttaggatcagcgaaatgctgcataaa

SEQ ID NO: 338875 - DNA, 201 bp, Homo sapiens
gacttaagcaaagcataaaactgataaagaattattaggtagaagatataaagaattcctacaaatcagttttttaaaacctcagtagaatatgagaaaamgatttaagcactttacagaaaaggaaacacaaatgtaaacatatggaaatgaggtttaatctcattcatcattagtgatatgtgaattaaaatcataggt

SEQ ID NO: 338876 - DNA, 201 bp, Homo sapiens
tcagtggcagttaagtattaggaaagattatgtgaggattggtgtcaaccattctcagtcttttgtactaaagaaattttctggccggcgtggtggctcaygcctgtagtctcagcaaactgggaggccgaggtgggtggatcacgaggacgggctgagacagaagaatggcgtgaaccccagaggtggagcttgcagtga

SEQ ID NO: 338877 - DNA, 201 bp, Homo sapiens
ctgggtgacaatgagactccgtctcaaaaaaaaaaaaaagaaagaaagaaagaaattttctccttcaatgttttctcaaggatcctacttttggattcttyagtctcttgcggttactcttcaaggagtctgaattcattactcttatcaggagattacttcagagttcccatgtgcatattgctgttatacgtgccatat

SEQ ID NO: 338878 - DNA, 201 bp, Homo sapiens; identical to SEQ ID NO: 71349

SEQ ID NO: 338879 - DNA, 201 bp, Homo sapiens
ggtggcaaagcgcaactccttgaaggaactgtggcttgtgatccatgggcgagtctacgatgtcacccgcttcctcaacgaggtggggcctgggaggtggraggcctctgaagctgctggggcgaggggtgaaaaggctgtgtggagtgtatgtgggaaggaagggaggcttggctgggggcgataaggcgtaagaaaggg

SEQ ID NO: 338880 - DNA, 201 bp, Homo sapiens
agagtctctagctcaaacacaagttagcaggttaaggactactccaagttctggcagagctaatttttactacttggtcttcaaaaaatagaggctttttwaaaaattttttttgtgacagagcttcactgtattgcccaggctggagtgcagtggtgcgattgtggctcactgaaaacttcgcctcccgggttcaagtgg

SEQ ID NO: 338881 - DNA, 201 bp, Homo sapiens
cagagaaaactacttaacagctgcagaacaggatgaagaaatgaattattggctgggcgtggtggctcacacctgtcatcccagtactttgggatgccaargcaggcggatcacttgaggtcaggagttcgagaccagcctggccaacatggtgaaaccccacctctactaaaaaatacaaaaattagctgggtgtggtgg

SEQ ID NO: 338882 - DNA, 201 bp, Homo sapiens
gtgagcttcttgtcgctctgtaccaggatgaacatgtagtggcagatcatatctgagaagaagcagatgataaacatgggcgggaccatccagtggctgaygctggagttggacagtagctcctaccctctgtcttcactgagagctggtctggcttctcctggggtgccggtgctctttgggttttcgtcgaggccttcg

SEQ ID NO: 338883 - DNA, 201 bp, Homo sapiens
acctacataggtttttatagagctatattccaacctgacttcagttccaggaagaaattcttgatctctcagatttatttcttacagaggtttaaataggsacttggtgtctaggatgtaggtatctctcttctccatactttatctggtttaaacattcaccattaagaaatggaaatggagttcatttcattggttacc

SEQ ID NO: 338884 - DNA, 201 bp, Homo sapiens
ttttttccaaatttaccacagcgaatatataacttttacttaatattttaaaaaagtgttgtgctttctcttgtttataagtggtgagagactgatgaaartgaaagtacttgtagaaagaactgtgtagcaagtaaaaaattcagtcattccctgaaatgttgtaatctatgaaggagttttattgtccttttactctga

SEQ ID NO: 338885 - DNA, 201 bp, Homo sapiens
agtgaatgtagtttctctttttttacacaaaagataacatactatgcacactcatctgtgtcttgcctttttcacttaactgtgtatctcagggatctttccatagcaataactggcatccctcctcctccttcaccacagctgcataggatttattatatggatcattatttaagcagtatcctattgataaacatttgg

SEQ ID NO: 338886 - DNA, 201 bp, Homo sapiens
ttacttaatattttaaaaaagtgttgtgctttctcttgtttataagtggtgagagactgatgaaaatgaaagtacttgtagaaagaactgtgtagcaagtmaaaaattcagtcattccctgaaatgttgtaatctatgaaggagttttattgtccttttactctgaaaggcaacacaatagttgggttgtgtcaaaaggaa

SEQ ID NO: 338887 - DNA, 201 bp, Homo sapiens
gaaaaaatatcatccatagtttaggtgtatagaacaaattgggacataattccagaactgatgacttagttccacaacaaagaacagtttcacatataatwacctgagagtttcagatataataacaagtgaatcgtggctgtcttactcttgctgtaaaatagcattcttaaatactgggatgtgagacccactcactgg

SEQ ID NO: 338888 - DNA, 201 bp, Homo sapiens
atctacttcctgaggcactactttatatagttaacttatttatttattcatttattttgagtcagagtctcactcttttgcccaggctggagtgcagtggygtgatcttggcacactgcaacctccccctcacaggtttaagtgattctcctgcctcagcctcctgagtagctgggactgcaggcacccaccaccaccatg

SEQ ID NO: 338889 - DNA, 201 bp, Homo sapiens
aaaaagaagcaggctacaaaacattatgtactacatgaattcactttgtgagaacacaaaaaacttttatttatcactgcctaccacacaaaatagtaagkattcaataaaaaattgtagactaatggctgaaatgattgaaagaatacacaggaaaaatgaagttttatgcaccaaattgttaactggacttatttctgt

SEQ ID NO: 338890 - DNA, 201 bp, Homo sapiens
cctgatctcaagtgatctgcccgccttggcctcccaaagtgctgggattacaggcatgagccaccgtgcctggcctagttaactttttaatttgaaacaayttcaaagttacagaaaagttgcaagaatagaataaagaattgcatataccctttgcctggagtccttagtcaggtttctgcagctatctcaataatattg

SEQ ID NO: 338891 - DNA, 201 bp, Homo sapiens
cccaagcaaaaatcctatttttctggaatttggactcagtatcatctcaggaataaaagaatagctgagtcttgaacagtaggaaacattttgctaatgcytttatacgctttttttttttaactgaaactccaaagctatgccctgtgtggttttgaaagaaattagtttatgggttcagttgtggaaaaatatcttact

SEQ ID NO: 338892 - DNA, 201 bp, Homo sapiens
ctcttcagcctcccaaagtgttgggattacaggcgtgagccatggcacttggtcttgtaactcctttttgaacataacttcaaagtgaaggcctttgcccrtgagctctttgacatcatctggtgtccactggtgacccatcagctccagaactttctactttgtcttggaagctttgctggtttctgtgggcatggccat

SEQ ID NO: 338893 - DNA, 201 bp, Homo sapiens
ctttggatttgattcaccacttgtaactaaaatcatagtattgcaattattactttccaggccaaagattgagagcattaaaatctgggcatggacataamcagctagatatgcctcaatacctgaagggataaattaaagtcaactataaactgtaagcttttcacttaagcatccattagctttagtctagtgcttagc

SEQ ID NO: 338894 - DNA, 201 bp, Homo sapiens
gtctcaagtaatagttgctaacctgtttctttctttttttttttcctctgtgaagattccagaagtaactaacctgtttcaaccacatgctgatatagccrgagacatcactaatgtgccaaggtttctcttggagcttgagctgcagctctttacctgcagttttgttttttttgttttgttttttgagacaaggtctta

SEQ ID NO: 338895 - DNA, 201 bp, Homo sapiens
aacatgggcgggaccatccagtggctgacgctggagttggacagtagctcctaccctctgtcttcactgagagctggtctggcttctcctggggtgccggkgctctttgggttttcgtcgaggccttcgtatgctcctcagcctgggcattatcttggcctaagactggccaggaccctgctatagcctcgggcctagtgc

SEQ ID NO: 338896 - DNA, 201 bp, Homo sapiens
tatagagttctaaacagaaaccaaaagctccctgacgtctttttgcttgttctaagccatctctattaagaccatattttagagtgaaagttattaaaccrtagaattttgtttgatcactctgacccccacttgcttcagtgaaaaaaaaaaagaagcaggctacaaaacattatgtactacatgaattcactttgtgag

SEQ ID NO: 338897 - DNA, 201 bp, Homo sapiens
tcgtctctactaaaaatacaaaaaaattagctgggcgtggtggcacacacccgtaatcccagctactcaggaggctgaggcaggagaatcgcttgaacccrggaggtggaggttgcagtgagccaagatggtgccgttgcactccagcctgggcgacagtcagactctgtctcaaaaaaaaaaaaaaaaagaattggggtc

SEQ ID NO: 338898 - DNA, 201 bp, Homo sapiens
gactttggcttttattctgagatgggaaatcattggagcagaagagtgacatgatgtgacttaatggcgtaataggatcgttctgactacattgttgtgawagactgaaggaagagtgtgtctggagttggttccttccggtgggtttttggtctctctgacttgaagaatgaagccatagaccttcgcggtgagtgttat

SEQ ID NO: 338899 - DNA, 201 bp, Homo sapiens
aatgattgtaatatcttatgacattgatagaaaatatcaaagtgcatctctcttatcaagggtaaaattttgtgaaactttgttcagttatatataatgtmtttttttttcttttttttggagacagtctggctctgttgtccaggcttgagtgcagtggtgccatcttggctcactgcagcctctgcctcctgggctcaa

SEQ ID NO: 338900 - DNA, 201 bp, Homo sapiens
tacagagtgccgattggtccatttttacagagtgctgattggtgcatttacaatcctttagctagacacagagtgctgattggtgcatttttacagcataytgattggtgcatttacaatcctctagctagacacaaaagtttgccaagtccccactccacccaggaagtccagctggctttgccttcttaagaggacaag

SEQ ID NO: 338901 - DNA, 201 bp, Homo sapiens
tggcctcccaaaatgttgggattacaggcatgagccactgtgcctggcctataatatctcatgtatatggtgtttattggattgcagtgtaaaattatttycttactgggtattacaagtgaaaatttggaagccattgacttgtgtataaatagtcatttgtcaaaagagtaacttgaaataacattgtgatattttaaa

SEQ ID NO: 338902 - DNA, 201 bp, Homo sapiens
tttgactttaccatggtgtgaaagtgatatgtgagtactcatacaagcattctgtttttcactttcagtatggtattcaataaattacatgaaatagtcarcactttattgtaagataggcttcatgttagatgattttgcccaactgtaggctaacgtaaatgttctgaacacatttaagttagggtaggctaaactctt

SEQ ID NO: 338903 - DNA, 201 bp, Homo sapiens; identical to SEQ ID NO: 71351

SEQ ID NO: 338904 - DNA, 201 bp, Homo sapiens
gagtgcttattattctaagtgctttacatgtaatttctcttttaagcctcccaacaacctgttttagaggtgagaaaacaggagcagaggagtaactttcrcagagtcataaagttaggtggcacaggtgagatttgaaatcaagcactgtgaccctatagcctgtactccttttttttttgagacagagtctcgttctat

SEQ ID NO: 338905 - DNA, 201 bp, Homo sapiens
aactttcacagagtcataaagttaggtggcacaggtgagatttgaaatcaagcactgtgaccctatagcctgtactccttttttttttgagacagagtctygttctatcacccaggctggagtgcaatggcgcgatctcagcccactgcaacttccacctcccgggttcaagcgattctccctgcctcaacctcctgagta

SEQ ID NO: 338906 - DNA, 201 bp, Homo sapiens
ctaggaagaaggttccaaagaagcagaggcatttgtcaagttacctaccctatatccagcatcctcctcatgagcttcagtagctgctctttgcccacgcytgtatcctacgtttgctatttgggcaaaccattacttcagttatttaacttccctttttttttaacttcacctttgactatgaacaagtaacggtaacat

SEQ ID NO: 338907 - DNA, 201 bp, Homo sapiens
tgctaatggtgtgtttagcataacgtggtggggagttccgtggttctccaggattctcctcactgttcttttcgtgaagtgaatcgttcatttgataatcrtgaaatgcaaaaagcaaggctgtgttttaatggctgtgaagtgggaacggggtagccaggtttgaggttctgtttccactgaaaatacctactgacagag

SEQ ID NO: 338908 - DNA, 201 bp, Homo sapiens
tagctaggactataggcatgcgccacctcaaccggctaatttttgtatttttttgtagagacaaggttatgccatgttggccaggctggtcttgaactccyggcctcaagtgatccacccgccttggcctcccaaagtgctgagattacaggcgtgagccaccgcctgagagccagggtttaaacctgcctcagtagagac

SEQ ID NO: 338909 - DNA, 201 bp, Homo sapiens
ttttttttttttttttgagatggagtctcactctgtcgctcaggctggagtacagtggcgtgatctcggctcactgcaacctccgcctcccgggttcaagygattatcctgcctcagccttccaagtagctgagattacaggcatgtgccatcacacctggctagtttttctatttttagtagagatgggatttcaccatg

SEQ ID NO: 338910 - DNA, 201 bp, Homo sapiens
agttctgagaagccctctgtcatccagcagtgagccatcctaccttgtatcaagggttatgatgcgatcgttcaagcccaatctgggactgggaaaatggscacatttgccatatcgattctgcagcagattgaattagatctaaaggccacccaggccttggtcctagcacccagttgagaatcggctcagcagatacag

SEQ ID NO: 338911 - DNA, 201 bp, Homo sapiens
tagcacccagttgagaatcggctcagcagatacagaaggtggtcatgacactaggagactacatgggtgcctcctgtcacgcctgtatttggggcaccaaygtgtgtgctgaggtatagaaacagcagatggaagctccccatatcatcgtgggtactcctggtcatgtgtttgatatgcttaaccggagatacctgtctc

SEQ ID NO: 338912 - DNA, 201 bp, Homo sapiens
aggccacccaggccttggtcctagcacccagttgagaatcggctcagcagatacagaaggtggtcatgacactaggagactacatgggtgcctcctgtcaygcctgtatttggggcaccaacgtgtgtgctgaggtatagaaacagcagatggaagctccccatatcatcgtgggtactcctggtcatgtgtttgatatgc

SEQ ID NO: 338913 - DNA, 201 bp, Homo sapiens
cctaccttgtatcaagggttatgatgcgatcgttcaagcccaatctgggactgggaaaatggccacatttgccatatcgattctgcagcagattgaattasatctaaaggccacccaggccttggtcctagcacccagttgagaatcggctcagcagatacagaaggtggtcatgacactaggagactacatgggtgcctc

SEQ ID NO: 338914 - DNA, 201 bp, Homo sapiens
catatcgattctgcagcagattgaattagatctaaaggccacccaggccttggtcctagcacccagttgagaatcggctcagcagatacagaaggtggtcmtgacactaggagactacatgggtgcctcctgtcacgcctgtatttggggcaccaacgtgtgtgctgaggtatagaaacagcagatggaagctccccatat

SEQ ID NO: 338915 - DNA, 201 bp, Homo sapiens
tggtcctgatgggatggagcctggagacgtcattgagagtaactggaatgaggttgacgacagctttgatgacatgaacctctcagagtccctcctccatrgcatgtacatctacagttctgagaagccctctgtcatccagcagtgagccatcctaccttgtatcaagggttatgatgcgatcgttcaagcccaatctgg

SEQ ID NO: 338916 - DNA, 201 bp, Homo sapiens
caggagtttgagaccagcctggccaagatggtgaaaccccgtctctactaaaaatacaaaaattagctgggagtggtggtgggcacctgtagtcccagctrcttggggggctgaggcaggagaatcgcttgaacccaggaggcagaggttgcagtgagctgagatcatgccacagcactctagcctgggcgacataacaag

SEQ ID NO: 338917 - DNA, 201 bp, Homo sapiens
gcatgccatcatgctcggctaatttccttcgtatttttagtagagatggggttttaccacgttggccaggctggtctcgaactcctgacctgggtgatccrcctgcctcggcctcccaaagtgctgggaggcaccacgcctggtccttactttcttgatagcatcctttgaggcataacattttaaaatgtgataaagtcc

SEQ ID NO: 338918 - DNA, 201 bp, Homo sapiens
ttctgatcggtaggtgccatcctgggtttccaggaagtgatctggtttcctccctggagcaggtggggagggagctcagcagggaccctggtcagccttcytcttgtttcccagggtctctgggagcccgactgcacgagctgaagcaaaaggtggtggctgagaacccacagcactttggcgtcgctgttccacgtaaga

SEQ ID NO: 338919 - DNA, 201 bp, Homo sapiens
atgagctggctttctctggtgctaatgagacacatacaagaagactaattagagcaggtcttggggtttaataacgtaccacagctcagatcacaggttcrttggaggaaagggaaagaggccagatggcgggctcctcaggcactcgggccgtggctgccctcagccgcagggtccccgcttccctccactaatgctgtt

SEQ ID NO: 338920 - DNA, 201 bp, Homo sapiens
ctcatttaattattttaacacccttgtctagaatcaattggcaagaaaagtaagggtttctttctggagtctcagtcccattccattggtctacatgtctrttcttaggccagcaccacactgtcttactttgattactagctttgtagtaagttttgaagtcaggtttttcaagcttgttttggctattctgggtccttt

SEQ ID NO: 338921 - DNA, 201 bp, Homo sapiens
gagggcctcatgagataggggtcccccctcctgcatagtggaagcccgactcccatttccccccctcctctctgcactccagtctggaggctccctttggsttgggtcttggggggtcggggacagggggcttgtaggcccagccaggtagttgtggaaggtgtgtcccagcaggagacttgagccagggctcttagaagg

SEQ ID NO: 338922 - DNA, 201 bp, Homo sapiens
tctcagcttgagagatgcagctcgctggctgggggctggatccagtccagtctcttgtaacagtcatttgcgaacagatcatagatctgatcctagtaatstgtgcccagtggaggactttaattccgtcacaaagtgatgcatttgtttgtatcctgcctctttctaaacaggatttgacgtggcttactaataaaagac

SEQ ID NO: 338923 - DNA, 201 bp, Homo sapiens
ggctggatccagtccagtctcttgtaacagtcatttgcgaacagatcatagatctgatcctagtaatctgtgcccagtggaggactttaattccgtcacaragtgatgcatttgtttgtatcctgcctctttctaaacaggatttgacgtggcttactaataaaagacaaggttattttaattgaaatagaaactcagggc

SEQ ID NO: 338924 - DNA, 201 bp, Homo sapiens
gtcgtcgggtggttgagggtctggtgtgcccctgggggctgcagctgggtgggcccttccaaagaggaaggacccagcagatatggggcaggggcacctcyagccatcagtggcgcctgtctcattctctgcaggtgatggaggagttgcaggccgcctccgtgcacagtgatgagagggagctgctccagctgctgtcca

SEQ ID NO: 338925 - DNA, 201 bp, Homo sapiens; identical to SEQ ID NO: 71377

SEQ ID NO: 338926 - DNA, 201 bp, Homo sapiens
cacagccttccttccttcccctggttccctttcacaaggcccctcctgggtcctgggtcctgggtgtgaatcctggctctgcctccttccagctgtgcaamcttggacaagccatcagatcatctgagtttccatttcctttcctttaacgttgggatagagtttctttctcaaccaatgtgtggttatcattggcatgct

SEQ ID NO: 338927 - DNA, 201 bp, Homo sapiens
ttttgttttgcaaatatttcaggattgaataagcagggggaaatggctcatttttcaaagagtcaagaagtcactgggagaataagaggcagcttcctagractcaaggccaaatcatcaggtccacaggcagtgccagctttctaggattcagaaccctccctggcccatggttgttatttcaagagaagcagctgcatt

SEQ ID NO: 338928 - DNA, 201 bp, Homo sapiens
cataccaccggccagctgcggcctgctgaccctgtgagcggcgggccagccttccttttctctggctttcccggcaggctgtgctcatggtacatgacacrgttgcccagaagaattttgaccccgttctcccgcctctgcctgacaatatcgatgaggattttgatgaggaatcggtgaagatcgtccgcttggtgaaga

SEQ ID NO: 338929 - DNA, 201 bp, Homo sapiens
tctgttatatgctgttatttaaatgttaacaattgtccccatcatgtcctttatgacattttcccttggtccaggatctaatctaggaccacacatagtakttgtagattcatatcttcatttcacaggtaaggaaattgaggctcagagagatgaagggacttgtccaaggtcagtcacatgccaagtaaaacagtgacc

SEQ ID NO: 338930 - DNA, 201 bp, Homo sapiens
cacccagccccttaacttttgtcctgaagtaatttcaaacttactgaaaaggtgtaagaattatacaaagaactctcatatactccacacccagattcacyagttgctcctttgccatgtttgctcaatttcctttcccacatctctgaatttttttttcctgagtcatatgagacttagttgtagacatcgtgtcccttt

SEQ ID NO: 338931 - DNA, 201 bp, Homo sapiens
gaaaagcaaggaagggagccctctggggccgtagcggtcaggagggatggagaattggaattcaacacgtagtgtccttgggttctcatggaaagtcttcygtccctttgacttttgaaaatacagttaccaacccgccactgctaaatttgaactggcttaaaaataataaaaatactaaaaaatacaaaaatgtacagt

SEQ ID NO: 338932 - DNA, 201 bp, Homo sapiens
agcctgctagggatgtgctgggtcttcagacacccagagcaaggcacttcctggagccaggacagattctggcttagccttgctgttgtcctgaggaggtrgcaggcaaagtggccttatggtgtgcccctaacagtgtgcccggggtatggggtggcagcaggaggaggggaacttcccttccatctgcctctcttagac

SEQ ID NO: 338933 - DNA, 201 bp, Homo sapiens
ccacctccacccccttctcccagaatctgcagggagaggtcgggaggtgacaacgccagcatgccagtgctatcggaggactctggtaagtacctcccccyggctggacctgccacagtcctgaagacaagagcctgcctggcagcctccaggccctggcagtgagagcctggggagagaatgtcctcacggcaggactga

SEQ ID NO: 338934 - DNA, 201 bp, Homo sapiens
gtgatctggtttcctccctggagcaggtggggagggagctcagcagggaccctggtcagccttcttcttgtttcccagggtctctgggagcccgactgcaygagctgaagcaaaaggtggtggctgagaacccacagcactttggcgtcgctgttccacgtaagagggcccatgtgggagtgtgtgtttgtctgcacacac

SEQ ID NO: 338935 - DNA, 201 bp, Homo sapiens
cggagagcgagcgggagtcggtgctcggcctcctgcggggagcagcccgagggtgagtccggcgtggcgtggcggggcggggcggggcggaggctggaggrcccggggccgctcttacgcctcttagtggcaccggggctcggcgctgcgggctggctccatgtttgcggaatgaatcagtcatgactctccttctcctct

SEQ ID NO: 338936 - DNA, 201 bp, Homo sapiens
gcgatcctcagcactagtgtctgggcagttgtctctctggcatggcgtctgccaccctccataccaccggccagctgcggcctgctgaccctgtgagcggygggccagccttccttttctctggctttcccggcaggctgtgctcatggtacatgacacggttgcccagaagaattttgaccccgttctcccgcctctgcc

SEQ ID NO: 338937 - DNA, 201 bp, Homo sapiens
ccacagctcagatcacaggttcgttggaggaaagggaaagaggccagatggcgggctcctcaggcactcgggccgtggctgccctcagccgcagggtcccygcttccctccactaatgctgttccatctgtcttttgtgcaaaccgcagatgatcagccttgtgacaaaggtaggcccagtatctatccgctgtccacagg

SEQ ID NO: 338938 - DNA, 201 bp, Homo sapiens
cgcacctgagggtagtcacacagagcccctgcccagccatgcctctgggtctcctgggatgggggcggagggagctctcctaatgaggctgaggagtggaractgagggagcgatcctcagcactagtgtctgggcagttgtctctctggcatggcgtctgccaccctccataccaccggccagctgcggcctgctgaccc

SEQ ID NO: 338939 - DNA, 201 bp, Homo sapiens
tgcccagttgaagtccattgtcatgggacccatgtaaccaggacctttgctgttgaggttatggtattgaagcacacgattattgagctttcaaaagtctrtttcacaacaaaacacttcaaaagtatataatattcctgaactttctttctcaggcactgaaacaactgaggacctcagaatttaaaccctatattatat

SEQ ID NO: 338940 - DNA, 201 bp, Homo sapiens
ggtgtccctctgcccctcctcccaagctggtcttcggaggagcttccggctgggctgtagggagagactgggtggctcgcaggaaggaaagatgtcctccrgagctgagtctccggagctgctgacttacgaagaggtggccaggtaccaacaccagcccggagagcggccccgcctggtggttctgatcggtaggtgcca

SEQ ID NO: 338941 - DNA, 201 bp, Homo sapiens
gtttgcttcccagagacctgtgactgtgagggctacctcaaagggcactatgtgggtaagtagctccccctgacacccacatgcacgacctgccccacccraggccccagagttagggagaggtcaaagcagggtgatctgagccccaggagtccttctggagcagtggagcctatgggacccccatctctcctcagttct

SEQ ID NO: 338942 - DNA, 201 bp, Homo sapiens
gctgtccacaggcgtggccccttttccgtggaacgtctggggcctgaggggctcgtgttctttccctatctgggcagctgtgcccctcccactgtctgcgyacctcttcctgctctgccagctggactgggctgttccttgaggcaggcaaagctggtggggacagggttcaaggccttaggggcacctccctgccctcct

SEQ ID NO: 338943 - DNA, 201 bp, Homo sapiens
ttcttctccttcttccaccagttgattgcagaaatgtttgctctgtttttatatagttattatttatagttctttcttataattatttaacctgtgtactraatgtcatgcggcacaatactactacttctttggaagtacttctgaggcaggaagtgtgatattagcatatatacacagttatagaatcagcatccccaa

SEQ ID NO: 338944 - DNA, 201 bp, Homo sapiens
cccagaatctgcagggagaggtcgggaggtgacaacgccagcatgccagtgctatcggaggactctggtaagtacctccccccggctggacctgccacagycctgaagacaagagcctgcctggcagcctccaggccctggcagtgagagcctggggagagaatgtcctcacggcaggactgaagtgctgtttgaggcccc

SEQ ID NO: 338945 - DNA, 201 bp, Homo sapiens
aaaaattttctcctttagaaactctaagggggaggctggcatggtggctcacgcctataatcccagcactttgggaggctgaggcaggcagatcacctgasgtcaggaattcgagaccagccaggccaacatggtgaaaccccgtctcatactaaaaatacaaaaattagccaggtgtggtggtgcatgcctgtaatccca

SEQ ID NO: 338946 - DNA, 201 bp, Homo sapiens
tcagccgcagggtccccgcttccctccactaatgctgttccatctgtcttttgtgcaaaccgcagatgatcagccttgtgacaaaggtaggcccagtatckatccgctgtccacaggcgtggccccttttccgtggaacgtctggggcctgaggggctcgtgttctttccctatctgggcagctgtgcccctcccactgtc

SEQ ID NO: 338947 - DNA, 201 bp, Homo sapiens
gagatcgtctgatgtgtcctaaatgaacttctgtttcactgtcatagattctttgttcagcccagtctatgtcaggatggcgagaccctcacccaaaacckaaatatttgacagagttcttccaggaggtgtgggcttggtgactcatcttttttggttcttaacagggtcagttagcagaatgagttggaagttgttgtg

SEQ ID NO: 338948 - DNA, 201 bp, Homo sapiens
aaaaatcatcccagccacccaggaggaagatcgcttaaaggagagcaaggtatggggaggtgggtccgcggtgccctctctcagcttgagagatgcagctygctggctgggggctggatccagtccagtctcttgtaacagtcatttgcgaacagatcatagatctgatcctagtaatctgtgcccagtggaggactttaa

SEQ ID NO: 338949 - DNA, 201 bp, Homo sapiens
ctgtggggcctgccaacccattttccctggttactgtgcagggctagatttacttccagacttaacctctgggtccacctctcctgacatgtgctgtgccrttctttgctgctgggattgagggaagggggcccactcactcacccactcctcaccttttaatacccacaaccacctgctcactcacccagcagttcctat

SEQ ID NO: 338950 - DNA, 201 bp, Homo sapiens
taatataatgtttttaaagttcattcatgtatcaatacttcattctttttttatggctgaataacattccattgtatagagtaccacattttgtttacccrtttatcgattaatggacatttagattgtttctaccttttcagctattatgaatcatgttatgaatgttcatatacaagtttttgtgtgaacatatgtttt

SEQ ID NO: 338951 - DNA, 201 bp, Homo sapiens
ttctctggctttcccggcaggctgtgctcatggtacatgacacggttgcccagaagaattttgaccccgttctcccgcctctgcctgacaatatcgatgargattttgatgaggaatcggtgaagatcgtccgcttggtgaagaacaaggaacccctggtaggtgctgctgcctgcccctctctaacccactcttcccctg

SEQ ID NO: 338952 - DNA, 201 bp, Homo sapiens
caggcaaagtggccttatggtgtgcccctaacagtgtgcccggggtatggggtggcagcaggaggaggggaacttcccttccatctgcctctcttagaccytctcctcagcacagccttccttccttcccctggttccctttcacaaggcccctcctgggtcctgggtcctgggtgtgaatcctggctctgcctccttcca

SEQ ID NO: 338953 - DNA, 201 bp, Homo sapiens
gaatttattgccaagatcacagccacagcaagacctggaggcaggcagctctgtctcttggggctgagtcagtctgggctgatggtgagtaccatgcaggmccctcctagaatgtatgcttgtagctaaccagctccaaataaactcatatgcaaaggcctaggaggaaaactacccaaaagaaaaggtttacctgatgct

SEQ ID NO: 338954 - DNA, 201 bp, Homo sapiens
ttaattcagataaatcctcattgagcctcattataacctcatcatcatgtcattgggaaaatgaatttactgtcaagtattgaagcttagaatgctgccartgggcgtgtgttcgtttttctgtggagggtgtcccttattgtcatctaattcccacaggggactagaacccaatgaaagtgattcagaatctggggtagg

SEQ ID NO: 338955 - DNA, 201 bp, Homo sapiens
tgcatgcctttgacatacaaatcaaccaagcccgagcccacacccccagccacctcctttatcaaactctcacccactgagcaggtgttccctttgcccarcagcaccccagggccaggtacccaacaactagggaccatccttacagccctgagcctgccagaattactcccattatacaatcctaagtgtcctcagtca

SEQ ID NO: 338956 - DNA, 201 bp, Homo sapiens
ttctgtggagggtgtcccttattgtcatctaattcccacaggggactagaacccaatgaaagtgattcagaatctggggtagggcagacaggaatgtgaarcatgcctctgtcacttgctttttgggtgatacagggcaagttaactttttaagctgctaatagtaagctacaaatagtaactgctatgataatattcaga

SEQ ID NO: 338957 - DNA, 201 bp, Homo sapiens
gatcagagttttctctagggccccttagggctaatgtaggtgggacttcaagcacatagatcattgctcttctcaattcagatggattaatgagcagatgrgttgagatggagatgaggaaagacatcctaagctatgttgaggagggagaagatctgagactcaagtttctgctgttaaatccatgaggctgatttagca

SEQ ID NO: 338958 - DNA, 201 bp, Homo sapiens
catctaattcccacaggggactagaacccaatgaaagtgattcagaatctggggtagggcagacaggaatgtgaagcatgcctctgtcacttgctttttgrgtgatacagggcaagttaactttttaagctgctaatagtaagctacaaatagtaactgctatgataatattcagaagaacagtggtagcgggtggatcct

SEQ ID NO: 338959 - DNA, 201 bp, Homo sapiens
gtggatggacatttgggttataaataggctattgtgaataatgaataatgctattcattattttaagctattatgaataattataataatggtgctatagyttttaagtacaaggctttgtgggtttcattcatatgttttcatttctcttggatgtgtacctaggagtacaatggctaggtcacatggtaactgtacata

SEQ ID NO: 338960 - DNA, 201 bp, Homo sapiens
agtgattcagaatctggggtagggcagacaggaatgtgaagcatgcctctgtcacttgctttttgggtgatacagggcaagttaactttttaagctgctamtagtaagctacaaatagtaactgctatgataatattcagaagaacagtggtagcgggtggatcctctacctagaacactgacgaattcactcctacttgt

SEQ ID NO: 338961 - DNA, 201 bp, Homo sapiens
gattcagaatctggggtagggcagacaggaatgtgaagcatgcctctgtcacttgctttttgggtgatacagggcaagttaactttttaagctgctaatartaagctacaaatagtaactgctatgataatattcagaagaacagtggtagcgggtggatcctctacctagaacactgacgaattcactcctacttgtcct

SEQ ID NO: 338962 - DNA, 201 bp, Homo sapiens
tgagcagaagtgaggtgcgaccttgtgcattacccattgagaaggaaatctcttgccctggttcctcagcccttcccattttgctggctggaaatggtatraggctggagctactttgggggctatttattggcaacatcagagttgctcccctcgattgggcccctggatgactttgggaaacagaatctgcagattccc

SEQ ID NO: 338963 - DNA, 201 bp, Homo sapiens
cagactcagcatttgtcgttacaggaaggaatggctttctgtttgcattttaggaaaacttcaccttttaaacatttcaaatggaaaaaaaagtatgcgatttttttttttgaggttttactgatatgagctacaaatagcttcttggaagccagtcagaactctcttttcaataatgttgaaacattttcctttgactgg

SEQ ID NO: 338964 - DNA, 201 bp, Homo sapiens
atagtttactctagaactactgcagctttcctaccaagttataacctgttggtgctgctgcctaagaccccaagtgttccctatggtttttccactgtcartgctggaacttaagtatcttccaatcatgcatgagccctgggaatttttttttttatcttacagcactgatagttgttcttttttcatatatatgagaaa

SEQ ID NO: 338965 - DNA, 201 bp, Homo sapiens
agaagcaaacaagaaggagcacatttctttctttgtctccagctttggagtctctcattctctctctgcccctctcctgctggcagggcctagagccaccwgtgagtgaggagtgtggttggtagttcctactccagtagcataggctgaacacagaagggagcctggacagtgagagatgttaacagctggcacagaaat

SEQ ID NO: 338966 - DNA, 201 bp, Homo sapiens
taagctgagataacaacctactttgttgtgacaatggagtctcagggtattgtaagagaaaaattattatatgaaaggctaacatctgtcaagttccttcstcagtgaactttattctgtggtcaaatttctaagcatagttcttcctatataaggtaacttatgtagacctggacatgttttatttggaatgacttccat

SEQ ID NO: 338967 - DNA, 201 bp, Homo sapiens
gtttcctggatttggcactctcgtgcaaagcggtcatatgctgcaggtaggaacctgcaggctgtgcacagttcacactctgctgtgtctgtatcccgtgyttatacaaaagaaagggatgcatgggaattctaggtttaaagttttgtatctaaaaaaggcaaaacaaaaatacaaatttatttttaactgttggtgcac

SEQ ID NO: 338968 - DNA, 201 bp, Homo sapiens
tatttagttttttcctttaatttcaaagggccaaacataccgactcagaggcaggttggctagagtggagttaggaaaatactctttctggaaagaaaggygactttaatcattgctgcctatacatgccactatcaccagtgagtcttcacttaatgtgcatatccacctgctggcagcattgccagagtgactgtctga

SEQ ID NO: 338969 - DNA, 201 bp, Homo sapiens
attgaatgaagaaatatacaacaattctaactaaatgtttaatgaagaaattttgaagggaaaaaatagaccaaaaccactttcttataatctcaccgacwgtgtataatgaatggctgtcctttggtggatatgtttccttttcgagagatcaaccctcatctgaatgcctccctcagtatagctgctgctggtcttgta

SEQ ID NO: 338970 - DNA, 201 bp, Homo sapiens
acggggtttcaccgtgttcaccaggatggtctcaatctcctgaccttgtgatccgcctgcctcggcctcccaaagtgctgggattacaggcatgagccacygcgcctggccacatgacctctgataaatgtatacttctatgggacaaattttcagagttggcaaagaaaataggttcatctttatggaccttgggatctc

SEQ ID NO: 338971 - DNA, 201 bp, Homo sapiens
tcccacaaaggtaactaattttattaattttatcattcacttgtgtttcttcatagtttctataatgaatcaaattgcttatttgctccataatcaagtayatgaaatttgaatggaattgtagtctattattttctgcattatgagttattttgttcaaggttacttgagtttactccgtgttaattcctgtaggtggag

SEQ ID NO: 338972 - DNA, 201 bp, Homo sapiens
ggactattcctttaagaatgtaacttattccatttcattcccagctctgaatcttccagtggttacctattacaattaacaaagaaatccaagctctttgytgtggtccacatttgtctgcccctttgactgtctgccttctccttttccttctcccagtgcctgcagccccactggtcttcgtaatgatccttgagctca

SEQ ID NO: 338973 - DNA, 201 bp, Homo sapiens
tatctttagcaatgtgtttttgccttagaggctcttatttgatattcagttggctacagtgagtttcttgtagttagaatttgcctggcagatcttttacmtccttttacttttggcttttctgtattgattttaaacatcatctagccagattttgtttgttttctgtttttaactgcattgaagctggataattcagtt

SEQ ID NO: 338974 - DNA, 201 bp, Homo sapiens
gaagtacattaattaaatttacagagccagaaaaggtgaagacccaggaggttaaacatagaaaatacagatggactgaaagagatgagaggaaacggacrgacttttacagcatgatattcagcttggaaatatgcgggagaatacgacagggaataccagccaaaagtcagatagctagtttaaagaaaaagttaataa

SEQ ID NO: 338975 - DNA, 201 bp, Homo sapiens
ccttgtcccctctcccctaagctttgagaccgttcctttttaagtcagtggccatgtctcgccccgttctcccgatataactcttactttacccagcagcrgggcctccgtttagtgcagcccgtgatgttgctttcctggttcatcttcccttatccacagatttacctggctggaatcgggagactgtgtgtgcccagg

SEQ ID NO: 338976 - DNA, 201 bp, Homo sapiens
gggtataaaatggctgtctagtggaggcagccaggctgctgggaatgactccaggtagaccagacacatgattcttctgtgccttcaacccgatgctttcragtggcgtgccttagctgtggacattctgaccctgccttgttgaatgctttttgtatttttgctcagagagagaaatcagagtgatttcttttttgtctt

SEQ ID NO: 338977 - DNA, 201 bp, Homo sapiens
agacataggaaaggaggtctagatgatttttatgaagagtatatatcaaatattatttatatattaatccagctttaagatgggaaaatgctataaacgtrggaagttctccatagaagaatcagtcaaaagtattcctgtttgctcatgtctaagaattctgaaactagggaaactgtattgaaaagataaattgaaata

SEQ ID NO: 338978 - DNA, 201 bp, Homo sapiens
ctacccagcctgcgggccacagaccagaactgagtataaaaaaagaataaaaccaaatgccacatgttgtctcttataagtcagaactcaacattgagtayacatgaacataaagaagagaacaatagatgccggagaacttgacaagagagggagagaggaaaggcttgaaaaactacccattgggatgccaggcacggt

SEQ ID NO: 338979 - DNA, 201 bp, Homo sapiens
gccaggcatggtggcaggcgcctgtagtcctagctacttgggaggctgaggcaggagaatggcatgaacccgggaggcggagcttgtagtgagccgagatsgcaacactgcactccagcctgggggacagagcgagactccgtctcaaaaaaaaaaaaaaaaaaaaaaagaccaaagacataggaaaggaggtctagatga

SEQ ID NO: 338980 - DNA, 201 bp, Homo sapiens
ccccaatatgacacaggactctttcttcctggtctgttctggttgtcctggagtttctttgtcaagctgctccactgatggtattgtctacacctcagctmcctgtccaagacactctcagaggtctgaggcgtggaactctgtgggctatgaaagggttttactttttgctgaaccacccacctacagccctccgcttat

SEQ ID NO: 338981 - DNA, 201 bp, Homo sapiens
aggtaggtgcctatcagtcaggtgtagccagtggttatgggaagactgggagggtgcacacctaggccttcccaagggcatgggggtagacccagcttcartgctgcactcaagcccagtctaaggcagcctcaaaggccacgtgacagatactcacacaagctgaagttggtggagtgtctgtccacgggactggcttac

SEQ ID NO: 338982 - DNA, 201 bp, Homo sapiens
ataacgtattgaggtagtgaatctttttccttctatagtttatttgttagatttttgtaaaaccattgttagattttgtaaaaccatttgttagattttgyaaaaccattggcacttttgtgaagtttgggaaataagaattaactacatttttggggttttagaatagagcaggaaaattctggtgttaatgattgccta

SEQ ID NO: 338983 - DNA, 201 bp, Homo sapiens
tatcacctaatctctttatgcctcttaataccatctgcaaaatgaaattcaagatcacagggtttcctctgttaattcagtttcttttttttctttttaawttcatgttaaagtgcttagcacaatgcctggctcaggatgagtgttgagtaaatgacagcagtgatcgtgattacactaggacgtaggtaggtgcctatc

SEQ ID NO: 338984 - DNA, 201 bp, Homo sapiens
agcccatagagaggactggaggttgagagaacttgggccttgcctggtccaggccatttaatttacagaaaagtacatcaagacccagggagcttaaagakcccaaagtcacatggacaagtagcagcaagcaaggactagaaccaccctttgtttcctggccaccaccctgaccccatgctgcagccacttggggccacc

SEQ ID NO: 338985 - DNA, 201 bp, Homo sapiens
gtggtcctcagaaaacagcacctacctccagtctcttgggattagccagagaagaaacgccagggagcattttgcttggggattccttggtgtctgttttktcgcagcttcccgcaagaaagaacccttttcatcacttgagtaaccattgccccctccccacaaaggaaaataaacaggaaaatttccctctggggtggc

SEQ ID NO: 338986 - DNA, 201 bp, Homo sapiens
gcagcaagcaaggactagaaccaccctttgtttcctggccaccaccctgaccccatgctgcagccacttggggccaccagaatctaagatgaaaacaagcragtggagaaagacatcttcagggtggagagctcagtagtcctcagcttcccaccggaagagtttataaaagagtatgtcccattctttggggtgactgtt

SEQ ID NO: 338987 - DNA, 201 bp, Homo sapiens
ctccagcctgggtgacaagagtgaaactccatctcaaaaaaaaaaaaaagaaagaaagaaaggggaaagctggagagttgaggtttggggacctgttatawacttacccacacagtgatggatgctccccgtacagtagaaaaaatgtagcacggaagcacgtcagcttagctggctgagcagatgttgtgctgaatgtgg

SEQ ID NO: 338988 - DNA, 201 bp, Homo sapiens
atgtgttactttttaaaatacattatttgattttgttttaggtatttgtttaaaattttatatccatatttgaatgtaatttgcctatagtgttcattttyctgcattgtccttattggattatggtaccacagttacattatccataataatgagttagggaagctttccctctttatctcctttgacttagtttatgta

SEQ ID NO: 338989 - DNA, 201 bp, Homo sapiens
gttactttttaaaatacattatttgattttgttttaggtatttgtttaaaattttatatccatatttgaatgtaatttgcctatagtgttcatttttctgmattgtccttattggattatggtaccacagttacattatccataataatgagttagggaagctttccctctttatctcctttgacttagtttatgtaaagc

SEQ ID NO: 338990 - DNA, 201 bp, Homo sapiens
agcatctctcagttttattcaagttatatatttcagattttatttattagagaattgtgatcaggggagtttattagatttttcaaaggacaaccttttgsctttgtccaacagacattttaggtatgtgaattatacctgttaattttgctcttatctattgtggtattagtatttttcttgtcagtgtcttctaaagta

SEQ ID NO: 338991 - DNA, 201 bp, Homo sapiens
ggcatggtggcaggcgcctgtagtcctagctacttgggaggctgaggcaggagaatggcatgaacccgggaggcggagcttgtagtgagccgagatggcamcactgcactccagcctgggggacagagcgagactccgtctcaaaaaaaaaaaaaaaaaaaaaaagaccaaagacataggaaaggaggtctagatgatttt

SEQ ID NO: 338992 - DNA, 201 bp, Homo sapiens
ctgtggctcctgccctcagtcctcgagtggcgctggcagttgggctctcctttgctgacttcccgtgcctgtcacagcagcttccaggggctggactcctstgctcttcatgccgaacttgactccgccttctgctcaccacagagagtgaggccccttcccggtggctcttcagcgtcctcctcgccaccctggaagcct

SEQ ID NO: 338993 - DNA, 201 bp, Homo sapiens
gactccctgcctttgtctgttcccgtctgtctgtaacacacacacacacacacacacacacacacacacacacacacacacagagaatgttgaaataaatrgatggattacagattgtacactttgggtagacatgaatagagaaaatcttgttagagaagatgaccccttgggctattggctcagaaaaggagaaggatg

SEQ ID NO: 338994 - DNA, 201 bp, Homo sapiens
tgggtcaggctggcctcgaactcctgacctcaagctatccacccacctcgccctcccaaagtgctgggattacaggcatgagccaccgtgcctggtcacatttttttttttttttttaatataaagcacctggtcatgctcactttggcagcacatagactacaattgcaatgatacagagaaggttaggatgatccctgc

SEQ ID NO: 338995 - DNA, 201 bp, Homo sapiens
agcattcaatcttccctgtcttttttataatagccatttacactgcagtgagatgatatctcattatggttttgatttgcatttttctgagaattagttaygttgagcattttcctgttggccatttgtatgtctcttctgtgaaatgtctattcagatcttttatgcatttttaaaacatattattttatctatttattt

SEQ ID NO: 338996 - DNA, 201 bp, Homo sapiens
gcttgtaagtattttctcccattctctgggttgtctctttgttgatgttttcttcattctgcaggaggtttttagcttgatgtaaccttatttgtctattyttgctttggttgcctatgcttttgaggtcttatacaagaaaatctttgtctagaccaatgtcctggagtatttccccaatgttttattttagtaattctc

SEQ ID NO: 338997 - DNA, 201 bp, Homo sapiens
ttttctcaggtaataggttttaatttgttgctttttatttttggtgtatctattataggtttttgcactgtggtcatcacaaggcttgcagaaacatcttktagatataacaagttatttttaaagagatgacaacttaacttagatcacagaaaggaatagaaacaataaactaaaaaaacctctgtgttttaactctat

SEQ ID NO: 338998 - DNA, 201 bp, Homo sapiens
gcattaatctcctaatcagcaaagtcagaataatgccacccaacctaattactttagagaattgtgatgaagatataataggctaacctgtgggaaatctmaaacatggatgctcttctttttcctggagtgatgaattgtttttgaaccttcatcaataagaatattgctgtgatttgaactccaaattcttttagccaa

SEQ ID NO: 338999 - DNA, 201 bp, Homo sapiens
ttcacccaaagaatgatagacacttccatttaaaatttcagcccaactgttttagccacataggtgatgtctgtggcatgatattcattgatattggcgtytggaaacagttaatagtcacacttaattacttcatggaaaatgtttgttttggagatgatattaaaggagaggcataaatgaaattaagatgggtatttt

SEQ ID NO: 339000 - DNA, 201 bp, Homo sapiens
gtgttttaactctatctcccctacatattgatttttttgttacctcaatttggatatatttatactgcctattttttagcaggtttctgtatgtgttttcrtttttgatagatttgtcttttgggcttcatactagagttatgagtggattgcacaccacaattacagtattagagtattctgggtatgtctatatgctta

SEQ ID NO: 339001 - DNA, 201 bp, Homo sapiens
ttgttatagtcatagccatccttgaaaagaaaaaaaaaaaaaggaaaatataggaaaactgaggcttaaaatccttcttctattttctaaacttctgtcaytggagtgcttgcgttcccccaggtgatagactccggaagctcatacagttgcagatgagaacatgagtaataaatacccccaaaattctttccaagttca

SEQ ID NO: 339002 - DNA, 201 bp, Homo sapiens
ggtttaatatgcatgtagttatctttttattggtccataattccaatttagcaaaatgtaaagatgaatcataaagaatacctggaaaaagccccaacatygatggcacttaataaagatagatgagtatgttcttactcctttttttaaaacaaactggacaaagataaattttaatgtttacaaaaatgtaaatttcag

SEQ ID NO: 339003 - DNA, 201 bp, Homo sapiens
aagagaagtaagcattagagtcacaggatgggattttgaaatactctgtgagttgattgatgttcctaaagttccctgtttaatgctctgagttaaatagrtggccatgctcagcttcttggatgttaatagtaacttctttgtttttcagatactgtgttgacaagtggtcatgctaccgactatttatttgttggaaat

SEQ ID NO: 339004 - DNA, 201 bp, Homo sapiens
ggataagcagtgggctgtgatggtgggtgctctgcccgtcgtgaggctgagagcactgaacagtctgcaatacctgaaccaaatggaagtaaattagaagsagcttgagctgggggaagaatcttgaagcccgtggccaacgttgaaaagagccttcatcagagtgtgaagtggcatccaagacagggaaaagccagggcc

SEQ ID NO: 339005 - DNA, 201 bp, Homo sapiens
taaatgaatttcgtgtttagacctgggtcctatctccaggatacctcatgatgtatatgcaattattccaaaattcaagaaaatctgagctccaaaatacytctggccccaagcttttcaattaagggatattcaacctgtatattgctttatcttcattatggctcctgtcctatgctaagcagttcgaatgtaagatgc

SEQ ID NO: 339006 - DNA, 201 bp, Homo sapiens
cctctccctccacgctgacactctcccctcacttctgcactgcacctggaatgatcttttaacaatgtgaatcaaaccatgttccttctctctttcaaacsctttaatgatgtagaattatacttagaacccagatacctgctaacaagtcccagtctggcctggccctgtcctgttagcttccccgtaaagcactatctg

SEQ ID NO: 339007 - DNA, 201 bp, Homo sapiens
ctgtgctgccccacgtgcctttgctccttgcacaacgtggggcttttctctcatgggtcatgagggtctttctagtctctgagacccataggtctttgccwgtctgccccttagcctgcctgcagcatttaatgctgttctcctctccctccacgctgacactctcccctcacttctgcactgcacctggaatgatctttt

SEQ ID NO: 339008 - DNA, 201 bp, Homo sapiens
aaaaaatatatatcatagacagttcttgatgcacaatcaggtttggaaaccactgatttaaatatatttattttccaaatagctacctgattgttccagcrccattcattgagcaagctttttccttattactggtttgggattcctcctttaccatgtgtgttaaactccagagtatgctgggggttgttctgtggctca

SEQ ID NO: 339009 - DNA, 201 bp, Homo sapiens
gtgaggccaggagtttgagaccagcctgggcaatatagcaagagcccatctctacagaaattctacaatttttaaaaattttaaattattgcagagctctyggaaatgtttgaaagcatgaacaaatagattgaaaatgacttggtagtgacttctattggtgcccagagagccctgggagggccacaggcagataagcaa

SEQ ID NO: 339010 - DNA, 201 bp, Homo sapiens
tgagtttgtgagaaatacgtaatttccttgattttctaactggctcttattggtgcataggaaagttcctgattttctttcagtagagtttttaaagcgcrctctgccttttggctctgctgagattctttcagttcctggattgtgtctcttgtccttgcactgactgtgccattcttccttttatttggaatgttcttc

SEQ ID NO: 339011 - DNA, 201 bp, Homo sapiens
tttattttttttgagacggagtttcactcctgttgcccaggctggagtgcaatggcgcaatcttggctcactgcaacctctgcctcccgggttcaagcgaytctcctgcctcagcctcccgagtagccaggattacaggtgcgcaccaccacgcctggcaaattttctgtatttttaatagagacggggtttcaccatggc

SEQ ID NO: 339012 - DNA, 201 bp, Homo sapiens
ccctgctggattgtaaacgtcttcaggtccaggaaggttttttgttttgtttaagtctttaaaccatctgagttaatttttgtctatggtgtaaggaaggkatccagtttcaatcttttgcatatggctagccagttatcccagcaccgtttattgaatagggagtcctttccagactggataaaggtggtacatatacac

SEQ ID NO: 339013 - DNA, 201 bp, Homo sapiens
caagtcagctaaagtagcaagtcgttgttcctcaaactaattttcttttttttttttttttgagatggagtctagctctgttgcccgggctggagtgcagkggtgcaatctcagctcactgcaagttccacctcccgggttcacgccattctcctgcctcagcctcccaagtagctgggattacagtcgcccgccaccgcg

SEQ ID NO: 339014 - DNA, 201 bp, Homo sapiens
atgggggtaggtttttcccatgctgttctcataatagtgaataagtctcacaatatctgatggttttaaaaagggtagctcccctgcacacactctcttgmctgctgccacgtaagacatgcctttgctcctcctttgccttctgccatgattgtgaggctcctcagccatgcgtaactgtgagtccgttaaacctctttt

SEQ ID NO: 339015 - DNA, 201 bp, Homo sapiens
gagctaaaggatgagaacacatggacacatagaggggaacaacagacactggggcttactggagggtggagagtgagaggaaggacaggatcagaaaatayaactaatgggtactaggcttaacacctaggtgattaaataatatgtataagaaacccccatgactcaagtttacctatatatcaaacctgcccatgtaat

SEQ ID NO: 339016 - DNA, 201 bp, Homo sapiens
gacttcatggagggctggctgttcttcttcctccacctcctagcatagctgtcacccaggttctggtcacaagcctttgcccaccgtgtgctcctttcctytgtgatcacatgcatctccatgggttcacccctcagcaggtgcaggcggccctccccacagaggactagcctggcctctgagagaggctgagagcttggg

SEQ ID NO: 339017 - DNA, 201 bp, Homo sapiens
tttttctggctggccattagaattagtaggccacatctaatacgtccacacaggtccagatatcctacacaggggtgtgggttcccaaagaaggggggatyggtaggccctacacatttgttgctcatctgtttgcatctcaggcaactgtgagctggctgggcttcctgactgtgacagacacaaattctaatccttgta

SEQ ID NO: 339018 - DNA, 201 bp, Homo sapiens
ttttttgctcattcatagaatacctttcagtgagttgcttctaaggacggtagcagagtttttgctgtcattgttttgttttattttttggtttttagacrgtctcactctattacccaggctggagtgcagtggcacgataagggctcagtgcagcctagacttcctgggctcaggtgatccttccacctcagcctcccg

SEQ ID NO: 339019 - DNA, 201 bp, Homo sapiens; identical to SEQ ID NO: 71403

SEQ ID NO: 339020 - DNA, 201 bp, Homo sapiens; identical to SEQ ID NO: 71405

SEQ ID NO: 339021 - DNA, 201 bp, Homo sapiens
gggagagttctgtccttagtctgtgcccttggactgtagatatagacatagaaggtcatctccctttatttcgcctttctgccttcattgtcactggggaracagtccccccaagtcttcctgtgtgtgacgctgtgcaggtggtacatagaaatgcccatcagtgatacttattttgatgctgctgtgatcctgagaatt

SEQ ID NO: 339022 - DNA, 201 bp, Homo sapiens
ggagcaggggaccaccaggttgcctaaggagtgatgaacaagcccaggtcagaaacaggtcaggtcaaaactactgtgctgatcagtagtggactcacaamggtgaatagccactgccctccagcctgggcagcataatgtgagtgtatttatcgctaataaaaaaattatttaaaaaatatgtatctctgacaccatggg

SEQ ID NO: 339023 - DNA, 201 bp, Homo sapiens
tagaatctttgggtaaaatgaagtctgatgaccttgttaaaacatattatgtaatgcttgactttggtcattcaggaaatacctactgtgtgcgttaacaygtaatttagtacatattttctctttaaaatgagcagttgctacaaatgaaacctggcccagaagtagcagattgtcattctgcaaaatatttgggagacc

SEQ ID NO: 339024 - DNA, 201 bp, Homo sapiens
ataggaaacctaccctcagaggctttcccttcccagcatcagcagctagaaccatgggaccccagttagcctgcacacggccgccacggcccctctatggycacaggtttcttcatctcaagcctccacctatccaaggctaaggaggccagatgtcgcactcacccgcacgctgccaaaaaaaagcagcttattttaaac

SEQ ID NO: 339025 - DNA, 201 bp, Homo sapiens
tagtagaaagatttgagtagattgggcaacttggcaccaaggccactggtagggacgtgcacactcttttcttaataacttagaggtgatgaactcctgaktgattgcctcagctaacagatatttggctgtcactaaaaattatctaagttgtattacttgaaaacttagaatttaaaagtgttaccatagaggcagatg

SEQ ID NO: 339026 - DNA, 201 bp, Homo sapiens
agaaggattaaaaccaatttgcatagctctggagagactgtctttccttgtattacttggggaaagcaaaaattaaaagagatgagatctattatctgaawcatggatagtgtgacctacccagagtacctactttttaaccttccagtgggtgttgaaatctgattcagcacattcttggagagtgatgagtaaatttgt

SEQ ID NO: 339027 - DNA, 201 bp, Homo sapiens
gggcacccttttcgacttcttttctccttttaaagagtatgacagtgaactcacagctcccctgataagttgtacgcatgcatggatggaattcaagattrtcaggtttttttattgtgttgtcttttggccagaatgtctaattgagctgtgggacttttccagacccctgacacagaagggttagccaatggagagcag

SEQ ID NO: 339028 - DNA, 201 bp, Homo sapiens
caggccacctctgcagacaagcccttgcctcccccgataacccccctgagcctttgggattctcaggcagtggccagaaggcatgctctctggaagagccrggaagccagcccaggaccgggactctcagttatgggaacacacagagtaagaaaacagcctgagtgtcttcttttaaagtctcctcctcttctccatccc

SEQ ID NO: 339029 - DNA, 201 bp, Homo sapiens
gcacgttacatttacacttccatccaggtttagaattatatgtttccttttgacttgctgttcttgcatacaaaagaagagtccagggaaagagtttcagaaaaaaaaaaaaaaaaggatggaaagttcaagatccttaaacagtctatttcttttaaaagtctctgagaacctggagacacccttaggtatatctgaaga

SEQ ID NO: 339030 - DNA, 201 bp, Homo sapiens
tatacacatgcatatagagatatatatgcatatctagatgagcataaatgcataaattatgcatagattataaatgcataaattatgcatagatatatgcrtatacctatatatgcatatatctataatgcatgtatgtatgtgtgtgcatatatatacatgcataaatataaatatacatatatctatattgtgtgtgtg

SEQ ID NO: 339031 - DNA, 201 bp, Homo sapiens
actggaactgcagtgcaagtgtgaacatgggaccacacacttaaaaatggctatggtggcagactttgttatctatattgtacaatcattttaagatgctaaaaaaaaaaaaaagagaaaaatgtcacaaacacttggctgctttcatcgccttgagagagacaaaaatgtataaggacagattgtatgctttggcgagct

SEQ ID NO: 339032 - DNA, 201 bp, Homo sapiens
gctttatttcagtggtcaggattgctgtagaggtatgcatgatatgccatttgattttgtcctctaagccatagttaagaagactttgtattgtgagctakcacatacatgagttttgtgtattttccctactttttaatgaacttaatgtcagctgttgattctggccagatttcacagtgacatcctgttatgccacag

SEQ ID NO: 339033 - DNA, 201 bp, Homo sapiens
gacatagaaggtcatctccctttatttcgcctttctgccttcattgtcactggggagacagtccccccaagtcttcctgtgtgtgacgctgtgcaggtggyacatagaaatgcccatcagtgatacttattttgatgctgctgtgatcctgagaattttcccacttataggtgctctctttgggatatctgttggcattca

SEQ ID NO: 339034 - DNA, 201 bp, Homo sapiens
attttttcaagtcactttcctaagaaacttgtaaggacctctctaaggcactgctatctgtctttgtagggcaagcgtgaagctttcccttgccagctttrtgatgtcattgaattaataatactgtaaaggctagatcagaagtcaatttggcagctgtgcctttagggaaatttttgggagagtgaccttccatttcta

SEQ ID NO: 339035 - DNA, 201 bp, Homo sapiens
taacatcacatacatttttagcaccttaggtagaagttgctaaaaatgattttgtctttaaggataactctgatcactgtattgtgaaatgcgaggccatygtaccatggggcatgattttctctgaggcagtggcagatgggactattggcagtgggactatttcttgttccatcaaatgacctctggctgctatatttt

SEQ ID NO: 339036 - DNA, 201 bp, Homo sapiens
gaatatgataatggaaaaattagggagacaacagaaataaaggcttctagtaagaattttaaaattacacttggaaaccaggtaagcaatgggaggaaggyaataggatgaaggagaatgaaggctagtaaaagatagtaggattctgggtttgaatggttgagagaatggtggcaacattaacctagaggcagaaagagg

SEQ ID NO: 339037 - DNA, 201 bp, Homo sapiens
ggctcccaggttgttttctccaactatatttgatctgtggttctgtggagtttcaaaacaaaatgggaaatcacttttgtgtagccagttacagttgtggrctgcctctgccaaaaagatcagcccttggctttaagtagcagttgcacaaactaggcgggaatagatacagcttaatatcccttcatgttaaaattgctt

SEQ ID NO: 339038 - DNA, 201 bp, Homo sapiens
ccccctcctgctcctacatttttctgtgtctgtggtaggagtcactcctcaacgtcactcaaggtcatggacgatagtgtaaagaggtatcgtagggtcayggaccatcgtgtaaaagggtattagaatctctgtttcttcgtgctatcccaggcttcccagcattttgtgctcctgtagctgctggctttcacggtttct

SEQ ID NO: 339039 - DNA, 201 bp, Homo sapiens
ttggctcactgcaacctctgcctcctgggttcaagcgattctcctgcctcagcctcccaagtagctgggactacaggtgcccaccaccatgcccggttaattttttttttttttttagtgagatgggggtttcaccatgttagccaggctggtcttaaactcctgacctcaagtgatctgcctgcttcggcctcccaaagt

SEQ ID NO: 339040 - DNA, 201 bp, Homo sapiens
atagctggaagccatcctgtttgtgaaataacattgtttgtctgtgcttgtgctacttgaccacagagaggaaactcaattgctgtcgggttcttctacctttttttttttttttgaagtctctcacctcaatgccttttgcccttcaagtttccttcagttcatgtttagtttacttacatgtagaaatatttatgtcta

SEQ ID NO: 339041 - DNA, 201 bp, Homo sapiens
tctgatatttacactttgggccataagtgtttgaaacagttatatctattcatgtgaaatttctgttcacattatagcaacaacatcaatttaaaaaaaaraaaacaaaaaagaattccccaagactgtccattctgcgtgtgtgtatgcacgtgtgtgtgcatgtgcaggcattttgcaccatgctgcaaaacagctcct

SEQ ID NO: 339042 - DNA, 201 bp, Homo sapiens
gtctgtgaggccctgggccaacttgagggatggggtggggcaatgttgtcaaagtgagatagtttctctcaccctttccatgcggcttttattccatgctrtggaccacacaagtgactctgacttattcctaacttggggagttttcaccaaggcgttcttgtctgtggatagttgctagttgaactttttgtggggtag

SEQ ID NO: 339043 - DNA, 201 bp, Homo sapiens
aaaacataaaccacaaaacaaaacaaaagcagagggcagaaactgtatcttccttccttgtagcctgagaagccatacagtcctcttttcctcactcccaytgcgttgtaaaagcaatgactcaggaatgagatcttagcaaaatttaacagtgaggctaaaagacttttcctacaaaacagtatgctaatattagagtac

SEQ ID NO: 339044 - DNA, 201 bp, Homo sapiens
aacatcagttcatctggggaaaatatagacaaggcctccgctaaagcatccagcatatggcagatgatgtcagccagggatagccacttacaacatttagrattggtgtgattcttatctgagcgtaccctctcctttataactgtattcagatctccacatctgagagactggagggatttgggttttgcatttttggtt

SEQ ID NO: 339045 - DNA, 201 bp, Homo sapiens
aagatttttcaaaaataagcatcggattcaaacatgagtagaaaggatgagatgttaatttaagtgattatgggaagctgtgatttatacacatgaaatcrttcatttagagatgggtagtaagaacaatgaggatcttagggactgagtatctgtttcctaggacactagagacagcattaggtagtgattaacttaaga

SEQ ID NO: 339046 - DNA, 201 bp, Homo sapiens
actctgagcacctgaaggataagaacatttcattgatttatcctcaacattcagcgaataatcacatatagttcttttaccctcagtgtctgccaaattgycaaatatggttgtttagtgtgccaaaacaaaagttatgttattgatgtgaggtatctctttatcaagtttttccgagtattcagtagtcagatacctgca

SEQ ID NO: 339047 - DNA, 201 bp, Homo sapiens
aatattttttttctttattttatcgaacagggaagaggtcttttgatttttggattatttggtataatattatattcttgaaatcatcctgtgactgtcaraaagctgactgtaaatgaacagtgagccactgcagacagaaacaattattcagggaaacataaattcataatcactgggcctaaaatgaattagtgagta

SEQ ID NO: 339048 - DNA, 201 bp, Homo sapiens
tcttaggagaacaggagtggtggcatttgctcttcggtgcttggaagcagatcatgtgaaaactctaaagccctgagaatcaaagcacagccacctacctrgtcaggaagttcaagtgcactaggtgtgggcccaaggctggcacaagcatatccgcccccaagggagctcccctccaggctgatgctgccttcaggctca

SEQ ID NO: 339049 - DNA, 201 bp, Homo sapiens
acaattattcagggaaacataaattcataatcactgggcctaaaatgaattagtgagtaatccaatctgggggtgagaaatgagcccttggcaacattgtytttaggctacagatggtccttgaaacactattagccggtggatctgagcacctgaaaggtttaaggaagcctgggtctgtgctgaaggtgtctttgggta

SEQ ID NO: 339050 - DNA, 201 bp, Homo sapiens
aggctgagcacagtggctcatgcctgtaatgccagcacttttggaggctgaagtgggcggatcacctgaggtcaggagttcaagaccagtctggccaacayggcaaaaccccatcgctactaaaaatacaaaaattagccaggcctggtggcaagtgcctgtaatcccagctactcaggaggctgaggcaggagaatcgct

SEQ ID NO: 339051 - DNA, 201 bp, Homo sapiens
cggcacagagtgggtccctctgaagcaagaagtcacatttttaaataatatctcattataggctgagcacagtggctcatgcctgtaatgccagcactttyggaggctgaagtgggcggatcacctgaggtcaggagttcaagaccagtctggccaacacggcaaaaccccatcgctactaaaaatacaaaaattagccag

SEQ ID NO: 339052 - DNA, 201 bp, Homo sapiens
gaggccaagcaactggctaagcccatgagggctaagggaggcctaaaatgcgggacattggagaggaaatgttctggaagcttctacaggcaaactgcatkgtactggaaggggccgatgaatagtgctgggtcaagggtttttaagtggaattgagaataagggaagcagaaaggtggtttgaagaggcgaaaaaaggaa

SEQ ID NO: 339053 - DNA, 201 bp, Homo sapiens
attaaaacatattagaaaattttaaagtagtttagataaagctgaagggagaaggggaatgaaaaacatgggagagattgagggatgtggaagatagaatsagatcaatatggagatactgtagatagaagctccaggagaaggtaaaatagagaacggaggggaggcaggaatctcagtgttttctgtaagtgaagatcc

SEQ ID NO: 339054 - DNA, 201 bp, Homo sapiens
agatagactggctcagagacaagctgtaccagtaagaacgccctaagaaactgttcaagccagagagagcagttgccagcgggcagtggttactggagctrgaatgccagatgaagtctgatgggtttggctctgatgggtcttgtgcatccaaaaccaggtagccagaaggagccagttgatcaagcagatatagaaaga

SEQ ID NO: 339055 - DNA, 201 bp, Homo sapiens
aaatggcagtgttagcatgatctgaggtggagttttcagccctctgacatgaaaaggtgcagtggaggacaccagaacctcactgcatcctctgagagtcrgccaaaacgtgtcccaaggtggtcgtcagtgtttacgaagggatgtgttgtgagacaggtgagctgtcacgtggaagaagtgaagagggaggggcatctg

SEQ ID NO: 339056 - DNA, 201 bp, Homo sapiens
agctaactcagaaaagatccttccaaacacacatacatgttaggtgaaatataaacaaaggcaggctctcaaaacataactaagctcaaaagaacgagaartaaatccagataccaaaaacagaggcatcaaagccagcagggttagaggaggtgaagccaaggaggctgcatgggagtatcagaccatgcaaagggctca

SEQ ID NO: 339057 - DNA, 201 bp, Homo sapiens
tctgtgaatctagtgaccatatacctttttccttgcggtaacatgggacataactgattttcttgaatgcgagagagctttaactaaaagaagattgacayttaagacaaaatgaaatattgcaaatagtcaagaagatctacacttgggtccagaatgttatagaattaagaaaataactttctgtggcatcagagattg

SEQ ID NO: 339058 - DNA, 201 bp, Homo sapiens
gggagtcaggtggacatgaggcacacagctgtgttcgaggatgctgggacctgcccagggactggagtagaagctgtcaactgaagaataaccaggatcakacatttggaagagctttatttctcataaagggttatagcctgcaggctggccattcctcctgctgggaggcagagctgagagggagggaggataagacag

SEQ ID NO: 339059 - DNA, 201 bp, Homo sapiens
ggactgagctaactcagaaaagatccttccaaacacacatacatgttaggtgaaatataaacaaaggcaggctctcaaaacataactaagctcaaaagaaygagaaataaatccagataccaaaaacagaggcatcaaagccagcagggttagaggaggtgaagccaaggaggctgcatgggagtatcagaccatgcaaag

SEQ ID NO: 339060 - DNA, 201 bp, Homo sapiens
aaaaaaaaaaagccgtcgagaccaggagcagtgtggctgtgaatccttccagagcccagatgtacaaggcagcagaagcaacaaaggctgtggccagcaaygaaggcagagtccccggtaggcggaggtccccgtgcacagtgtggtgcagcagtgaacccaagattttccttcacagggcaggggaactatttcctaata

SEQ ID NO: 339061 - DNA, 201 bp, Homo sapiens
catgttggctccaccccaagtccagagaagcttattgctggcgagcgtggaaacatgcatgcatgggtttctgtctgagtgctggagctctgtagagcaarggcagcttgggatggcctgccagtatgccctggcaattctgtgttacaggtgctgtcctttctgctccttgtggtgtgacatgccacaactcatttaacc

SEQ ID NO: 339062 - DNA, 201 bp, Homo sapiens
atttagtattttaaagagattctctctttaaaaaaaaaaaaggaaaacatagatctaaattgctttttctgtgccaatctgtactcctcttttcttctcaytatttcagaattaaccaaagtaaatattttgttgtgttttgttcaccttttttactttgtttttgtgaacagatagcttccaaaccatatatagatgata

SEQ ID NO: 339063 - DNA, 201 bp, Homo sapiens
caggttagtaaccagttgataggattatatcaacctgtctctaagtcaaaacagattattcaacttttttgagtggtattttagaatacataggtcaaagrtgggcatggtggcacacacctgtagtcccagctacttgggaggctgaggagggaggcgtgcctgagctcaggagttcaagtcagcctgggtaacataggg

SEQ ID NO: 339064 - DNA, 201 bp, Homo sapiens
ccagctacaaagcggctcagccagttcatggagacttgtcacaggttggtgactgagaagggtccacctgaaacacttgcatgtccaggtccagctgagcrtgcatgccagcctcagccgctggggtccctgtctggtcctgcagcatcacgtggctcagatggcatcttcgctgtgagtgcgaagacgctgggcaccagc

SEQ ID NO: 339065 - DNA, 201 bp, Homo sapiens
actgaattaaggttttctgagtagagataaggctgaggtagccaaaactacttctgctatctctttagaaaaagtacttttattcagtctgttcttaaaakaaataagtgtggttgttttcttttttaccataagcagaatgaaaacaaaattagaagtcattacttttttttgccccagcttactttttgttatggaggt

SEQ ID NO: 339066 - DNA, 201 bp, Homo sapiens
ggtcagccagttatgtgacagaggatttccttaaatgtctggaaccaaaaagaaaagaaaaaaacaaaacaccaaacatttttctagtctttgcagcttarttctgacctaagtcattccctcaatgctaaaccaggtcacccatgactctgccttagccttcacctcctgctgtgcagaacccacagatccaccagtggg

SEQ ID NO: 339067 - DNA, 201 bp, Homo sapiens
agattccatatataaatgagatcatgcagcacttgtcttactgtgcccggtttatttcatttagcatagtgtcctcttggtttatccatgttatagcaaaygataggatgtcctttttaaggctgaatagtattccactgtgtgtgtgtgtgtgtgtgtgtgtgtgtgtgtgtgtgtgtgtgtatgtaccacagtttcttc

SEQ ID NO: 339068 - DNA, 201 bp, Homo sapiens
attcaataaattgggttggcttattctgagaaggataaaagttttttgtttttcgttttttggaaatagaaacattttgtgggaggtagggatggccagtrtagagaaatatgtcatggggtaagtgggaaaagataacctgagggtaccagactggcacctgggtgcttgcaggtgagaagccaaacatctcttgaaaat

SEQ ID NO: 339069 - DNA, 201 bp, Homo sapiens
tgagatatcatcctgtcttcctttgaattattagtattataggtagtccttgaaatgttatacatttaacagaaatttctcttatctacttatggactttraatttagggatattcctagattggaagaaggcaatattcagagcaaaaaggtacaagctttacttgccaccagcagctgccagagtggaggccttatgta

SEQ ID NO: 339070 - DNA, 201 bp, Homo sapiens
atgatagtaaaaagaatatgaaagtggcagggaaatggtgactgcagctgcactgggtgtgagaggctgggcagggaacgatctgaagaatgggggagggygatggtgagaaaagacacagctgatggtcgacaggggacaggagaaagagattcacggaggggaagaaaaagcattgaatgtgtgggataaagaaagagc

SEQ ID NO: 339071 - DNA, 201 bp, Homo sapiens
attaacagtggaaccaccttttgaatcctgggtactcctaggttgagcagggctgcacttccaccgtctttcagggttcaccagatgaaactctgaggatsctctatgaatcagcagatacacaacatctcctgagattataaggtggtactgtctgtggtgattacttaattttaatttataaactgggaatgcaaaggc

SEQ ID NO: 339072 - DNA, 201 bp, Homo sapiens
ctttcagggttcaccagatgaaactctgaggatcctctatgaatcagcagatacacaacatctcctgagattataaggtggtactgtctgtggtgattacytaattttaatttataaactgggaatgcaaaggccatgctgaccttgctaagaaatgtgaagttcacaggagaacaaaactggggaaaaaggtaggggaca

SEQ ID NO: 339073 - DNA, 201 bp, Homo sapiens
atcttatttgtgttattcatattcagtgagtaataatttcagtgtgaatatgtaatataatataataggttgatatataaagaaaccccaggccgagcacrgtggctcatgcctgtaatcccagaactttgagaggctgaggtgggcaaatcatgaggtcaggagtttgagaccagcctggccaacatggtgaaaccccct

SEQ ID NO: 339074 - DNA, 201 bp, Homo sapiens
tctttacactccctccactccactccacccctgctttttcttgtcctaactctatgtctacaccaaggctaggcccttgtgcttttagctgccaaacaccrtatactcttaaataaaaacagtagaatttgagtaaaaagagattttcttagagttctgtgatggaccaagcatgaaatgatacagccaactctacgagga

SEQ ID NO: 339075 - DNA, 201 bp, Homo sapiens
atgttcctggccctctccagcatctggggccttgcctatacctagagcagggtcgtctatttttcccattccatggcccctcccctgtcaccacatcaackcctacacatctttcaggcatccaggatctttcctgatcactctccactcctcccctacctaccatcaactcccagagcactgactgtaacttttatgcca

SEQ ID NO: 339076 - DNA, 201 bp, Homo sapiens
atcctcttggtcatggccttggtgagctcggcgggggccctgtactggaacaggtctcatggtgaaaagaactggtacatcaagaagatgggtaagtgtcrgggtgggttgcttgttccagtggaagaaaaccatttttgagatgttcttgcagccatggttgaagtgtggtgtccctgccgtccttctgttccctttggt

SEQ ID NO: 339077 - DNA, 201 bp, Homo sapiens
agtagagacagggtttcttcatgttggccaggctggtctcaaactctgacctcaggtgatctgcctactttggcctccgaaagtgctgggattacaggcaygagccaccgcgcccggcccataactagttttaaaactatgattacttcatagaatcctggtttcttcagaaaactactttatcaggatgaagggctaatt

SEQ ID NO: 339078 - DNA, 201 bp, Homo sapiens
tggtctaacacgctaagtgataacagaatggattctgtgttttatgagtcagtcagccagatctcaaagggataacaattaggaaaaatatatataatttwtcccagtaaaagaactagcctattgctgaaaaaaagttgtaccctgtattattgctttttttttgtcccacaggtgtgaataaacctggaaagcataaac

SEQ ID NO: 339079 - DNA, 201 bp, Homo sapiens
ggaattccctgaccccttgcgcttcccgggtgaggttatgccttgccctgcttcagctcacgcatggtgccctgcacccactgtcttgcacccactgtccrgcactcccctgtgagatgaacccagtacctcagttggaaatgcagaaatcacccgtcttctgtgtcgctcactctgggaactgtagactggagctgttcc

SEQ ID NO: 339080 - DNA, 201 bp, Homo sapiens
gagaagttatttcatagcataataaagaatggcatgaagaattatattgtcaaaaaaacctagccagatttttttgagcaaagaggggtatttccaccccygactgcccactgtaagaataagagacgcttattgtaggattgggaaacagtgaaggaaatagaaaccgctaatggtatcactctcctaaggggactactg

SEQ ID NO: 339081 - DNA, 201 bp, Homo sapiens
tttgtgaagcccgttggaaaagcgcagtattagggtgggagtgacccgattttccaggtgctgtttgtcacccctttctttgactaggaaagggaattccytgaccccttgcgcttcccgggtgaggttatgccttgccctgcttcagctcacgcatggtgccctgcacccactgtcttgcacccactgtccggcactccc

SEQ ID NO: 339082 - DNA, 201 bp, Homo sapiens
tattgtcaaaaaaacctagccagatttttttgagcaaagaggggtatttccacccctgactgcccactgtaagaataagagacgcttattgtaggattggraaacagtgaaggaaatagaaaccgctaatggtatcactctcctaaggggactactgttatttcctcttaggcactttgtgttcgcatatacatacacagg

SEQ ID NO: 339083 - DNA, 201 bp, Homo sapiens
tttgctcagtgggggacactgtaggtcatagagtccatcttggatgggtatcaacttgaagttagtgtctgcctgcctgcctgtctctcatatgtttgttyggggggcctatctgtatatatacttttgtcttatttgaagattccagtttttttcatagagaggcagtaaaagatgcccaaggatgttctgactcccttt

SEQ ID NO: 339084 - DNA, 201 bp, Homo sapiens
atctcagactactgtactagcaatgaacgaggctccgtgggcatagaaccctccgagctaggtgccggatataatctcctggtgtgccatttgtgaagccygttggaaaagcgcagtattagggtgggagtgacccgattttccaggtgctgtttgtcacccctttctttgactaggaaagggaattccctgaccccttgc

SEQ ID NO: 339085 - DNA, 201 bp, Homo sapiens
aggcaatccctagaaccaaaaacaaaactatagcaacaacaacaaaagcactttgggaggcctgggtgggcggatcacaagttcaggagatagagaccacyctggctaacacagtgaaaccccgtctctactaaaaatagaaaaaattatccaggcatggtggcgggcgcctgtagtcccagctactcggaaggctgaggc

SEQ ID NO: 339086 - DNA, 201 bp, Homo sapiens
ttatttgaagattccagtttttttcatagagaggcagtaaaagatgcccaaggatgttctgactccctttcaacttatccttgtaaggcaccatagagaargtatcttaggtcttttgttttttcagactgtggcatcatcagcttttctccaaagtgctggctgcctctcacaacatcactgcagtgtgtgttgtcttgc

SEQ ID NO: 339087 - DNA, 201 bp, Homo sapiens
attttccattcatttgggtatattcttaggaatggaattggtgagtgatgagataattctgtgtctaacttaccaaggaacagtggctgcaccattttacwtctcaccaagtaatgtgcaagagttccagtttctccatatcctctccaacacttattttctgagttattttggttttggggtttttttaatagccatcct

SEQ ID NO: 339088 - DNA, 201 bp, Homo sapiens
agattgaacttactttgtcacaaatttatgtggtcacagaaggcactactgcaatgaaccctgtgttcctgggtaggaatcatgtattaactgaacgcgayatgaggttgaaatgattatttgtaaactgttgactgtcagacgtttcagaggggcctgtgaggtatagaggttggcatgattcgttggagacataaatac

SEQ ID NO: 339089 - DNA, 201 bp, Homo sapiens
ggtcatttctacttttggcttttgtgaataacgcagctagggatattgtactggtatctgtctgagtccattttccattcatttgggtatattcttaggartggaattggtgagtgatgagataattctgtgtctaacttaccaaggaacagtggctgcaccattttacatctcaccaagtaatgtgcaagagttccagtt

SEQ ID NO: 339090 - DNA, 201 bp, Homo sapiens
tttctgaagctgcctctgctggttgccaggcagtggctttactccttttggagtaaagatgaatctgaccccagggtaggatcaaaatctgtaccagtagrtcccagttctggctttttgagctaatatagtcaatctaatttcccttgcatgtgatagctattaaaacattttaagactgtgaacatgcttatttgagac

SEQ ID NO: 339091 - DNA, 201 bp, Homo sapiens
catgaggttgaaatgattatttgtaaactgttgactgtcagacgtttcagaggggcctgtgaggtatagaggttggcatgattcgttggagacataaatasaagtgtgactttggacacaagtctgaatgaagggtcagtgtaacttttctgtaaaggatcatttcataaatattttaggctttgtggtctctctgcatct

SEQ ID NO: 339092 - DNA, 201 bp, Homo sapiens
cagaaaggcgtggctgtttgattctagtcatctgcctaggagatagttgaagcttgagaaagaacatttgagaagtgctgaaaacatgatccactcaccccaccaccacacacacacacacacacacacacacacacacacacacacacacacgccacaaacccagtgaattcaagacgccttctcaggtgacgggtccat

SEQ ID NO: 339093 - DNA, 201 bp, Homo sapiens
ttgggttcttactgtgcacagcctatcttggcacagggtggcatctctttagttatgagacattcaatttggctttatgggtggaatttacttgatgcctrtgaaaaataagttaaaaggcaatggaaacaacaaatggaaacatttctctctctctctgtctctctgtctctctctctctctctctctctctccttccac

SEQ ID NO: 339094 - DNA, 201 bp, Homo sapiens
atccatctgtaccatatttctttatatggctgaataattctccattgtatgcatagaccacatttgcttacacatttgtcagttggtggacatttgggtcrtttctacttttggcttttgtgaataacgcagctagggatattgtactggtatctgtctgagtccattttccattcatttgggtatattcttaggaatgga

SEQ ID NO: 339095 - DNA, 201 bp, Homo sapiens
caagaacctttggtcagcttgtattttttagggtcagtattctctggcaataatctctccagcttctttggaacgaaaacatgaatagtgtattagattaraaatcacaggactcccaggctagcattaattctccattcaaccctgcctctttcctaccatgatggacaaggcaaggagatgagggacagaatgctttct

SEQ ID NO: 339096 - DNA, 201 bp, Homo sapiens
gggtgtcctgtgtgaatatgtccagacaggcaccccagggaatataaccagcgattgtagagtacaacaaaccagcaaagaaaaatgagataactatcgaytggggaaagactaaagtgggagagttttcagtgttagggagggtgcatgtgttgaagtcaactgtcacagacataacctgagtgcagagatgataaccca

SEQ ID NO: 339097 - DNA, 201 bp, Homo sapiens
agaaaggcgtggctgtttgattctagtcatctgcctaggagatagttgaagcttgagaaagaacatttgagaagtgctgaaaacatgatccactcaccccaccaccacacacacacacacacacacacacacacacacacacacacacacacgccacaaacccagtgaattcaagacgccttctcaggtgacgggtccatg

SEQ ID NO: 339098 - DNA, 201 bp, Homo sapiens
acaaaaagtgtaagacttggttccggctgaatgaaccctctagttgaacacacagatggtgtgctggtgttttccagggatcactaggcacagtgctgctwctcagtctaccagctctccatgggtttctacaagctgagtccaaagttgcatctcagctttgacctctctctggtcccctgtcttctgaacacctcagag

SEQ ID NO: 339099 - DNA, 201 bp, Homo sapiens
ctctggcaataatctctccagcttctttggaacgaaaacatgaatagtgtattagattaaaaatcacaggactcccaggctagcattaattctccattcarccctgcctctttcctaccatgatggacaaggcaaggagatgagggacagaatgctttctcctccgcctctcactgttcctgtgattttcagattgtacta

SEQ ID NO: 339100 - DNA, 201 bp, Homo sapiens
cggagtagctgggaccacaggcaaatgccaccacgcctggcttttttatttttattttattattttattttatgtttttgagacggagtctcactctgtckcccaggctggagtgcagtagcgcgatctcagttcactgcaagctccacctcccaggttcatgccattcttctgcctcagcctcccgagtagctgggactt

SEQ ID NO: 339101 - DNA, 201 bp, Homo sapiens
gtggctgtttgattctagtcatctgcctaggagatagttgaagcttgagaaagaacatttgagaagtgctgaaaacatgatccactcaccccaccaccacacacacacacacacacacacacacacacacacacacacacacacgccacaaacccagtgaattcaagacgccttctcaggtgacgggtccatgctgtgtgg

SEQ ID NO: 339102 - DNA, 201 bp, Homo sapiens
gctgtcattcaaattctttgcctgctcagctaatgaggtcagaacggctctgcctgaggtggacagcctctccctcgggtagtgtgcctgcaggagatacrggaggaagtctccccacccgctttaaaggaagcttggcgagatagcattgcttagcactgttcacaaaaggataactgcagaaaaacatgaaataaaagg

SEQ ID NO: 339103 - DNA, 201 bp, Homo sapiens
ttgtagaacagggcagacagaatcaaatcaggcctggtgtagaggtgtaccttgggaaatacctccagttgttttcagacacttgcaaatatgtgtaaatrataagttttatcagatagctttttattttaatattttgggaaatgggataacacaaccttttcttgtgaatatcttttgttcttttaatagaatgtgaaa

SEQ ID NO: 339104 - DNA, 201 bp, Homo sapiens
ggggagatatcaaaaatctggaaggacagaaatattataatctccttcaggagattaaaagtataggcaggaaataacaaaatgagatacagcttggaaartgcacactaatgcggctgggaaaaaataatgtaaaatgcagaacctaagtgaacagaagaaatgtgcaccaaaatgccaaaggcaagcaatatttggatg

SEQ ID NO: 339105 - DNA, 201 bp, Homo sapiens
agactgtaagcaccagaggaccaggatatgtcagctgactggaggacttgtttatgtgtgctgatttgctgtcctgagtacaagtgaattcttattacacttttttttttttgagacagagtcccattctgtctcccaggctggagtgcaggagcacgatctcggctcactgaaatctccacctcccatgttcaagtgatt

SEQ ID NO: 339106 - DNA, 201 bp, Homo sapiens
tgcccaggctggagtgcaggggcgcgatcttggctcactgcaagctccacctcccattctcctgcctcagcctcccgagtaactgggactacaggcgcccsccaccacacctggctaatcttttgtacttttttagtagaggtgaggtttcactgtgttagccaggatggtcttgatctcctgacctcatgatccacccgc

SEQ ID NO: 339107 - DNA, 201 bp, Homo sapiens
gaaaattggaatttcaaattagagaatatgtttctgacttgacatcataagcatagatgtctttaaaatgcttttaatattcacaggcatttggggaagartgagctagattcttttttccctcatctagcttagatatttctacatttgctatcctcagtacatcatatctcagtagctcttcccccggcttgagttgtc

SEQ ID NO: 339108 - DNA, 201 bp, Homo sapiens
tttggaaagacagctttgctatgtaaaatatttttggttggcagattttttcccccttcactttgaatatatcatcccactcttagtctgctggatttctrctaataaatttgccaagatagtcatattgggacccctttgtatgtaatgtatttcttatctcttgctgttcttagaatttcttctttgtctttgatttag

SEQ ID NO: 339109 - DNA, 201 bp, Homo sapiens
tggtttgcttgattttgaggcttcataatcttttaaaaagatggagatgtatgaccttcaaagcctttttctttttttttttttggagatggagtctggcyctgttgcccaggctggagtgcaggggcgcgatcttggctcactgcaagctccacctcccattctcctgcctcagcctcccgagtaactgggactacaggc

SEQ ID NO: 339110 - DNA, 201 bp, Homo sapiens
atcatatctcagtagctcttcccccggcttgagttgtcctggaaaggtgcagacctcatgagaggtggaggatggcagggaaataaccaggtcatctcagrggtctgcagaagggtaacatctaattgagttctgagaccacacgtgaactctgcctcaggacattgcagcccttgtcctggccacacactttattgcatg

SEQ ID NO: 339111 - DNA, 201 bp, Homo sapiens
ttcttccccctctcaactgacccccaccccaaatatccatctctgccccccatactactttctctgaaattatgctcttaccatggtttgcacagacggtrgataaatactgttccaaaggctggcttggggaacccaactattcccggtttggggttttgtccccctttgaaaaaattcacttgagattttaaatatctg

SEQ ID NO: 339112 - DNA, 201 bp, Homo sapiens
atttatcaagatctcggcagcatgaccacgcagaaacaaacagaaacaaaggaatgtgtcaccaggattcctctctcatgcagggctgtgttaggacacayatacttcatttgagattgtttggaaagtcacctctcacccccactctagaacaacttacattagagaaacgttttcttacagtggcctcacacacaccct

SEQ ID NO: 339113 - DNA, 201 bp, Homo sapiens
ctagcacacagtaaagatttgaatatgttattttgaaataatgaatcagtgccctaaaacaaaggtggtcattgttaaggatgatctggagaggcctgggygaaggataccaccctgggcccattccaggttagtgacatgaagagaccagttgatattgtcagtgtctttctcctttgatgctctatagattgagttgag

SEQ ID NO: 339114 - DNA, 201 bp, Homo sapiens
caatggcgtggtctcggctcactgcaacctctgccttctgggttcaagtgattctcctgcctcagcctcccaagtagctgggattacaggtgcctgccacyatgcccggctaaatttttttgtatttttagtagagatggggtttcaccatgttggccaggctggtctcaaactcctgacctcaggtggtttgcctacctt

SEQ ID NO: 339115 - DNA, 201 bp, Homo sapiens
gcagaaattgaacaggagagaaatttcatgctctacgttcttggtgtgaccgtgctaattgtgtggcttttgtgggttggatcgcatccttgaaaagataygttgagttgttgagtcctaaacccccctgcacagtatcttagaatgtgacctggtttggaaatagaatcatggcagcttagttaagatgagttcataagt

SEQ ID NO: 339116 - DNA, 201 bp, Homo sapiens
ggtggtgcacacctgtaatcccagctacttgggaggctaaggcacgagaatcgcttgatcccgggaggtagaggttgcagtaaaccaagattgtgtcctcyagccttgccgacagagtgagactttgtctcaaaaaaaaaaaacaaacaaaaacaacaaacaaaaacgaaacaaaacaaaaaaacaaagaggttaggttgg

SEQ ID NO: 339117 - DNA, 201 bp, Homo sapiens
acataggaattatctctaaagatataaaatggtcttatttttccttaatggtgttaggaaaacctaatagcaacaatggattgtgcatgatcaattttatstagtcacattttgggggatctttaagcaagaataggcaacaagaaaatgtgcatttagtgttggaagggatgagagattagttgtggatctgaggattat

SEQ ID NO: 339118 - DNA, 201 bp, Homo sapiens
atgtataccaaaatctgcagatgcttaagtctcttctataaaatggtgagtaggctgggtgtggtgactcacgccagtaattctagaactttgggaggtcraggcaggtggatcacaaggtcaagagattgagactatcctggccaacgtagtgaaaccctgtctctactaaaaatacaaagattagctgggtgtggtggt

SEQ ID NO: 339119 - DNA, 201 bp, Homo sapiens
agtggccggacttccgagtaggtactctgctgtctgagtctaaagaactgtgtatcatctctagccttcctccagggcagggggctcctgagtgggtaaagggggccaggaaatgtgtaactttagtgtcacagccaacttttacactgtttcacctgcagtctgccactctgtattttgactcagtgctttgttcattct

SEQ ID NO: 339120 - DNA, 201 bp, Homo sapiens
ctctcacaacatcactgcagtgtgtgttgtcttgctggcagagtctttccatttctctttggggtgggaatggaggcaggaagatattcttttctagcacrtttggcaaggggagttcaattcaaaactctaaggaattggtttttcaaatctgtgccacctttgttctttttttaaaaaaaggacatttaatatttctca

SEQ ID NO: 339121 - DNA, 201 bp, Homo sapiens
ttctgggaggattaaatgagctttattttatagcacagtgtcttagacacatggcatttaatgagtcttggctattatttattttattaatagtatatgarctgattgtgtaagaatagtctttgtatggccacaggtccaatcaatcactaaattccttttgagtttattgtgtaacctttttctttacatggaaacaac

SEQ ID NO: 339122 - DNA, 201 bp, Homo sapiens
acacgagactgtggctcaccatactttacaggcctgggatactcactgccccaacagccagacatgcggtgatctttggctgttttcgtgctgttgtgtgsctgttttgtgctgttgtgtcgctgtttcattctgaaactcttgggcctctaggatcctgtgcacattataggcctttcctgcctaagagttaattacagg

SEQ ID NO: 339123 - DNA, 201 bp, Homo sapiens
tcccttctccttctgcgtcctcccctaacaggtattaatagttttgcagagctccgcgttttgtatatttacctctatgcctgttgccccactgccctccyccacttctgcagtagatggcgttcctggaggtcctaattcctttccttctttcttctgtttgtaaatctctccattcctggtgcttatcacagtatctag

SEQ ID NO: 339124 - DNA, 201 bp, Homo sapiens
aagattctatcaacagagtgaaaaggcagcctatggaatgggagaaaatatttgcaaatcatatatccgataagagattaatatccaaaatatctgaagarctcctaaacacaacagcaaaaaaccaattcaaaaatgggcgaaagacttgagtagacatttctccaaagaagatatgcaaatatccaataagcaatgaaa

SEQ ID NO: 339125 - DNA, 201 bp, Homo sapiens
agtatgcaatgtttagctcccacttaataagtgagaatatgtggtatttggctttctgttcttgcattaattctcttaagataatggcctccagctccatdcatgttgctgcaaagaacatgatttcattttttttctggctatgtattccatggtgtatatgtaccacattttctttatccaatccactgttgatgggca

SEQ ID NO: 339126 - DNA, 201 bp, Homo sapiens
ttatccatgacttaaggaaataataattcatggaacccatagtgagcaggaaaggagttctctggaaggctataaacaacactgatgtcaggtgttcctgmtagcgaatgtcatgatagctggagccacactcaagtgctaactgctgctttctggcctctggctctgcgtgcatgcacatatgagcacatgctcacacac

SEQ ID NO: 339127 - DNA, 201 bp, Homo sapiens
cctttgttttcatagatattccaaatatgtgtgtactattcatttaatatcagttttctttcaactttgttaatatttgtatttatagaaattagtttcaratttgtccctcatttctaagtttaatgtcttacaggagtcatgtttcacatagagcaaaataatggttttcatgttttcttccaatgctttcagagtttt

SEQ ID NO: 339128 - DNA, 201 bp, Homo sapiens
ctgctaagaaaaatggggatggggtggaaggtcagtgaggaatcagggaatcccctaagagacagtggcaattaatccgggtcagaggtgatgatgacttygcttacgatgttagaggaggaggtagtgagaagtggtcggagtctggattcattttatctttctaaaagctaacagagcttgcacatggattagattgtg

SEQ ID NO: 339129 - DNA, 201 bp, Homo sapiens
aagctctttagtttaattaggtcctacttgttgatttttgaggactaacctcttttgaatgccttttgccattaaagattttgacttcatttcatacaccytattcaaacccaccaggaaccctaaggggagggtgctgtaccttcattttatagagaaggaaaggagtaacttatcgaaggacacctggttattcagtgt

SEQ ID NO: 339130 - DNA, 201 bp, Homo sapiens
ctaagtaccacatcgagtacaacaggtgtcagtgtgaggtggtagagagaggagggctgtcagtatagaagaggtacatacgaaaatgttgcaaaggtgtrttgtatttttataggatttaattctctccaaaaccaaactcagtttaaaaaaatttttgtaatagcctaaaactatgcaatttgtaacacatttgatgga

SEQ ID NO: 339131 - DNA, 201 bp, Homo sapiens
gtcctgtataccttctagtaaccaaatctaaatggtttatctcaaaggaaagatgttattgcttatgagtcttacttatagaactagatcctgttaaattktagtcttatgtatcgagggaaagaattattaaacttattttatttgactatgtcaagaatacagagctctcctaggattaattagtggttgacagtatta

SEQ ID NO: 339132 - DNA, 201 bp, Homo sapiens
tgaaaaaatgtatccatgttttaatacaggtatagttcctcttcactgctgtgtattgttacatcatagcatcatgttttcatcctttcttctgttgatgracatttgggttgcttgcagttttttgttgttatgacagtgtctttgtgaacattcttgtatataacccctgctgtgtgaagctttttctaccatttatat

SEQ ID NO: 339133 - DNA, 201 bp, Homo sapiens
tgaaacgatcccatggctttctgttgtgtcctgaaggaaatctgagctcctcagttcagcagccctctttcctcacaggcttccctcccctccatgcatgscctaaacccaagcacactgttctcctgcaggaagcacctctgtaggaggcagcgtgtctggccgtcttctggctgcaatgctcttcttacctgcgctgaa

SEQ ID NO: 339134 - DNA, 201 bp, Homo sapiens
tctgtttatgcttgggagacaattgctttgagattttaatactttgcacctcggttaagagcctatttttcttcctttagatgggacaggaacaaacattyggaatccttaatgtcctggaattttctaggtatgtttctctttcatacgtttgaaataaaataattatatttatttaccagcttcatcagagtgtttaca

SEQ ID NO: 339135 - DNA, 201 bp, Homo sapiens
aatttgtaaaatcctgaattcagaagcataactgggccaaaggtttctgacggacctgtgcagctggtgtcctctatctccatctcttggaagtgcctgcrctccccaactgttagcactgaagaaacgtgagaagcttccaccagaagagggagctctgaccccaccagacttgtgagaaaacagtacatgttgcaaagg

SEQ ID NO: 339136 - DNA, 201 bp, Homo sapiens
gggtcacaaaagactgcctgattagttaggactcgtagataacagtaataaaaagaatcctactcaaccattcatcaaaccaccaattctcaaattatagkttttgcatataagtaaaagaaaaaacttactgcagtactaccaagtcaggaacaaattctcaaattcctacatatttacatgaaatgtcctcgccaatag

SEQ ID NO: 339137 - DNA, 201 bp, Homo sapiens
ctcagacaacttggtgagccaatggaagccaatcatttaaacaggcgtctttagataagactctgcttattcaactttcttaaatatggctacggtattayagataaagctatgtgagtaaccagacatttaaaaacacatattgtttttaagaactatataagaaaataagtatttttcagaaagtgtatgagttctcaa

SEQ ID NO: 339138 - DNA, 201 bp, Homo sapiens
aactgtatgcagcatatcttttcttctttggcggctgcttcactgctgttgaaatcagctctcatgcctgcacatggcatctggctcactcaccacccccycgtgtgtatgtgcgcccttctctgtgagccggtggctcagctgcccacaaatgcaagtctgtgggtcagagatggtactgagaagtggaaaactgtgcgt

SEQ ID NO: 339139 - DNA, 201 bp, Homo sapiens
ttttgtctgacacaatttaaaaaaatattgcaaggtaaaatatttaacagaatgattgtactgggttggtagtgtgtgcgtgtgtgtggtttgcttgattytgaggcttcataatcttttaaaaagatggagatgtatgaccttcaaagcctttttctttttttttttttggagatggagtctggctctgttgcccaggct

SEQ ID NO: 339140 - DNA, 201 bp, Homo sapiens
ttttcttctttggcggctgcttcactgctgttgaaatcagctctcatgcctgcacatggcatctggctcactcaccacccccccgtgtgtatgtgcgcccytctctgtgagccggtggctcagctgcccacaaatgcaagtctgtgggtcagagatggtactgagaagtggaaaactgtgcgtgtgtttgcacatttcatt

SEQ ID NO: 339141 - DNA, 201 bp, Homo sapiens
gtgaggtgggttctgactgatgttggaggggatgcgctataattcctgcctctgcatttaagtgtatgagtgtttcaccagggatgtccaaactgtcccaytttgggtaaaggacaaaaagcaggccaaacaagattttcttttgtctgacacaatttaaaaaaatattgcaaggtaaaatatttaacagaatgattgtac

SEQ ID NO: 339142 - DNA, 201 bp, Homo sapiens
gtcaatgggaagtggcgtgctcagtgacaggagccagcctagactgtaaagtcaacttacaatgaacttatctttatttatgtcctgttttggttccaacractggacatggacatttgatttggcatcattttcagtattatctcatgaggactcttggaatatttcatttgcttggtctacatctatctaggctctgga

SEQ ID NO: 339143 - DNA, 201 bp, Homo sapiens
agaaattgcagtgtcctgctgtttttcattatgctattttcttcctatttattctatggtcttgtttctcttagaattaaacaatcagaaactgatatgargggaattcaatcagagcagggtatttgtggagccagggcatttctcctctttgacacagccacatggcttgttttcatgcattactccttaataatgtgt

SEQ ID NO: 339144 - DNA, 201 bp, Homo sapiens
gaaaaacgcgtcagatagaaacaaaattactgtgtatccatttctgtgcataactatagtggaagaaaagcaaaatttaaaaaaaacacaccaaaaacccygcgatcaccattctctgtaattcagactcttttttgtagtaagaagtgccatgcagctttcatgaagttgctggtatctgttagccgcactccattgcca

SEQ ID NO: 339145 - DNA, 201 bp, Homo sapiens
ttgatttggcatcattttcagtattatctcatgaggactcttggaatatttcatttgcttggtctacatctatctaggctctggactatgtatccactctrtgatcaaacttggaattttcctgatgcctggggatgggctggagtgtttacaagtggagtaaatatgaattcagccaagatataattgatacaaagagag

SEQ ID NO: 339146 - DNA, 201 bp, Homo sapiens
cattccctgccactcaccacccacacgccccactcccaagtattcaagggccaatttgtttgtggataaagcagatcccccgcttctgctcccacttctcrcgggtgccttctagcttcctttgctcattagcaggctcttagaaggcaggctgcagaaggaggcaagagatcactccaaaatcagaagtgctttggctgg

SEQ ID NO: 339147 - DNA, 201 bp, Homo sapiens
gtgtggtggtgcacacctgtaatcccagctacttgggaggctaaggcacgagaatcgcttgatcccgggaggtagaggttgcagtaaaccaagattgtgtmctctagccttgccgacagagtgagactttgtctcaaaaaaaaaaaacaaacaaaaacaacaaacaaaaacgaaacaaaacaaaaaaacaaagaggttagg

SEQ ID NO: 339148 - DNA, 201 bp, Homo sapiens
gtggactgcagttggtcctcttgcttgttagtgttctagacacataagtttcttaaaatgcgtgatttcgtagtagagtcttataattctactagattttrtgtgtagttttatgtgtgtggactaatacttctgtgggtttcagtctacacatttgtattttattcttgtcattagagttctgaaatgatggttggcacg

SEQ ID NO: 339149 - DNA, 201 bp, Homo sapiens
tatgaattcagccaagatataattgatacaaagagagggtagtatttaaggattgagatgacacttgtatgaatgaaataaaggccaggattggtttctartgccaatagaactttgattgcttattctttaagtaagattacttttaagcaagcaaacaaaaaccacctgagttttttgaatcatcctctagttcagttt

SEQ ID NO: 339150 - DNA, 201 bp, Homo sapiens
acagttcctgccttcccatcgccccagcaccttccactcactctgtctccactcacgtccatcaccacttccccaggcacaggagcttaaaaccatcagcygccttcccactctctctccctcatccctcacatccagagcagggtcatgagtgttcactcctgcagctgtgtcgtttgtgtgtcccagcatttatagcat

SEQ ID NO: 339151 - DNA, 201 bp, Homo sapiens
tatgtcattcttccattcggtaaagatttgaatatactttgcaagccaggctgtgccctcggccctgaatatacaattgtgaaagagtcagccaggaaatmctggcccctgcagctgattctctagtggggagggtggacagtgagcaaaatgtgtcagtaaaagatgtagaagacggacatggtacatgccccaagggaa

SEQ ID NO: 339152 - DNA, 201 bp, Homo sapiens
caagcaaacaaaaaccacctgagttttttgaatcatcctctagttcagtttcttaggaatgcagtgccaaaaatggtattttagtaaaagagaaactgtgycaggatacatcactctgaatgtgacagcatgctaggcaggaggctgactacatcctatcatgttgatggtttatattgttttcaccacactccagatgcc

SEQ ID NO: 339153 - DNA, 201 bp, Homo sapiens
tgaggcaggtgaatggcatgaacccaggaggcggagcttgcagtgagccgagatcgcgccactgcactccagcctgggcgacacagcgagactccgtctcaaaaaaaaaaaaaaaaaaaaaaaccttttaattggtaataaagaaaaatcagaaacattcagttgagcagtgctagctaagtgagttctcacagcctgtaa

SEQ ID NO: 339154 - DNA, 201 bp, Homo sapiens
agttgtttatattcattcgtgttgtatgtctcttgccttctttaagttagttcttagttgtctttccttttgatgtccttggcaccgacctggtcctcccsccgaccccacaattctgtttccagttcagtagtagttacttaagggtgtctcctcccatgttccttagagcaagtgcctttctaaactttcatactagcc

SEQ ID NO: 339155 - DNA, 201 bp, Homo sapiens
ataattgatctcttgttatgtgactgacataatataacagtcacatgttccacacagacaggaacatggatcaggtaatgcactttgtgagaataggctarttgccagtattattttatgtgaatggacacgtaagaatgcttgtttgaaaaatagcaatatgtaattacaattactaattactaatcagtgacctatttg

SEQ ID NO: 339156 - DNA, 201 bp, Homo sapiens
ggggtgagctgcatggaaatctgggagaatggatgcaagggagcagcaggtcagcctattagaagaaaagcagaaagctagttggggctctggcaccagasgaggtcagaggggtgctgggcctcgctggccatcagaaggcacttggttcttattcagatggagaccagaagctttggaggactttgaatgtagtgacag

SEQ ID NO: 339157 - DNA, 201 bp, Homo sapiens
ttatattgttttcaccacactccagatgcctggagctgtgggctgacttctcgttgatctgcagtgagcctctgtaaaaatgttctttaatacccaagagrtaccctgttgcaaataatacttttcagaaaagtctttaaaattcaggtaaaggcaattcattcatatgagttgtttctccagctgaaattggcattctca

SEQ ID NO: 339158 - DNA, 201 bp, Homo sapiens
gaggcaggtgaatggcatgaacccaggaggcggagcttgcagtgagccgagatcgcgccactgcactccagcctgggcgacacagcgagactccgtctcaaaaaaaaaaaaaaaaaaaaaaaccttttaattggtaataaagaaaaatcagaaacattcagttgagcagtgctagctaagtgagttctcacagcctgtaaa

SEQ ID NO: 339159 - DNA, 201 bp, Homo sapiens
gttcaaattaagacatttattgttctaaagtcaattggcgttagcaatgagttgatttttcaaaacgacaaaaattagaagtgagtgttatggaagacagwttgctttatatcatctctatatctagtttacttttgttttgttttgggttgtgttgagaaaagccttgagggataaagattagttgccaagtttgtgttt

SEQ ID NO: 339160 - DNA, 201 bp, Homo sapiens
gtgctgggcctcgctggccatcagaaggcacttggttcttattcagatggagaccagaagctttggaggactttgaatgtagtgacaggacctgccttccwtggtaacagggtttctctgctgggtggaggcccagggacagttcaggaggctgctctgatggtccaggtgagggagggtgaccctagcagtggccaggtg

SEQ ID NO: 339161 - DNA, 201 bp, Homo sapiens
caattcattcatatgagttgtttctccagctgaaattggcattctcaatgatgttctcaatgaactgatgataaagccaactcaagacctcccacccccaraaaactcccaaacgcccaaaactgtcgtgaaaagaaggaagtcttgttcatggctctcaggatgtctgtaggaatttgcacactgacatgaacttaaagc

SEQ ID NO: 339162 - DNA, 201 bp, Homo sapiens
aggcaggtgaatggcatgaacccaggaggcggagcttgcagtgagccgagatcgcgccactgcactccagcctgggcgacacagcgagactccgtctcaaaaaaaaaaaaaaaaaaaaaaaccttttaattggtaataaagaaaaatcagaaacattcagttgagcagtgctagctaagtgagttctcacagcctgtaaat

SEQ ID NO: 339163 - DNA, 201 bp, Homo sapiens
actggtctccgcctcctaccaagttaatgcttacacgatgtttagatctcagatgcttgatcacttcccaagggaagcctttcctcacatcctggacctaygtgctcctattgtatgttctcttaacacagtttacctttcgcttgttgtataatactcaccacaactaaaactctacatactaatgtatgaggtgtcatc

SEQ ID NO: 339164 - DNA, 201 bp, Homo sapiens
ggcggagcttggagtgagccgagatcgcgccactgcactccagcctgggcgacagagcgagactacggctcaaaaaaaaaagcctcaggagaaatgctggwtgttttttattcatatttgatggctgcttttgcacactacagcacagagcatgtcctcccaggcccctgacgtggtctctgtcactagactagtgactag

SEQ ID NO: 339165 - DNA, 201 bp, Homo sapiens
tagcacgtaggcaaataaagttctgcagaatgaagctgattaaagaatttgaatttgaacctggaaggacttctatggtcctttctatgtatgtaatggtrtttttgtaggtaaatatttgaggttactctgtatagtaggttcaaatgtttgtgaaattgccttagagttagaaaacaattaacccaggttgagtctatt

SEQ ID NO: 339166 - DNA, 201 bp, Homo sapiens
accccctaagtatctcttttttttttttttttgagatggagtctcgctctgtcacccaggctggagtgcagtggcgcaatctcagctcactgcaagctccrcctcccaggttcacaccattctcctgcctcagcctcccgagtagctgggactacaggcgcccaccaccacacctggctaattttttgtatatttagtttc

SEQ ID NO: 339167 - DNA, 201 bp, Homo sapiens
tcttgccaaatgtaagtctgatgtcattgttccctggcttcctgttgccctcaggataaagcctggggacatttacctggcccctgaggccctgcgaggcytaccactgctccctttatgctctccctcacctcatccacactggtggcttcccacttcctggtgtgaggagcgagctcctacagggcgtttgtgcctgct

SEQ ID NO: 339168 - DNA, 201 bp, Homo sapiens
agcttagctacttgcccagtgctgcgatgaagaagtgcagcatctttagaaaatgcctggagagaaaatgggaagaagtgtcctcttgatggagggaggtragtgtggagagaccatcagtgttagcggtttgctagtaacacggcctcaggctgtatttccaggatgacttgagtacatttccttttttgaattatgact

SEQ ID NO: 339169 - DNA, 201 bp, Homo sapiens
ctgggattacaggcgtgagccaccgcacccagcctttaccccataagtatctcttaaatatatctgtttccacccagtttcatcccatccagttagtttgygcagcatcatttcttgcgtggacaattgcagtagtctcatgactagttcttagcatctgatctgcctggacccattcctctaccggagccagagtgatct

SEQ ID NO: 339170 - DNA, 201 bp, Homo sapiens
tcaccaaggcgttcttgtctgtggatagttgctagttgaactttttgtggggtaggggggtagtgaaacctgtgacctcctatcccaccatcttgctgatktcgtctgaattctctttgtacattagttttgtgatctaggaactctgaactctcttattaattctaatatgtagattattctggatttttaaatgtaaac

SEQ ID NO: 339171 - DNA, 201 bp, Homo sapiens
cctacatgtaggaagaacttggaccaagcagagaaatcataccctccccccaagaaatgctgaagccaaaccagcggacaaattcagagcaaataaagggwaaagagtgtgtgaaagcggctcattttgtttgtttgtttgtttgttttttgagacagaatcttgctctatcgcccaggctggagtgcagtggtgcgacct

SEQ ID NO: 339172 - DNA, 201 bp, Homo sapiens
agagttgtgttcttcttaaactgggcatgttgtccttaaagcccctgtgcctgagatgatgatgatgatgatgatgatgatgatgatgatgatgatgatgrtgatggtgatggtgatgatggtgatggtgatgatgatggcagcagctacccacaagctgggcactttattcaagctatatatatttaattcacactgtac

SEQ ID NO: 339173 - DNA, 201 bp, Homo sapiens
aaatccaaggaagctagagaattgtagttgcatgttgttgtcttttagatccctacatgtaggaagaacttggaccaagcagagaaatcataccctccccscaagaaatgctgaagccaaaccagcggacaaattcagagcaaataaagggaaaagagtgtgtgaaagcggctcattttgtttgtttgtttgtttgttttt

SEQ ID NO: 339174 - DNA, 201 bp, Homo sapiens
agcctcccaagtagctgggattacagggatgtgccgccatgctgagacctgtcttcctggtttttaatgccatggacttattcattatgctccactttatwtttttatcataacactgatccccacatgcagcaaatgaaagtttcctcatgtgcagaaaaggcgatgaggcctcagagagatggagtcacgtctgctcag

SEQ ID NO: 339175 - DNA, 201 bp, Homo sapiens
ataaatttaaaagattcagagacaagcattaaatgctaaatgggagaggaaaagagggtagtaactccatgtggcctctgccatctgggaagacctgcagrgaggacagagtgtggtggaagttcataaaatcctgaagttagtggaacttgctccctaagacctagaaacacagaacattctgggagtctttcagatttg

SEQ ID NO: 339176 - DNA, 201 bp, Homo sapiens
ttggtcaataacagaacatatcaaccatggtggtcccatacgattataatggagctagaaaattcctttcacttggtgacgtcgtagctgttgtaatgtcrtagtgcaaatactttatttttcataaatttagggtagcctaagtgtatagtatttataaagtctacagtaggtacagtaatatcctaggtcttcagattc

SEQ ID NO: 339177 - DNA, 201 bp, Homo sapiens
cccaccagcatgcctggctaatttttgtatcattagtagagatggcgtttcaccatgttggccaggctggtctcgaactcctgacctcaggtgatccatcygcctcggcctcccaaagtgctgggattacaggcatgagccaccgcaccaagcccgcttgcttcttttctctaatgtctcttttcctgaccctggccctct

SEQ ID NO: 339178 - DNA, 201 bp, Homo sapiens
gcaggtcacgaggtcaggagatggagaccatccatcctggctaacacagtgaaatcccgtctctactaaaaatacaaaaaaaaaaattagccgggtgtggkggcgggcacctgtagtcccagctactcaggaggctgaggcaggagaatggcgtgaacccgagaggcggagcttgcggtgagccgagatcgcgccactgca

SEQ ID NO: 339179 - DNA, 201 bp, Homo sapiens
gcctcctgccaccatccccactgaaactgctctgaactttcactgccattgccaacctctctgccttgcagttgacgtccactcctaccagttctcccagscttcgcctttcttcttccagtggggctccaaaaccacttgtgtaggtgggacatttcttcttgtccttaactcccctgcccttcttggttctgggtttct

SEQ ID NO: 339180 - DNA, 201 bp, Homo sapiens
ggagaagacagagggaggacagaggctctcaaggagtttgtgagtttagagctggcctgatggccatgagcagcatgttttccatcttgaagaaagaagargtgggaattcagaatggtgcagctgccttggtaaaaccttacggtggctttatttctacttaccaaatactagaaacaacctatatgtcccttgactgag

SEQ ID NO: 339181 - DNA, 201 bp, Homo sapiens
tcaagatgcctgccatcactatataattcattgttttcatgttttcggcaactgcaaagaagattacaaatattgggaaaacagtgaacaatttctgtacktatacacatatgctcacagaaatatggtaatgtaaatatgttcatatatgattgtgtatctagaaaacaaaagaaaaaacagtagataaatactcgaatt

SEQ ID NO: 339182 - DNA, 201 bp, Homo sapiens
aggcacattgacaacagctggtctgctagctgacccagaacacttttccatataccagccaacaatgcataatgtctaagtaggctctataaacatccatkctgtgtgactcatttgtgtaaagttccagagcttgcaaaactaatttatggtgttggaggtcaggagcgtgggtatgcctgggtggaacagaggatgagt

SEQ ID NO: 339183 - DNA, 201 bp, Homo sapiens
gatcccaactttaatgggacttgtactactaaggaatagtgaggaaccgtgaaatccaatcaaacctggctgcctgtgtagactcccagccttctattcayggataagctgcatgttgcttattaactgagcaccaagatgtagcagctttgctttattgcgtaatgatgcatgactgcttgctcagttagcacaactgct

SEQ ID NO: 339184 - DNA, 201 bp, Homo sapiens
aagtacatcaagacccagggagcttaaagagcccaaagtcacatggacaagtagcagcaagcaaggactagaaccaccctttgtttcctggccaccacccygaccccatgctgcagccacttggggccaccagaatctaagatgaaaacaagcgagtggagaaagacatcttcagggtggagagctcagtagtcctcagct

SEQ ID NO: 339185 - DNA, 201 bp, Homo sapiens
ctccacctcccattctcctgcctcagcctcccgagtaactgggactacaggcgcccgccaccacacctggctaatcttttgtacttttttagtagaggtgrggtttcactgtgttagccaggatggtcttgatctcctgacctcatgatccacccgcctcagcctccaaagtgctgggattacaggcgtgagccactgcgc

SEQ ID NO: 339186 - DNA, 201 bp, Homo sapiens
ttttagtagaggtgaggtttcactgtgttagccaggatggtcttgatctcctgacctcatgatccacccgcctcagcctccaaagtgctgggattacaggygtgagccactgcgcctggcacctttttctcatttttattagtaggtagtgtcagcttgggttcttactgtgcacagcctatcttggcacagggtggcatc

SEQ ID NO: 339187 - DNA, 201 bp, Homo sapiens
attcttggcaccagtgttgaaatcaattgaccgtatatgtgagttcatttttgggccttctattggtgagtctttttttgtgtgagtatcatgttgttttmattactatcactttatagtatcgtttgaagttaggtagtgtgatacctcccactgtgttctttttcttcgtgattgctttggttttgttttgtttttttt

SEQ ID NO: 339188 - DNA, 201 bp, Homo sapiens
tttatagttttcagtgtacatgtctttcacctccttagttcaatttattcctattttattttatttgtagctattgtaaatgggatttttctcttgatttstttttcagaatgttcattgttagtgtatagaaatgttcctgatttttgttagttgactttagattttgcaactttattgtatttattagttctgagtttt

SEQ ID NO: 339189 - DNA, 201 bp, Homo sapiens
attttattttatttgtagctattgtaaatgggatttttctcttgatttctttttcagaatgttcattgttagtgtatagaaatgttcctgatttttgttarttgactttagattttgcaactttattgtatttattagttctgagttttttggtggaatatttagggttttctctatataagatcatgttgtcagcagtga

SEQ ID NO: 339190 - DNA, 201 bp, Homo sapiens
tttctttttcagaatgttcattgttagtgtatagaaatgttcctgatttttgttagttgactttagattttgcaactttattgtatttattagttctgagttttttggtggaatatttagggttttctctatataagatcatgttgtcagcagtgattgtttcattttgtactttccaatttggatgccttttatttcttt

SEQ ID NO: 339191 - DNA, 201 bp, Homo sapiens
tgttcattgttagtgtatagaaatgttcctgatttttgttagttgactttagattttgcaactttattgtatttattagttctgagttttttggtggaatmtttagggttttctctatataagatcatgttgtcagcagtgattgtttcattttgtactttccaatttggatgccttttatttctttctcttgcagaattg

SEQ ID NO: 339192 - DNA, 201 bp, Homo sapiens
tccaatttggatgccttttatttctttctcttgcagaattgctctggcaaggaatccaacattcaatagacatgttggatttttgtcagatgcttttcctrcgtctaatgagatcatatagtttttgtctttcattctgttaatatagtgtatcacatttattgatttccatatgttgaactatccttgcatcccagggat

SEQ ID NO: 339193 - DNA, 201 bp, Homo sapiens
tattgatttccatatgttgaactatccttgcatcccagggataaatgccacttcatcttggtgaatgattcttttgatgtggtggcaaattcaatttgctrtattattgaggatttttgcatctgtgttcatcaaggatattggcttgcagtattttttttttttgtgatgtccatgtttggtttttgcatcagagtaata

SEQ ID NO: 339194 - DNA, 201 bp, Homo sapiens
catcttggtgaatgattcttttgatgtggtggcaaattcaatttgctgtattattgaggatttttgcatctgtgttcatcaaggatattggcttgcagtattttttttttttgtgatgtccatgtttggtttttgcatcagagtaatactggcttcataaaaggatcccttcctcttttattttttttgaaggcgtgtcta

SEQ ID NO: 339195 - DNA, 201 bp, Homo sapiens
cataaaaggatcccttcctcttttattttttttgaaggcgtgtctaaaaaattcatgtcagttcttcattacagcatttggtacaattaaacagtggagcyatctagccttgggattttctttaatagaagacttcttattactgattcaatctcctcacttgttagtggtctatttagattttctatttttcgtgattca

SEQ ID NO: 339196 - DNA, 201 bp, Homo sapiens
caatgctcttcttacctgcgctgaaatggatcctcaatgaaccccacacaggcgtctcttccagaacccgtgtgactctgctctgccctagaagtatctcstcacccgtcccatcctgaccaattgctgcttgaggacaaccactgtccctcttgttccccatatagtcctggcagcagcacacactgaatccaactgtgg

SEQ ID NO: 339197 - DNA, 201 bp, Homo sapiens
ggaagatatatgtttagctttataagaaattgccaaacaatttccattttacactcctgctagtattacctgcgagttttcatttttgcgtatcttcaccrgtgtttggtactgtcagtcgttttaattttagccattctagtgggtgtgtattattgataatatctcattgtgactttaagttatatttccctgatgact

SEQ ID NO: 339198 - DNA, 201 bp, Homo sapiens
aacacagagcctatggtcgttctgtcctgcgagcctctgcttcctctgcaaagtgagagctccttttccttgtgtttcctgacctcatccaagggtttttwaattattttctaagggagggtgtcactgtctttggaaagatctaaaatagcaaatttttgttttcctgtatacatataagaaaactggaaggagggatca

SEQ ID NO: 339199 - DNA, 201 bp, Homo sapiens
tcagcggtgcctccaccaggctcctgacttcatccccctctgtgggaggaggggtgagcaaagtaccttctccctctgctgtgggaagcatgagtaactcrcagatggtgtcagagggcgtgtgttcaggtagtgcagccagcagtgagtgaatgaaatgaaatggtgtctgtctgttccaaggctgggctctgcaggggc

SEQ ID NO: 339200 - DNA, 201 bp, Homo sapiens
tacctcagctacaattcatttatttattcagtagcaataatagaggattcgtgcctgttagagccatagcgcttgagcaggcaaacaggcctcatctgccrtgctccttgggctctcatcttcataaggaggacagtattgtgggaaggttagtagagaagtcagttttcagtgtcgcatttccaaatttgtgtggtcttt

SEQ ID NO: 339201 - DNA, 201 bp, Homo sapiens
aatcttttttaaagtaaagcaggtttcaaacaacaggatttattttttacgttcattatagaaagccctcatttttttagtccttgtcctcccttcccccrtatacaatttcctccattttggcagtttattttctttttggcctctcatttcaaggatgctgtgtgttaattagaggccccgcggctttgattgagtggt

SEQ ID NO: 339202 - DNA, 201 bp, Homo sapiens
gagccatagcgcttgagcaggcaaacaggcctcatctgccgtgctccttgggctctcatcttcataaggaggacagtattgtgggaaggttagtagagaaktcagttttcagtgtcgcatttccaaatttgtgtggtctttccacataagagtttgaaaatataaagggcttcaattcgaactgtttggcagatgtagcaa

SEQ ID NO: 339203 - DNA, 201 bp, Homo sapiens
agaagtaacacactgtgtttctggatgacattctcatctgaatgcaaagcacaatgagcgaagttaagacagtaccgacttcctggcttctgctgcacctrtgactgttgtcgcctgcaccccagggtcccccatccgtgtgcatttccttcctagaaggctcccaacaccagtccctttctgaggcaatccctagaacca

SEQ ID NO: 339204 - DNA, 201 bp, Homo sapiens
ttgtatttacactgcttttaataacttatttgctttttctttacaaaagtaatctatgttaataatataagcagaaataataaaatgaaggaataatacasccaaatcagagataaccactttctaaatcattttctcctgaagttttatcactgcatgtatatgtatgtatacatctagtatgtgtctaaaattggatgc

SEQ ID NO: 339205 - DNA, 201 bp, Homo sapiens
ttggaataacatcgtgacatctttttgtacagttttcttgagtattgaaattggcccaattattcattgaagtccaattcacattctggcttttcaactcrtacattttgtggaatagtgagactcatttgcaagaagtaacacactgtgtttctggatgacattctcatctgaatgcaaagcacaatgagcgaagttaag

SEQ ID NO: 339206 - DNA, 201 bp, Homo sapiens
aatctgaatacaaattttacatgtgcataacttctgaataggcagcttggctatttatcctaagaaatttatcctaagaggccaggcgcagtggctcacgyctgtaatcccaacactttgggaggctgaggcaggtggatcacttggggtcaggagttcaagaccagcctggccaatgtggtgaaaccccatctctactac

SEQ ID NO: 339207 - DNA, 201 bp, Homo sapiens
gcaaaatgagcattttccaacaaagatattttgtgtttaaataaatcagttctattttaaagcaatgtgattgatccccacaaaaagcaaaccaagaaaaktatccactacaagacaacgatccattggtaaggcattggtgcttagaatatctgctttgtgttctcttccttctggttcaggatggatctgctgtgatga

SEQ ID NO: 339208 - DNA, 201 bp, Homo sapiens
tggagtgagggaagggacttgtctgcagcatggaaggagggaactttggggatgatgaaagtgttctgtatcttgattgtggccggggttacctgactctrtacctttggcaaaacttgctgctgaatcctacgcttaaaatgggtcagctttattgtatgtcagttaataaagctgattaacaaaagagtatttctgtag

SEQ ID NO: 339209 - DNA, 201 bp, Homo sapiens
acagcaatgcatagctgcaaatttgagaatctcattctagtgcggtaggtcagtccacaaatactctctgagtgccagctccatgccagctattgagatgracaccaccaggactatgctgggaaaacagcaaacatggtgctggtattgcagggagatcacagagggaaaattatcctcaacctggagggatggcttctt

SEQ ID NO: 339210 - DNA, 201 bp, Homo sapiens
ggcctgttcatggcacacctggctgctatctctgctttacttactctgtagaaatgagcaaaacctcctgggtctatccaagtctggaccatgtctagcarctgtttctcgtgagatagcccagggtagcattacttgccatttcacctggtagctctgtcagctaatagcccaggtcgtctgagacctccactgagtgtg

SEQ ID NO: 339211 - DNA, 201 bp, Homo sapiens
cgcctgtaatcccagcactttgggaggccaaggcgggcaggtcacgaggtcaggagatggagaccatccatcctggctaacacagtgaaatcccgtctctwctaaaaatacaaaaaaaaaaattagccgggtgtggtggcgggcacctgtagtcccagctactcaggaggctgaggcaggagaatggcgtgaacccgagag

SEQ ID NO: 339212 - DNA, 201 bp, Homo sapiens
ccttcaattggctcgcttgagaactgcacagaagggacctatgttccaccacatgtgtgtggtgaacccagctcgtctgggtttgatcaaagattattgcygagtgggcatggaaagtgcaggaattaaactcaaagtagaggctggagacacgtcaagggtggcgttagaaggatggacctggagggctcttagtggtag

SEQ ID NO: 339213 - DNA, 201 bp, Homo sapiens
ttgtttaatatatttttctttgttctgctaatgacctgagcttcattacatgctgataaagaatcctaaaatgtacatagaaaactgacgaagaacgaactggccctggccctgaacagaacaggcatgccactatgccggctgcccagactcagcatttgtcgttacaggaaggaatggctttctgtttgcattttagga

SEQ ID NO: 339214 - DNA, 201 bp, Homo sapiens
tttctttaattttgattttagtcaattttttgtttataattttgtttattacttttgtacttagaatcatcctttatttagaaatgaaagattaaaaaaawttttttaacattagttttatttgtatctctaactgtaatcaaactatgtctctgatctggaattttattccgacctatgatgttaagacttcaaatctat

SEQ ID NO: 339215 - DNA, 201 bp, Homo sapiens
gaggtttaaataaataatgcagattaaatctatagcctatgtagatgttcaggaagcgtcccctaactgaaaagctgcataacaagtacatttcactggcygtgtttaccatctaacatgtaagcctggggaagatgtgaatgcagcaggctctccgagttgcatcgtcggggtgtgccccctagtctgaggtaaaaggga

SEQ ID NO: 339216 - DNA, 201 bp, Homo sapiens
ccatattggtgtgctgcacccattaactcgtcatttagcattaggtatatctcctaatgctatccctcccccctccccccaccccacaacagtccccggartgtgatgttccccttcctgtgtccatgtgttctcattgttcaattcccacctatgagtgagaacatgcggtgtttggttttttgtccttgtggtagtttg

SEQ ID NO: 339217 - DNA, 201 bp, Homo sapiens
tgcaccggactccaacaatgactgcgtcacttcaggaaatcggttttttcacagtactggccgttggcagtgcacatgtggtgcatctcccttttgctttygtcccacctctcccacactttcctcctaaaatacctattattggctttttttccagccaaaaggataggaaattagggcatcctttcagcaaacctctcc

SEQ ID NO: 339218 - DNA, 201 bp, Homo sapiens
gtttacacggtactgtactctattaagtgtgcaacagcatcacatctttaaaaaacccaatgtgtgtgccttaatttaaaaatactttttactaaaatacrctaacaatcgcctaagccttcagcaagtcataatctttttgttggtggagggtcttgccatgacattcatggctgctggctgatcaaggtggtggttgct

SEQ ID NO: 339219 - DNA, 201 bp, Homo sapiens
gaaaactgtgaattggaggattaggtaactgttggattcttttttttttttttttttgagacagggtcttgctctttcgtccaggctggagtgaagtggtrtggttgtggctcctctgctggattcttacagtgttgggagcggaagctgtggtacctgtgttctgtctcccacccacggcccagttgctcagcagaatta

SEQ ID NO: 339220 - DNA, 201 bp, Homo sapiens
tctttgctattgtgaatagtgccacaataaacatacgtgtgcatgtgtctttatagcagcatgatttataatcctttgggtatatacccagtaatgggatkgctgggtcaaatggtatttctagttctagatccctgaggaatcgccacaccaacttccacaatggttgaactagtttacagtcccgccaacagtgtaaaa

SEQ ID NO: 339221 - DNA, 201 bp, Homo sapiens
accagtcgtattaaaaaaatgaaacaacacaaactcccgaatgcattctgagtgagtactcaactcaaaaatacctgtcatgctttgatctttaacggaartcctttgatctttaaaacagtgttgaaaaaactgtttagtatcatcacacctctaagtcaaaatcagtcccactgccaggctgagcatgtcgctgagcca

SEQ ID NO: 339222 - DNA, 201 bp, Homo sapiens
tggggtggttttggcaatttctcaaaataagacaacaataaagtttgctgcatctgttgactctacttttcacaaaagatttatccatggcatgtgatgcygtttgatagcatttacccacagtagaacttccttcaaaattggaatcaattatcccaaacactgctgctgctttatcaactaagtttatgtcatgttcta

SEQ ID NO: 339223 - DNA, 201 bp, Homo sapiens
ggtgagagagacagaagagaacaggcgcttccacttcactcacaatgccaaataaatgtggaacctagagagcctattggtgttgtcctcctggtgttatatgctgcattgacacctctttgttacctcattaaagttttaaggtcatatttctgggggtcacaaaagactgcctgattagttaggactcgtagataacag

SEQ ID NO: 339224 - DNA, 201 bp, Homo sapiens
tctcattgtggttttgatttgcatttctctgatggccagtgatgatgagcattttttcatgtgttttttggctgcataaatgtcttcttttgagaagtgtstgttcatatcctttgcccactttttgatggggttgtttgttcttttcttgtaaatttgtttgagttcattgtagattctggatgagtatgttgcaaaaag

SEQ ID NO: 339225 - DNA, 201 bp, Homo sapiens
tgaataaacaaggagagcttgttctatttctagatcacctttcactctgttcatcccagttggtgggagtggggtggggtggggtgagcccagggctgatwttctccattgtcaagggtaaacagacccggttgctgcccctgcctttgccaggaaggcagtggattatcttccccttaagtgctttccctgggtgtagct

SEQ ID NO: 339226 - DNA, 201 bp, Homo sapiens
tgctgtttgatagcatttacccacagtagaacttccttcaaaattggaatcaattatcccaaacactgctgctgctttatcaactaagtttatgtcatgtkctaaatcctttgttgtcatttcaagaatgttcacggcgtgttcaccaggtgtagattccacctcaagaaaccactttctttgcccatccataagaagcaa

SEQ ID NO: 339227 - DNA, 201 bp, Homo sapiens
attagatcccatttgtcaactttggcttttgttaccattgcttttggtgttttagacatgaagtccttgcccatgcctatgtcccgaatggtattgcctargttttcttctagggtttttatggttttaggtctaacatgtaagtctttaatccatcttgaattaatttttgtataaggtgtaaggaagggatccagtttc

SEQ ID NO: 339228 - DNA, 201 bp, Homo sapiens
atcttcaggcttcacttctaattctagttctcccgttgcttctaccacatcttcagttacttcctccactgaagtctcaaacttttcaaagttatgcatgagggttgaaatcaacttcttccaaactcctcttcatgttgatcttttgacctcctcccatgaatcataggtgttcttagtgacatctaaaatggtgaatcc

SEQ ID NO: 339229 - DNA, 201 bp, Homo sapiens
cattctgtctttgggtcctggtacatagcaggatcctcacatgtatttatatttaaattaaaccgatgcaaagcttttcagtctggtgtgttactaatttwtgagccttttccctttgcagtttttttctcttatataacctatatctggttaaatgtcttttcacctagactgtttccaactagtagctagattgtttcc

SEQ ID NO: 339230 - DNA, 201 bp, Homo sapiens
acccagtagtcattcaggagcaggttgttcagtttccatgtagttgagcggttttcagtgagtttcttaatcctgagttccagtttgattgcactgtggtstgagagacagtttgttataatttctgttcttttacatttgctgaggagtgctttacttccaactatgtggtcaattttggaataagtgtaatgtggtgct

SEQ ID NO: 339231 - DNA, 201 bp, Homo sapiens
ctacccctgtgcaggggaaaggggagagggagagagagggagggtgatggtggagagagggatcctggaagaaccagcgatgctgctcatccttcaggagyagccaggctgttctaggacccatgcaagcccatggctcagggcaggcggggcaggcactcggtggctttgttgtcagtctaaccccagaagcccaggaga

SEQ ID NO: 339232 - DNA, 201 bp, Homo sapiens
gctgagtaggtgggtacctgattttatgaatttctccacactggaggttgttactgctctacctcagagccgtgagtcatgggagtcagccacttctgccygccactgccctgttgatcaaggggtcatccccctgactcgctggtggacaaaaacaagtaacaacgtggaaaagtctggtaaactgtaacccaatgcaaa

SEQ ID NO: 339233 - DNA, 201 bp, Homo sapiens
ggtggagagttctgtagatgtctattaggtctgcttggtgcagagctgagttcaattcctggatatgcttgttaaccttctgtctcgttgatctgtctaaygttgacagtggggtgttaaagtctcccattattattgtgtgggagtctaagtctctttgtagttctctaaggacttgctttatgaatctgggtgctcctg

SEQ ID NO: 339234 - DNA, 201 bp, Homo sapiens
tttaggggagcagggaaaatagcatatattggctgtgagctggaatatttgtccgaagcacatatatgctcaatttgtaatatctatttaatatctaaacyaccctcacccctctcctcaaaaacaagacatttttcagtttattggtgcattttccctttgatcgtgaggcccatattatgtctcatattatgctccaaa

SEQ ID NO: 339235 - DNA, 201 bp, Homo sapiens
tttctgccgagacatcagctgttagtctgatgggcttccctttgtgggcaacccgacctttctctctggctgcccttaacattttttccttcatttcaacttttggtgaatgtgacaattatgtgtcttgaagttgctcttctcaaggagtatctttgtggcgttctctgtatttcctgaatttgaatgttggcctgcctt

SEQ ID NO: 339236 - DNA, 201 bp, Homo sapiens
tttcctaggcagaggaccctgaggccttccgcagtgtttgtgtccctgggtacttgagattagggagtggtgatgactcttaaggagcatgctgccttcargcatctgtttaacaaagcacatcttgcactgcccttaatccatttaaccctgagtggacacagcacatgtttcagagagcacagggttggggggtaaggt

SEQ ID NO: 339237 - DNA, 201 bp, Homo sapiens
aaacttctcttcacgcttcatttcattcatttcatcttccatcgctgataccctttcctccagttgattgcatcggttactgaggcttgtgcattcatcgygtagttcttgtgccgtggttttcagctccatcagctccttcaaggacttctctgcattgattattttagttatccattcgtctaattttttttcaaagtt

SEQ ID NO: 339238 - DNA, 201 bp, Homo sapiens
gaggccttccgcagtgtttgtgtccctgggtacttgagattagggagtggtgatgactcttaaggagcatgctgccttcaggcatctgtttaacaaagcayatcttgcactgcccttaatccatttaaccctgagtggacacagcacatgtttcagagagcacagggttggggggtaaggtcacagatcaacaggatccca

SEQ ID NO: 339239 - DNA, 201 bp, Homo sapiens
ccctccaccagcctcgctgccgccttgcagtttgatctcagactactgtactagcaatgaacgaggctccgtgggcatagaaccctccgagctaggtgccrgatataatctcctggtgtgccatttgtgaagcccgttggaaaagcgcagtattagggtgggagtgacccgattttccaggtgctgtttgtcacccctttc

SEQ ID NO: 339240 - DNA, 201 bp, Homo sapiens
tctggttctggtgcgggctctctcctggcttgcagatagctgctttcttgccatgtcctcccagaacagagagagtgagcaagagcaagagcgagagtgarggagagacagagtgagagctctctgtctctaataagggcactaatcccatcttgagggtcccaccctcatgacctcatctaatcctaattatctccaaaa

SEQ ID NO: 339241 - DNA, 201 bp, Homo sapiens
ctctgaggaacttggcactgtgcataatatggaaactgaatacttaactgtagattcaatgatataaaggaatattatttatttatttatttattttaaaytttttctttttttgagacagagtctcgctgttgcccaggctggagtgcagtggcgtgatcttggcttactgcaacatcccactcccggattcaggtgatt

SEQ ID NO: 339242 - DNA, 201 bp, Homo sapiens
cacacaataaaacccactaaaagtccatctgcttttaatcatctccgtgtaccagcagtaacattctcctccctgcaaaagccttcttttggactaaattytaaataattgccgtgactactaattagtttttttgtttttttttgtttgtttgtttgtttgttttttgttttttgttttttttggagaggaggtcttact

SEQ ID NO: 339243 - DNA, 201 bp, Homo sapiens
cgtgtaccagcagtaacattctcctccctgcaaaagccttcttttggactaaattctaaataattgccgtgactactaattagtttttttgtttttttttktttgtttgtttgtttgttttttgttttttgttttttttggagaggaggtcttactctgtgggccaggctggagtgcagtggtacagtcatacttcattac

SEQ ID NO: 339244 - DNA, 201 bp, Homo sapiens
ctgtgaaggcttaaacttatggacacttaccatagtgtttagcaattgtttagaaaccgtaagaacaattactagatcattagcaagcacttttttttggwtgggggagaagctgcaaaatatctcctgaaattgctcttagggatgttccctctaattttaaaaagtaaaggggaaaaatgaatttgcattcactggtgt

SEQ ID NO: 339245 - DNA, 201 bp, Homo sapiens
gcccccttggaagtttgaactgatgaagttttcttttaaatggatcttcaccaaagagtggaattgaaaataagtccatgtatcttagtttgtctctgccrttgtctcatgcagttgtgttttgtttattttagtttttgaaattaaaaatgactgaaagacctgtaccaagcatttctttcacttgccttctctaaatct

SEQ ID NO: 339246 - DNA, 201 bp, Homo sapiens
gagcttgttagaaatgcgcattcacaggcccagcccaggctttctgatcagaggctgtaccttgacaatccctctgggtgattccgatgctcacttaaagytggaaactcattgatctaggacagtggttttcaaacttccttttagtcataaggactgctacatgtaataaagatgttttcaaatccagatagtgaaaga

SEQ ID NO: 339247 - DNA, 201 bp, Homo sapiens
ctcttaaggcccccttggaagtttgaactgatgaagttttcttttaaatggatcttcaccaaagagtggaattgaaaataagtccatgtatcttagtttgkctctgccattgtctcatgcagttgtgttttgtttattttagtttttgaaattaaaaatgactgaaagacctgtaccaagcatttctttcacttgccttct

SEQ ID NO: 339248 - DNA, 201 bp, Homo sapiens
tacatcacaaccatcccatgaggtggctggttctcattttcctgatcccactcatgaaaagcaggggctcatggacttcctttccctgcttaaatggtcartgtgtggtgcacaggaaaatgtcatactcaggcctttaactgtggctcccaggttgttttctccaactatatttgatctgtggttctgtggagtttcaaa

SEQ ID NO: 339249 - DNA, 201 bp, Homo sapiens
taagtttaatgagtaacagtttgtcttaagccttttaaattatgacttacatgatctcttaaggcccccttggaagtttgaactgatgaagttttcttttraatggatcttcaccaaagagtggaattgaaaataagtccatgtatcttagtttgtctctgccattgtctcatgcagttgtgttttgtttattttagtttt

SEQ ID NO: 339250 - DNA, 201 bp, Homo sapiens
agagagataaagagagcaagagagtgcatgggaatacgagcgagatcacctctttgtctttttagaaatcctgtacgtgggcattaaaattaatttagagwttcttattatgtcctttcaataatagcaacaaaataattataatgacaacaatgaagtagccaccttgtgtcattttgtctttggctaagtcttgaattc

SEQ ID NO: 339251 - DNA, 201 bp, Homo sapiens
gtggtggcgtggggggggggtggtgggggggcaagtgctgtttaagtgatccaaaagcttacctgtaaatcccgcaaatcaagcatcagcttaccaattcrgaatgtagagtcactcagtcctgagatgctagtctttgcttcgtgttgctgtgttttgtggtctacactctgaataagcacttcattatcatgaataccc

SEQ ID NO: 339252 - DNA, 201 bp, Homo sapiens
actggaggttgttactgctctacctcagagccgtgagtcatgggagtcagccacttctgcctgccactgccctgttgatcaaggggtcatccccctgactygctggtggacaaaaacaagtaacaacgtggaaaagtctggtaaactgtaacccaatgcaaacaccctaaaaccttataagtttttaagagggaaatcaaa

SEQ ID NO: 339253 - DNA, 201 bp, Homo sapiens
tcacggaagcatgtttagtatctaagaatgtttgattctcaaagtattgaaaaagaagattctgctcacttgttcagcctctacttgatccctgttagcamagaaagatgcagtcagatttctcttgagcttggtgatatcctttataataacctttagagatccgttctattaatgaggcatgatattgttactccaatt

SEQ ID NO: 339254 - DNA, 201 bp, Homo sapiens
tgatagcccaaaggtgaaggaagatagccaatttcctaacccgtagggtgcatatctgagaccacctttgcaaaattatgactgagacagtggaagagatstaacttaaccgactccatcttgcttctaacctccaagctgtccttgttcatttctgggcgtaagctgaactaactttgagagaaactcagtttatacttt

SEQ ID NO: 339255 - DNA, 201 bp, Homo sapiens
gacctgctttactggaactgcataggaataggatgtgttatccagagcaattgctctcttcaaattaaaagtgtcaaagaagggtggagcagggagcgagkctttaaaacgccattgggggttttcttgcccctccagcatcatagtcacttctgccaaaggaactgatgcagcccacatgtttctgtgcaccctcatttc

SEQ ID NO: 339256 - DNA, 201 bp, Homo sapiens
tactgaaatcgtgttcatgtttccaggcacatctcatactctgtcgtctttaagaagtcttcccagaaaccccatcgtttatattcgtgatatataccatattccactgtgtaatgtagattgcaccagagagtatttaatctcctgaaggcaaggactataacctattcatcttcctttcctgggtggggagaaccacca

SEQ ID NO: 339257 - DNA, 201 bp, Homo sapiens
agaaaagccacagcttgatgaatttctttgcctctcttgaaatggtaaacatctctggttgtttatcgccttgggctttatctgttcattttaatgtggakgcattttttttattacgcttcggaggaagtaccctcagggttattatactcagaaagaaaaaaatgttagctcaaagacttaccttgggaaagttacgaa

SEQ ID NO: 339258 - DNA, 201 bp, Homo sapiens
agttcactgagcaggaaaggaatggaagattgctcaacagatctacaggaaaccattcccccgccatcacctctgcatttcaaaaagcaaatgcaattccrgtcagaagacattgtctacttcggagtgatatgcttataatctatctgtgtgtgttttttaactcttacagtgaagcttcaattatatcttcttaacccc

SEQ ID NO: 339259 - DNA, 201 bp, Homo sapiens
tttcctgaaaacaaatcactgtagtgctcaagttgaggcattcaggatgactcaagcagatgttttctgtgcccattgaagtttaacatcagggggtcccsgtcaaatacaaacttcctttttatttgtttagctagttattttatgatttcccattcccctttggaatccttaatgagcctttatggggagttttatttt

SEQ ID NO: 339260 - DNA, 201 bp, Homo sapiens
ctgcagttgatttctcagcttctaacaggaagtaaataagtagtttttaagtaaatgaatgtgaatcttctggggagcatttaaaaaaaaactgttgtacraactctgcagattgaggatcccttatccacaatacttggaatcactggtgtttcggattttgattttttcagatttttgaatatttgcattggacttacc

SEQ ID NO: 339261 - DNA, 201 bp, Homo sapiens
tctggctctcaccagcttgtgtcctaatgaatcaataattctacccacctgacgctcactttcctgtaatttactgcagtgagttcctaggcatatggcaygtaaatggtcagtagatcaccttagaaggatttcagactctgggtctcagtccatctgtgaaaattaggatggtaggaacctctctgagatacaccttta

SEQ ID NO: 339262 - DNA, 201 bp, Homo sapiens
cgccactgcactccagcttgggcaacaaagcaagactccatgtggagatcacgccagtgcactccagcctggcaggagagcgagactccatctcaaaaataaataaaaaaataaaataaaaggagctaagttaaagttgaatgctcagttggataatcgtttactaacaattgataggagcttggcctctggtgagtttct

SEQ ID NO: 339263 - DNA, 201 bp, Homo sapiens
ttattatgttaatgaaccaccactaatttttgtggtttcaaaatagcaaggttcattgataaaactcccttgtgccttggtgacaaaaaacactgatacarcccactgtcaaagtaagtgtgtttgttatttttgtttttaatgacactaaatttgtaggaatgatatttttaggtggttgctcaatctcacccgccatca

SEQ ID NO: 339264 - DNA, 201 bp, Homo sapiens
atttaatatgtggcttcaaacataaagttgaccttaattttcacttttcatcttcaaaatataatagttgtgagagttacctatttctctaataatgaaaraagtaattttttttcagaaaataactggtctatgaaatcatgaagcatgttcctatcaatattgattcagaaattggtgatgttgtatagaaataaatac

SEQ ID NO: 339265 - DNA, 201 bp, Homo sapiens
actgcactccagcttgggcaacaaagcaagactccatgtggagatcacgccagtgcactccagcctggcaggagagcgagactccatctcaaaaataaataaaaaaataaaataaaaggagctaagttaaagttgaatgctcagttggataatcgtttactaacaattgataggagcttggcctctggtgagtttctagat

SEQ ID NO: 339266 - DNA, 201 bp, Homo sapiens
gttattatgttaatgaaccaccactaatttttgtggtttcaaaatagcaaggttcattgataaaactcccttgtgccttggtgacaaaaaacactgatacmacccactgtcaaagtaagtgtgtttgttatttttgtttttaatgacactaaatttgtaggaatgatatttttaggtggttgctcaatctcacccgccatc

SEQ ID NO: 339267 - DNA, 201 bp, Homo sapiens
gcaaattcctagtgtcatggatgaataaggagaggagacgtggcctttggtgtagaagtgcaaatagtgaataagagactatgttattgtatttgcctctrttcctttgcatctcacatacatcccaattccttgaaacccagcccttagtgaagaaggcatagctgggtctccatctggccacatgcagcagactccctt

SEQ ID NO: 339268 - DNA, 201 bp, Homo sapiens
tgagacaggaggatcacttgaacctgggttgttgaagctgtagtgagccatgttcctcccactacactccagccaggtcgcaaaaaagaaggagaggggargaaaagaaaagaaaggagaaagaaagagagagagagggaaagggaaaagaaaagagagagagagagagaaataaaagaaagaaagagaaagaaggaagga

SEQ ID NO: 339269 - DNA, 201 bp, Homo sapiens
ggtgtagacagttgtgttaatggctgaagatctgtgcattttagcatatttaaattataacccccaggaagcattgcctcatcttcctgggggatgtatawgcttgttaagagcatactgggggtgcttttgagaaccccttaccatgttattatgttaatgaaccaccactaatttttgtggtttcaaaatagcaaggtt

SEQ ID NO: 339270 - DNA, 201 bp, Homo sapiens
aggatggtctcgatctcttgaccttgtgatctgcccacctcggcctcccaaagtgatgggattacaggcatgagccactgcacctggctgagaactttttraaaacatattttcctcaaaaagctaaatctggaaagtaccatatgacccagaaattgcactcttaggtaggtatacacccaaaagaattaaaaacaggca

SEQ ID NO: 339271 - DNA, 201 bp, Homo sapiens
gtttacactcccaaattaattgcaacactattcacaatagcagagttatggaatcaacctaagtgtcaatcaatggatgaatggataaagaaaatgtgagacacacacacacacacacacacacacacacacacacacagtggaatagtcttcagccttaaaaaagagatttagtcatttgcaaaaatatggttggaattg

SEQ ID NO: 339272 - DNA, 201 bp, Homo sapiens
ctccatgtccatcccaacatcttcagctcctcctcacgtcgccagtggatgtcctctgcaagctgatataaattattttcaaacccagatatacattcctracttaattccactctcctcaaactcgcccacggaatgcctctaacagaggggagcgagggcacaccctgggaggcccgagtatgtatcctgtggcattac

SEQ ID NO: 339273 - DNA, 201 bp, Homo sapiens
ccagaaattgcactcttaggtaggtatacacccaaaagaattaaaaacaggcactcaaacaaatacttgtatgtgcatgtccataatgttcatagcagcayggcccacagtagcctcaaattggaaaacaacccacatatgaatccatacggtggaatattattgagccataaaaaaaaataaagtagtgacatgtgctac

SEQ ID NO: 339274 - DNA, 201 bp, Homo sapiens
ggtaccactatttgagttctgcagttggccagggttgtgggaggggcctcaaagttaagtggagacactgagatggacaagaccagatgctatgcacaatrgaaatgcatggttgaagttttccttcctgcctgtgtggggccttagggtgagttaagtgttgaggttaagtgctgtgtaaactttccctctgctgtccct

SEQ ID NO: 339275 - DNA, 201 bp, Homo sapiens
cagctgtttggcacaggatatattgatttattttctaaaagaaacatgaaaacataaaaatttcaaggtctaaaaatagtgtacattattgtgatggtaawaacttatcagaagtcaacttatccttgttgacttatccttgttacgtaagtccaacttatcttgttgatgagtgtgggtgggaggcacgactgagagata

SEQ ID NO: 339276 - DNA, 201 bp, Homo sapiens
tttacactcccaaattaattgcaacactattcacaatagcagagttatggaatcaacctaagtgtcaatcaatggatgaatggataaagaaaatgtgagacacacacacacacacacacacacacacacacacacacagtggaatagtcttcagccttaaaaaagagatttagtcatttgcaaaaatatggttggaattgg

SEQ ID NO: 339277 - DNA, 201 bp, Homo sapiens
acaggtcaggtcaaaactactgtgctgatcagtagtggactcacaacggtgaatagccactgccctccagcctgggcagcataatgtgagtgtatttatcrctaataaaaaaattatttaaaaaatatgtatctctgacaccatgggacaggcactgactcttgaattggagagacctggattcaaatcctgaggtagtct

SEQ ID NO: 339278 - DNA, 201 bp, Homo sapiens
tttttttttttgaggcagtcttgctctgtcacctagtctggagtgcagtgccatgaacacaaacacagctcactgcagccttgacctcctgggttcaagcratcttcctgttcagtctcccaaatagctgggactagcatgccactatgcctggctaatttttaaaatttttttatagagatggaggcttgctatgttgcc

SEQ ID NO: 339279 - DNA, 201 bp, Homo sapiens
acatgtgcataacttctgaataggcagcttggctatttatcctaagaaatttatcctaagaggccaggcgcagtggctcacgcctgtaatcccaacacttygggaggctgaggcaggtggatcacttggggtcaggagttcaagaccagcctggccaatgtggtgaaaccccatctctactacaaatacaaaaattagcca

SEQ ID NO: 339280 - DNA, 201 bp, Homo sapiens
gcagagttatggaatcaacctaagtgtcaatcaatggatgaatggataaagaaaatgtgagacacacacacacacacacacacacacacacacacacacastggaatagtcttcagccttaaaaaagagatttagtcatttgcaaaaatatggttggaattggaaaacattatgctaagtgaaataagccaagtacagaaa

SEQ ID NO: 339281 - DNA, 201 bp, Homo sapiens
tgggggactgaggcaggagaatcgcttgaacccgggaaaaggttgcagtgagccgagatcatactcttgcactccagccggggcgacagagtgagactctraaaaaaaagaaagaaatttatcttaagaaagtaaatggataaatagacaaggtcataggcacagtcactagcttattgttcatcagcaggtccttgagag

SEQ ID NO: 339282 - DNA, 201 bp, Homo sapiens
ctcagcctcccaagtaactgggtttaccggcacctgccaccatgcccagctaatttttgtatttttgtagagatggggtttcaccatgttggccaggctgktcttgaactcctgacttcaggtgatccacccacctcagcctcccagagtgctgggattacaggcatgagtcaccatgcctggcctagatgcaagtttaat

SEQ ID NO: 339283 - DNA, 201 bp, Homo sapiens
gcttttacttatttatgatctgagaaaaactgttcgcatccagagggcaggctgggcctgcctgtaaccccagcacttgggaggccgaggtgggtgaatcrcttgagcccaggagttcgagaccagcctggtgaaaacctgtctctactaaaaatacaaaaaaattagccaggtgtggtggtgctcgcctatagttctggc

SEQ ID NO: 339284 - DNA, 201 bp, Homo sapiens
acagaaagggaggcatactgaccctgccaaagttccttcttcattcctgattcattccatctccaaacccacctgtgtcctgtggccctcctactgcttatcaaaactgttcccattattgctgcaatctgattcacataggcaaaattggcagtagccattgtgtgcaaagcattccgttgaatgtaggggcaatttaaa

SEQ ID NO: 339285 - DNA, 201 bp, Homo sapiens
tcgggaggctgaggtgggagaatctcctgagcctgggaggtcgaggctgcagtgagccaagatcatgccactgcactccagcttgggcaacagggtgagaktctgtctcaaaacataaaccacaaaacaaaacaaaagcagagggcagaaactgtatcttccttccttgtagcctgagaagccatacagtcctcttttcct

SEQ ID NO: 339286 - DNA, 201 bp, Homo sapiens
gaaatttctttctctctctgactccctgcctttgtctgttcccgtctgtctgtaacacacacacacacacacacacacacacacacacacacacacacacagagaatgttgaaataaatggatggattacagattgtacactttgggtagacatgaatagagaaaatcttgttagagaagatgaccccttgggctattggc

SEQ ID NO: 339287 - DNA, 201 bp, Homo sapiens
tggtgaaaccccctctctactaaaaatacaaaaaaattagctgggcatggtggcgggcatgtataatcccagctacttgggaggctgatgtaggagaatcrattgaacctgggaggtggacgttgcaggcagccaagatcacaccactgcactccaaccccagatgacagtgcaagactccgtctcaaaaaaaaacccata

SEQ ID NO: 339288 - DNA, 201 bp, Homo sapiens
caaaacagtatgctaatattagagtacatatcatggactctttttcctcaaattatctgaaaaattatcagacatcagaaaaactgagttgaggccaggcrcggtggctcacacctgtaatcccagcaatttgggaggctgaggcgggtggatcacgaggtcagaagttcaagaccagcctggccaggttggtgaaaccct

SEQ ID NO: 339289 - DNA, 201 bp, Homo sapiens
ctctcagatggggcggctgccgggcggagaggctcctcacttctcagacggtgcggttgccaggtggagggtctcctcacttctcagacggggcggctggscagagacgctcctcacctcccagacggggtcgcggccgggtaggggtgctcctcacatcccagacggggcggtggggcagaggcgctccccacatctcag

SEQ ID NO: 339290 - DNA, 201 bp, Homo sapiens
ctgggtgtggaggtgcatgcatgtaatcccagctacttgggaggctgaggcaagagaattgcttgaacctgggaggcggaggttgcagtgagccaagatcrttccattgcactccagcctgggtgatggagtgagactctgtctcaaaaaaaaaaaaaaaaaaaaaaaaaaaaaaagctgtcccagaaggcctagaatgtt

SEQ ID NO: 339291 - DNA, 201 bp, Homo sapiens
tgatgcgtgaagtccatatgtgggcgtggccagtagacctctgtgaaatccagaaaaatcttttactttgtgtttattctgtgtgtgtggtggcgtggggsgggggtggtgggggggcaagtgctgtttaagtgatccaaaagcttacctgtaaatcccgcaaatcaagcatcagcttaccaattcagaatgtagagtcac

SEQ ID NO: 339292 - DNA, 201 bp, Homo sapiens
acaaagtcagcttccggtggggacgcttaaagcctcctttattctttcagtaaatattgaacgcttactgtatgttgggaagatataagaaatttgttttkccatggaatgcagtagaataaggcaattgtttttgactgtctttacaccttaacatggatttactgtttccattttggtgttgcgtgttaaggtttagct

SEQ ID NO: 339293 - DNA, 201 bp, Homo sapiens
aggagacccatatcacatgcagagacacacctaggctcaaaataaagggatggaggaagatctactaagcaaatggaaaacaagaaaaggcaggggttgcratcctagtctctgataaaacagactttaaatcaatgaagatcaaaagagacaaagaaggccattgcataatggtaaagggatcaattcaacaagaagagc

SEQ ID NO: 339294 - DNA, 201 bp, Homo sapiens
atgatatatatgatatatatgttatatatgatatatatatgttatatatgatatatatgttatatatgatatatatatgttatatatatgatatatatatgattatatatatgattatatatatgattatatatatatgttatatatatatgtttgcatgtgctgtctctctgtctctggatcttcctctcctcccttaca

SEQ ID NO: 339295 - DNA, 201 bp, Homo sapiens
atatatatgatatatatgttatatatgatatatatatgttatatatgatatatatgttatatatgatatatatatgttatatatatgatatatatatgatkatatatatgattatatatatgattatatatatatgttatatatatatgtttgcatgtgctgtctctctgtctctggatcttcctctcctcccttacatac

SEQ ID NO: 339296 - DNA, 201 bp, Homo sapiens
ttgagtttctgttcacacctccggcccctctccatgccctctgcaggccgctgccatctgggtttctctggaagtgcagaggccacaggttgcaatctacwctccagcctcggtgcctgtctctgccctggttctcctctgccagctgacctcttgccttctgattcccagaaggacagggcgttggttcctgtgattttc

SEQ ID NO: 339297 - DNA, 201 bp, Homo sapiens
atatatgatatatatgttatatatgatatatatatgttatatatgatatatatgttatatatgatatatatatgttatatatatgatatatatatgattatatatatgattatatatatgattatatatatatgttatatatatatgtttgcatgtgctgtctctctgtctctggatcttcctctcctcccttacatacac

SEQ ID NO: 339298 - DNA, 201 bp, Homo sapiens
ttactccctccccagaaaggtatcagtatcagctagagtgaagaatgatttggattcagagggcctgacattacttgaaacagcagaaaatggagtgatgrtctctaattgatggtcttctgtggtccaggagctgacagctttgcagactcctaaaactcatgactgtttccatcgttcatttgggagaaaaacaacaat

SEQ ID NO: 339299 - DNA, 201 bp, Homo sapiens
ctatgcttttatgcctaagtgacaaactgtaagtttttacttttaagtaaaactcctgagtcacggaagcatgtttagtatctaagaatgtttgattctcmaagtattgaaaaagaagattctgctcacttgttcagcctctacttgatccctgttagcacagaaagatgcagtcagatttctcttgagcttggtgatatc

SEQ ID NO: 339300 - DNA, 201 bp, Homo sapiens
tggaagtcccaactctctaatcctgcctcggtctttcctgtttcaccctgaagctacctagggaaaccaagggggtagggtgacctaggggtcactggtarccatctcattaacatgcgaaagacatcactcttgagattccaaaggtgtttggggctctgtgccaggtaacagggatgaagagcaaatacatatttcaca

SEQ ID NO: 339301 - DNA, 201 bp, Homo sapiens
tttcccaacatagcaaaccaagcagttttctagcagcaaacaccaactgggtgtcctacaatttaactcagttggagttggatcccacagattaagggctyagccccacaaggctctccccgaccttagaatccaatcgcaagccccaccccctgacaccccctcatggttcgattaatttactagagtagctcacaaaac

SEQ ID NO: 339302 - DNA, 201 bp, Homo sapiens
gtaaggtgcaactccctgaggaggtgattttggtttgtgtagacagagaggaatcccattctctttggtgactgtcatggctaccataactgttgacatgkgagcagtgtatttgcactgtcataaaggtgggatgccatagaaacccagtggcctggggcaaatccttacttggagaagagcttctctggggacccccta

SEQ ID NO: 339303 - DNA, 201 bp, Homo sapiens
accagaaatgtggggagttttcccaacatagcaaaccaagcagttttctagcagcaaacaccaactgggtgtcctacaatttaactcagttggagttggaycccacagattaagggctcagccccacaaggctctccccgaccttagaatccaatcgcaagccccaccccctgacaccccctcatggttcgattaatttac

SEQ ID NO: 339304 - DNA, 201 bp, Homo sapiens
aaggtcacaggctgagagtactgggggttaggactccaacatacgttttattgtgggacattatttaacccataacattgccccttctttcctccatgagrgggaacatcacatcaccagcatcctaagcccttgtttgataacttggtgatcatcactcttccaggggagcataattggtcacctatgagactaataggt

SEQ ID NO: 339305 - DNA, 201 bp, Homo sapiens
atatagttgattcttcacattttcttcaatgtgatagctcacagccatcatattgtttcctttcttgtaattatttgttgtcttccctctcctacatatgmgctctggccacaaatgattgcatgtatacagtgcaatatttactcttgttttatttgctgtgagcagacactcttagaagttttctctggtggaagtgac

SEQ ID NO: 339306 - DNA, 201 bp, Homo sapiens
ccacacctgtaaatgcacttacgttttcatacttccttgccttttattcattctcatcgctttgcctgagtattctttcctctcttcctaactcaggacarcactgcctgtattagtcttctaggctgctatgacaaaataccacaaactgggtggtttaaatagcagaaacttgtcatctcacagtctggaggctaaaag

SEQ ID NO: 339307 - DNA, 201 bp, Homo sapiens
aaatgtagttgatgatgccagctctcaccatcaaggctcataagtgctatgagccagatgcaagggttttacttaacaatgaaaattttacctgtcaggtraactgagtctatggcttgggctgacataaagaagccatgatcacattgagaagccatgttatccatattgcatggtgaactgggactccagatagaaggg

SEQ ID NO: 339308 - DNA, 201 bp, Homo sapiens
agagggaactcaaatccagtgtaaggcatatcaaatgtgtagaaacgtgatgtaaacagggttgcagctaacggcacatttatgccagagcaggacaccaygcaccagaccagagaaactcgtttccctccctccagcgcaaggtttacactttttgggacctttatgaaacggcacacagaaggcaaagccaggctaagg

SEQ ID NO: 339309 - DNA, 201 bp, Homo sapiens
gttgtgggaggggcctcaaagttaagtggagacactgagatggacaagaccagatgctatgcacaatggaaatgcatggttgaagttttccttcctgcctrtgtggggccttagggtgagttaagtgttgaggttaagtgctgtgtaaactttccctctgctgtccctgctcttcaatgaagtttgctgcattggttgtct

SEQ ID NO: 339310 - DNA, 201 bp, Homo sapiens
acccttagtgtattagtctgttttcacaccgcggataaagacatacctgagactcggtaatttataaagaaaaagaggtttaatggactcacagtcccatrtggctggggaggcttcacagtcaaggcagagggtgaaggaagaacaaaggcgaacaaaggcatgtcttacatggcagcaggcaaagagagaatgagagcc

SEQ ID NO: 339311 - DNA, 201 bp, Homo sapiens
taggaattcaagccaggtagcactttccacctcttccaggagtgatcagctcagctttgcctgtgagctacactgttagctggtacctctaatcaggtacytttgctgccaggtacacaaagctaccaccaagatctgtacactcattgctttgtttccacctgaccccaggtggtctagttgtgctgtattccgctgtgt

SEQ ID NO: 339312 - DNA, 201 bp, Homo sapiens
aatcaactttttctgatgtaagctctgacaatactgggttcaaataactattaataacaagtgccttgctaaggtagctgtaactaactacttctttaccyggttgtctaatctttcctactcaatcattcaggtcaaacatataagttcatgtcacacatctggtaactaaactactaaagagtgatttccccaagttgt

SEQ ID NO: 339313 - DNA, 201 bp, Homo sapiens
tttgaaagcattaagcatttagaaaagggtgcagaaatgtagtaggacaaaatgtgccttaaaacatacagcctctttatgtccaaagcttccacacaacrtgaagtaattgtctgaaattacaagtgctactatagtgattgaactctagctgctaattgagccttcaggtttaaaaatacacaggcctcagcaattcaa

SEQ ID NO: 339314 - DNA, 201 bp, Homo sapiens
atacacagtttctatgtcaaatttgttttttaaaagcataatggtgttctgttatatgaaaacacagcaattaatttattcctaattgatggatagtcagkttaacaatgttttttacatgaatagttgcaaagacacttgatgatgtccataaaacaataatggattcaaggataagcaacatagaaacttgcaaaaggg

SEQ ID NO: 339315 - DNA, 201 bp, Homo sapiens
gcttaggaatttggaggatgtggctgggatgctcatggcatagaactcagcttgctccttgttttcctgaagctgacatgacaagccccatgcgttatgcygtgagcgtttgatgtcaatgggaagtggcgtgctcagtgacaggagccagcctagactgtaaagtcaacttacaatgaacttatctttatttatgtcctg

SEQ ID NO: 339316 - DNA, 201 bp, Homo sapiens
atatggaacactaactgaaagttccctccactctcgcccccaaacctccttccgtattatctgtcctgacctttttctctgtaggtatggagatatttatrtatacaaacaaatcaaggattttagataaatgccatcatgctgtgcagagccttctgcaactcatttcacctgacagtgtattctggagaccattcccag

SEQ ID NO: 339317 - DNA, 201 bp, Homo sapiens
tattaaaaatagctcacgtgaatcattgtagaggccagaatatgtagagacttgagtattaatctaaagtaggaaaaggaaaccatttctaaataattatktacagcttaggaaaaaaaacaagctttttgaaattaaagctaattttgatgatagcacatttagaaatggagggcaattctcatcttaaatacctattgc

SEQ ID NO: 339318 - DNA, 201 bp, Homo sapiens
aggtaaacaaagcggccaggaagctcaaactgtgtggagcctgttgcagctcaaggaggcctggctgcctctgtagactccaactctgggggcagggcatrgccaaacaaaaggcagcagaaacctctgcagacttaaatgtccctgtctgacagctttgaagaaagtagtggttctccaggcatggagtttgagatctga

SEQ ID NO: 339319 - DNA, 201 bp, Homo sapiens
cagcttcccagctggccaccttgtttacctactcaagcctgagcaatggtgggcgcccctccaccagcctcgctgccgccttgcagtttgatctcagactrctgtactagcaatgaacgaggctccgtgggcatagaaccctccgagctaggtgccggatataatctcctggtgtgccatttgtgaagcccgttggaaaag

SEQ ID NO: 339320 - DNA, 201 bp, Homo sapiens
ctgggaaaaggttatttggaatagataacatttttagtggccataaaattcaaatagaaaaataatagggacattacttgaacttaacctatatttcgaamaattatcatagggatctcttgtaaactttggtataacataaggaagatatgccaaattatttttgaaatagagatgagtctgaaatcataatggtgatta

SEQ ID NO: 339321 - DNA, 201 bp, Homo sapiens
actgagtaccttcacactagtgtttgtttgcagaagctcagatgcaaactgaacagtgggagtaatgaagccctttcctcttttggcagtagtctaagaaytatggtaatagggtctgtgtgatctcccatccatccgctctgcagctttcaacacatggggacccttgtgagacaccagaagagctcacagacacatgac

SEQ ID NO: 339322 - DNA, 201 bp, Homo sapiens
atgtgaaacaatacactgacattttgttcccccataaaagtcaccaacagtgctatgtgcagcatggaaaagatctaaaataaatttaaaagattcagagwcaagcattaaatgctaaatgggagaggaaaagagggtagtaactccatgtggcctctgccatctgggaagacctgcagggaggacagagtgtggtggaag

SEQ ID NO: 339323 - DNA, 201 bp, Homo sapiens
aggctgcctcatctcagaagccaatgggcggtgtaattagtgctgaaaggtgggctgggggatgactgcattgctctagcaaggaaggaggagcagggagmtgaagggagacaggtggaggaggccaagcaactggctaagcccatgagggctaagggaggcctaaaatgcgggacattggagaggaaatgttctggaagc

SEQ ID NO: 339324 - DNA, 201 bp, Homo sapiens
gtttttccacagagggcatggctttgggatgattcaagcacagtacatttatcattagatcctcataaggagcgtgcaaactagatcccttgcatgcgtgytttacaatagggttcatactcctgtgagaatctaatgctgccactgatctgacaggaggcggagcttaggcaatattgcccgctagccctccgctcacct

SEQ ID NO: 339325 - DNA, 201 bp, Homo sapiens
aggtgtggtggcgggcacctgtagtcctagatacttgggaggctgaggcaggaaaattgcttgaacctgggaggcggaggttgcagtgagccaagattgcrccattgcactccagcctggcaacagagctagactctgtctcaaaaaaaaaaaaaaaagaaaaaaactgagttgaagttcatattttgttctacgtgtaat

SEQ ID NO: 339326 - DNA, 201 bp, Homo sapiens
ggcagtagtctaagaactatggtaatagggtctgtgtgatctcccatccatccgctctgcagctttcaacacatggggacccttgtgagacaccagaagasctcacagacacatgacttttcaagacttttcctgtgtttctttttttcctttcccctttttcatgaatgattacttcatcagtgcatgtcatttttgaca

SEQ ID NO: 339327 - DNA, 201 bp, Homo sapiens
taatacctggaaagtaagtgaaattcacatgtaaaggaatgtatatttttccagatatgaagctacccatcctttaatatgttcttttccaaaagtatacrttgtcctttttactcaaaatgttcaggtaagcccacagttaagactcagacctgagggaagacaacatcagttcatctggggaaaatatagacaaggcct

SEQ ID NO: 339328 - DNA, 201 bp, Homo sapiens
tcgaattctcacgcctgtaatcccagcactttgggaggccgaggtgggtggatcacgaggtcaggagatcgagaccatcctggctaacatggtgaaacccygtctctactaaaaaaacacaaaaaattagctgggcatggtggcaggtgcctgtagtcccagctactcgggaggctgaggcaggagaatgacgtgaacctg

SEQ ID NO: 339329 - DNA, 201 bp, Homo sapiens
tccctgaaaaaaatcctctctcagctgggtttgtgaagtcacagtgactttcaggtgcttactgtttttattcagactaaaaaaattattaggtgggggcwgggcgctgtggctcaacgcctgtaatcccagcactttgggaggccaaggcaggcagaccacaaggtcaggagatcgagaccatcctggctaacatggtga

SEQ ID NO: 339330 - DNA, 201 bp, Homo sapiens
cagccagtattctgcctatgactttaaaaaccataaaaaaaaaactccatcctgggagctttactgtcctccagtttgaataggaagccccaagattacartcagcaaggtgtagccacatctactactatgccacatctagactgcagtttctctattttaagcctctcccattgtttcttactcgttgaactttagaga

SEQ ID NO: 339331 - DNA, 201 bp, Homo sapiens
agttctttaaattttattgatgattttccatttgtactatccattgttgaatgagggatattgaaaaattcaactataattgtgaattagtctatttcttmtttcagttctatcagttttagcttcacatattttgcagctctgttacttggtgcatagacattcaggattgctatgtattctgaatggattgatcctttt

SEQ ID NO: 339332 - DNA, 201 bp, Homo sapiens
aatgcctgccagccctttctgcgcagaagaaatgccaggacccacagacatggctttccctggaaccactcctctgttggtggtctcactggtgcctgccrctagcagagagcagcatggttacaggtgaggccccgcacccaggccagctgtgggacctagtttccagctcaagccgtgaaaacttggctgcacctcctg

SEQ ID NO: 339333 - DNA, 201 bp, Homo sapiens
cttatttgtacgtttccttctgtattacttgtgtcctcactggtccataggtgccttggagacaaggatcctatctgtctttccccctcaatctccagctmctggagtagagcctagtccatagttggtgctccataaatatgtgttcaataaatgatcaagcaggagtgagttataaccagaggtcaaaaccctggggca

SEQ ID NO: 339334 - DNA, 201 bp, Homo sapiens
aatggctgttttgctaaatgaatgaatgaaacatgcaacagatcatggggatttggggatcatgtccccaaaataagcttaaaatttgaaaataaaaataratgatttattaccagtcacaaaaaacttaaattttaaattatcgtaggctaggcatagtgattcacgcctgtaatctcagcactttgggaggccaaggct

SEQ ID NO: 339335 - DNA, 201 bp, Homo sapiens
ttaaagtatggatacgtactaattgtacatatttatgggataaatgtgatgttttgatacaggcatacaatatgtaatgatcagatcagggtaattggggygttatcacctcaagcatttatcttttcttgagtgttaggaacattccaactccgctgttttaattattttgaaatatacaataaattattgttaactata

SEQ ID NO: 339336 - DNA, 201 bp, Homo sapiens
agttactttgctctaaagaccactttatctaatattaatatagttacttaggttttattttgattaatgtttgcatgatgtatcttttccatcattttctrtctgcctatatcattatatttgaagctagcttctaaaaggcagtatgtaattggctcatgtttttaaattcaccatgtcattctgtatcttttaattggc

SEQ ID NO: 339337 - DNA, 201 bp, Homo sapiens
ttattatgcagtttcctcctgaaaattttttgtttaagtattgtattttcagtctggtcatttcttttctattgagagttacatttaattaattaattaattaattaattaatttatttatttattattttttttattcagagtttcactcatgttgcccaggctggagtgcagtggctggatctcggctcactgcagcct

SEQ ID NO: 339338 - DNA, 201 bp, Homo sapiens
tcttgaagcccgtggccaacgttgaaaagagccttcatcagagtgtgaagtggcatccaagacagggaaaagccagggccaggtgcggtggctcacacctrtaatcccagcactttgggaggccgaggcgggcgtttcacctgaagtcaggagttcgagaccagcctggccaacatggagaaacccccgtctctactaaaa

SEQ ID NO: 339339 - DNA, 201 bp, Homo sapiens
attatgcagtttcctcctgaaaattttttgtttaagtattgtattttcagtctggtcatttcttttctattgagagttacatttaattaattaattaattaattaattaatttatttatttattattttttttattcagagtttcactcatgttgcccaggctggagtgcagtggctggatctcggctcactgcagcctcc

SEQ ID NO: 339340 - DNA, 201 bp, Homo sapiens
ccaggttcaagtgattctcccacctcagcctccccagtagctgggagtacaggtgcatgccaccacacctcgctaatttttgtatattttggtagggacarggctttgccatgttggccaggctggtctcaaactcctgatctcaggtgatccgtccaccttggcctcccaaagtaatccccaaagggattacaggcatga

SEQ ID NO: 339341 - DNA, 201 bp, Homo sapiens
cttccactagggtcacaagtctctggcacatagtaggtgttagaaagaaaagttggactgaatttccagattctctggaatggactatgatccagatttayagtcatttaagagttagaatctgtaattcttagtgactgactgaatgtacttggggatggtgagatggggtagagatgaagcactgctgtaagagagctc

SEQ ID NO: 339342 - DNA, 201 bp, Homo sapiens
ttatgcagtttcctcctgaaaattttttgtttaagtattgtattttcagtctggtcatttcttttctattgagagttacatttaattaattaattaattaattaattaatttatttatttattattttttttattcagagtttcactcatgttgcccaggctggagtgcagtggctggatctcggctcactgcagcctccg

SEQ ID NO: 339343 - DNA, 201 bp, Homo sapiens
cacggtgaaaccctgtctctactaaaaatacaaaaaattagccaggcatggtggcaggcgcctgtagtcctagctacttgggaggctgaggcaggagaatrgcatgaacccgggaggcggagcttgtagtgagccgagatggcaacactgcactccagcctgggggacagagcgagactccgtctcaaaaaaaaaaaaaaa

SEQ ID NO: 339344 - DNA, 201 bp, Homo sapiens
catagtaggtgttagaaagaaaagttggactgaatttccagattctctggaatggactatgatccagatttatagtcatttaagagttagaatctgtaatwcttagtgactgactgaatgtacttggggatggtgagatggggtagagatgaagcactgctgtaagagagctcatgtcagagggggtcctggaggaggagt

SEQ ID NO: 339345 - DNA, 201 bp, Homo sapiens
ttttacatttcactttttgaggaacagccatactgtttttttacagcagctgcatcgttttatatggtttgtgatttttccatattcttgccaacactggtttttttttttttaatagtagccactctaatgggtttgagagtggtatctcattggagttttgatttgtatttccctaattattagtgacaatggacatct

SEQ ID NO: 339346 - DNA, 201 bp, Homo sapiens
gcagtttcctcctgaaaattttttgtttaagtattgtattttcagtctggtcatttcttttctattgagagttacatttaattaattaattaattaattawttaatttatttatttattattttttttattcagagtttcactcatgttgcccaggctggagtgcagtggctggatctcggctcactgcagcctccgcctc

SEQ ID NO: 339347 - DNA, 201 bp, Homo sapiens
aggcatggtggcaggcgcctgtagtcctagctacttgggaggctgaggcaggagaatggcatgaacccgggaggcggagcttgtagtgagccgagatggcracactgcactccagcctgggggacagagcgagactccgtctcaaaaaaaaaaaaaaaaaaaaaaagaccaaagacataggaaaggaggtctagatgattt

SEQ ID NO: 339348 - DNA, 201 bp, Homo sapiens
agaaaaacaacaataacaaagaaacaccagttatgtactgtaccgcatgcagttttatttccatttaaaatgtatttacttggtttatttcagtggagctyctggcatgtgccagagattgtactaggcatgggaagaatgaagctcagcgcttcccttaaggagtttcaaacttcagtgggcatcccagtcaccgtccac

SEQ ID NO: 339349 - DNA, 201 bp, Homo sapiens
gtttcctcctgaaaattttttgtttaagtattgtattttcagtctggtcatttcttttctattgagagttacatttaattaattaattaattaattaattaatttatttatttattattttttttattcagagtttcactcatgttgcccaggctggagtgcagtggctggatctcggctcactgcagcctccgcctccgc

SEQ ID NO: 339350 - DNA, 201 bp, Homo sapiens
ggctgctccacgtttggcgaaacgtgaaaggatgtggatcctgccctcagtcctcgggagcgtgaagggctgtggctcctgccctcagtcctcgagtggcrctggcagttgggctctcctttgctgacttcccgtgcctgtcacagcagcttccaggggctggactcctctgctcttcatgccgaacttgactccgccttc

SEQ ID NO: 339351 - DNA, 201 bp, Homo sapiens
agaggttgcagcgagccaagattgtgctgctgccctccagcctgggtgacagagccaggctccgtctcgaaataaataaataaataaataaaaataaaaartaaacaaataaaataaacaaaacacaagcagtcaaactccagagtcagtgtaacccaggagtccccaagccccaagccacagactggtaccagtctgtgg

SEQ ID NO: 339352 - DNA, 201 bp, Homo sapiens
cttagagatatctgacttccactgtacttttctttcagtttagtagctcacctttgtttaataattaatccctattgcagcactattcataatagcaaagacatggaatcaacccaaatgtccatccgtgctagactggataaagaaaatgcaatacacatacaccatggaatactatgcagccataaaaaggaatgagat

SEQ ID NO: 339353 - DNA, 201 bp, Homo sapiens
agatgaagtctcgctcttgtaccctaggctggagtgcagtggcatgatcttggctcactgccacatctgcctcccgggctcaagcgattctcctgcctcarcctctcgagtagctgggattacaggtgcgtaccaccacacccagctaattttttgtgttttaagtacagatggggtttcaccatgttggccaggctggtc

SEQ ID NO: 339354 - DNA, 201 bp, Homo sapiens
acgggcagatgacaaggtcaggagattgagaccatcctggctaacatggtgaaaccccatttctactaaaaatacaaaaaaattagtcgggcatggtggcrcacacttgtaatcccagctacttgggaggttgaggcaggagaatcacttgaaccggggaggcagaggttgcagtgagccgagatcgcaccactgcactcc

SEQ ID NO: 339355 - DNA, 201 bp, Homo sapiens
ttagagatatctgacttccactgtacttttctttcagtttagtagctcacctttgtttaataattaatccctattgcagcactattcataatagcaaagacatggaatcaacccaaatgtccatccgtgctagactggataaagaaaatgcaatacacatacaccatggaatactatgcagccataaaaaggaatgagatc

SEQ ID NO: 339356 - DNA, 201 bp, Homo sapiens
aaaatgaaagttatttaaatgctagcaaatcatgatatagaaaatattagtaaatgatgaagtattcagtaaagccattgtctgttaggcatataggcctrtaagagctgggcgggtggctcacgcccataatcccagcactttgggaggctgaggtgggcggatcacctgaggtcaggagtttgagaccagccaggccaa

SEQ ID NO: 339357 - DNA, 201 bp, Homo sapiens
ttattagtgacaatggacatctttacatgtgccttttggtcatttgtatatcttctatggagaaatgtctattcaatcctttgcccattttttaatcaggtttttttttcagtgttatgacataatttgtattttttctacctccctttagtcccttagactgtaaggtccatggttaaaaacctgtttaaaaaaactggg

SEQ ID NO: 339358 - DNA, 201 bp, Homo sapiens
gtcagcaaggtgagaatcatgagttagtctaggttgtgaaatgattattttgaaatcaaatcatatctatataaatataaatcatgtgtgtgtgtgtgtgwgtgtgtgtgtgtgtgtgtgtgtgtgtgtgtgtgtatttcttttttagatgaagtcttgtgctgtcacccaggttggagtaaagtggtgtgatcttagctc

SEQ ID NO: 339359 - DNA, 201 bp, Homo sapiens; identical to SEQ ID NO: 71391

SEQ ID NO: 339360 - DNA, 201 bp, Homo sapiens
accccactgtcaacattagacagatcaatgagacagaaagttaacaaggatatccgggaattgaactcagctgtgcaccaagtggacttaatagacatctrcagaactctccaccccaaatcaacagaatatacattactctcagcaccacattacacttattccaaaattgaccacatagttggaagtaaagcactcctc

SEQ ID NO: 339361 - DNA, 201 bp, Homo sapiens
tcagcaaggtgagaatcatgagttagtctaggttgtgaaatgattattttgaaatcaaatcatatctatataaatataaatcatgtgtgtgtgtgtgtgtrtgtgtgtgtgtgtgtgtgtgtgtgtgtgtgtgtatttcttttttagatgaagtcttgtgctgtcacccaggttggagtaaagtggtgtgatcttagctca

SEQ ID NO: 339362 - DNA, 201 bp, Homo sapiens; identical to SEQ ID NO: 71393

SEQ ID NO: 339363 - DNA, 201 bp, Homo sapiens
tgcatcagttttgttttgttttgttttgtttttttgagacggagtttcactcttgttgccaggctggagtgcaatggcgtgatctcgactcactgcaagcyccgcctcctgggttcacttgattctcttgcctcagcctcccgagtagctgggattacaggcacgtgccaccgcacctggctaattttttgtatttttagg

SEQ ID NO: 339364 - DNA, 201 bp, Homo sapiens
agcaaggtgagaatcatgagttagtctaggttgtgaaatgattattttgaaatcaaatcatatctatataaatataaatcatgtgtgtgtgtgtgtgtgtrtgtgtgtgtgtgtgtgtgtgtgtgtgtgtgtatttcttttttagatgaagtcttgtgctgtcacccaggttggagtaaagtggtgtgatcttagctcact

SEQ ID NO: 339365 - DNA, 201 bp, Homo sapiens
tgacaaatgggatctaactaaactaaagacctctgcacagcaaaagaacctatctacagagtaaatagacaacctacagaacaggaaaaaatgtttgcaarctatataggtccaaaggtctaatatctagcatctataaggaacttagacaaatttacaggaaaaaaagaacaaccccattaaaaagtgggtaggctgggc

SEQ ID NO: 339366 - DNA, 201 bp, Homo sapiens
gaggcaggagaattgcttgaacatgccaggcggaggttgcagtgagccgagatcacaccattgcactccagcctgggcaacaagggtgaaatttcatctcaaaaaaaaaaatttcaggagggagtggagataaatgaatatatagttgattcttcacattttcttcaatgtgatagctcacagccatcatattgtttcctt

SEQ ID NO: 339367 - DNA, 201 bp, Homo sapiens
ttggccatttgtatatcttcttttaagaattgtctattcattttcttagcccactttttgatgagattgtttgtttttttcttactgatttgtttgagttygttgtagtttctggatattagtcctttgtcagatgcatagattgtgaagattttctcccactctgtgggttgtctgtttactctgctgactgttcctttt

SEQ ID NO: 339368 - DNA, 201 bp, Homo sapiens
tccctgggaccacaaaatccgtaaacttaaaatcctggtgtggttatgatccttccgtcagcctcccaagaggagttttttaaggttgaagcagtatgacytttaaactgttgcccctaaagatagcaatatgaactgttttgtgtagtgttgccatattgattgaaacaatgaccatcattggggaaaaacatcatgctt

SEQ ID NO: 339369 - DNA, 201 bp, Homo sapiens
gtttccttgtccctgctgctaatctctgattaagcaacttggtgaaaatccaaaagctcttaggagaacaggagtggtggcatttgctcttcggtgcttgraagcagatcatgtgaaaactctaaagccctgagaatcaaagcacagccacctacctggtcaggaagttcaagtgcactaggtgtgggcccaaggctggca

SEQ ID NO: 339370 - DNA, 201 bp, Homo sapiens; identical to SEQ ID NO: 71400

SEQ ID NO: 339371 - DNA, 201 bp, Homo sapiens; identical to SEQ ID NO: 71401

SEQ ID NO: 339372 - DNA, 201 bp, Homo sapiens
gttcacaatatgagtctccacatgctgctttgtttgtccaagtgggaactgcaagttagtcctgcctcctgtctgtgattttctcctataccccagttatyttattagatgcagaccaaaaaacccccaaataattaacattcatttatcattgaccacccccaacaacacactttcaatgctggaattgaactttctgaa

SEQ ID NO: 339373 - DNA, 201 bp, Homo sapiens; identical to SEQ ID NO: 71402

SEQ ID NO: 339374 - DNA, 201 bp, Homo sapiens
ctggatctagccacccagcagagctgcctggctccaggctgccactggggaatgtctacaaagagtcctgtgatgtggaccgtctacaggtctctcagccrtggataccagcacctgctttgttggaggtagcaagggagtgaagtggactctgtgagggtacttggttgtatttttgtttagtgcacttgttggcctcca

SEQ ID NO: 339375 - DNA, 201 bp, Homo sapiens; identical to SEQ ID NO: 71404

SEQ ID NO: 339376 - DNA, 201 bp, Homo sapiens
cagttattgttatttctcttctggatctagccacccagcagagctgcctggctccaggctgccactggggaatgtctacaaagagtcctgtgatgtggacygtctacaggtctctcagccatggataccagcacctgctttgttggaggtagcaagggagtgaagtggactctgtgagggtacttggttgtatttttgttt

SEQ ID NO: 339377 - DNA, 201 bp, Homo sapiens; identical to SEQ ID NO: 71406

SEQ ID NO: 339378 - DNA, 201 bp, Homo sapiens
tttagataacctgatgactgtgtacctaggcgatgatctttttgcagtgaatttcccaggtattctttgagcttcctgtagtctagatctctagcaaagcyggagaagttttcctcaattattccctcaaatacgttttctaaagtttcagatttttcttcttctttgggtacaccgattattcttaggtttggtcgttta

SEQ ID NO: 339379 - DNA, 201 bp, Homo sapiens
tttgtttcttgctctgtatttcagtgttaacatctgtctccatgaccttccctccttgccagtctgtgtaaaataaagaatggtgaggagagccccaaccygccccaaagcccaccctcacgcaccctagttcgttacgggttctacacagccggaagcctttcggccaggtgtgtgtgtcagggagaagacttcttcctc

SEQ ID NO: 339380 - DNA, 201 bp, Homo sapiens
tatttaaaagtcatgctgatgagatagtggctacagtagccatgaggggctgagtacaagttgatgttactaagaagtagaaaatgagtaagccaaaacascgcatcggtggacaggagagcagagtgctcctgcagaaaggctcctagaacccttggatgtgtgcacataccttatgaacacacccacagtgtctgtact

SEQ ID NO: 339381 - DNA, 201 bp, Homo sapiens
tctgtctccatgaccttccctccttgccagtctgtgtaaaataaagaatggtgaggagagccccaacctgccccaaagcccaccctcacgcaccctagttygttacgggttctacacagccggaagcctttcggccaggtgtgtgtgtcagggagaagacttcttcctcactgtatctgcagtgctgaggccaccgtggaa

SEQ ID NO: 339382 - DNA, 201 bp, Homo sapiens
ctgtttattttgttagaataaattcctagaaggctcctaggtcaagagaaatatgccttcttgagtggaggtaatctatattcacacacacttaacacacrtatgtacatataaatccatatactccttcttgccctccaagtaaattctgccagtttaattgtaatttatttactagggaatgaaaagagcttaccacag

SEQ ID NO: 339383 - DNA, 201 bp, Homo sapiens
gtgtgtgtgtcagggagaagacttcttcctcactgtatctgcagtgctgaggccaccgtggaaatgagatgttttctacattttttgcttatttttttcayttactgatttttaaagtttatgtataatagagtgcgcctctgccattaccaactggagactctcatgtagaaagtatttccaattttaaatgtggtaacg

SEQ ID NO: 339384 - DNA, 201 bp, Homo sapiens
ccttgtgtgtatgtagtgtatatacatatatgcctgtgtgtatattggtagccattttttaaaaaatgcaactactcacaatagatattcatgttaacctagttttttctctcgtagctgagattgtatctctagatcaactaatatgtagctgcagctcggttttagagaactatgtagataacattttgtatatttctg

SEQ ID NO: 339385 - DNA, 201 bp, Homo sapiens
aggtgaccacattttgaatctttttacttttaaaaacaattccccaccccagttctttagctgagattgtcatttgaagacgtgtgccctgttcatccagytgcacatgaccagaaggccctggagaatggtttaagccattttgaagagcacagacatgggggagaaggaggtaatcgtcatcaatacatcatccctacc

SEQ ID NO: 339386 - DNA, 201 bp, Homo sapiens
tgtcagggagaagacttcttcctcactgtatctgcagtgctgaggccaccgtggaaatgagatgttttctacattttttgcttatttttttcacttactgmtttttaaagtttatgtataatagagtgcgcctctgccattaccaactggagactctcatgtagaaagtatttccaattttaaatgtggtaacggtgtcct

SEQ ID NO: 339387 - DNA, 201 bp, Homo sapiens
tctttgaacaaggtggagtgatggtgtgcaccccagggggacactagatgatatattaaaatgctggaaaaaaagttgtggtttcctattttttcagttaraaaagtactgagagattagctttattgataatacgtaaggattgccactggcatcctcaattttttttcctggcacactgaccagaaattggtctgagag

SEQ ID NO: 339388 - DNA, 201 bp, Homo sapiens
gcaatattcagagcaaaaaggtacaagctttacttgccaccagcagctgccagagtggaggccttatgtaattacttcggcttcagccttggcagcttttrttagcccaaagtggatttgctatatttgtgctttgaattttaccgtttacactcattaagttctataaatacaaaagcatggagagcattagtgctgtca

SEQ ID NO: 339389 - DNA, 201 bp, Homo sapiens
attaaaatcgtatttggtggtggggagggggataaaagcagcgtcctagcgcaataaagtagatatacagtagagctttggtggagctcccaggttgagtwtttaagtctcagggctccaataacaatgcagatgggacagggacacagaaaatggcccaacaattagaagcatttggcctggcttctctttatttcatct

SEQ ID NO: 339390 - DNA, 201 bp, Homo sapiens
tctaatttttttgtattttttgtatttttagtagagactgggttttaccacattggccaagctagtccctctcctcctcctgccaaggaagaagaaccatrtattggcatccagtctatcctcatgtgtgctgcagaaataaccctaactggagaaagctgccttcctaagatgagcacctatgtctccatttatgctgtg

SEQ ID NO: 339391 - DNA, 201 bp, Homo sapiens
tattaaaatcgtatttggtggtggggagggggataaaagcagcgtcctagcgcaataaagtagatatacagtagagctttggtggagctcccaggttgagwttttaagtctcagggctccaataacaatgcagatgggacagggacacagaaaatggcccaacaattagaagcatttggcctggcttctctttatttcatc

SEQ ID NO: 339392 - DNA, 201 bp, Homo sapiens
gggcacaggaacatgatggcatggtgttacatttggtgatttggtgcacacaactgtctgtggtcatgcactttgatgtaactcttgtccaactggcctayccaaagtacagatatatcttcttatagatggcttttaaaaaaaagtaaaaagcccatcctcaatagataaaaactattgcaaacaattttaaatccttaa

SEQ ID NO: 339393 - DNA, 201 bp, Homo sapiens
tctgcacagtaccatgagggtcttcatcttccaggtgtggaggtggcttatgtcagttagtgctgctgcccactagaaaccctggagcctggaagatgagscttgtaggaaatacctctttctaggtgcacactcaggactacgagaaatgttgaggaaggtgaaggattctcccataactcagtcctcctgggcaggtga

SEQ ID NO: 339394 - DNA, 201 bp, Homo sapiens
aaaaaaaaattgacagaacaaattaacaggagaaaagcacaccaatttatttaatataagttttatgtggcacgggagccctcaaaggaaaataaagattaaaaaaaaaacacagtcagttatttttatatattgaattggacaaacaaagataagttgtaaaatgcgataaggccagcaggcttggcctagggtaggtaa

SEQ ID NO: 339395 - DNA, 201 bp, Homo sapiens
tattgtaaaatcagttcattaggttagtgtctattgagcaactactatgtgtatgtgttgtgttgggagtagtgcaagatgaggctggaggagaaaactgkggccgaatcacccaggtctgcaagtctcattggaacttggacttgctcctcagtgcaatgtgaaacctttgaaaaattttagcaaaggaatgatgtggtc

SEQ ID NO: 339396 - DNA, 201 bp, Homo sapiens
tggcacgggagccctcaaaggaaaataaagattaaaaaaaaaacacagtcagttatttttatatattgaattggacaaacaaagataagttgtaaaatgcrataaggccagcaggcttggcctagggtaggtaattattggagaaggaactaggatgataagggttagttaacaacctttgtgcagatttcccttggattc

SEQ ID NO: 339397 - DNA, 201 bp, Homo sapiens
ccatttgttgaagagacagtcttttcctttttgagtggtcttggccagatgtatatttttaaaagatcactgtcagcagggtgtgaagggtttaaaggagkagcgatgagaatagaagtggggagatcaatttgaaaaatatttatgtagctcttattacgtgtaaaacattgttccaggcactggaactatgatcataaa

SEQ ID NO: 339398 - DNA, 201 bp, Homo sapiens
ttaatgtaccgtccattgctttaagtgttttacacatactgtattcacttatttaatgtccaccaactcctaagtccctgttagatgatcttcattttacrtgaggaagccaaggcacccagaggtgcgatgtaacttgtccacactcaaacagcagcaaagctggcatttaaaccagacatgctgattttagaacactaa

SEQ ID NO: 339399 - DNA, 201 bp, Homo sapiens
gagcaggggaccaccaggttgcctaaggagtgatgaacaagcccaggtcagaaacaggtcaggtcaaaactactgtgctgatcagtagtggactcacaacrgtgaatagccactgccctccagcctgggcagcataatgtgagtgtatttatcgctaataaaaaaattatttaaaaaatatgtatctctgacaccatggga

SEQ ID NO: 339400 - DNA, 201 bp, Homo sapiens
caaataagaaagattaaaacaccagtaaattgttttacattgattttactaaggttagttagaagtaaaggcttacaaacacgtactgtttatttagtgayagatgaaacttagaggcgtttcttctgttgtaattggttggctctttgcattgattagaactaggtagacaagttggtacaaaaatggcaggagtggaag

SEQ ID NO: 339401 - DNA, 201 bp, Homo sapiens
agaataactgtaaggtgttacaggagagatggttttggcagccaaaaagggcttatgatcctaagatccaccttaaaagtgttctgttgcccagttctgtrttaattctgagcagaggcagcagaaagcatctttcagggtcgagaatttctgagatcttgaccgtcaggaaaaggatgcttccaggcagccgtggaaact

SEQ ID NO: 339402 - DNA, 201 bp, Homo sapiens
cagggatgttaagttggcagatttttgtgctagaagctgtgggtttacatctcctttgtgcaggtgtcctagacataccagtggcttgttatttaaacatygggatcgggtgtgtgggtggtttttaagttatagtagggatgcaggtgctgtgggatcgcttcattgtttaacaattcctttgcattcacacagggcttc

SEQ ID NO: 339403 - DNA, 201 bp, Homo sapiens
aactaggtagacaagttggtacaaaaatggcaggagtggaagggaatgggcccctgttgatgtgtaagaacatacgcgtgcatgtggggacaccagtggcrttttctgcatgtttcggggtttcagaagacttgccttgttctgcacctctaaattagacctactgtgaaaaacttacaggtcagtttctgggagtgcttt

SEQ ID NO: 339404 - DNA, 201 bp, Homo sapiens
gatccaccttaaaagtgttctgttgcccagttctgtattaattctgagcagaggcagcagaaagcatctttcagggtcgagaatttctgagatcttgaccrtcaggaaaaggatgcttccaggcagccgtggaaactgaaatccgagccctaatcttgctcagagctgctgaggtctgtttgtaggaaaacatcgggttat

SEQ ID NO: 339405 - DNA, 201 bp, Homo sapiens
tggtacaaaaatggcaggagtggaagggaatgggcccctgttgatgtgtaagaacatacgcgtgcatgtggggacaccagtggcattttctgcatgtttcrgggtttcagaagacttgccttgttctgcacctctaaattagacctactgtgaaaaacttacaggtcagtttctgggagtgcttttcttcctggactttcc

SEQ ID NO: 339406 - DNA, 201 bp, Homo sapiens
ccagcagacctgcagcagagggacctgactgttagaaggaaaactaacaaacagaaaggaatttcatcaacatcaacaaaaaggatgtccactcaaaaacyccatctgaaggtcaccaacatcaaagaccaaaggtagataaatccacaaagatgaggaaaaaacagcacaaaaaggctgaaaatttcaaaaacgagaatg

SEQ ID NO: 339407 - DNA, 201 bp, Homo sapiens
acaggtttcctcatgtagcatcccctctgtgctggtgtctgggtcttgggggtcatcctggaggcacagctcagaggctattcttcaagtctctctcctgrttttataagctccgaattcttgtataaagttaccttctagttaaaatacccagcatgatttctgttatctgcacatgacctccgataaatgtatactttt

SEQ ID NO: 339408 - DNA, 201 bp, Homo sapiens
taacagtggtaacttgaggcccaatatataattttttttttgagacagggtctcactctgttgcccagtctggagtgcagtggtgcgatcttggcttaccscaacctccacggctcaggtgatcctcccacctcagcctcctgagtagctgggaccacaggcatgcatcaccacactcgactaattttttttgtccttttt

SEQ ID NO: 339409 - DNA, 201 bp, Homo sapiens
gtggctcatgcttgtaattccagcactttgggaggcaggcagattgcttgagcccaggagtttgagaccagcctgggaaacatggcaaaaccctgtctctrtagaaaaaaaaaaaagtccaaaaattagctgggcatggtggtgcatgcccatagtcccagccacttgggaggctgaggtgggaggatcgcttgagcctga

SEQ ID NO: 339410 - DNA, 201 bp, Homo sapiens
ggttttttgaaaagataaacaaaataaatagactgctagccagactattaaagaagaaaagagagaagaatcaaatagacacaatgaaaaatgatcaaggrgatatcaccactgatcccatagaaatacaaactaccgtcagagaatactataaacacctctatgcaaataaactagaaaatctagaagaaatggataaat

SEQ ID NO: 339411 - DNA, 201 bp, Homo sapiens
tttcttcatagtttctataatgaatcaaattgcttatttgctccataatcaagtacatgaaatttgaatggaattgtagtctattattttctgcattatgrgttattttgttcaaggttacttgagtttactccgtgttaattcctgtaggtggagtgtattcattctcactgctacataaagttccattgtatgaatttt

SEQ ID NO: 339412 - DNA, 201 bp, Homo sapiens
aggtgtgttaagccaacctaagcaaatatctatcatttagaccactgctttttcctagtctatctcccctcttgaaaataactatttaaaaataggatttkcagccgggcacggtggctcatgcctgtaatcccagccagcactttgggaggccgaggcaggcggatcatgaggtcaggagatggagaccatctggctaat

SEQ ID NO: 339413 - DNA, 201 bp, Homo sapiens
gccaggcgccatggctcatgcctataatcccaacactttgggaggctgaggcgggcagatcacctgaggtcaggagtttgagaccagcctggccaacatggtgaaaccccatctctactaaaaatacaaaaattagctgggcatggtggcacacacctgtaatcccagctgctcgggaggctgaggcaggagaatcgcttg

SEQ ID NO: 339414 - DNA, 201 bp, Homo sapiens
tcccacagccaatatcatactgaatgggcaaaagctggaagcattccctttgaaaacaggcacaagacaaggatgccctctctcaccactcctatttgacrtagtattggaagttctggccagggcaatcaggcaagagaaagaaataaagggtattcaaataggaagagaagaagtcagattgtctctgtttgcacatga

SEQ ID NO: 339415 - DNA, 201 bp, Homo sapiens
ccgtggctggtttgaagatggaggagaatgcgtggccaggaagtaggtaacctctaggtgctgggagtggcccccaaatggcatccagcatgaaaatgggkccctcagtcctacagctctaaggaactgaattctgtcacagccatgtgagtttggaagaggatcttgagctccagatgagaacacagcctggctgatacc

SEQ ID NO: 339416 - DNA, 201 bp, Homo sapiens
gtccttttcaggccctaggttcagtctgtgctgactctgaccctctgagatgactattcccaaacctgagggaccgaagatcagcatcaaggacaacagayaggggtgctggggtgcagatgtaagtgagctgggtcttctggagcgctggtcactgcatgctgtgggtataaaatggctgtctagtggaggcagccaggc

SEQ ID NO: 339417 - DNA, 201 bp, Homo sapiens
ttacattttgagtaaaatttaattttatgtaaaataaagtgtaccacactggtggtaatgtggctgtaatttttactctggccttatgctcattaattatktctgtcttaaacttggtggtgatgttactattttagcctttcctttctttttgctcatgtttgtgttatatgactactcataactttgtttttaattttt

SEQ ID NO: 339418 - DNA, 201 bp, Homo sapiens
atagataaaaactattgcaaacaattttaaatccttaataagaaaataatttcaaattgctgtgcattgacagtatttgaaggaggtggggatgttataarggatggtttttagaaagaaagagctgagagacatgaattttgcagtgcagagaacatgagctttagattcaagctccagttgaatgatctttctgtactt

SEQ ID NO: 339419 - DNA, 201 bp, Homo sapiens
aagagaggacacaaacaaatggaaaaacattccatgctcatggataggaagaatcaatatcatgaaaatggccatactgccaaagtaatttatagattcartgctctccccatcaagctaccattgactttcttcacagaattagaaaaaaactactttaaatttcatatggaatcaaaaaagagcccatatagccaagac

SEQ ID NO: 339420 - DNA, 201 bp, Homo sapiens
tctgaggcaggtggggcccagtttcctttggcaaaagaagaaactggcaagacatggaggtggtccaaggatgtggggtccgttccctgttgctttagtgmctgcacgaggagcgagggacttattccaggtttccctttgtgcttggaaggaagatgtattctccataggctccaaaattcatttgtttagacattttaa

SEQ ID NO: 339421 - DNA, 201 bp, Homo sapiens
tgccctcaaagcatttcaagtgctcttgctgatggcagatgaagctgccgtaaagcagggggatgtgattgagcaaaaaatcttttctctttcaacccagsagagcaaaatagtaactctacttcatgaaaacaaaattggctgtttccaatagagcactcagatcttcaggaaaatgtagcatatttcctaaaggaggtt

SEQ ID NO: 339422 - DNA, 201 bp, Homo sapiens
cttctagcctccataactttgagaaataaatgcctgttgtttaagccacccagtctgtggcattttgttatggcagcctgagcagaccgagatggaactgmaagtattgtcattaactgagatggagctatctggaggaaatgcatcatttggtgaggccactctggctggatattagtcctcagtgttctgaaacacatt

SEQ ID NO: 339423 - DNA, 201 bp, Homo sapiens
tgggtatatacccaaaggattataaatcattctactataaagacacatgtacacgcttgtttattgcagcactcttcacaatagcaaagacttggaaccawcccaaatgcccatcaatgatagactggataaagaaaatgtggcacatataaaccatggaatactatgcagccataaaaaaggatgagttcatgtcctttg

SEQ ID NO: 339424 - DNA, 201 bp, Homo sapiens
tgggaagacaaagtaatttgtgttgacctatgataatcttgagtattctgatatatattggttctctagcacctcttcttctcaattgttatgtttttttytcatacattatagagagacgtgttttaggtacaaaggcaatgtccatgtgtagctgcattattactgccccttttagtcagtttcctaggtcaggctttt

SEQ ID NO: 339425 - DNA, 201 bp, Homo sapiens
ggggaaagtgtttccattacctgttggcttgttattacagtgaccgcagcccctgctgtttggagtgtctgaggcaggtggggcccagtttcctttggcaraagaagaaactggcaagacatggaggtggtccaaggatgtggggtccgttccctgttgctttagtgcctgcacgaggagcgagggacttattccaggttt

SEQ ID NO: 339426 - DNA, 201 bp, Homo sapiens
aggctatgaacagacacttctcaaaagaagacatttatgcagccaacagacacataaaaaatgctcataatcactggccatcagagaaatgcaaatcaaarcaatgagataccatctcacaccagttagaatggtgatcgttaaaaagtgaggaaacaacaggtgctggacaggatgtggagaaataggaagacttttaca

SEQ ID NO: 339427 - DNA, 201 bp, Homo sapiens
aagatgtgtacgtgtgggtgtacctcatctaggggtgacaccttcaagtttaattttgaagcttgggccagtggtgcttcctttcccacaaccaccatgayagatcctctatgagatgttatcacagaacccatgtttctcagtggcagtagaatacgacatctctgtcaacaaatataattctacattactttaattgct

SEQ ID NO: 339428 - DNA, 201 bp, Homo sapiens
aggctgctctgagccttatgagataattgatacctgtccaaacaattttttaaaaataacgattgtattattttgtactttttttctaagtgggtgtagtaacgtgtagtgctcatgccagaaccgctcacatcatttgctatctcttaattgatctttcttagcaagtactctccaagaccgctagaagatgatgcttta

SEQ ID NO: 339429 - DNA, 201 bp, Homo sapiens; identical to SEQ ID NO: 71392

SEQ ID NO: 339430 - DNA, 201 bp, Homo sapiens
gccttgacccagtctggaccctcctactgtttctaacctttgagtgcagctcctcccaccccgtgtagttgtgtttctgtagatgtagcactgcgtcttakaagccctcagtttcctactgtgtgaagggaagggctttaatgagagttttcaacgtttccctcaattctgaaatcctgtggttgaatggaccctaagctg

SEQ ID NO: 339431 - DNA, 201 bp, Homo sapiens
tctggactatttaattcatggtaggtatatccagtatgtataagaaagtaaaaaaaatgcaaacactttaatctcaaataacagtatgcagtgctctaatrtaatatcttctactctgaagggcaggtcataagagcaggctcctggtgatgagatgggagatcattcttcatttgttggaagatcaactttatttcatgc

SEQ ID NO: 339432 - DNA, 201 bp, Homo sapiens
tgcttctttgcatgttttcttccttccttaggatgaattctgagagatgtaattgatggggcaaaatgtactcacacatttttaagggttgtaaacttttyggtcaaaagctggtactcttggttgtttgaaaaggaaagcaagtcctcccattccagggttggattttgactcttttcctgtaaacttcactgctttttg

SEQ ID NO: 339433 - DNA, 201 bp, Homo sapiens
gcttctaacagctagacaattgatttctttgagagagctatgtctgaattgtttcttcacttcacctttggaactgaagcttgtagccttgggtgacgccragaatttaaatgtcgtcttgtgatttaaagtatctgtcaagcctacaaatgatgcagaaggctcaggaaagcatatacgtccggacattttattagactt

SEQ ID NO: 339434 - DNA, 201 bp, Homo sapiens
tcttttcatgtggttattagccgtttatatatcatctttggagcaatgtctattcagattctttgcccatttttggattgggttgtctttttattgttggrctataagtgttctttatgtaatctatatacaaatgccaaatcctatatgagatatattatttgtaaatattttatcccattctgtaggttgtcttttcac

SEQ ID NO: 339435 - DNA, 201 bp, Homo sapiens
gaggcaggagggctgtggttaggcatggctttggccagatggggaagctgggtgcttgggatcagggtaagcgggtggggatgctgtgagtatagacgctrggcagggaagccctgcagggcagagggagcggcagggctgcagtgcatttggccgtccagctggagcagaggatggaaaccgaagagtgggttgactctt

SEQ ID NO: 339436 - DNA, 201 bp, Homo sapiens
ggatgtaggatgagtgagaacaaaatcctagtgtgtattccattttaaagtaattaagttggcattagctttcctcttaaaccatttctgaattgaaattyaaagtctttcccccaccctccctgcattttgttacccatcatttgatacttttaaaaccatttcttatggtcttagaggtttattttttaaattttaata

SEQ ID NO: 339437 - DNA, 201 bp, Homo sapiens
ttatgtaatctatatacaaatgccaaatcctatatgagatatattatttgtaaatattttatcccattctgtaggttgtcttttcaccttctttatagtgtttttttttttttagcacaaatgtttgtaattttgataaagtctaatttatctgttttttcttttgtcccttatgcttttggtgccttatctaaaaaatta

SEQ ID NO: 339438 - DNA, 201 bp, Homo sapiens
ttgttcctgactttttcaaaaatgtctccagagaaatctggatttgatatcaaaaccagtgttctccttttttaaggaggaaacaggttgagagagctgasagatttggtttagtaatattttctagtgtgaagcattatcttgtattaaaatcaagtcctgccgtaagtaccatagactatataatattttggtttcttt

SEQ ID NO: 339439 - DNA, 201 bp, Homo sapiens
tgggtggattgtctgagcccaggaatttgagacaagcctaggaacatgatgcaactccatctttacaaaacaaaacaaaacacacaaaaattagccaggcrtggtgacatgttcctatagtctcagctactcagatagctgaagcaggaggatcacttgagcctaggaagttgaagttgcagtaagcaatgattgtgccac

SEQ ID NO: 339440 - DNA, 201 bp, Homo sapiens
tctcagggatgaaaagggaacctgctagtaggtctgagcacataaatgcagcagttctgctccttgtcccttaggtaaatgccgtcttctttgctagccaygtgtagcatctgtgagaaggatgtcttcttccctgtcctgtgaggagaatccttactcctccccctggctgtaggaacagtactggccaagccctccctt

SEQ ID NO: 339441 - DNA, 201 bp, Homo sapiens
gattgtctgagcccaggaatttgagacaagcctaggaacatgatgcaactccatctttacaaaacaaaacaaaacacacaaaaattagccaggcgtggtgrcatgttcctatagtctcagctactcagatagctgaagcaggaggatcacttgagcctaggaagttgaagttgcagtaagcaatgattgtgccactgcact

SEQ ID NO: 339442 - DNA, 201 bp, Homo sapiens
catgtttatagcagcacaattcacagttgcaaaaacctggaaccaacccaaatgcccatcaaacaacgagtagataaagaaactgtggtgtgtgtgtgtgwatatatatatatatatatatgtatgtatgcgtatatgtatatgtatatatatatataatggaatactactcagccataaaaaggaatgaattaatggcat

SEQ ID NO: 339443 - DNA, 201 bp, Homo sapiens
acagaaatgaatttcaagtgtaaagatttaaaataggaaattaggtgcttgtgaaattattgggaaagtggaaggagcggaaggagcagaagccagcgagycctagagaggcttcaggtccatgccctgcagctttgttcccggagtcagagcactattgctgctacccaggagacctcagggagccactgccaacgtcct

SEQ ID NO: 339444 - DNA, 201 bp, Homo sapiens
gtttgggaggccagagtggttgggtcgcttgagcccaggagttcaagagcagcttgggcaacatggtgaaaccctgtatctacaaaaaatacaaaaaaaawttagccagtgtggtggtgcttgcctgtagtctcagctacttgggaggctgaggtgggaggatggctttagcccaggtggcagaggctgcagtgagtcgag

SEQ ID NO: 339445 - DNA, 201 bp, Homo sapiens
tttttgttgtttataacttagtacttttttctgaggcgattctagtcaattcacaagtctcctaaggattatttcaaatgcaggtcacttcgtgttcttgmgatgactttgaaatccatctgtgtgtgtgctgaatgaatattgagcatatgtgtcgcaaatatgtttcctgacaaacaacgtgccatgttctgggtcctg

SEQ ID NO: 339446 - DNA, 201 bp, Homo sapiens
tttgaaatccatctgtgtgtgtgctgaatgaatattgagcatatgtgtcgcaaatatgtttcctgacaaacaacgtgccatgttctgggtcctggggagckagcagctccccagggtagctagcagctaccgtggtggacaagatcagcacagcccagcacaacccctgcctctgtgagactcagggcctgggagaagagc

SEQ ID NO: 339447 - DNA, 201 bp, Homo sapiens
atgcctatactacattttgttgattcattaatccatcagtggacagttgagtagcttataacttttttttttttttttttttgagacgaagtctcactctsttgccaggttggagtgctgtgccaaacgaggctcaccgcaacctccaattccttggttcaagtgattcacctgcctcagcctcctgagtagctgggatta

SEQ ID NO: 339448 - DNA, 201 bp, Homo sapiens
tactagaaagctgaaaaatcatcccctggcagcaagggttctgaaaatgactagcctgtcagaatcacttatgtaagacttgaacacagagcagaattaaktgggtagagggatggtgtggtccagacatcagcttgctggcctgactggcaggcgagctgtgcccagagctggcatcgctgtggggcccccatggtggcc

SEQ ID NO: 339449 - DNA, 201 bp, Homo sapiens
tgcctgtagtcccagctgcttgggaggctgaggctggagaattgattgagcctgggatgtggatgctacagtgagccgtgatcgtgccactgctttccaasctgggtgacagagtgagactctgtcttgaaataataataatacattcgtatagtaataggatacatgtatacttaattctctgatgtcccaatgctgccg

SEQ ID NO: 339450 - DNA, 201 bp, Homo sapiens
tgagggtgtggagcctggagcaagaagacacttgcttgtgtttagtcttgtcttggccacttcttaggttgtgacctcgggcatactgtgtcaatctttcygagctgggttttctcacctgtaaaatggagagaataacagcaccaattttgcagagttgtgcttaggattacagcagccaatgcgtggaaagcacttagc

SEQ ID NO: 339451 - DNA, 201 bp, Homo sapiens
atgtttggtaagctggtatttattaagccttcaaagtgcttttgtgaggtgttatgcaggggctgggggtgagcttttaatagttgaagcattatgatctraagaggccaggaaaaaaaactaagcttaggtgttagcttttcccaggagagccctttgtaaggacaaagattgttgtcagccatgtgtcattaaaagctg

SEQ ID NO: 339452 - DNA, 201 bp, Homo sapiens
tcagaaggaacaatatgagttgtaaaggaccagggaagtcttcctggatgagaggagtttaaaacttgagccttcagagtttgtttaaaacaaaaatgacygagaatagaatgggtcaggatgtcccaacgtggggagaagccgtgaggtgaggttgagggagcatgttcttctgtgtggcgagggttcctgagaagggcc

SEQ ID NO: 339453 - DNA, 201 bp, Homo sapiens
ttggtaaaaccttacggtggctttatttctacttaccaaatactagaaacaacctatatgtcccttgactgagaagtggataactgtgcagtatacctatkcagtggaatattacttagcaacaaaaaggagcaatacacagaatacagtgctttgctgtgcaaatgcattgtgctacatgaaagaacccagactcaaaaa

SEQ ID NO: 339454 - DNA, 201 bp, Homo sapiens
tttgtaatagttactagcaaatgttatctattatgtgcccgatactgcactaagtcctttacagatgttttatatttaattcccttggagaatttaaaagkcattatccccttttaaagataaaactgaggcacagagagatgaagtaacttagtctaggtcatacagatgtgagaaagctgaaaatctgagcacttaacc

SEQ ID NO: 339455 - DNA, 201 bp, Homo sapiens
agtaaaaagcccatcctcaatagataaaaactattgcaaacaattttaaatccttaataagaaaataatttcaaattgctgtgcattgacagtatttgaargaggtggggatgttataagggatggtttttagaaagaaagagctgagagacatgaattttgcagtgcagagaacatgagctttagattcaagctccagtt

SEQ ID NO: 339456 - DNA, 201 bp, Homo sapiens
gccaaacagaagagactgcaaactatgattctgtttatataacattctagaagaggccaaactgtagtaaaaagaggtagatgaaaggtcagcagggcctrgagtgagggaagggacttgtctgcagcatggaaggagggaactttggggatgatgaaagtgttctgtatcttgattgtggccggggttacctgactctgt

SEQ ID NO: 339457 - DNA, 201 bp, Homo sapiens
agagaatgaaacagatgaggaagtaccaattgtgcagtgtagatgttaattatgactggcttttgtaatagttactagcaaatgttatctattatgtgccmgatactgcactaagtcctttacagatgttttatatttaattcccttggagaatttaaaaggcattatccccttttaaagataaaactgaggcacagagag

SEQ ID NO: 339458 - DNA, 201 bp, Homo sapiens
aaaaagcccatcctcaatagataaaaactattgcaaacaattttaaatccttaataagaaaataatttcaaattgctgtgcattgacagtatttgaaggargtggggatgttataagggatggtttttagaaagaaagagctgagagacatgaattttgcagtgcagagaacatgagctttagattcaagctccagttgaa

SEQ ID NO: 339459 - DNA, 201 bp, Homo sapiens
taaactgttacataaaatgatgaaatatgcgcacagaaaataagggagctttttaaaataaaaactaatttgtatgctttggaaagactcaaaggtgagtktttttttttttaagctaattagatatgggtaagacaactgtgaaaaactggagaattttttttttaaaggcgtgaaggatgtacactcaaattgccttgt

SEQ ID NO: 339460 - DNA, 201 bp, Homo sapiens
aggagagcaaaatagtaactctacttcatgaaaacaaaattggctgtttccaatagagcactcagatcttcaggaaaatgtagcatatttcctaaaggagrttaaaggtgaatgaaacctttgctggtggttccatatattctaccataatcgtaataacaacagcagctcacatttattgggccttttaatgtaccgtcc

SEQ ID NO: 339461 - DNA, 201 bp, Homo sapiens
gtagggcagcatgtatcctgaggtttccaaaagagaaaagatttgttcacaggggtaagttgaggaggcgggagaacagctctcaaatccacctccctgcygataagacttaggaatatttttgggttaggaagtaacaggttcatttgtgcaagcgtatttggggttcttggcacttcatatgacatatatacagaagat

SEQ ID NO: 339462 - DNA, 201 bp, Homo sapiens
agttatgcaatagatgtggagttttcgcagtctgtaattttttttaatggatgtaggatgagtgagaacaaaatcctagtgtgtattccattttaaagtarttaagttggcattagctttcctcttaaaccatttctgaattgaaatttaaagtctttcccccaccctccctgcattttgttacccatcatttgatacttt

SEQ ID NO: 339463 - DNA, 201 bp, Homo sapiens
cctaaaaattcatccataggaaggagatttgctgaactgagaaagtgaacatttcacaagaagtacatatgtctccatgctaagaagtaactccctgggcratcgccgtcatgctgagtgtttccatctccaagccctgctgcagcctgcctccttgtctccacccatgcctggaaaacctaaccctcataaaagtctcag

SEQ ID NO: 339464 - DNA, 201 bp, Homo sapiens
tctggtcctggcactgtggctcaccaggtagtcacgtgaccctactcacctgtgcaaatgcccccacgcttctcagatcccaagctcaagggggcgttgargatcaggtcacccacaagttcccttcctgccctcagcttgcacgtggctcatctgtcaaggaaccacatactgtgtcagattttgttaaagcaaaaaccg

SEQ ID NO: 339465 - DNA, 201 bp, Homo sapiens
aaagggaacaggtcttgaagtgaaacctgcctggcttggaattctgcctctgccacttaccagctttagtccttgttgaagaaattagctggaatcaggasttttctcatgggtgaagtgaggatacctcatggagaagtctatgcaaaagtaaggttctcagcacaatacccggctaataatattacctgcttagagagt

SEQ ID NO: 339466 - DNA, 201 bp, Homo sapiens
cctccctgtcctctgtctcgcagagaactagggaaggatggaaagtgactaaaggtatggaatgcctgaggcatggccaggccaggtactgtggcacataytttcgtatgttgtctcatttaaccctgattcataccttttaggacaggtcatgatattcccatttaactgcgctttaaagaagttgaatgtccactgggt

SEQ ID NO: 339467 - DNA, 201 bp, Homo sapiens
aaaaaaaaagctgaaatgttgatcaggtagcagatttgcaggagacctaggtactcatcactctagcacttcctaaactgtagttaaagaaacattgttcrggatgctaagtgtaacgtgggggaaaaaaatagctctctgtgcaaataaatttgtataattgttaaatgtgattgctttccctctgagtctttaatctga

SEQ ID NO: 339468 - DNA, 201 bp, Homo sapiens
tatgttctttatagttatcactgaaagaaattttgccacatagagaagggggctgcttacaaaaaaaattctcttggtgtgaaacacactggggacatcascaccctcagccatcatcacaagatgcccagccttgacccagtctggaccctcctactgtttctaacctttgagtgcagctcctcccaccccgtgtagttg

SEQ ID NO: 339469 - DNA, 201 bp, Homo sapiens
atcccatctctaccaaataaaaatacaaaaattagccagttgtagtggcgcattcctgtagtcccagctactcatggggatgaggcgggtgctgaggtggraggatcacctgagtcctggggaggctgaggctgcagtaggccgtgattataccactgcattccagcctgggcggcagagtgagaccttgtttcaaaaaaa

SEQ ID NO: 339470 - DNA, 201 bp, Homo sapiens
tgtgatgcaccttggggttcccagaaagggtgtgtatttgagagtgggcacaggggcagctgaagaccctaccctgtgatggcagcatgtggtgatgccgrgagagcttccacaggggtgctgcgggcctctcatcttgccttgggcccatcttaaggatgttttattttgttctgaactttggtggttatcactctcttt

SEQ ID NO: 339471 - DNA, 201 bp, Homo sapiens
tgaaatgttgatcaggtagcagatttgcaggagacctaggtactcatcactctagcacttcctaaactgtagttaaagaaacattgttcgggatgctaagkgtaacgtgggggaaaaaaatagctctctgtgcaaataaatttgtataattgttaaatgtgattgctttccctctgagtctttaatctgataatgtgcatt

SEQ ID NO: 339472 - DNA, 201 bp, Homo sapiens
tgcctcatagtcattttttaatgttacctttacaaattagaattcattgaccattctaacagtgatgtaccagagtaaactgaataatttcacataatgaygatgccgtggtaaggcagaaacatgaacttctctcagtatcactgttttgactgtcagctgtcatgcagtttcaacactacacctatttcaacaaagttt

SEQ ID NO: 339473 - DNA, 201 bp, Homo sapiens
aatcaaagacctaaacataagacctaaaacaataaaactcttagaagaagacataaggggacagtttcatgacattgaatttggcagtgtttacttgaacrccaaaaatataggcaacaacaccaaaaaatagacaaattggacttcatcaaaattcaacatttttgcccttcaaaagattctatcaacagagtgaaaagg

SEQ ID NO: 339474 - DNA, 201 bp, Homo sapiens
tggaggccgaggtgggcagattgcttgaacccaggagtttgagaccagcgtgaacaatatggtgtaaccccatctctacaaaaaatacaaaaaattaaccrggcatggtgccgtgtgcctgtggttccagctactctggaggctcagttgggaggattgcctgaactcaggtggttgaggctgcaagtgagccgtgatcat

SEQ ID NO: 339475 - DNA, 201 bp, Homo sapiens
gatggatgatggtgatgggtacacatcaaggtaaatgtttttaataccactgaactgcacacttgaaaacagttaaaatggtgaattttatgttctgtatrttttaccataccaaaaaggacataaaacatattgagatagtttttgagatttgtagatacatggatctttagatttctcttagggaatgtgtgcacagct

SEQ ID NO: 339476 - DNA, 201 bp, Homo sapiens
tttaaatcacactctcagtgactacatgaaacctaaatctctggaagtctccaggtaagactgggggttttattgggtttagaagtgagcaaaacaactcatgtgcagaaaatcgatgttgtggcagtattatcttaaggtggaagagtccagagttagcagtattaccacagaggagttaaagctaggcctttgaatttc

SEQ ID NO: 339477 - DNA, 201 bp, Homo sapiens
ctttaagacaggtatgtcttcaactctatcaagttggcttttgttttgaagaacaaaagggaatcatggcttggcagtttcagctatgtgtggggactacyttctattacactggtcctgcttttacctctggtgtctaaaatgtaataaatatgtgaactagagctcatagggtagcttcaactctgcttagagtttata

SEQ ID NO: 339478 - DNA, 201 bp, Homo sapiens
ctgtatattttaccataccaaaaaggacataaaacatattgagatagtttttgagatttgtagatacatggatctttagatttctcttagggaatgtgtgyacagctgctcatgtatttggagaattcatgtctagtgtccttcacggtctgaatccagccctcttctctcacttcattttccttgttccagccacctggc

SEQ ID NO: 339479 - DNA, 201 bp, Homo sapiens
ttaaatcacactctcagtgactacatgaaacctaaatctctggaagtctccaggtaagactgggggttttattgggtttagaagtgagcaaaacaactcatgtgcagaaaatcgatgttgtggcagtattatcttaaggtggaagagtccagagttagcagtattaccacagaggagttaaagctaggcctttgaatttca

SEQ ID NO: 339480 - DNA, 201 bp, Homo sapiens
tgattaactcactggccattggtgattcactcagccttcagcccctcccctccctggaggttgaggggtggggctggaagtcccaactctctaatcctgcmtcggtctttcctgtttcaccctgaagctacctagggaaaccaagggggtagggtgacctaggggtcactggtaaccatctcattaacatgcgaaagacat

SEQ ID NO: 339481 - DNA, 201 bp, Homo sapiens
ctgtggtcccagccgcacgagagactgagacaggaggatcacttgaacctgggttgttgaagctgtagtgagccatgttcctcccactacactccagccargtcgcaaaaaagaaggagaggggaggaaaagaaaagaaaggagaaagaaagagagagagagggaaagggaaaagaaaagagagagagagagagaaataaa

SEQ ID NO: 339482 - DNA, 201 bp, Homo sapiens
gtaggccgtgattataccactgcattccagcctgggcggcagagtgagaccttgtttcaaaaaaaaaaaaattaactccaaatgaatcaaagacctaaacrtaagacctaaaacaataaaactcttagaagaagacataaggggacagtttcatgacattgaatttggcagtgtttacttgaacaccaaaaatataggcaa

SEQ ID NO: 339483 - DNA, 201 bp, Homo sapiens
ggctcaggtccaacactgtgtgcagggaccaaccacccagtttggagggccacatgcattttgcagagatacagaacctgcgtttgaattctggctttgcwacctaccggtgaggccttgtgcaggatatttcatatgatcagattgtctcttcatctgtcatagaagaaggctaatattttctttgggggattaaggttc

SEQ ID NO: 339484 - DNA, 201 bp, Homo sapiens
acaatttggagcgattatgttctattgtgccaagaatttcttattaaaaatcaatttaattgtgcataccccatctggtcggtattatggtcttttatggsgggggggggaaacacgattttgtgtttacctgatgttccatagagtaagcatgtagttttgcagaaacagagacattttataacgctgagaaatgagtaa

SEQ ID NO: 339485 - DNA, 201 bp, Homo sapiens
attaagattttatatgtattatatgaaacaattcgtatgttcttatactaattaaatattttttaaaaatattcaatgtataaaaaatgcaatttaaaaaygagtggctgaaagaatagtaaacagcactgtaatcctaaaagcttgtgttaactttacatttcaatttagtcacaaaatacagatggatacattcctgaa

SEQ ID NO: 339486 - DNA, 201 bp, Homo sapiens
tggaagttggaggcacgtatgatgctttctgggctgttatctccaatatccttgctagatgagcagcctcgcatgttgggaaagaatctgtaccagaattyggaatatggggcttgtggccacgtagcaatgaggtcactgaccagctacaatccctggagcaaaccattcacactgcagtcctctgtttcctgctggtga

SEQ ID NO: 339487 - DNA, 201 bp, Homo sapiens
tcatttccatatttataaatttaacattttaaaagataggtgtttctagttcatagatttgctgcaatcaccccctactaaagaacttcagggttttttgtttttttttttgtctgtgctttctattttgttttctgctaccaacaatactgcaaaacaagatgggtttttatataccgctgctttcatttatgagaagtg

SEQ ID NO: 339488 - DNA, 201 bp, Homo sapiens
cttgatcccgggaggtagaggttgcagtaaaccaagattgtgtcctctagccttgccgacagagtgagactttgtctcaaaaaaaaaaaacaaacaaaaamaacaaacaaaaacgaaacaaaacaaaaaaacaaagaggttaggttggataagtaagtgaaggccaaatcataagacctgtgatgaagttggggctgtatt

SEQ ID NO: 339489 - DNA, 201 bp, Homo sapiens
cttttttgaatagagtgtctttttcatgttcatttggcatgtttctcttatatgtagcatatattttggattttatttttttatccatctgaacttttatygtatgttgggctttgtaaatccaagctaagaaactgatcttctttgaatagtgtctttttcatgttcatttgacatgtttatcttatatgtagcatatat

SEQ ID NO: 339490 - DNA, 201 bp, Homo sapiens
agttaaaatgcatgcactggaaaagggaggggaactcagctgcacacacattactttttttctatggccttttctgcatctacccaggacttaattgctaatactgcctccctccatgtgggatgaagtgggagaaggatcacaggaaaatacttccacccgtttgctgtggcagggctagattccaaagtgcccaggact

SEQ ID NO: 339491 - DNA, 201 bp, Homo sapiens
aaccatttggaatcctgcactgctcatgtagttccatttctttacaccttctcgcatgtgtttctattgaattgctttcaaaaagatgattttctaaaagrtatatactgtataaggatatgggatttgaagagctacttttctttttaaactttagtgtgttttcaagatgtatttttgcttaatttctattaattcctt

SEQ ID NO: 339492 - DNA, 201 bp, Homo sapiens
gctccatgcagtcttggccaattcaaattaatccaacagattttattgagtgcctactacagataagatgctgacaggctagagggcagtgttggtcaaartaaggcccacagaccatttgcaggagaataactagggtttatttgaaaaatgcagattcctgagccccaccccagattaacaaagagtatctcagacata

SEQ ID NO: 339493 - DNA, 201 bp, Homo sapiens
gttaaaatgcatgcactggaaaagggaggggaactcagctgcacacacattactttttttctatggccttttctgcatctacccaggacttaattgctaatactgcctccctccatgtgggatgaagtgggagaaggatcacaggaaaatacttccacccgtttgctgtggcagggctagattccaaagtgcccaggactg

SEQ ID NO: 339494 - DNA, 201 bp, Homo sapiens
tttcacagcagcattattgtgaatagccccaaagtagaaataatctaaatgtccatcagctgatgaatgaataaataagatgaagtatatccatacagtgsaatattattgggccataaaaaggaatgaaatattgacacattctacaacatggatgagacttgaaagcattatgctaagtggaagaagccagtcacaaaa

SEQ ID NO: 339495 - DNA, 201 bp, Homo sapiens
tcatatgtgcttgagaagaatgtgtactctgttgttgttggatggaatgttccatatctgtctgttaagtccattaggtttaaagtgttgtttaagtccartgttcccttattaattttctgtcttgatgacctattattgaaagtggagtattgaagtcccttgctgttattatattggaatctatctctcccttaagat

SEQ ID NO: 339496 - DNA, 201 bp, Homo sapiens
tacatggaatcttataacgtgtaaccttttgttagtgacattttctttcagcataattctctggagtttcatccaggttgttgcatgtgtccatagtttcytcctgtttactgctgagtaatattccacccaatgcatgtaccacgcgttgcttgaccattcatccgttgaaggagatctggatttccagtttttgctctt

SEQ ID NO: 339497 - DNA, 201 bp, Homo sapiens
aactctaaataaaatagaaacagaaaaaagccatttaaccagaattcagaccatttacaaaaaccagtagcatgctgcccaaaatggtaaaattctgaaayggtttcatttaaaataagaaattaatcaagatgcctgccatcactatataattcattgttttcatgttttcggcaactgcaaagaagattacaaatattg

SEQ ID NO: 339498 - DNA, 201 bp, Homo sapiens
ccccttcccccaccccaccacagtccccagagtgtgatattccccttcctgtgtccatgtgatctcattgttcaattcccacctatgagtgagaatatgcrgtgtttggttttttgttcttgcgatagtttactgagaatgatgatttccaatttcatccatgtccctacaaaggacatgaactcatcattttttatggct

SEQ ID NO: 339499 - DNA, 201 bp, Homo sapiens
tgggaaaacagtgaacaatttctgtacgtatacacatatgctcacagaaatatggtaatgtaaatatgttcatatatgattgtgtatctagaaaacaaaagaaaaaacagtagataaatactcgaattataagagaatttgataaagtgaccagataaatgataaatatatttttaaaatcaatagcctttttctagccta

SEQ ID NO: 339500 - DNA, 201 bp, Homo sapiens
gagttaacgactgtgaaggcttaaacttatggacacttaccatagtgtttagcaattgtttagaaaccgtaagaacaattactagatcattagcaagcacttttttttggatgggggagaagctgcaaaatatctcctgaaattgctcttagggatgttccctctaattttaaaaagtaaaggggaaaaatgaatttgcat

SEQ ID NO: 339501 - DNA, 201 bp, Homo sapiens
ttctttcaaaaaagcaattaaaattatacattgcataggaaaaatgtttacagtacctacatttttaaaagtcttattgaacaaatggaaaagcatactaytttcttgtatgggaagacttagtatcataaaagattcaactcttctaaaattaatataaatatatatgattccacatagactcaatcccaacaggtgaat

SEQ ID NO: 339502 - DNA, 201 bp, Homo sapiens
tcatgtacaaatagagatagttttacttctttctttcatatttggatgtattttatttctttttcttgccaaactgctttggttagaacttcagtaagttygttgaatagaagtgctgaaagttggcatccttgtcttcttcttgaacatggaaagatggctttcagtcttttaccattaagtatgatgttaactttgggt

SEQ ID NO: 339503 - DNA, 201 bp, Homo sapiens
tcagaaaggcgtggctgtttgattctagtcatctgcctaggagatagttgaagcttgagaaagaacatttgagaagtgctgaaaacatgatccactcaccccaccaccacacacacacacacacacacacacacacacacacacacacacacacgccacaaacccagtgaattcaagacgccttctcaggtgacgggtcca

SEQ ID NO: 339504 - DNA, 201 bp, Homo sapiens
ggaattcttctacctatctctcagtctgcacagtaccatgagggtcttcatcttccaggtgtggaggtggcttatgtcagttagtgctgctgcccactagmaaccctggagcctggaagatgagccttgtaggaaatacctctttctaggtgcacactcaggactacgagaaatgttgaggaaggtgaaggattctcccat

SEQ ID NO: 339505 - DNA, 201 bp, Homo sapiens
agatatatcacatgtagtttattcatcacttggcggatagttaggttgtttttacttcttggctactatgaattatacttctataaacattcatctacaartttttgtgtggacatatgttttcatttctcttgggtatatacctaggagtggaattgctggggtatatggtcactctatggttaaccttctaaaacagaa

SEQ ID NO: 339506 - DNA, 201 bp, Homo sapiens
aacctcgcttatcgatggcattttaatttccttcctcttactacattatgtgttttttatgatagtgctttaaagtccaggcttataaggaaaaggaaacmatctcctatgcaagtccccagggtttcagtgaagcagatggcaggaagggtctgggcatggtgtgtgttgcctgtttcaaaattatgtcccatgcacccc

SEQ ID NO: 339507 - DNA, 201 bp, Homo sapiens
atggtgacagggctaggaattgaccattgctccattaaagtggaccaaagtggaatctgagtccttttcaggccctaggttcagtctgtgctgactctgamcctctgagatgactattcccaaacctgagggaccgaagatcagcatcaaggacaacagacaggggtgctggggtgcagatgtaagtgagctgggtcttct

SEQ ID NO: 339508 - DNA, 201 bp, Homo sapiens
acattaggtaccacaaaatgctgtggccaaccaggaaagtgattttggcaacgttactatttgtgttctcttttgtcaacgccaagggagccgccccatgycagagctgtatttgcattactgaaaagcaaatatctcaggcctttggacaacacgatacactctcacatgccctggagactctgcgtgtgagatgattgg

SEQ ID NO: 339509 - DNA, 201 bp, Homo sapiens
tacttttcagtattactggggatatttgatccatgtgatgggcagataaaatgtctctgtcttagagaaaaaatggactttttaggtagccagcattgcartgtactattgttagcagacatttgagatggcttctaaaaaccgtgcaagtgaaacaccccaggttttgagaaggggggagcaccgtgtcccaggtcacag

SEQ ID NO: 339510 - DNA, 201 bp, Homo sapiens
aggacccacagacatggctttccctggaaccactcctctgttggtggtctcactggtgcctgccgctagcagagagcagcatggttacaggtgaggccccrcacccaggccagctgtgggacctagtttccagctcaagccgtgaaaacttggctgcacctcctgacccatctcagcctcattatcctttcctgtaaagtg

SEQ ID NO: 339511 - DNA, 201 bp, Homo sapiens
tcaaattcaatgcagaaaggcagtctgtgaggcagtaggaaatgcagctgctggaattctgttatcagtatgtgtatcagttctgattgagttgtaaaatrgaagcctgatgtgctggatattaatttagcaatagataagtctgaaaatagacttaccttcaatttcatcataaaagtcaacctcccacctaacacgttg

SEQ ID NO: 339512 - DNA, 201 bp, Homo sapiens
aaatgcaaattaaatctatttttctatgaacatgtgcatattatctctgaaagtagatgtatgccttaaatataaattttccttacaatatggatttctgkgatatcgggaatctatgttttataaaggaacaactgctgcagtccctgtggctcatgattccttagcagctgtgtccagctggtggtccacattcccgct

SEQ ID NO: 339513 - DNA, 201 bp, Homo sapiens
acaacagacacaggggcctctgaaatgggagagggagaggccgcaggttagaaaaactacctgttaggtacttgtgttcactatttgggtgacatgatcartggaagcccaaacctcagcatctcgcagtatacccacgtaacaaacctgtacatgtaccccctgaatctgaaataaaacaaagaataaaaatgaagtgtc

SEQ ID NO: 339514 - DNA, 201 bp, Homo sapiens
gaatctgaaataaaacaaagaataaaaatgaagtgtcttatctaaaatgaaaatctatattgctttgccctttcaaacttaacatgtccaaaagagagctrttgattctttcatctcaacactcgttcttcctgctttgtcttcccctgccctgtcctttcccctccctttgtgatccacccctgctgagcttcccacctt

SEQ ID NO: 339515 - DNA, 201 bp, Homo sapiens
tacaggcatgagccactgcacctgccctgtgtgtggatttttattccaacttctgtttcctcagctgcttcttctacagatgccagataacatggcagggycagctcagtttcccatcttaattttctgcctcgcttggcggggatgttcttggattcccttcctattttccctgatggttttggctatgcaggatagcct

SEQ ID NO: 339516 - DNA, 201 bp, Homo sapiens
agttaagaaagtaaatgattcttgtgactaattaacaactattttcactagtcagtggtttctgtttctttgctttttagaaaatttagaaaacgacctartcacgatgtcagcagatagaagatttcaaataactttgcaatacagcaccatattatttttggcatacggttcagaagaaatctaaagtattgatggctc

SEQ ID NO: 339517 - DNA, 201 bp, Homo sapiens
tttcaaataactttgcaatacagcaccatattatttttggcatacggttcagaagaaatctaaagtattgatggctcttgctgtaatgaagctttacattmtttttaatgtgtgaactattaatagatttctcaggactgagatctatagaaatgagtaataggaatagaaattaaaacaaaattaagtaagatttccatt

SEQ ID NO: 339518 - DNA, 201 bp, Homo sapiens
gggcatagaattcaagatttgacagctttgattttcttattgctttcttcacaaaattttagtctgagactaagagagcatgtttttactaggtttaaatwtgcgttattattttatgtaattataaccattttaatggttttgcccattaatgggcttttctaagagccttgcatctttcccttcccagcttgttgacaa

SEQ ID NO: 339519 - DNA, 201 bp, Homo sapiens
gcgattatgttctattgtgccaagaatttcttattaaaaatcaatttaattgtgcataccccatctggtcggtattatggtcttttatggggggggggggraacacgattttgtgtttacctgatgttccatagagtaagcatgtagttttgcagaaacagagacattttataacgctgagaaatgagtaattaaagaaaa

SEQ ID NO: 339520 - DNA, 201 bp, Homo sapiens
tgtgtctaaatgtttctcaaattcattgacagatgatgttttataggaatcttcattcacaaggctaaggaaaattgacctaaatcaaatgaagatgcctycatgcctgttacaaacattaaaactatcatagttcctggaaaagaattagacacacttacatagggcatagaattcaagatttgacagctttgattttct

SEQ ID NO: 339521 - DNA, 201 bp, Homo sapiens
gaaatttctgtgtgttataggtttctcttggatgattctgcattttttttcttttcagttcaccttgaaacttacttgatcagtgtctgccaagttgattrtcatttatattttctatactgccctgctgtcttccctgattgattcctgaaaaaaaggagggaaaaagcatattgcccttcagctttaatttgcctgctg

SEQ ID NO: 339522 - DNA, 201 bp, Homo sapiens
tcccaggcttattaggaagaggaaattcccacctaataaattttggtcagaccggttgatctcaaaaccctgtctcctgataagatgttatcaatgacaayggtggccaaaacttcattagcaattttaattttgcctcggtcctgtggtcctgtgatctcgccctgcctccacttgccttgtgatagtctattaccttgt

SEQ ID NO: 339523 - DNA, 201 bp, Homo sapiens
aacaactgtctcagaaccgtttgattgcctttctttgtcagaatttgttagtgctgttcttaagtatgtgccaatctttaactgaggatattttttcaatstagaatttgctgctacttggagccacagccatagaagatcgccttcaagcaggagttccagaaaccatcgcaacactgttgaaggcagaaattaaaatat

SEQ ID NO: 339524 - DNA, 201 bp, Homo sapiens
tttgtagatacatggatctttagatttctcttagggaatgtgtgcacagctgctcatgtatttggagaattcatgtctagtgtccttcacggtctgaatcyagccctcttctctcacttcattttccttgttccagccacctggcagctcacacctgctaggcttttgtacaagttgttctctctactttcagtgcccctt

SEQ ID NO: 339525 - DNA, 201 bp, Homo sapiens
ccctagtcaagacgactacagcatagagaggaggtaggggctggaaaagggaacaaatacttgagagaggatctgatcactaacacctggcggaggggggkactttttctcagggcagggttggaggtaggagagttttgtgatgagatttgcctgtaaagaagattaagactgctctgtagagaaacacataggatctgg

SEQ ID NO: 339526 - DNA, 201 bp, Homo sapiens
ctgtggaggctggttagatgttgtacatgctaagctttctcgcactaacttattctaatgatatttaaactttgccgttgctactccacattgcctacttygattttgttgttgttgttattcttttcagtttatcctaaggctttagctcactttcaatttattggtttccttcaagtgtgggagctgggtttcagcttt

SEQ ID NO: 339527 - DNA, 201 bp, Homo sapiens
tttaaggggcatcctgtttttccgtttttctcttttgaagcttggatttatagtaataaaaacttaggttgtgtctatcctggggaatgccagtcctcggytatggaaaatacatgatgatgttttttttccgtgggggaccaggtgtttttcttttccccagtagaataaccatgagataaaatgggtccccaaagcaaa

SEQ ID NO: 339528 - DNA, 201 bp, Homo sapiens
gttctcttttcttgtgtcttaatgaaccgttagctctgaatcattttctttgctttaagaagcacttaattttcatggtctttctgaaagctctagccacyctcagctaaacattaatgatagcttaagaaatatcaggtcaaaaacagcatcagcgactttctgggtttgcttaagattaggcttaatgagattaactca

SEQ ID NO: 339529 - DNA, 201 bp, Homo sapiens
ttcaactcgtacattttgtggaatagtgagactcatttgcaagaagtaacacactgtgtttctggatgacattctcatctgaatgcaaagcacaatgagcraagttaagacagtaccgacttcctggcttctgctgcacctgtgactgttgtcgcctgcaccccagggtcccccatccgtgtgcatttccttcctagaagg

SEQ ID NO: 339530 - DNA, 201 bp, Homo sapiens
tttctggcctctggctctgcgtgcatgcacatatgagcacatgctcacacacacgcatgggtgtggctgcctgaaagcctggatctttcatgggatagcaygtggggcctttccttgctgtcttgaaacacacttcccacctcctctgcttgctgaaacctgtttactgcacatggatcatgcacagctcccgaacctctc

SEQ ID NO: 339531 - DNA, 201 bp, Homo sapiens
tgtatatgacttactagtgtgaaagtctgattttataatgtgtcagagagccatcgtttacctgtctcatgaataaataaaataaaagctaagtacgtttstataaatatttaaaaatacactgccttctcatacttttcccatttcacctatggaaaccttgccaaaatgaaatcaaatttgagcgtttcaatgtaaggg

SEQ ID NO: 339532 - DNA, 201 bp, Homo sapiens
atttaatatcagttttctttcaactttgttaatatttgtatttatagaaattagtttcaaatttgtccctcatttctaagtttaatgtcttacaggagtcmtgtttcacatagagcaaaataatggttttcatgttttcttccaatgctttcagagttttgttttttgtgcttaaatattcaaggcatctgaaattcattt

SEQ ID NO: 339533 - DNA, 201 bp, Homo sapiens
agtattggcaatgatttagagaacttggtatcctcatgcattactgatggggatgaaaaacgatggagctgctttggaaaacagtaaaaatgatggagctrctttggaaaacagtttggtagttcttcaaaaggttcaatgtaaagttaccatatgacctagccgttctactcctgggtaatctgcccgagagaaatgaaa

SEQ ID NO: 339534 - DNA, 201 bp, Homo sapiens
actcctgtcctcaggtgatccgccaacctcggcttcccagagtgctgggattacaggcatgagccaccacgcccggtctctgacagtgttttatcccttgycatgtacactaattatatcctggcacttggctctgtagttgtttttatatcagtcttgcctaatcggttagaatcatagactacttgaaggcatgaataa

SEQ ID NO: 339535 - DNA, 201 bp, Homo sapiens
ttccaatcaccattagtaatactctttcctttttgaaataatagctcgaaatataaatatctttattttatttgctatttaaagagctgccaagtatttgygttaggtgagatggtgcatatgatctgtagcagtttgctgtagctttcgggaggctatttgaaggaatagcttaagctatgaggcaaggcccatcagaat

SEQ ID NO: 339536 - DNA, 201 bp, Homo sapiens
aatcacattcagttctcagtggtccacgacaattgttaagaggtcttcatttgctgcgaaactttgcccagagttagcagaaagatggacagaagctagcrtttaaatgtctacttttgctggccgctatgtcacacaccctggctatagcagcttagtgaatcttcataacctattgaagcaggccaggagactggaata

SEQ ID NO: 339537 - DNA, 201 bp, Homo sapiens
gttgaataaaagtggtgaaaatggtcatccttgccttgttcccaatatttgggagaaatcattcaactttttatcataaagtgtggtgctagctgcaggtktttttgtagatgctctttgtcaagttgggggagttcttttcttaatttgctaagagattttttgtttgtttttaactcatgaatgggtgttgaattttgt

SEQ ID NO: 339538 - DNA, 201 bp, Homo sapiens
cacaaggaatcacattcagttctcagtggtccacgacaattgttaagaggtcttcatttgctgcgaaactttgcccagagttagcagaaagatggacagargctagcgtttaaatgtctacttttgctggccgctatgtcacacaccctggctatagcagcttagtgaatcttcataacctattgaagcaggccaggagac

SEQ ID NO: 339539 - DNA, 201 bp, Homo sapiens
catgtaacctgaattcttaaaaaattacaatgtttcatctctataaatccacaaacactgctcacaatatcttctggaatttggagtgagcttttctctcyggaagagaatagggacaatgtccatattctggcattttaaaagaataatacagaggaatttaccttggccactattggaaaacctactgtgtcctgagct

SEQ ID NO: 339540 - DNA, 201 bp, Homo sapiens
ctttcctagccaagggaagctgtaacagatggcacctggaaaattgggtcactcccattctaatactgcacttttccaatggtcttagcaaatggcacacwaggagattatatcccatgcctggctcagagggtcccacgcccacagagcctcactcattgctagcacagcagtctgagatcgaattgcaagatggcagca

SEQ ID NO: 339541 - DNA, 201 bp, Homo sapiens
tttgctgcctgtgctttcagagttatattcaaaaaattactgtccagaccagtgtcatagacctttcccctatcttcctccagcagttttagtttcaactygtatatataagtctttaattcattttgagttgtttttgtatatggtgtgagataagggtcaagtttcattcttctgcatgtgaatatccagtttgccacc

SEQ ID NO: 339542 - DNA, 201 bp, Homo sapiens
gtgaatatccagtttgccaccaccatttattaaagatgctgctttttcttcattgtgtgttattagcacctttgttgaaaatcagttgaccataaatgtaygggtttatttctggcagtctagcctgttccgttggtcaatgcatctgtttttatgccagtaccatgccattttatttgcaatagctttataacatatttt

SEQ ID NO: 339543 - DNA, 201 bp, Homo sapiens
agttgtgataggttgtaagtgtctaggaacttaacatttcttctagattatccaatttgttgccatatgattgtttgtagtaatatctaatgaccctttaygtttctgtggtatctgttatagtgtctcaactttcaattctcactttatttgcgtctctcctttttttcctagtcagtctagctaggagtttgtagatct

SEQ ID NO: 339544 - DNA, 201 bp, Homo sapiens
gaaactctgaaggcaggaggaggaggacaggggtgcttatctcattagtcttgcacttcccacccactttggggcttcatcaaaacctactggcccagatrttgctgtgaagactttcctctgccagattcagcctcctgggtctggcttgtagcatttaacagcatctgtgctagattatctaaaatcctgggcacctgg

SEQ ID NO: 339545 - DNA, 201 bp, Homo sapiens
ggacaggtaagtactcctgattgggagtgtgtcttctgtgtcttgtgacagcaatgtttctccatgggcgggtgagcaggcactgtgtgtcttacagccaygatgagcttcaggagaggctggtccttcctgcttccatcagaatctatcaggagataaaccaaaccaaagcacctggaagaggtcatccagtccacagaa

SEQ ID NO: 339546 - DNA, 201 bp, Homo sapiens
atcccagcactttgggaggccgaggtgggtggattgcttgaactcaggagtttgagaccagcctgggcaacatgatggaaccccgtctctacaaaaaatasaaaaattaggctagtgtggtggcaggcgcctgtaatcccagctcctcgggagcctgaggtgggaggatggcctgagtctgggagggcaacagagccagac

SEQ ID NO: 339547 - DNA, 201 bp, Homo sapiens; identical to SEQ ID NO: 71394

SEQ ID NO: 339548 - DNA, 201 bp, Homo sapiens
ggcgcgagactctgtctcaaaaaaaagaaaagaaaaaaaattttaccgtctctctgggttacattatatataccaaggtttcaattccagctgaaaactarcagcttccaaatatatatctttagcacaacactttatagttgctaacaactcagtttcctttgaaagtggagacagatctttttcatcttttgtatctct

SEQ ID NO: 339549 - DNA, 201 bp, Homo sapiens
ctgtagctttcgggaggctatttgaaggaatagcttaagctatgaggcaaggcccatcagaatgtcatctttcattctttctctttgctctgtggtcaccygcccccttccaccctctgcctttttactgtgttagatcagcgtcgcttctgttttccagcataaaacccctgacctcaagtgaagaaatactggtttaac

SEQ ID NO: 339550 - DNA, 201 bp, Homo sapiens
ggtttattgactgagccactcaacaaccatttcgtaatatctatgatggggatacgttgatctttaagggtcctttcaactgtaaaacagcgttgatgacrttttctgaagacaaacaaacactcaaaagccttacttcttaacaggcctgttgaagattttctttttcccatctttgccatcacaggctttctttacact

SEQ ID NO: 339551 - DNA, 201 bp, Homo sapiens
tctgtgatggaccaagcatgaaatgatacagccaactctacgaggaaataggaaataggaccttgaaggttcttttcagagttaaactgtcctgttggatygcttgttcattttaagactttgacttattttagatatttttttcagataaaagttcggtgatgacaaatgaactctacagtctggcatctaccctagcag

SEQ ID NO: 339552 - DNA, 201 bp, Homo sapiens
aagtgaaatattctaacatggttaattaagaattgaggacattatgcaaagtgaataagccagtcacaaaaggcaaatactctatggttctgcttgtatayagtgagtactcgtagagacaggaagtgccatggcagttgccggggctgggggaggggaaatgaagagctgctgtttaatagacagagttgcagttttgcc

SEQ ID NO: 339553 - DNA, 201 bp, Homo sapiens
ccataaatgagagaacttgccagaaagcctgaggccacggaaacattccacacactgtgttttccttcccaagtcttggttatttcctctttgttctttgkctatactcctcaagcaaacctctttcttgaaatattacacttctcccaactctctctgcagttttttttctagcaccagtctatatttgcctgcatgatg

SEQ ID NO: 339554 - DNA, 201 bp, Homo sapiens
ttgtgtctggctcatttcactgactgtgttttctaggttcattatgttgtagcaggtgtgcaatttccattcctttttcaagctgaataatgctccgtctygtattggcctattttgcctgtcccgtcatctgctgcgggatggtggtagtgttcgcgcctgtggcttttgtgaagaataccgcagtgaaaagggatgcac

SEQ ID NO: 339555 - DNA, 201 bp, Homo sapiens
ataaatataccaaagctcagtagctgggtcgctgggctcattagctcaggagctggagccctagtgggccagtccagcaggggcgggagcaataagtgaawcatggccaattttggaaacctccaggcacagggggagaagtcctggcttctcccttcttctctaacctcttgccagcgcttcccactgggaggacccagt

SEQ ID NO: 339556 - DNA, 201 bp, Homo sapiens
ttccctgcatcctgctgtgcctcccgctccttctccttgccactctctcctgtgtgattgttttgtgtttgatttgcctcctacccagtcttcattcattyaccttcttccctttcctgtagctcacatgcatggtttgtcctgatacgagcacacaaacactagctggatattgccctccgtgctgcacggcgggtccct

SEQ ID NO: 339557 - DNA, 201 bp, Homo sapiens
ctctggtgtcatcccccacccccctcgactgacgagtgcagaaccttgtttgacaggcatgctggataagcagtgggctgtgatggtgggtgctctgcccrtcgtgaggctgagagcactgaacagtctgcaatacctgaaccaaatggaagtaaattagaagcagcttgagctgggggaagaatcttgaagcccgtggcc

SEQ ID NO: 339558 - DNA, 201 bp, Homo sapiens
tgcccgtcgtgaggctgagagcactgaacagtctgcaatacctgaaccaaatggaagtaaattagaagcagcttgagctgggggaagaatcttgaagcccrtggccaacgttgaaaagagccttcatcagagtgtgaagtggcatccaagacagggaaaagccagggccaggtgcggtggctcacacctataatcccagca

SEQ ID NO: 339559 - DNA, 201 bp, Homo sapiens
gtttatgtggtgtatcacatttattaacttccatatgtaaaatcatccctgcgttcctggtatgaaacccacttgatcaaggtgtgttaactttttgataygctgttggatttggttagctagcattttgttaaggatgtttgcatctatgttcatcagggatattgttctgtagttttctctttttgttatgtcctttcc

SEQ ID NO: 339560 - DNA, 201 bp, Homo sapiens
atctgtggtttaagtcacccggtctatggtgttttgttgtggcagcccaaggggacgcagatgatgcttttcaagactgtgcagcccctcctggaagcttyagctccttggccttgcaagaaacacttgctggtcactgtctttggtcctttcagaggcccttcctcagcggtgcctccaccaggctcctgacttcatccc

SEQ ID NO: 339561 - DNA, 201 bp, Homo sapiens
catgttctggaagatctgggctttaattttgttgtgattagtgtatttcagagagtgaacatgtttggaagagtattgaaaatactctcctgggttgtgcyggtgttcatgggttggacaagctcacctttgacaggcaggcttggatgctgctgatggagttacagagagggctttgcatgtgaaaaaatgacattttaa

SEQ ID NO: 339562 - DNA, 201 bp, Homo sapiens
cttcttttctagtttcttcatgtgagaacttggaattctttaattttttttaatatatagattaactgctatgaatttccctcacagcactgttttaaccrtgtaccacaaattgtaatgtattttctttttcatttaattcagtaattttttatttgtcttaaggctttttcttaatcctttattatttggaagtgtgtt

SEQ ID NO: 339563 - DNA, 201 bp, Homo sapiens
agttattagcctcatgaccttaaagaaatcatttcacttctctgcacttcattttcctcacctacaggactgggacgctaccttcctacctcctcacgtgatatataaacagggctgacctgctgcatctacactgcctggtactattactgtttgatcaatagccatttctcttgtcagttaagtagttggggcacccac

SEQ ID NO: 339564 - DNA, 201 bp, Homo sapiens
gttattagcctcatgaccttaaagaaatcatttcacttctctgcacttcattttcctcacctacaggactgggacgctaccttcctacctcctcacgtgatatataaacagggctgacctgctgcatctacactgcctggtactattactgtttgatcaatagccatttctcttgtcagttaagtagttggggcacccacc

SEQ ID NO: 339565 - DNA, 201 bp, Homo sapiens
ggtccttgtccattatgactggtcagtgcctactgtcctccagattgaaaagtgcttttttttgagacagagttttgctcttgttgccctggccggagtgyaatgatgcaatctcggctcactacaacctccacctcccaggttcaagtgattctcctgcctcatcctcccaagtagctgggattacaggcgccaaccacc

SEQ ID NO: 339566 - DNA, 201 bp, Homo sapiens
ttttgaatcctgggtactcctaggttgagcagggctgcacttccaccgtctttcagggttcaccagatgaaactctgaggatcctctatgaatcagcagayacacaacatctcctgagattataaggtggtactgtctgtggtgattacttaattttaatttataaactgggaatgcaaaggccatgctgaccttgctaag

SEQ ID NO: 339567 - DNA, 201 bp, Homo sapiens
tcactgcaacctatacttcccagttcaagtgattcttctgcctcagcctcccaagtagctgggactacaggcacctgccacaatgcccggctaattttttktgtgtgtgtgtgtatgtatgtgtatatatatatattagtagagatgatgtttcaccaagttggccaggctggtcttaaactcctgacctcaggtgatcca

SEQ ID NO: 339568 - DNA, 201 bp, Homo sapiens
cctttaatttggtagagattcagaggaagattgacagtctgcgtcttctgtgatgagggtgccttttactcctccagcttagccgggaagctgccctcttscgtgggagaagttgtgctctgctcacccctctgagcttttcctcactttcccagcgaggagactctagaagttactctcagagtcacagtctgtttgcca

SEQ ID NO: 339569 - DNA, 201 bp, Homo sapiens
atatggtaatgtaaatatgttcatatatgattgtgtatctagaaaacaaaagaaaaaacagtagataaatactcgaattataagagaatttgataaagtgwccagataaatgataaatatatttttaaaatcaatagcctttttctagcctagcaataaacagcttttttttttctctagcagtggacacctagaaatgca

SEQ ID NO: 339570 - DNA, 201 bp, Homo sapiens
tgctgaaaatttggagaacaacatggagagatagagtgaagaaaacagaaggggaatgttctggagtgttctgtagccttcatagctaactgctcttgtcrtcctaaggctccttgtacgtcagtctctttgaaagcaaagtgagaggcttttgccattgccatcaaggtgccctctacaaccatgtttgtatttatctca

SEQ ID NO: 339571 - DNA, 201 bp, Homo sapiens
gatgagcttaacatctaaatagggagactgaggacagcagattgccctccctaatgtgggtgggcctcatcccatcagctgagggcctgaagagagcagargactgaccctcctgtgagtaaaagtcctcctgcctagctgccttcaaactggtacatcagccttttttccctgccttcagactggaactgaaacatcagc

SEQ ID NO: 339572 - DNA, 201 bp, Homo sapiens
ctgtgagtaaaagtcctcctgcctagctgccttcaaactggtacatcagccttttttccctgccttcagactggaactgaaacatcagcttttcctgggtstccagcttacagaccccctctgcagatcttgggacctgcccacctttctaattgcgtgaatcaattccttataatgaatctcttcatgtgctcacacata

SEQ ID NO: 339573 - DNA, 201 bp, Homo sapiens
aaagattaagcttacttgactgctccctcttctattttttaagtcaatacagatcggatttccagggggttacaatgagtaggacagcgccatggtcagasgcagcctgtcagtgtttccaagtaaataacctgttcgcatccactttttctcatacaaaaaagactaagttcgtgagaaacaggaaagagaaaattgaat

SEQ ID NO: 339574 - DNA, 201 bp, Homo sapiens
cagcaccttcctgacacgagactgtggctcaccatactttacaggcctgggatactcactgccccaacagccagacatgcggtgatctttggctgttttcstgctgttgtgtggctgttttgtgctgttgtgtcgctgtttcattctgaaactcttgggcctctaggatcctgtgcacattataggcctttcctgcctaag

SEQ ID NO: 339575 - DNA, 201 bp, Homo sapiens
agcaccttcctgacacgagactgtggctcaccatactttacaggcctgggatactcactgccccaacagccagacatgcggtgatctttggctgttttcgkgctgttgtgtggctgttttgtgctgttgtgtcgctgtttcattctgaaactcttgggcctctaggatcctgtgcacattataggcctttcctgcctaaga

SEQ ID NO: 339576 - DNA, 201 bp, Homo sapiens
caccttcctgacacgagactgtggctcaccatactttacaggcctgggatactcactgccccaacagccagacatgcggtgatctttggctgttttcgtgytgttgtgtggctgttttgtgctgttgtgtcgctgtttcattctgaaactcttgggcctctaggatcctgtgcacattataggcctttcctgcctaagagt

SEQ ID NO: 339577 - DNA, 201 bp, Homo sapiens
tatattttaatttttcatgatagatattaggcttgagttgcaggtaatatgagacctttagtggaggttaagcctaaggatttcataaaattttgaatgtyaccataaacaagattcaaactaactttagatgaatcatcctcagtcaaaagatgggaaagtaggtgttagcatcagccttagaaatggggtatgtcattc

SEQ ID NO: 339578 - DNA, 201 bp, Homo sapiens
gtggcattttattttttttgctttgtctttctactttctttctttctttttttttttttttttgaacagcccaatgtaactccattggttgtgtttggaaraatgaaagaaaaggctaattattgtcctttgcttttcttgctctgaaaacagcttccattctccacaattaatggagaaatataagaagacagttctata

SEQ ID NO: 339579 - DNA, 201 bp, Homo sapiens
cttctcctttcctttgattgcctcatgggaactactctctctttcaccagcgtgctccttttacccccattttttgcctccataccacagtttgtcctctrcatacccctttgtcttggagggctcgttccaggtgctaagaggcagtgctttccttttagagcttccaatctatggatctggttatttgtttgcccgttt

SEQ ID NO: 339580 - DNA, 201 bp, Homo sapiens
cacgtttggcgaaacgtgaaaggatgtggatcctgccctcagtcctcgggagcgtgaagggctgtggctcctgccctcagtcctcgagtggcgctggcagktgggctctcctttgctgacttcccgtgcctgtcacagcagcttccaggggctggactcctctgctcttcatgccgaacttgactccgccttctgctcacc

SEQ ID NO: 339581 - DNA, 201 bp, Homo sapiens
ctccagtgttaggtgcatatatatttaggattgtgatattttcctgttggacaatcccttttatcattatataatgttcctctttgtctttttacactgcrattgctttaaagtttgtttggtctgatgtaagaatagctacttctgcatgcttttggtgtctgtttttttctacccctttaccttaagttcatgtgagtc

SEQ ID NO: 339582 - DNA, 201 bp, Homo sapiens
acaggtcccactgacgaggacttcatggagggctggctgttcttcttcctccacctcctagcatagctgtcacccaggttctggtcacaagcctttgcccrccgtgtgctcctttcctctgtgatcacatgcatctccatgggttcacccctcagcaggtgcaggcggccctccccacagaggactagcctggcctctgag

SEQ ID NO: 339583 - DNA, 201 bp, Homo sapiens
ccagcactttgggaggccaaggcgggcaggtcacgaggtcaggagatggagaccatccatcctggctaacacagtgaaatcccgtctctactaaaaatacaaaaaaaaaaattagccgggtgtggtggcgggcacctgtagtcccagctactcaggaggctgaggcaggagaatggcgtgaacccgagaggcggagcttgc

SEQ ID NO: 339584 - DNA, 201 bp, Homo sapiens
gcaggcggccctccccacagaggactagcctggcctctgagagaggctgagagcttgggctctagggccttgttggatgctggctctgccacgatcctggmcaagctccgtgacccatcgtgcctgagtgacctcacctgtgagaggagaatcaacagcaacgtgggttgtcaggagggtgagctgagctgattcacagag

SEQ ID NO: 339585 - DNA, 201 bp, Homo sapiens
agcagttctccttctagatgaaaaaagggaagcagagcaagtaaatggagtgtctggcaagtgccaggcactatactaggagtgttttctgaaaactcttyttttaatatttacatatgaacattcttatagctcgaggaggaaattctacatttcccagggctataccctacttaatgaccaaactggtactaggtctca

SEQ ID NO: 339586 - DNA, 201 bp, Homo sapiens
atggcctaaacccaagcacactgttctcctgcaggaagcacctctgtaggaggcagcgtgtctggccgtcttctggctgcaatgctcttcttacctgcgcygaaatggatcctcaatgaaccccacacaggcgtctcttccagaacccgtgtgactctgctctgccctagaagtatctcctcacccgtcccatcctgacca

SEQ ID NO: 339587 - DNA, 201 bp, Homo sapiens
gttttcatgcatgtattctgcgtgcataaacctatagaaaatattaacaatacacagtgctaatcatgcagggttttgaaactttaaatagattgtattayatgtactcttcctcaacactgggtttaaaaaaaaacaactgtttttgaagtttatcatagtgatataattgtagcacattccttttaatgctgttttcca

SEQ ID NO: 339588 - DNA, 201 bp, Homo sapiens
tagaaaatattaacaatacacagtgctaatcatgcagggttttgaaactttaaatagattgtattatatgtactcttcctcaacactgggtttaaaaaaawacaactgtttttgaagtttatcatagtgatataattgtagcacattccttttaatgctgttttccattatataaatttgccaaattttttttattctccc

SEQ ID NO: 339589 - DNA, 201 bp, Homo sapiens
ctcaacactgggtttaaaaaaaaacaactgtttttgaagtttatcatagtgatataattgtagcacattccttttaatgctgttttccattatataaattkgccaaattttttttattctcccattgataaacatttgagtttcctttttttccctacagttgccagaaatgccatagtgaacactcctgaacatatctat

SEQ ID NO: 339590 - DNA, 201 bp, Homo sapiens
ctctgagagtcagccaaaacgtgtcccaaggtggtcgtcagtgtttacgaagggatgtgttgtgagacaggtgagctgtcacgtggaagaagtgaagaggraggggcatctggtcgcagtttcagatgattggctaaggtgataaaggaatgagttgtccatttctcattttccagagctgatttctgcttactccttaga

SEQ ID NO: 339591 - DNA, 201 bp, Homo sapiens
tgagccatttgatccctgccttcatccctattaactgataatttatctattcattagggggctctgtgaggtgggttctgactgatgttggaggggatgcrctataattcctgcctctgcatttaagtgtatgagtgtttcaccagggatgtccaaactgtcccactttgggtaaaggacaaaaagcaggccaaacaagat

SEQ ID NO: 339592 - DNA, 201 bp, Homo sapiens
ggggctggaaggcagctataatctcgctcacgtggtttcacccgctccatgtgcgctggatgccgacagcacgaggggaagcctctgagagcgcggcttcrtggggcagagcatctcccaggcccactccatggaaatctcttccaagtggcagcccagagcctcttcgtgccatctgatagctgttccatagcgtatagg

SEQ ID NO: 339593 - DNA, 201 bp, Homo sapiens
taatgtttgttaaaccccatgcggcatgctgggcaaagacacttgctcacttaaccattggaagatggctcttgtttgtactgtcatttttagaagctcaytgaatattatgaattctaaagagatgtctgttttgcagcttaaaaattagccacaaatcccaagcgtctactcactgatggaggggcgctataaatgaag

SEQ ID NO: 339594 - DNA, 201 bp, Homo sapiens
atccccagcacagcatcttaattaaaggaaagagtaaggaaaagcagagagtaaagtggctgtgagtgcagtaaagaagcagaactggggaaaggagagcragggaggaaacagtgattgataacgggaggacgaggagcctgactgtgatggggaaggccaggtggagccatgaaacctggaaggagaagctttaaaaat

SEQ ID NO: 339595 - DNA, 201 bp, Homo sapiens
agtgatcttgccaaatgtaagtctgatgtcattgttccctggcttcctgttgccctcaggataaagcctggggacatttacctggcccctgaggccctgcraggcttaccactgctccctttatgctctccctcacctcatccacactggtggcttcccacttcctggtgtgaggagcgagctcctacagggcgtttgtgc

SEQ ID NO: 339596 - DNA, 201 bp, Homo sapiens
atcagcctcccaaagtgctgggattacaggcgtgagccaccgcacccagcctttaccccataagtatctcttaaatatatctgtttccacccagtttcatmccatccagttagtttgcgcagcatcatttcttgcgtggacaattgcagtagtctcatgactagttcttagcatctgatctgcctggacccattcctctac

SEQ ID NO: 339597 - DNA, 201 bp, Homo sapiens
acgtatttcaagtactcagtagcatctggccagtggctgctgtgttggacagcacagctcttgaccaacgcagatctggaaatgcagattcactccccaamgctaaatttagtgcaggcaagatcaagaggtaggaaactcagcctcagcccagatcctccaggttcctcccacacacttggggtgtgcactgcctgactt

SEQ ID NO: 339598 - DNA, 201 bp, Homo sapiens
ttttaacggaaaagaaaatgccagactaaagtaaaaaatgtatgtgtgtacctcatctgctacatttatttccatgtaataatttctattttatactctcragattaaaattccagtccttttattcttttttctttttctttttttttgttttgttttttgtttttgagatatgatgtcatggagtctgtgcacgatcat

SEQ ID NO: 339599 - DNA, 201 bp, Homo sapiens
gacccaaactggtcagccgggtcctctgcctcactgaccatggcagttgattcaggaatgcacatggtgccccaggctggagtatcacctagagacagttyaaggattttttacagaaactaattgggggatggagctcttttgctgctgggtctcttataggaggacggtgtcagcctggagcggctaggacaccctgca

SEQ ID NO: 339600 - DNA, 201 bp, Homo sapiens
attatataattagttatggaagaaggtttgtaagtggtctaaacattaaaatattaatatattttttgttactaatttgcttgctttagggaaatctaccygtttcatacaggttttgaaaaatatagaaggaaagacttcatttgttgatctttgcatctcaatacttcctgatgtatatttcttttattctttggttta

SEQ ID NO: 339601 - DNA, 201 bp, Homo sapiens
attagttatggaagaaggtttgtaagtggtctaaacattaaaatattaatatattttttgttactaatttgcttgctttagggaaatctacctgtttcatmcaggttttgaaaaatatagaaggaaagacttcatttgttgatctttgcatctcaatacttcctgatgtatatttcttttattctttggtttaggtgaaat

SEQ ID NO: 339602 - DNA, 201 bp, Homo sapiens
cacatcattcagtcagagctcttattgcaactccctctgcatatttcggtacactttgattatataattagttatggaagaaggtttgtaagtggtctaarcattaaaatattaatatattttttgttactaatttgcttgctttagggaaatctacctgtttcatacaggttttgaaaaatatagaaggaaagacttcat

SEQ ID NO: 339603 - DNA, 201 bp, Homo sapiens
gattttgactcttttcctgtaaacttcactgctttttggtttaattgtcataaaatgccaagcaccaccaacagggctatgggaaggggcccagaggcagragggctgtggttaggcatggctttggccagatggggaagctgggtgcttgggatcagggtaagcgggtggggatgctgtgagtatagacgctgggcaggg

SEQ ID NO: 339604 - DNA, 201 bp, Homo sapiens
tctgtaagccacgaagagtcatcaaaagcctcacttgtgagaactagttattgaatgagatcctgtgagtagagaatttatcaagatctcggcagcatgaycacgcagaaacaaacagaaacaaaggaatgtgtcaccaggattcctctctcatgcagggctgtgttaggacacacatacttcatttgagattgtttggaa

SEQ ID NO: 339605 - DNA, 201 bp, Homo sapiens
accttcctgacacgagactgtggctcaccatactttacaggcctgggatactcactgccccaacagccagacatgcggtgatctttggctgttttcgtgckgttgtgtggctgttttgtgctgttgtgtcgctgtttcattctgaaactcttgggcctctaggatcctgtgcacattataggcctttcctgcctaagagtt

SEQ ID NO: 339606 - DNA, 201 bp, Homo sapiens
ccttcctgacacgagactgtggctcaccatactttacaggcctgggatactcactgccccaacagccagacatgcggtgatctttggctgttttcgtgctrttgtgtggctgttttgtgctgttgtgtcgctgtttcattctgaaactcttgggcctctaggatcctgtgcacattataggcctttcctgcctaagagtta

SEQ ID NO: 339607 - DNA, 201 bp, Homo sapiens
ttcctgacacgagactgtggctcaccatactttacaggcctgggatactcactgccccaacagccagacatgcggtgatctttggctgttttcgtgctgtygtgtggctgttttgtgctgttgtgtcgctgtttcattctgaaactcttgggcctctaggatcctgtgcacattataggcctttcctgcctaagagttaat

SEQ ID NO: 339608 - DNA, 201 bp, Homo sapiens
tttttttccctacagttgccagaaatgccatagtgaacactcctgaacatatctatttgtggacatgaatgaatttcccaagagggcataatctggaatgraatgcacattgcaaatttctcagtctgtggcttttctctaactttttttatggtgtcttttagtacaaaagttttccattgttaatgtaggcaagcttat

SEQ ID NO: 339609 - DNA, 201 bp, Homo sapiens
actcctgaacatatctatttgtggacatgaatgaatttcccaagagggcataatctggaatgaaatgcacattgcaaatttctcagtctgtggcttttctytaactttttttatggtgtcttttagtacaaaagttttccattgttaatgtaggcaagcttatcgattttctttttttttgagatgaagtctcgctcttgt

SEQ ID NO: 339610 - DNA, 201 bp, Homo sapiens
accatgggacaggcactgactcttgaattggagagacctggattcaaatcctgaggtagtctcttactgtatgaccttggactgtccattcaactcctgarctttatttcctttatctgtaaaatgggaataattagtatctcccctacaagggtttttgaaataatgtatataggcatacccaggaaagaagggtttgat

SEQ ID NO: 339611 - DNA, 201 bp, Homo sapiens
gggggagtgtgctttcttcatctttgtgtctctcagaagtaaccaaataagttctcaaaaactgctggcagaaggaaggcacgttaatggtggatgtaacrttattcatttcatgaaagaaagaaatcaacattaaaattagaaagcattgttttaatttctgaattgggtacttggaatggacattcttcacaattttca

SEQ ID NO: 339612 - DNA, 201 bp, Homo sapiens
taatggtggatgtaacattattcatttcatgaaagaaagaaatcaacattaaaattagaaagcattgttttaatttctgaattgggtacttggaatggacrttcttcacaattttcactgggttatcataaaatctttattaattcaagtcttttctcccccaagaacatttttctattaaaaaataacaaccaccaccat

SEQ ID NO: 339613 - DNA, 201 bp, Homo sapiens
cctctgccagagaagagccccagcaaggattgaggctgggcatccaggtgcctctgcagcccttcccgtggctccagctggacaattgcccctgagacacrgaagatagagactgcacgtgtgtcttcagtgaacgttgctttatttatgttgttgttaaaagtgaaagagagtacaaactgccttttttttctgagacag

SEQ ID NO: 339614 - DNA, 201 bp, Homo sapiens
gattggaaaaattgtcccctcctgtgtttcttttcgtcttttaactttacaagtgctcctcattttcttttacttacaatttgaagttggcactggtgttkctgggccaaccagcatcttgaggactcaactctctggctgcaggtgctgtggggaaggggcagacttaaattttcttctgtaaaatggggacggggggga

SEQ ID NO: 339615 - DNA, 201 bp, Homo sapiens
cccatctgactactaaggataaaattttttctgctgtgcaaagctagttctttatcacgggtgttcgtacattttcaaatttcattaaactttcaggcttraacaactttgtatctgggagagacttcagaggatgtagttctgtgagctgctcagaacaccatgcttgggtgtagagaagttcagtgatttatcaggtta

SEQ ID NO: 339616 - DNA, 201 bp, Homo sapiens
caggtgctgtggggaaggggcagacttaaattttcttctgtaaaatggggacgggggggattaaataaaatgctttatgggaagttctggcacagagtgaygcacgaagaaatttgagcttccttctcctcacaggtgaactgttgctgctccacctttattacatcttttcaaatccacgccacattggggaacacaaac

SEQ ID NO: 339617 - DNA, 201 bp, Homo sapiens
aatattaatcctgcttgtcccgaaccacccatccttggatttgagttgtcaagtatctactgaggcacgatatctgtgatgcaccttggggttcccagaargggtgtgtatttgagagtgggcacaggggcagctgaagaccctaccctgtgatggcagcatgtggtgatgccgggagagcttccacaggggtgctgcggg

SEQ ID NO: 339618 - DNA, 201 bp, Homo sapiens
ttagaaacaacttacaggctcccttatatatcaagtatacacaatgattgctgagggggcataagtaatttctaagtaaaatgagaatttcagagcaaaaytctcaaactcctctcaaacattttacaggacgacatcacatataatgtggtgtgagaatgtgctttagagtgtttgttctgatgtggggaggggtcatct

SEQ ID NO: 339619 - DNA, 201 bp, Homo sapiens
tctgtgacccaaactggtcagccgggtcctctgcctcactgaccatggcagttgattcaggaatgcacatggtgccccaggctggagtatcacctagagasagttcaaggattttttacagaaactaattgggggatggagctcttttgctgctgggtctcttataggaggacggtgtcagcctggagcggctaggacacc

SEQ ID NO: 339620 - DNA, 201 bp, Homo sapiens
gaggtgattttggtttgtgtagacagagaggaatcccattctctttggtgactgtcatggctaccataactgttgacatgggagcagtgtatttgcactgwcataaaggtgggatgccatagaaacccagtggcctggggcaaatccttacttggagaagagcttctctggggaccccctacatgctactgggattctagt

SEQ ID NO: 339621 - DNA, 201 bp, Homo sapiens
cccggctgtcctccaattgttctggccaaactctgtgtcattctggcgataggtggcctgacggcgcgcgggtgcctgtccgtgcattcctctagacatcyggctttccagtgttcctctgctgatgtgtttctctcaacgtccagccacctctgtgtctgctggctagggtctcgatttttgtataggcacaggataggg

SEQ ID NO: 339622 - DNA, 201 bp, Homo sapiens
cattttgggaggctgaggcgaaaaggttgtgtgaggccaggaattctaaaccagcctgggcaacacagtgagaccacatctctatatttaaaaaaaaaaawttttttttaaagcaaacagagccttaggagaaggcaacactatggaggtcaagttagagttcatatgcaaggtagaggcccgtgtaatacttcaatttag

SEQ ID NO: 339623 - DNA, 201 bp, Homo sapiens
aggattacatgacagtatgttctctactctcaagtttctgtttgtgctgttataaatttgagcagtcatcattaaatctcagctatacatttaagttctgttgtgacagttgccacaaaggaaacgtctaaggtgctaagtatatatggttaggaaaaatcttgcaaactttttctgtaaaggactagatagtaaatattt

SEQ ID NO: 339624 - DNA, 201 bp, Homo sapiens
tttagaaacccgtggcatggctggtgaggagcggtcagcctcgtcaaggaggaagtcctatcagcagagattcacctttcggtttggaataacatcgtgasatctttttgtacagttttcttgagtattgaaattggcccaattattcattgaagtccaattcacattctggcttttcaactcgtacattttgtggaatag

SEQ ID NO: 339625 - DNA, 201 bp, Homo sapiens
attttgggaggctgaggcgaaaaggttgtgtgaggccaggaattctaaaccagcctgggcaacacagtgagaccacatctctatatttaaaaaaaaaaaattttttttaaagcaaacagagccttaggagaaggcaacactatggaggtcaagttagagttcatatgcaaggtagaggcccgtgtaatacttcaatttagc

SEQ ID NO: 339626 - DNA, 201 bp, Homo sapiens
aaccggagctgccttggggaagctagttctggagtggagagatgggatttctcatggaaagtgaaaataactcattgagaataatgtgtttccaaactgtsttttattttcacagtatgttgttgttactgtttgtctgaaagctggtttggagaccacagcttggactaaagtaagttttctctagaattgtttctctgt

SEQ ID NO: 339627 - DNA, 201 bp, Homo sapiens
catgcagctcatgttctgtgagtgctatgcccttgcccaagaccttcaaaaaggtcatcatacaaatcttatattcttggaaaattaaaaacctatacttrcaaatccagtgtcaaagaggaaatcacattggaaattagaaaatacttagaattgaatgattaaaaaatacttttgcatcaaattcatgggatatgaata

SEQ ID NO: 339628 - DNA, 201 bp, Homo sapiens
taggaagacaaaaagacaaacaaaaacaaaagtgtcttttttttattgttttattactttttatttgacaagtaaaggactccaaaagtctctatgcaatygttgagacactgtatgaagccagcctcgaagcccatcccaggtggggcgctcagtgagaatttcctgtgtgctgcccggccttgtgggtagccccggcca

SEQ ID NO: 339629 - DNA, 201 bp, Homo sapiens
agtatagatatttttcatgctaggatttctttttaagccttggggaaaccataagcaatatctggctatcttctttcagattttctgtgtaaaaattgtgrtttgatcttgatcagggtaaatttgcaatccaaagtctcttggtgattcatttgcttggcacgtaatacagctctaagctattaacagtcatctcacttc

SEQ ID NO: 339630 - DNA, 201 bp, Homo sapiens
aaatatgactctattagaatgttttagctcctgctgggtgttacaggagaagatggtacactgaagatacagctgagtgattgctcatgttaagtggttaygtaggatgccagctggtgacggtgaccaccgtaagggcagctagctttcaaagtagggaattacaccacgagacatgaaatcgttaaccatggaaaaatt

SEQ ID NO: 339631 - DNA, 201 bp, Homo sapiens
accctttgaaatctatttagaaaaagttctttctaaaagctatcgattgtgctgattatgatcatagcaggtttcaacctgctgtccaagtctggaacttyaggcaagttaagatcaacaagcactctgcgatcgagtttcatttaattagagtttgctgccaagtcaggttttgaggccaactgcatgccaggcgccttt

SEQ ID NO: 339632 - DNA, 201 bp, Homo sapiens
gagacatgggaattagaaagattgaacttcccattaactggtgagtcatcaaagtctttccataaggaaaggtagcttggatgcaaggattctgcagcaartggagttggggtgaatctgccaggctggtcgagaagcctgtctgagtgtctatttccctctgcagttcagtcatctggctgtctggggaagcatgctgac

SEQ ID NO: 339633 - DNA, 201 bp, Homo sapiens
aaaaagttcagagaaacaaagggattttcacagcagtgcttgcaattccaacatctgccttgtgactttcaattttgagttaatatttgaaactgtcttcrttgcctgcataaagtgatcaagtgaccatcagtacaaagactttttcacatacctgttttaattgctctggagaatgcctgattctctgagttattgcct

SEQ ID NO: 339634 - DNA, 201 bp, Homo sapiens
cctgacaacctttgctctataatagcatttctgatctttttcccttgatttcctgcctacttacctatttatttattttgccttttcctttgtcaatctcmtgctgtttcttgggcattgtttcatttccatatttataaatttaacattttaaaagataggtgtttctagttcatagatttgctgcaatcaccccctact

SEQ ID NO: 339635 - DNA, 201 bp, Homo sapiens
tccttgtaactgttgttctttacaataactcgtaaagtatcttatttatagtaaactccaggattaattgttttgaggtttaaaataataatacagaattycaagtctttaaaagtttaatgtgaatccctacaggactttaggtatggttcttcttgaaggcagattctttccaggtttgggttagcttaacagaaactt

SEQ ID NO: 339636 - DNA, 201 bp, Homo sapiens
taaagtatcttatttatagtaaactccaggattaattgttttgaggtttaaaataataatacagaattccaagtctttaaaagtttaatgtgaatccctayaggactttaggtatggttcttcttgaaggcagattctttccaggtttgggttagcttaacagaaacttttaaattgaataaattttctctgttctctctt

SEQ ID NO: 339637 - DNA, 201 bp, Homo sapiens
catctcttgagctaaagcgcaggagctgcattccaagagaaacctggggattagtgcgcgtcaggagaaccggcttggggactccagaccagagcggtagragggggatctgaggtccatattaaggacctctaccctgtcctacagggagcaataggatgactggatgttagttggggatctgcttgtgtgagccctggt

SEQ ID NO: 339638 - DNA, 201 bp, Homo sapiens
tcctgacacgagactgtggctcaccatactttacaggcctgggatactcactgccccaacagccagacatgcggtgatctttggctgttttcgtgctgttktgtggctgttttgtgctgttgtgtcgctgtttcattctgaaactcttgggcctctaggatcctgtgcacattataggcctttcctgcctaagagttaatt

SEQ ID NO: 339639 - DNA, 201 bp, Homo sapiens
cacgagactgtggctcaccatactttacaggcctgggatactcactgccccaacagccagacatgcggtgatctttggctgttttcgtgctgttgtgtggytgttttgtgctgttgtgtcgctgtttcattctgaaactcttgggcctctaggatcctgtgcacattataggcctttcctgcctaagagttaattacagga

SEQ ID NO: 339640 - DNA, 201 bp, Homo sapiens
acgagactgtggctcaccatactttacaggcctgggatactcactgccccaacagccagacatgcggtgatctttggctgttttcgtgctgttgtgtggckgttttgtgctgttgtgtcgctgtttcattctgaaactcttgggcctctaggatcctgtgcacattataggcctttcctgcctaagagttaattacaggat

SEQ ID NO: 339641 - DNA, 201 bp, Homo sapiens
ccttaaatggtaacatcttacaaaactgtagtacagtatcacaaccaggaaactgacactgacacagtcaacacaaaacatacccatcaccacaaggaccrcttcctccctaccctttccatcccgccattgtgcttttataggtacccctactttctattcattccttaactcctggcaaccattaactgttctccattt

SEQ ID NO: 339642 - DNA, 201 bp, Homo sapiens
tgacacagtcaacacaaaacatacccatcaccacaaggaccacttcctccctaccctttccatcccgccattgtgcttttataggtacccctactttctaytcattccttaactcctggcaaccattaactgttctccatttctatgattttgtcgtttcaagaatggcatatacatggaatcttataacgtgtaaccttt

SEQ ID NO: 339643 - DNA, 201 bp, Homo sapiens
acctgaaaaatgttgtgccagttgctctggcctcagtggtttctgatgagaaatccactgtcaacctacgtggttttcctctattggtgtcatttctcttwggctgcctttggaatctttgtcgttggtttttggcagtgtaattaaaatctgtcttgttgtggatttctttgagtttatcctctttagaattgctctgta

SEQ ID NO: 339644 - DNA, 201 bp, Homo sapiens
tctttgtcgttggtttttggcagtgtaattaaaatctgtcttgttgtggatttctttgagtttatcctctttagaattgctctgtaagtttatattgttcwtcaaaattgggacattttcagccactatttctgagtgctcttttagccctgccgtatttctcctctttttctgagactctgaagacgtgaatgttagatc

SEQ ID NO: 339645 - DNA, 201 bp, Homo sapiens
gtcctgagctcaatgctgggcgttatggatagacacgagacaaatggtgaaggattgagttgtggagacacaacataagaagagagtcgcaccacaaatcrgttaatacaaagcacacatgcaattttacatattgaaccgtgtcctctgttttcagcccaggataggtactgtgaaaaacataacaaaaagtgtaagact

SEQ ID NO: 339646 - DNA, 201 bp, Homo sapiens
tttaggctggaaaaccgattttgtttttgttttattcttgtgattttccttcattacataagtgtctttaactaaggtaaagttttagataaaacaaaggyctaggtaggtctggaatacacttgagccccgaaggttttcatttcctaatgataatgagtaaaataagttgccaattgtggctatgaaatatcattctct

SEQ ID NO: 339647 - DNA, 201 bp, Homo sapiens
aggtctggaatacacttgagccccgaaggttttcatttcctaatgataatgagtaaaataagttgccaattgtggctatgaaatatcattctctaataaarcaggttagaatgttaacagcctggtggattggtagatgtttggccttccctgaaggacagggaactggggaccagctttttttcttgagggcctgtcaca

SEQ ID NO: 339648 - DNA, 201 bp, Homo sapiens
tgaggaaacacaccagaaagagttacataacttgcctgagttcctacagtcggtgagcatcacaggctgtgtgggatgcattagggagtggtctgcctgargtgcaggcaataagaaggtccacacaataaaacccactaaaagtccatctgcttttaatcatctccgtgtaccagcagtaacattctcctccctgcaaaa

SEQ ID NO: 339649 - DNA, 201 bp, Homo sapiens
gacatttatttctataagttcccttcttaagattgcttttgctgcaacccataaatttagatatgctgtgtttccattttcatttgtttcaaatatatttrtatctttgatccattttaagttaatttttgtatgtggtgggaagggcccaattccattgtttggcatgtagaaatctagttgtcccagcaccatttgctg

SEQ ID NO: 339650 - DNA, 201 bp, Homo sapiens
tatttcaaccaaggcactcagaaatgccctctcctggaaattcaaaatgaacttcagctcaaagaactgtgaagaagagccagggccccactcctctttcratggccctgagggagctaggtgggtctgcagtcatgggaggggcctcctcaggctccaggctcactgatcgatcgggggcagggtacatgggattcaagc

SEQ ID NO: 339651 - DNA, 201 bp, Homo sapiens
tgcctgggctgccgcaataaagtgccataggctgtgtggcttaaacagcagaaattgagtttgtcacagtctggaggctggaagtccatactcgagctacytacagattggtttctcatgcgagcactctccttggcttacaggtggctgtgtgctctgtggtcttccctccgtgtatgcctgtgtcctcatctcctcttc

SEQ ID NO: 339652 - DNA, 201 bp, Homo sapiens
agtctttccataaggaaaggtagcttggatgcaaggattctgcagcaagtggagttggggtgaatctgccaggctggtcgagaagcctgtctgagtgtctrtttccctctgcagttcagtcatctggctgtctggggaagcatgctgacctggctggtgttttttggcatctactcgaccatctggcccaccattcccatt

SEQ ID NO: 339653 - DNA, 201 bp, Homo sapiens
gggcttgaagcactttataaaagagaggcaagggcacacgtcaaactagaagaatgaaagtaagaagagagaaggctgcagagaggagcaagccccatccrtccccctgatggtcctgccagtgcatgggttacctctcattgcatttagtgcggtctgttgtttttgtattgtgaaatattatccttgattacattatgt

SEQ ID NO: 339654 - DNA, 201 bp, Homo sapiens; identical to SEQ ID NO: 71399

SEQ ID NO: 339655 - DNA, 201 bp, Homo sapiens
tcccagtgacagaaaaagaatgtctgtaattgttcgaactccttcaggacgacttcggctttactgtaaaggggctgtaagtaccggagaagcgttgtgcrtagcggagttcttggcagctttgttaatctgccgcttttcctaactgctttcctcatcattccctgattgtttgtccagagttgaaagactgtttcaggt

SEQ ID NO: 339656 - DNA, 201 bp, Homo sapiens
aacacgagacaaaagacataataaaagccaacctaatactaagcttagatttccatactgctcaggctatgtattaaaaattcttactgtagaatttttartcaactggagttttctagtaaactgaattggtgtatgttaaaagggtcggaaagtcgggtagggatgatgggtggggagaattgcttgagtaagagatag

SEQ ID NO: 339657 - DNA, 201 bp, Homo sapiens
aaatgaaagattaaaaaaatttttttaacattagttttatttgtatctctaactgtaatcaaactatgtctctgatctggaattttattccgacctatgaygttaagacttcaaatctatggttgaaaattccagctttatgatagaatcacctgaagtgctttttagagacatttgcccagttcccttcagttcccttcc

SEQ ID NO: 339658 - DNA, 201 bp, Homo sapiens
aactctggagtccaagccctgtgctctggtcctggcactgtggctcaccaggtagtcacgtgaccctactcacctgtgcaaatgcccccacgcttctcagwtcccaagctcaagggggcgttgaggatcaggtcacccacaagttcccttcctgccctcagcttgcacgtggctcatctgtcaaggaaccacatactgtgt

SEQ ID NO: 339659 - DNA, 201 bp, Homo sapiens
cgagactgtggctcaccatactttacaggcctgggatactcactgccccaacagccagacatgcggtgatctttggctgttttcgtgctgttgtgtggctkttttgtgctgttgtgtcgctgtttcattctgaaactcttgggcctctaggatcctgtgcacattataggcctttcctgcctaagagttaattacaggatt

SEQ ID NO: 339660 - DNA, 201 bp, Homo sapiens
ggtgtgctcagtgttcactacagcgtcaactttccaggatcaagcgatcctcccacctcagcctccagagtagctgcgactacagacatgcagcagacacrcaccaccatgcctggataattttttagttttttcgtagagatggggtttctctatgttactgaggctggtcttgaactcctgggctcaagcagtccctcc

SEQ ID NO: 339661 - DNA, 201 bp, Homo sapiens
attaggtccaggggcttaaactggccatacaaagaactggccagggatcaccagtgagggtgtttttggggaatggaagggcagtggtacctattcaaggsgttgttgtgaggattggtcagagaatggggtggaatgctgagccagtgcctgtcatctggctgcacctgctattcacgcttttaacatctaattaaggct

SEQ ID NO: 339662 - DNA, 201 bp, Homo sapiens
catgagatattttcctgatatagcagaggatttgtagacagctgttcttttctctcatataactctgtctgtactccccagcgcctgctgattcagggagycctaagaaggtcctgctggcagggctttcaagaaccacgccctgtgggctaacctgcagcctgggagcctgtgggggacagcccagcttcggccctttct

SEQ ID NO: 339663 - DNA, 201 bp, Homo sapiens
agcgatcctcccacctcagcctccagagtagctgcgactacagacatgcagcagacacgcaccaccatgcctggataattttttagttttttcgtagagayggggtttctctatgttactgaggctggtcttgaactcctgggctcaagcagtccctcctgtctcggcctcctaaagtgctgggattacaggcgtgaacca

SEQ ID NO: 339664 - DNA, 201 bp, Homo sapiens
acaacactgacacctttctgattgaaagtatgcaaaatagctcttacgttaattggtcccaaagaaaattatgttatccattttcctgtctatacatctgrcactttccctcatctgtcacctcctgaattatcaatgctttcccttgcctgattttgacagccagtattctgcctatgactttaaaaaccataaaaaaaa

SEQ ID NO: 339665 - DNA, 201 bp, Homo sapiens
gtttttaatatagtcacagatatgaacagccatcatcacactaaattaaggaacattttcatcacctctaggagaaagcttgtgtttgtctgtttttgctwtggttgcctgactctgaggtcttactcaaaaatctttgcccagaccagtgtcctgaagcatttccccaatgttttcttccagcagtttcacagtttcagg

SEQ ID NO: 339666 - DNA, 201 bp, Homo sapiens
acacacatgttgaatgatccatttccatggctaagttcgtggcccctttttcctcctgctctctggctcatgcccttagcctcttaaagaagagttacggragagaaactccgagcagcctcctggcctgtttttcctgagccgtaaggtgggtgcttcactcttcacagggctagccccgtatagctttaattcccacag

SEQ ID NO: 339667 - DNA, 201 bp, Homo sapiens
tgttgcccaggctggtcatgaactcctgggctcaagcagttctctccccctggcctcccaaagtgctgggattacaggcataagtcactatgcccaggctyttttctatttttatttgttttttctatttttagttgataacaagacaacatgttaactggattttgcaataaaataaaatacccactagatatctttttg

SEQ ID NO: 339668 - DNA, 201 bp, Homo sapiens
caggtgtagattccacctcaagaaaccactttctttgcccatccataagaagcaactcctcgtttattcaagtttgatcatgagattgcagcacattgtcrcatcttcaggcttcacttctaattctagttctcccgttgcttctaccacatcttcagttacttcctccactgaagtctcaaacttttcaaagttatgcat

SEQ ID NO: 339669 - DNA, 201 bp, Homo sapiens
tttttttttttcactctcccagtgacagaaaaagaatgtctgtaattgttcgaactccttcaggacgacttcggctttactgtaaaggggctgtaagtacyggagaagcgttgtgcgtagcggagttcttggcagctttgttaatctgccgcttttcctaactgctttcctcatcattccctgattgtttgtccagagttg

SEQ ID NO: 339670 - DNA, 201 bp, Homo sapiens
ttggaaatgctgtttttggccattggagctgtactttcaagcatgttgtcttgatttccaggggcacattcttccagtgcctgccccatcccctcctgtgyccatggcagtgacaagatgcatagccaaatccaaactcatttacctgtagatgcctctgtcactcatcagcagtggtgcagagggagagacaggccaacg

SEQ ID NO: 339671 - DNA, 201 bp, Homo sapiens
cacctatttcacaaagtatttgaacaggaatccttttactatgtagggatgttctcttttcttgtgtcttaatgaaccgttagctctgaatcattttcttygctttaagaagcacttaattttcatggtctttctgaaagctctagccaccctcagctaaacattaatgatagcttaagaaatatcaggtcaaaaacagca

SEQ ID NO: 339672 - DNA, 201 bp, Homo sapiens
agggagggaaggaagaaaggaagaaaaccttctggtgacctctcagaattaaatttaaaaacctagtgggatgctgcttctcccttgctttctgtgtcccrgccacattggactcctttctgttcctttggctctcaaagcaggctttgccccaggactataacaggattttgccccactgacacatggcaaactcacctg

SEQ ID NO: 339673 - DNA, 201 bp, Homo sapiens
ttttgtaagtttttgcttttggataataaaatcattgtatgcagtagataataacttatgtgttgcctcgggtgatatatttaaggcaggaaattgggctwtagcttaaccagcctctttagacacctgatggtatttttagggggaggtaatgtatactcagagtgtcctaaatacctgtacagtgacactaaacagttc

SEQ ID NO: 339674 - DNA, 201 bp, Homo sapiens
caaacctggcacatctcagggtgtgttttttctcagatctcagaaaatagcatttatatgtaaattaacctaactatggtgtgatggagaaaccatgaaaygataaataatcaagcttaacctttatgtgacaaactttggtagtcttggaaatatttttgaatatattggaacattacagaaagaagtttagagagtttt

SEQ ID NO: 339675 - DNA, 201 bp, Homo sapiens
taataacttatgtgttgcctcgggtgatatatttaaggcaggaaattgggctatagcttaaccagcctctttagacacctgatggtatttttagggggagktaatgtatactcagagtgtcctaaatacctgtacagtgacactaaacagttcaaactttgttttcaaatattaggtctctggagccccattgatttttat

SEQ ID NO: 339676 - DNA, 201 bp, Homo sapiens
gcaggtagtagtggcagttaaatgatgcaggggaggcaaagctttacctctatcctcttagggtcctggctgggcctgagaattaaatggacatgacaaawtaagccaggcacagtaatcccagctactagggaggctgaggcaggaggattgcttgaggccaggagtttgagaccagcctgggcaacatagtgagacccc

SEQ ID NO: 339677 - DNA, 201 bp, Homo sapiens
cttctgctaggacctgtagagtaaatgtcaccctagataggcagatttcctgtcctcccagagtctgtcatctatcaggaagtgtagcctttaaacaagcrctctgaagaagctgtgataaatgctgggttctccattattgtcatctctgaaggccattggtaacctggaggaatattctcccactaacaggagaaagca

SEQ ID NO: 339678 - DNA, 201 bp, Homo sapiens
ttagacacctgatggtatttttagggggaggtaatgtatactcagagtgtcctaaatacctgtacagtgacactaaacagttcaaactttgttttcaaatrttaggtctctggagccccattgatttttatcactgatgttccttatagcctgctttagagcttgctaatttgggcagcaaatgaaagattgctgtgttgt

SEQ ID NO: 339679 - DNA, 201 bp, Homo sapiens
ttaaggtctgactgggttagtgtgtcagctaatttgaagtgttgatgagtgataggaaatttcacataattatgttgtagagacctttagcgtgttatctsaaaaggctgaaaaatgtgagaacctcagacaacttggtgagccaatggaagccaatcatttaaacaggcgtctttagataagactctgcttattcaactt

SEQ ID NO: 339680 - DNA, 201 bp, Homo sapiens
atgctgcccaaaatggtaaaattctgaaacggtttcatttaaaataagaaattaatcaagatgcctgccatcactatataattcattgttttcatgttttyggcaactgcaaagaagattacaaatattgggaaaacagtgaacaatttctgtacgtatacacatatgctcacagaaatatggtaatgtaaatatgttcat

SEQ ID NO: 339681 - DNA, 201 bp, Homo sapiens
ataggtcaagtatgggaagaggctcagagcctccctgccctcctcaggaacctgcatgtgttcagcaacctgaaagctcctgaaccctgatttttggggcttttatggaggcttcaccacgtaggcatgactgattaactcactggccattggtgattcactcagccttcagcccctcccctccctggaggttgaggggtg

SEQ ID NO: 339682 - DNA, 201 bp, Homo sapiens
taggtcaagtatgggaagaggctcagagcctccctgccctcctcaggaacctgcatgtgttcagcaacctgaaagctcctgaaccctgatttttggggcttttatggaggcttcaccacgtaggcatgactgattaactcactggccattggtgattcactcagccttcagcccctcccctccctggaggttgaggggtgg

SEQ ID NO: 339683 - DNA, 201 bp, Homo sapiens
caattcagtgttttccaatagcaacaaagttcccaggctagctcacaggggctaaactagtggaaatagtatcaaattgctgagtaactcttgaatatggrcgcagtttcatcccctgagagcacgcacaatgcctgggagcactgacatgctcagaccattgccctctgaggccatgttgtgattgagtaaaaaccagca

SEQ ID NO: 339684 - DNA, 201 bp, Homo sapiens
gaaatcaaaatgagtccgttggattctcaggggagatccaggaatgcctgtaagggtttacaggaacatgttcttttcttgccaggtgcttgatactaaaacacacacacacacacacacacacacacacacacacacacacacttttttccccttcttgctgtgactgcttcacagtgctttgtgtgtctcataggccat

SEQ ID NO: 339685 - DNA, 201 bp, Homo sapiens
ttctgtgttggttcccgctacgtcctgtgagcctctctttagcggatgcatcctgctgtgcagtcgcattgtggggcctgtgtgcctcctacagaaagcascctttgaactcaccgttcctgacatgcaggaggtgctcaataactattttaacatgaatctctaaatgagccaatagactttggttgtgaacacctttca

SEQ ID NO: 339686 - DNA, 201 bp, Homo sapiens
aaatcaaaatgagtccgttggattctcaggggagatccaggaatgcctgtaagggtttacaggaacatgttcttttcttgccaggtgcttgatactaaaacacacacacacacacacacacacacacacacacacacacacacttttttccccttcttgctgtgactgcttcacagtgctttgtgtgtctcataggccata

SEQ ID NO: 339687 - DNA, 201 bp, Homo sapiens
aatcaaaatgagtccgttggattctcaggggagatccaggaatgcctgtaagggtttacaggaacatgttcttttcttgccaggtgcttgatactaaaacacacacacacacacacacacacacacacacacacacacacacttttttccccttcttgctgtgactgcttcacagtgctttgtgtgtctcataggccatat

SEQ ID NO: 339688 - DNA, 201 bp, Homo sapiens
gtgagagtgggagcacagctgaccaggctaggcaggacagccctgtgaggcagtcttgattttacagaggaggaaaatgaggcacggagaggttaattaaycttttgagtgtcgcagtctaaggctcagaggcacagttccatcccaggtctgtctgaatcccgagtcctcactcccgattcaccaccttactccactgct

SEQ ID NO: 339689 - DNA, 201 bp, Homo sapiens
atcaaaatgagtccgttggattctcaggggagatccaggaatgcctgtaagggtttacaggaacatgttcttttcttgccaggtgcttgatactaaaacacacacacacacacacacacacacacacacacacacacacacttttttccccttcttgctgtgactgcttcacagtgctttgtgtgtctcataggccatata

SEQ ID NO: 339690 - DNA, 201 bp, Homo sapiens
agaaaatgtctcatcaaggggtccccggatttttctgctccgggaaggctgcctgagggatggatcgcggccagctggcaggggctcagacgcctggtacygtgctgcagccactgagctcattggctccacctaagtcattttacagtcagagctgtttcaagatcagcacacggcactgtacagatgtttggggtcggg

SEQ ID NO: 339691 - DNA, 201 bp, Homo sapiens
tcaaaatgagtccgttggattctcaggggagatccaggaatgcctgtaagggtttacaggaacatgttcttttcttgccaggtgcttgatactaaaacacmcacacacacacacacacacacacacacacacacacacacttttttccccttcttgctgtgactgcttcacagtgctttgtgtgtctcataggccatatac

SEQ ID NO: 339692 - DNA, 201 bp, Homo sapiens
tttctgaattgggtacttggaatggacattcttcacaattttcactgggttatcataaaatctttattaattcaagtcttttctcccccaagaacattttyctattaaaaaataacaaccaccaccatgaactttggtgtggaggggcagtgaaaagagtaatagtgagagggagagagagaaagaagaatccctgtgggg

SEQ ID NO: 339693 - DNA, 201 bp, Homo sapiens
gctctgaatcattttctttgctttaagaagcacttaattttcatggtctttctgaaagctctagccaccctcagctaaacattaatgatagcttaagaaakatcaggtcaaaaacagcatcagcgactttctgggtttgcttaagattaggcttaatgagattaactcacgctgttgagttacaggagcaatcagaatgct

SEQ ID NO: 339694 - DNA, 201 bp, Homo sapiens
tattgaaggaggactctttggatgtaagtagtttttcaaagttgtatttgctttgctataacagtattaaactctttctttctactatcattgataatcarggatcatgttttgctaaaaaacagttatgaaaaaactgtgtttattttctgtttatatttatatttaagaatggatgtcagaaagccttatctttaaaca

SEQ ID NO: 339695 - DNA, 201 bp, Homo sapiens
aaaaatgtgattttcccctatactcttgtttcaggccacaagggcagccattactcagcactgcactgaccttgggaatttgctgggcaaggaaaatgacrtggccctcatcatcgatggccacaccctgaagtacgcgctctccttcgaagtccggaggagtttcctggatttggcactctcgtgcaaagcggtcatatg

SEQ ID NO: 339696 - DNA, 201 bp, Homo sapiens
tcccatctaggtttgtgtcagtacactccaggatgctcccacaacaacgcactcacctaactatgcatttcccaaaatgtgtctctattgttaagcaataygcatctgtattttgtaacctgtcgatctctgcctgtatgatttgaaaacgaatgttattttcgcttcatagatcccaactttaatgggacttgtactact

SEQ ID NO: 339697 - DNA, 201 bp, Homo sapiens
caagaccttctccctcctgcccgcttcctgctgccttcccgtcctctgggcaggccccaccggcctttcctccacactgactcatgcatattaccgccccyggttcccctccctcactgtcctcccagaatttccttcaccttcacagcacaggtcccactgacgaggacttcatggagggctggctgttcttcttcctcc

SEQ ID NO: 339698 - DNA, 201 bp, Homo sapiens
gtgggttgctcatatacctttagtgacccatggaatatcattacaatgttttgcaggggtattttcaaaatgccaccaccaccaacatataggcatgatgycctccacttcttgcagctttacatagactgagatacaggaaaagctaaagtgttttgcgtactctcactcagtacaatacttctaacaccagaaatgtgg

SEQ ID NO: 339699 - DNA, 201 bp, Homo sapiens
ttgctatacatcagtgatctcttccctcctgtctcagatactgactctgtgccccggggtccctctccgtgaagcaggagttacacgctcagatgcctggrggggtgagacagcaacataaatgtctttcatgggccagatggggactgtcaccagcagcagagcatgttcagccactactcattgccaagcagttgtttc

SEQ ID NO: 339700 - DNA, 201 bp, Homo sapiens
ctcctgcctcagccttctgagtaactaaaactacgggcatgcaccaccatgcctgactaattttgtaattttttgtagagatgaggtctcactatgttgcycaggctggtctcaaactcctggcctcaagctatcctcccgctgtgtcttcccaatgtgctgggattacaggtgtgagaaaccaggctcgccctggagtaa

SEQ ID NO: 339701 - DNA, 201 bp, Homo sapiens
ttgactctttcatcgcttcacttcttcagtccttcaacaaatagtttttgagcatccactgtgcaccaggcactgttttgggtgccaagcatgtaactgtaaaaaaaaaaaaaaaaaaaaaagcaaaattcctgccctcatagaacttacattctaatgaggaacacagacagtacacacaaactatgtcgtgaaaagtgt

SEQ ID NO: 339702 - DNA, 201 bp, Homo sapiens
ccgctacgtcctgtgagcctctctttagcggatgcatcctgctgtgcagtcgcattgtggggcctgtgtgcctcctacagaaagcagcctttgaactcacsgttcctgacatgcaggaggtgctcaataactattttaacatgaatctctaaatgagccaatagactttggttgtgaacacctttcagatactctggtttc

SEQ ID NO: 339703 - DNA, 201 bp, Homo sapiens
aaatgtacccttgtagtaaatattctgtgaaccaaaatctcaagtgcagtcatagaagtcattcactcaacttttgtggcattttattttttttgctttgkctttctactttctttctttctttttttttttttttttgaacagcccaatgtaactccattggttgtgtttggaaaaatgaaagaaaaggctaattattgt

SEQ ID NO: 339704 - DNA, 201 bp, Homo sapiens
cgctacgtcctgtgagcctctctttagcggatgcatcctgctgtgcagtcgcattgtggggcctgtgtgcctcctacagaaagcagcctttgaactcaccrttcctgacatgcaggaggtgctcaataactattttaacatgaatctctaaatgagccaatagactttggttgtgaacacctttcagatactctggtttcc

SEQ ID NO: 339705 - DNA, 201 bp, Homo sapiens
attatagggaaggattcgggaggccatgggcctgagtgtctgcggaagtcattcattgtggagacgcagacaggccctgcagagtcttcagtgagaagttygattaaataagcctcaatgggcctgcgtatcaggacgcaaaacaaatgttttccaggtatcccttaattgaaagaaaaataataaatcatcatcttcaag

SEQ ID NO: 339706 - DNA, 201 bp, Homo sapiens
cccatcagtctgttggtgactcttgaggttgtgaagtatactcaagcccttttcataaactgggtgagtattaaagcagagttgaatcactattttccaaygctatttcagagcctttggcatttaattgagcactcaaaaaagaagaactatattcatttaccattaggtccaggggcttaaactggccatacaaagaac

SEQ ID NO: 339707 - DNA, 201 bp, Homo sapiens
tatcactccccaaatcaagcattatattaaaaactgcacactatattttaatttttcatgatagatattaggcttgagttgcaggtaatatgagacctttrgtggaggttaagcctaaggatttcataaaattttgaatgtcaccataaacaagattcaaactaactttagatgaatcatcctcagtcaaaagatgggaaa

SEQ ID NO: 339708 - DNA, 201 bp, Homo sapiens
accttcaacgtgggggatcacatctcaacatgagatatggtggaggcaaacatccaaactatatcactccccaaatcaagcattatattaaaaactgcacrctatattttaatttttcatgatagatattaggcttgagttgcaggtaatatgagacctttagtggaggttaagcctaaggatttcataaaattttgaatg

SEQ ID NO: 339709 - DNA, 201 bp, Homo sapiens
ggtacagcaagcaaataaactctccaccattgtcagacttgaatgagtttagtcaacttcccctgctgggcagttgattagatagaaggagaagtggctcrctattatagtgtaattttctgatacaaagattcatttttacttggtgtcagtccatttgcattgctgtaaaggaatacctgaggctgggtagtttataaa

SEQ ID NO: 339710 - DNA, 201 bp, Homo sapiens
ctgcctgtgtggggccttagggtgagttaagtgttgaggttaagtgctgtgtaaactttccctctgctgtccctgctcttcaatgaagtttgctgcattgrttgtctccctgcctgggtagggtcttggggtaagctttgaggtcacaccaggtgttgttagactcccaggtgtggcacaactagctttccattttgctgc

SEQ ID NO: 339711 - DNA, 201 bp, Homo sapiens
ttgtcattacatcatgaaactctccctctgaaaatggaactcagagtccaattcacagaggaatttattgccaagatcacagccacagcaagacctggagscaggcagctctgtctcttggggctgagtcagtctgggctgatggtgagtaccatgcaggaccctcctagaatgtatgcttgtagctaaccagctccaaat

SEQ ID NO: 339712 - DNA, 201 bp, Homo sapiens
taaataatgcagattaaatctatagcctatgtagatgttcaggaagcgtcccctaactgaaaagctgcataacaagtacatttcactggccgtgtttaccrtctaacatgtaagcctggggaagatgtgaatgcagcaggctctccgagttgcatcgtcggggtgtgccccctagtctgaggtaaaagggagaaatctaac

SEQ ID NO: 339713 - DNA, 201 bp, Homo sapiens
actcttgcagtgagcttggctgcagctaatttgtcattacatcatgaaactctccctctgaaaatggaactcagagtccaattcacagaggaatttattgscaagatcacagccacagcaagacctggaggcaggcagctctgtctcttggggctgagtcagtctgggctgatggtgagtaccatgcaggaccctcctaga

SEQ ID NO: 339714 - DNA, 201 bp, Homo sapiens
gattttcccctatactcttgtttcaggccacaagggcagccattactcagcactgcactgaccttgggaatttgctgggcaaggaaaatgacgtggccctsatcatcgatggccacaccctgaagtacgcgctctccttcgaagtccggaggagtttcctggatttggcactctcgtgcaaagcggtcatatgctgcaggt

SEQ ID NO: 339715 - DNA, 201 bp, Homo sapiens
tttcattcctaccacttcccactgaggatgctgaagagacaaatatgggcatccccagcctccatcgtaaatgtgcgtgaccatgtgagccagagtgggcyggagagcaccagggaagtcaccggacgtccagcacgcaggcagagctggtgggggctgccttctctcccttccctgaaggcagatgggatgcccgttgcc

SEQ ID NO: 339716 - DNA, 201 bp, Homo sapiens
tgtttcaggccacaagggcagccattactcagcactgcactgaccttgggaatttgctgggcaaggaaaatgacgtggccctcatcatcgatggccacacmctgaagtacgcgctctccttcgaagtccggaggagtttcctggatttggcactctcgtgcaaagcggtcatatgctgcaggtaggaacctgcaggctgtg

SEQ ID NO: 339717 - DNA, 201 bp, Homo sapiens
ctacaagccagcacaccgcaagacatttgggacagaaagggtaagctgcagtccacagctgtagagggccaggctaagtgctaagagcctgaaacgcacargttgtgaaatccttatctgctttttcctaccacctttttcaacttaagaaaaatgacgctattaatattgatgtccagcaggccaacatttctttttgta

SEQ ID NO: 339718 - DNA, 201 bp, Homo sapiens
aatgtagtttcaagaaggattttacttgttctcactgggcctgaaagctctgtcttcagagaatggttttctgagattcctgcggaatctggtttcctctrcctacattatctgacttctgttcataaggacattctgtttgtgacttttattcctcaatgatgggctcttctgagctttgtaattttcctttttcagttt

SEQ ID NO: 339719 - DNA, 201 bp, Homo sapiens
cgcattctttttctggctggccattagaattagtaggccacatctaatacgtccacacaggtccagatatcctacacaggggtgtgggttcccaaagaagsggggatcggtaggccctacacatttgttgctcatctgtttgcatctcaggcaactgtgagctggctgggcttcctgactgtgacagacacaaattctaat

SEQ ID NO: 339720 - DNA, 201 bp, Homo sapiens
gaagtatactcaagcccttttcataaactgggtgagtattaaagcagagttgaatcactattttccaatgctatttcagagcctttggcatttaattgaghactcaaaaaagaagaactatattcatttaccattaggtccaggggcttaaactggccatacaaagaactggccagggatcaccagtgagggtgtttttgg

SEQ ID NO: 339721 - DNA, 201 bp, Homo sapiens
agttttagtagcagacaagactcaattgataaatctccacaaggagagtcaagtaggactgaaaatctcactgcacttgcatgaaaacaacaaaagctaamatgccaaaccgaatgcaagctttgttcatttcctcaaagttaattgttttgactataatcatacagttattatttaatggccatacacaatttatttatc

SEQ ID NO: 339722 - DNA, 201 bp, Homo sapiens
atttataggtgtttagaataaaaggatgcttttacataaatcagtacaattagttttattattgcaaccttgttttaggcatttatgttagctggtgacawgacgatgaaatcttcagatcctgatgtttcagtgaaccacaaatagaaggaagttgacaactatcacactatggaattgcaacaatttgcagagatgaca

SEQ ID NO: 339723 - DNA, 201 bp, Homo sapiens
aagtatactcaagcccttttcataaactgggtgagtattaaagcagagttgaatcactattttccaatgctatttcagagcctttggcatttaattgagcrctcaaaaaagaagaactatattcatttaccattaggtccaggggcttaaactggccatacaaagaactggccagggatcaccagtgagggtgtttttggg

SEQ ID NO: 339724 - DNA, 201 bp, Homo sapiens
ccatctgcttgactccgtgcactcaggctgctccacgtttggcgaaacgtgaaaggatgtggatcctgccctcagtcctcgggagcgtgaagggctgtggmtcctgccctcagtcctcgagtggcgctggcagttgggctctcctttgctgacttcccgtgcctgtcacagcagcttccaggggctggactcctctgctct

SEQ ID NO: 339725 - DNA, 201 bp, Homo sapiens
tgcagaagcccaaactctccacacatggtttcaatcatagcagatcattcctgaataaccccttgaaattattaacccatatatcttgataatagaccctygttacccccttactacatgcctgtgcaacactttcgtgtttttagctcaagtacaaatttctgaactacacctaaactcattccgcttcattatttttgt

SEQ ID NO: 339726 - DNA, 201 bp, Homo sapiens
aagcaatcctcccacctcagcctcccaaagtgccaggactacaggtgtgaaccactgcgaccagcgttgttttgtcttgaactcacttcctttggttcttwaaaacccttcttcagattctttttgtgttccagctagcccaactccttctcggccttttccctcttctgtaacttacaggtttgggttctacacctcagc

SEQ ID NO: 339727 - DNA, 201 bp, Homo sapiens
gttcagcagccctctttcctcacaggcttccctcccctccatgcatggcctaaacccaagcacactgttctcctgcaggaagcacctctgtaggaggcagsgtgtctggccgtcttctggctgcaatgctcttcttacctgcgctgaaatggatcctcaatgaaccccacacaggcgtctcttccagaacccgtgtgactc

SEQ ID NO: 339728 - DNA, 201 bp, Homo sapiens
atggaaggagaccatttaagcaagatattgattgttagttctcaagtttattagtttctcacaaagaaaaaggtctgatttatacaccagagcgtggggtkcatgccactgcctgaagctggtgtagagcatcctttaggcttcaagggtctcaatcagaaatcatgttgtgtttgttcagatgcttgatctggcgaataa

SEQ ID NO: 339729 - DNA, 201 bp, Homo sapiens
ctttattaatgtagaatttgaaaaattcacgcagttctggggagactattttaacttataccctctcctccttcctttttcatctgagcttcctctcatcratcttaatatttacacctaaaatcttatgagttgagacaatatagaaattaattattgatctgtaaattatgtgaaagttcccaacatagaagcatttta

SEQ ID NO: 339730 - DNA, 201 bp, Homo sapiens
cattttaggttggtgcaaaagtcaaccgcaattacttttataccaacctaaaatacgtaatacaatatttacttccttgaaaaggaaatccttaatgcacrtttaaattatgagttcccagaataatgtggctggtaaaataatacattttaaccatttttaagtgtacaattcaatggcattaagaacattcataatgtt

SEQ ID NO: 339731 - DNA, 201 bp, Homo sapiens
agacaatatagaaattaattattgatctgtaaattatgtgaaagttcccaacatagaagcattttatatatattaaatcagtgttagaattcgtggctagktacccgtagtgtaaaattgtatttaggagctgaaagaccgtgagtgtgaatggatgtttaggtggcaattggaaagatttcccagtattctgaagaacat

SEQ ID NO: 339732 - DNA, 201 bp, Homo sapiens
ttcctctttgttctttgtctatactcctcaagcaaacctctttcttgaaatattacacttctcccaactctctctgcagttttttttctagcaccagtctrtatttgcctgcatgatgaggccttaccttaaactttacatgtctaaaacacatcttttgtcttcctcatcctttttaaaataagtccttccagatttcta

SEQ ID NO: 339733 - DNA, 201 bp, Homo sapiens
gaaaggaatggaagattgctcaacagatctacaggaaaccattcccccgccatcacctctgcatttcaaaaagcaaatgcaattccggtcagaagacattrtctacttcggagtgatatgcttataatctatctgtgtgtgttttttaactcttacagtgaagcttcaattatatcttcttaaccccttcccaaagccttg

SEQ ID NO: 339734 - DNA, 201 bp, Homo sapiens
atgccttctttctcttcattgccttattacaggtaatggttttttaacagttccttggaattcacttaattacatgtaaaatgagattttgctaaaggttycttaactgctaaagtgttataatcttggaatatagtttgtttccctcctctagtcattgtttgatagagtgaacaagcctgactttgtatacagggagat

SEQ ID NO: 339735 - DNA, 201 bp, Homo sapiens
gtgttgacaagtggtcatgctaccgactatttatttgttggaaatattgtttacacagtaagtttatctctgtttattaagccattcttaaacagcttatktgtggcttgcacttctctaaacccttaaaaagggccttcctcattattattatttatttcaaatcttcaaaatgtattttatatatccttcaaagttcag

SEQ ID NO: 339736 - DNA, 201 bp, Homo sapiens
ttaattttcttttctttctttctttcttttttttttttttttttttttgagacagagtgttgctgttgtcacccagtctggagtgcagtggcaccatctcrgctcactgcaacctccgcctcctgggttcaagtgattctcctgcctcagcctcccaagtaactgggattacaggcacccgccaccatgcacagataattt

SEQ ID NO: 339737 - DNA, 201 bp, Homo sapiens
gaaatgagaggatagttttgtgagtagaaaatgatttgaagagtttggcagaataaaactgaaaactgattcatctgacaaaactcttttaagttcggtasagaaacaaggactagatagttgtctcactaactccattcttggtgttcccttgactttgctgtttattgtgtttttttgttagaatttcttgaatttatt

SEQ ID NO: 339738 - DNA, 201 bp, Homo sapiens
gattcatctgacaaaactcttttaagttcggtacagaaacaaggactagatagttgtctcactaactccattcttggtgttcccttgactttgctgtttaytgtgtttttttgttagaatttcttgaatttattaatttttgttacagttccatcatgaaacttactgaattatgtagatttaaattgttttccatggtat

SEQ ID NO: 339739 - DNA, 201 bp, Homo sapiens
cgagcgcgaccgcctgatcaagaggctgggccggaagacgcccccgacgctgttccggggcagctccctgcagcagggcgtcccgcgtgagtaccgcgggygggggctgatggaggagtgggtgtcggtgcggggcgggggttgatgaggagttgggggagcgggcgctgatggggggccgggtgagtgctgacggggggt

SEQ ID NO: 339740 - DNA, 201 bp, Homo sapiens
agtgctgggattacaggcatgagccaccatgactggcttctttgtttttaataaaagtccatttaacttttatgcatagaacattattctattaatgtttygtctattgcaggcatacctcagagatattgcagatttgggaccagtccatagcaataaagcaaatactgtaataaagcaagtcacactatcttttttttt

SEQ ID NO: 339741 - DNA, 201 bp, Homo sapiens
aaggcaacattaccagtgtctgcatggaagcactttccttttgttcttgtcaaggaaaataatttgggcttctctatcttaaacttcatggcttagttatrtaataattttttcttcaaatatttaagcacctttttcaccatgtgtgttttgtttcttttctttcgtgcccctctgtcctcatccctgtctctctaggtg

SEQ ID NO: 339742 - DNA, 201 bp, Homo sapiens
ctttttctagagaaataaaatattcagccacaaagggttatgccttagccctaatggaatctatgggaagaatatgccatttatgatgagagagaatgtgwctcgaaaaagtaggctgcatcaaactctaggtcatgcagggtgccaggccttcatatagcgtcttattgagttctctgcctgtgatgctggagagagggg

SEQ ID NO: 339743 - DNA, 201 bp, Homo sapiens
tcattgagaataatgtgtttccaaactgtcttttattttcacagtatgttgttgttactgtttgtctgaaagctggtttggagaccacagcttggactaargtaagttttctctagaattgtttctctgttcagtatagatatttttcatgctaggatttctttttaagccttggggaaaccataagcaatatctggctat

SEQ ID NO: 339744 - DNA, 201 bp, Homo sapiens
aagatgagtgtgtgtttcctttttcatccattactcctactatcgtggttatttataacaatttattttgaagggccaatcagcagacacagattccatartagagattttctaaactgtgaatttgtggaaaggaccttatgaaacttggctctttttttctctctccttagtgaacctcaggcaatgtgttatgttgaa

SEQ ID NO: 339745 - DNA, 201 bp, Homo sapiens
tgtggaagcagctgaggctctggagcacaacttgggctgagaatcaccctcttcttcctggggccgtgactcaagcagacaccgtggtcagccttttgatrtgcagctacgtggacaacacttttcctgagcaatcatcccctcttttctcatctgtttgggcacagaattattggtgaacatccttcatcatcaaagagc

SEQ ID NO: 339746 - DNA, 201 bp, Homo sapiens
tagcctttagacaggggagattttagaatcagtttttctaattcaggcgttattagataaaggtgcttgggaacagggttttaaattgccagcctcccttyactcaggtgctgttaaatgcatgcagaaagagaagttgaatcatccccagcattgcaattcagtgttttccaatagcaacaaagttcccaggctagctca

SEQ ID NO: 339747 - DNA, 201 bp, Homo sapiens
gaaataaaggccaggattggtttctagtgccaatagaactttgattgcttattctttaagtaagattacttttaagcaagcaaacaaaaaccacctgagtkttttgaatcatcctctagttcagtttcttaggaatgcagtgccaaaaatggtattttagtaaaagagaaactgtgtcaggatacatcactctgaatgtga

SEQ ID NO: 339748 - DNA, 201 bp, Homo sapiens
gttcatggctctcaggatgtctgtaggaatttgcacactgacatgaacttaaagcaggacagatggatggcaagggctgtgcatctcattggatatttaasttgggaaatgagaacagtgagtctagcacgtaggcaaataaagttctgcagaatgaagctgattaaagaatttgaatttgaacctggaaggacttctatg

SEQ ID NO: 339749 - DNA, 201 bp, Homo sapiens
acctggaaggacttctatggtcctttctatgtatgtaatggtatttttgtaggtaaatatttgaggttactctgtatagtaggttcaaatgtttgtgaaaktgccttagagttagaaaacaattaacccaggttgagtctattatgtttcctgctcatttgtgggaaagctggtgatcccacactgaaaggaaactggacc

SEQ ID NO: 339750 - DNA, 201 bp, Homo sapiens
catataaacaggtcagagtgaaagccaatttttataaccagagtcaaaatcagtgtggaataattcataggtcattcttaattttatgttaaacattgtgstagattatctccatctttttggcccgtgctttcaaaatatccccatgatcaaagcttcttagataggatatgtttccctccattgtggggaaacacagag

SEQ ID NO: 339751 - DNA, 201 bp, Homo sapiens
ctccatctttttggcccgtgctttcaaaatatccccatgatcaaagcttcttagataggatatgtttccctccattgtggggaaacacagagcctatggtygttctgtcctgcgagcctctgcttcctctgcaaagtgagagctccttttccttgtgtttcctgacctcatccaagggtttttaaattattttctaaggga

SEQ ID NO: 339752 - DNA, 201 bp, Homo sapiens
tttggcccgtgctttcaaaatatccccatgatcaaagcttcttagataggatatgtttccctccattgtggggaaacacagagcctatggtcgttctgtcytgcgagcctctgcttcctctgcaaagtgagagctccttttccttgtgtttcctgacctcatccaagggtttttaaattattttctaagggagggtgtcac

SEQ ID NO: 339753 - DNA, 201 bp, Homo sapiens
actgttctacagcggtcttcagtaattttttaaatcttgaaatagaatggaaagattgagagtgacctgctgaggtaactggaccagaacaggttaggagygcgtgtttataaacacgagggagggtctgagtaggaggacctgaggaatatgtagggcagtgtggaaagggaagacatggaaatgacattgatacagctg

SEQ ID NO: 339754 - DNA, 201 bp, Homo sapiens
tcctgacctcatccaagggtttttaaattattttctaagggagggtgtcactgtctttggaaagatctaaaatagcaaatttttgttttcctgtatacatrtaagaaaactggaaggagggatcagtagaaacttaggtctacctcagctacaattcatttatttattcagtagcaataatagaggattcgtgcctgttag

SEQ ID NO: 339755 - DNA, 201 bp, Homo sapiens
tgtcactgtctttggaaagatctaaaatagcaaatttttgttttcctgtatacatataagaaaactggaaggagggatcagtagaaacttaggtctacctyagctacaattcatttatttattcagtagcaataatagaggattcgtgcctgttagagccatagcgcttgagcaggcaaacaggcctcatctgccgtgctc

SEQ ID NO: 339756 - DNA, 201 bp, Homo sapiens
tgaagacgcgtaatgaattgctggtcttgattgcagtataaagtttctgttagacacagtagagttttccatgaggtctgctgagacctgatgcgtgtttmctctgtcccttgcatcttctagtaagggcccaatgtgtcacttcaagctatgaacttcatcgctcctgagtgacgtttctgaaatctcaaagtattttct

SEQ ID NO: 339757 - DNA, 201 bp, Homo sapiens
ttactttactttgttttaggagaattcgccaccctttaaagaaatttctcctttatagtgttttacagtaacaccttaacctttgctgcaatcttgaagtygtatgctgcaaacattcatcaacctcacgtttggaaaggtcatggttcttggtcaggaggttgggaattcttgactcaaagtgggagagatgctcccaat

SEQ ID NO: 339758 - DNA, 201 bp, Homo sapiens
tactgttgccttttaatcagagcattggccttccgtgcagcttgcccagttttgaatcctggttctaacactcagtggctgtattactgtgatcaagttaytttgttttctgcacctcaatttgtaaaacagagaaaaatttataaaacagagaaaaatttatgtgtgttaacttagttgatccttgtagtcactctatga

SEQ ID NO: 339759 - DNA, 201 bp, Homo sapiens
ctggctctggtggtgtgtgcgtgaccgttctaccctactgtatacagctatggaaatgctgaagtatttgtaaatggatgcataattgtaagaaaacgagwtctttatagctgttctgacttagcccttttctccctttccctttccttttttattaaacatcattgcaaaaaaaggcaacattaccagtgtctgcatgga

SEQ ID NO: 339760 - DNA, 201 bp, Homo sapiens
cgagatctttatagctgttctgacttagcccttttctccctttccctttccttttttattaaacatcattgcaaaaaaaggcaacattaccagtgtctgcmtggaagcactttccttttgttcttgtcaaggaaaataatttgggcttctctatcttaaacttcatggcttagttatataataattttttcttcaaatatt

SEQ ID NO: 339761 - DNA, 201 bp, Homo sapiens
tgcagcatatctgagatttcagaatctgtttcctgatgggccctgccagcagtctgtcctgcagaacccagtgctgcacattgatagctgttcaagaaccrtgggtgttttctcagcgtaatcgtgaccagcagatggtgtttgctcttcatccatccatgttttgccccttttctgtccaagtatcattttcatattctc

SEQ ID NO: 339762 - DNA, 201 bp, Homo sapiens
tttgtcttgctttttgagacacagctatgtcgtatcacccagaagtaaccagaaaaaaaaaagaagtaatataaaaaatacagtgcaacatcatttgggaygcttaaaaaagtgttatcagaagcaaataacggggaaaacgatggctgagatacttagatattgagtaaccctacaaaacgtgtgggggccaatttaaag

SEQ ID NO: 339763 - DNA, 201 bp, Homo sapiens
agttttattctaggaaggaatcatcactcagtgcagttcttgacttttttggggcttggtgcatgaaagtacatagctaggaaagaaagccaaaattaggkcaagaattgacatctattcttgaattcaagattaaattgtgtgacgttaggactataacttcctatatttatacactgttgggaatcatagatcggcatg

SEQ ID NO: 339764 - DNA, 201 bp, Homo sapiens
gaaggtggaaaatgcagatgttgcatttaggaagttcaaatttgtctatgaacctaaatttggaaagaactgcctttattttagtttcttaggtagctttwtctagatttctgttctcttatctgatatttgttaccgtatgcctgaactacaaatggtctttgttttctggattaggggaacaatcaattctaacttatt

SEQ ID NO: 339765 - DNA, 201 bp, Homo sapiens
gacagcaacatttgctgttcagcaatattcactgttctacagcctctgctgccaatacccaggcaaacagggtctggagtggacctccagcaaactccaasagacctgcagctgagggtcctgactgttagaaggaaaactaacaaacagaaaggacatccacaccaaaaccccatctgtatgtcaccatcatcaaagacc

SEQ ID NO: 339766 - DNA, 201 bp, Homo sapiens
cagtttactccatgaaatggggaggaggcagagtgctcaaagtgaaggggctggggtagggcggagagtttgaggagagagaacggttggaacagccaggrtggtgcatggggcagggagctgtccaaggtctgtggcaccaagaacctaggtgacatcagaaaacacatgtgggtcaatgtctgttaagggacccactta

SEQ ID NO: 339767 - DNA, 201 bp, Homo sapiens
tagagggtacgctcggccagatggctgggggtgccgctggccttggcgcccccgccgtccccgcgcggtcgcccaccccggcccgacaagcagcttgggcrtccagcccggcccggtccctgcagggagggagcgcaggagctgggggcggctctcccggggcggggctcgctccacaagcgccaggggccgcgcggggcg

SEQ ID NO: 339768 - DNA, 201 bp, Homo sapiens
atacagtgcaatatttactcttgttttatttgctgtgagcagacactcttagaagttttctctggtggaagtgactcgggccaactgaaatgccagccatwgtcttgatccctggcttctgtttcttctccttgtaactattgttccttgtaactgttgttctttacaataactcgtaaagtatcttatttatagtaaact

SEQ ID NO: 339769 - DNA, 201 bp, Homo sapiens
tttagcatcgcctggggatacaatgcgtggggaggggtttgtttagggaagaatttcaggatgtcaggatgtgtgctttatagataacaatttcatttaayctttaaaatcccccgaagtatggatcagctccattttacagattaggacagagttgcagtgagtagcccaaagacatgccaacacattgactaaaataac

SEQ ID NO: 339770 - DNA, 201 bp, Homo sapiens
ggattttccccccatgctgtttcatgttgaagatatttcagcaaattggtcagagttctgccaaagtattttgaatgttctttagaagtgtttggaatgayctgatttttctcctcaggacacatctgaattttcttaggcttttggaactctttttttgttttaaatgttacataagctctttggttcgagcattgaatg

SEQ ID NO: 339771 - DNA, 201 bp, Homo sapiens
tgacatgttatgacatttaaggggaaaaaattttataagcattaatcaatgtaagatatttgttgctttttcattcgaccccatccagctttcatcctgaygcacaccatactggaggcatggctgcttgtttaattgtttagtgcagaacgcggtttgatctctttcttgtgctttcagtgctggtaaattaatcaaaag

SEQ ID NO: 339772 - DNA, 201 bp, Homo sapiens
gagaggacagtgaaattataatgccaattgagatagcagatagcagaatagttttgactaacatgaaattgtggatccttaggttgtttttctgtcttccktgaaataaaagttgacactttctaactcttggcagcaggtgggccaggcatttgggaggcactgcagacgctgaagagaacagacctttgccttgcagga

SEQ ID NO: 339773 - DNA, 201 bp, Homo sapiens
gaatgtgggtgaggagggggtgtaggcagcagggaatcatgacgcaggcattgtcacatcgatgtcagagcaggaggctgtgctcggtgggggcagtcagraagccccttgagtgagcagctacagagcttaggctgttcctggggcaagggagatgggaggaatttaagaaagagtgggacagctttgccttaggagcag

SEQ ID NO: 339774 - DNA, 201 bp, Homo sapiens
ccggtggtttcagcccagctttgggagcaccgtagatactttcagttcagcagggcccttcgccccaccacgtgatgggattctagaaatgagtgtgttcsagtaatagggaggaagtgtggggagcctgggggccctgtcggcaggtacctcatatgtgtagttttggcatcgagtttatacgagcacatgggcatcaaa

SEQ ID NO: 339775 - DNA, 201 bp, Homo sapiens
tttagcttactgtgcaaatgtgatttatttggtgggtttcctgattctcctacaaggagattctctgtggttatttgaaagtaactaagtcaacctcccayaccttggcttactttgaattcaacctcgtcaacagatgccctgagggccccagactgtaataagcagctctgctacagtgcctaccagaagggtaaaggc

SEQ ID NO: 339776 - DNA, 201 bp, Homo sapiens
ccagtcagaactctcttttcaataatgttgaaacattttcctttgactggaaattaataccttcaatttagaagaactctagttagaagtttatagcacaratatagccccatgtaactaagggaatcttggagaattttctgatgtcaaaaaacagagcggtgttagctcattttaaaaaattgttctagtcaaatataa

SEQ ID NO: 339777 - DNA, 201 bp, Homo sapiens
atgtcaatttctgtcaattttcttagtgaaacactgtttctagacttccacttatactaattgcaccttgattggattatttgctgatttgttttttgggytttttgttgttgttggaggtaagagtaagaggaaaaactacttccagcacatgaatggaaaagaatcactttgctgtttgacgttgcttgaggagacaat

SEQ ID NO: 339778 - DNA, 201 bp, Homo sapiens; identical to SEQ ID NO: 71398

SEQ ID NO: 339779 - DNA, 201 bp, Homo sapiens
gaagacaaaggcagagctgttgaaggccattcaatgttgacaagtaaggaactgagagactaaggcatttgatgggccagtgctgtgattttgaagatgcrataatggtgaagctgggccagaaaggaatgccatgagccagttgtcaagtcttctgtgagtgacagggagcaactgagaggtgtggcctggctacggggg

SEQ ID NO: 339780 - DNA, 201 bp, Homo sapiens
gactgtctagttgcaggaagacaagctcagggctcccactgattctacattatggtgagttgtataattatttcactacacactacaatgtaagagtaatrgaattaaagtacacaataaatgtaatgcacttgagtcaccccaaaaccatccccacccaagtctgtggaaaaattgtcttccacgaaaccagtacctggt

SEQ ID NO: 339781 - DNA, 201 bp, Homo sapiens
cacctgaactggagtgattcttgaatctagccttaatgaatctttctatactctcctgccaacactggcctcagctccacctgggctggtttccccccagyagtgagaaggcaggtgctaagcctgtgataaggttgccattctccttccgtttctcctttgctgtctacatcattcaggatgccactcagctttctcctg

SEQ ID NO: 339782 - DNA, 201 bp, Homo sapiens
tgtccatccacttattttgaaaccctctaatgttctgttttgcattattgatatgtatgtgtttgtgtatgtcttttttattcctcaaattctgagctccrggaggaaaaatatgtgctttagaaatatctctgtgtatttattgcagagctgtgctattatcgtgaaggtcttctctagatttttatggtatggaatgtc

SEQ ID NO: 339783 - DNA, 201 bp, Homo sapiens
tcaataatttatgaactcagaacacacagaacagaggactttttgttgttgtttttaatttatgatttatatctctttgaaagtccggcaaagacacatcrtatttctcaaatcaactttagagaaaaacaagaatgtgaagctgagactcctccagtcaatgagaaagttttgataccaaacctattaaatgcaaattaa

SEQ ID NO: 339784 - DNA, 201 bp, Homo sapiens
aatatggttgttttacctcctttcccccaaccccttgccccaaatctgttctgtgacccttactgactttcaatgctgttgtgtagaattcaaccaaagcrcctctcaagagatcaaatgttgagaaggtgactaacgtgcagatcctggtgttgtttggcatcctcttggtcatggccttggtgagctcggcgggggccc

SEQ ID NO: 339785 - DNA, 201 bp, Homo sapiens
gcactgtcatatatattacatctgtatataagttcaacaatgcaattttatgatgcttttagcaattgcttttttaaaattgggaatatataattatactmtcttttataaatcctgtagaattatcattactagtgtcctttgtttttgtggattttaattactgtctggtatttctttcatcctggagaacttctttag

SEQ ID NO: 339786 - DNA, 201 bp, Homo sapiens
catgcagtatttctctcctgctttttcttctaaatgtactctttgtttgattccgcaagtcagctaaagtagcaagtcgttgttcctcaaactaattttcttttttttttttttttgagatggagtctagctctgttgcccgggctggagtgcagtggtgcaatctcagctcactgcaagttccacctcccgggttcacgc

SEQ ID NO: 339787 - DNA, 201 bp, Homo sapiens
tggagcaagaagacacttgcttgtgtttagtcttgtcttggccacttcttaggttgtgacctcgggcatactgtgtcaatctttccgagctgggttttctyacctgtaaaatggagagaataacagcaccaattttgcagagttgtgcttaggattacagcagccaatgcgtggaaagcacttagcccagttactgatgat

SEQ ID NO: 339788 - DNA, 201 bp, Homo sapiens
ctgttatatgtgttcctgacccccaaacccctcatttctcaagtttcatggctggaactttcttcattctcaactccccctttggtaccctcccaatccargcggttgtgtgtctggctcactctggcctttatctcctttctgagctcagtgactagctctattctgaaggcacagggtcctgctggctccatgctgcag

SEQ ID NO: 339789 - DNA, 201 bp, Homo sapiens
ccattcaacttttacatgaaatgcgcttgcccagatcttaatacattccacatcatttagtagagatgtcaggttttcagaagctagactcctgtcagaaygccactttaattgttctgtttttgtggacatgcgataaaattgtcacagacgcaagtaccgatgcataaattctgaacccccaagcaaagtatccttatt

SEQ ID NO: 339790 - DNA, 201 bp, Homo sapiens
ctgggcaaagtgatgcacacctgcggcctcagctgcttgggaggctgcggcaggaggatcgcttgagaccaggagttcaagaccagcatgggcaacataargagatcctgtctcaaaaaaagtatatgtatataaaatataatatatattagcacagtatatatatatacacacacatatgataaggtatatatatacctt

SEQ ID NO: 339791 - DNA, 201 bp, Homo sapiens
tgcacgtagtcactctgaaacccattcgctcatggattgttcttttctctgtcagcactcaccttgcttttcaaaatacgtcccaccttagacccaacccktgtgaggctgcctcttggtcaaacactgcattctttgaaataaaaactgaactgctctcacctttccttcgttgttgcatctctctaaggcacactctct

SEQ ID NO: 339792 - DNA, 201 bp, Homo sapiens
tgcccccaagcacctagcttgggtcagctgtggtctggggtttttattttataggttgaattattatatgttgggaatacttattaagtgtggcatgtgaytccaggtcacaagttaagattaagaaacagccggcttgtgcttcctggcaacttggtatactaaaatactgcatatggctaaagtggagtggtgcctctt

SEQ ID NO: 339793 - DNA, 201 bp, Homo sapiens
ccactcctgagattttccgacccctgcagtgtgaagtggccaagcctttgcctgtgggcttcctttctctccagaccaccttgaatttgctgatggagagrccagctttcttgatcagttgggtgacatacggacttaaggaggagtcgcagcctcaggcctgctgagtcctgtttaagttcctgttttacgctctcttgt

SEQ ID NO: 339794 - DNA, 201 bp, Homo sapiens
gtcgcagcctcaggcctgctgagtcctgtttaagttcctgttttacgctctcttgtgatactttcatggatgcataagaggagttgcagattaagtgatgscctccttagtgaggttccacctcagtgaatgaatgattttaattaaagagtgattaatataatcataagaatccagactgtagatccactatgtcctcag

SEQ ID NO: 339795 - DNA, 201 bp, Homo sapiens
tgaatggcaaggaagaaatgattttagatgtagctgaagagttagaggtcatatcttcgaggacactgaaggagaaataagggttggaagttttttgtttytgttttgagacagggtcttgctttgttacccaggctggagtgcagtggtgtgatcatagctcactgcagccttgacctcctgggcttgtgcgattgttcc

SEQ ID NO: 339796 - DNA, 201 bp, Homo sapiens
gcctcctacagaaagcagcctttgaactcaccgttcctgacatgcaggaggtgctcaataactattttaacatgaatctctaaatgagccaatagactttrgttgtgaacacctttcagatactctggtttccttccacagacaccacctcagataattttggatacaacctactgacgttcatcatcttatacaacaatc

SEQ ID NO: 339797 - DNA, 201 bp, Homo sapiens
gttagagccatagcgcttgagcaggcaaacaggcctcatctgccgtgctccttgggctctcatcttcataaggaggacagtattgtgggaaggttagtagmgaagtcagttttcagtgtcgcatttccaaatttgtgtggtctttccacataagagtttgaaaatataaagggcttcaattcgaactgtttggcagatgta

SEQ ID NO: 339798 - DNA, 201 bp, Homo sapiens
gggtgctgcctttaccttgaattcacatggggcagctggctggactgagcttcacaatcaggctgagctgctggatgggcactacagtagcctcagatcakgccagggtgtgttctctgctcaagtggtaccactatttgagttctgcagttggccagggttgtgggaggggcctcaaagttaagtggagacactgagatg

SEQ ID NO: 339799 - DNA, 201 bp, Homo sapiens
tctggttattttatcccttttgtgcacatggccttttccctttaggagaaatggagttcagggggccagaaagatgagaaatggggttcttcagacttacstgtctaggccaccctcagtgttactcccttgtaccgacatggtgggagaatggttaatggaaggacagtggggcctttcactcctgcctcctgaacctcc

SEQ ID NO: 339800 - DNA, 201 bp, Homo sapiens
ggccagtccttgctgattcccacgttggtcagcactggacacagaacagatgttggggattatagggaaggattcgggaggccatgggcctgagtgtctgyggaagtcattcattgtggagacgcagacaggccctgcagagtcttcagtgagaagttcgattaaataagcctcaatgggcctgcgtatcaggacgcaaaa

SEQ ID NO: 339801 - DNA, 201 bp, Homo sapiens
ttctgttatcttttttatttatttctagtttgattccattgtgtttgtagcatgtattgtgtataacttttaagtgtgttgaagtttgttttgtggcccaraatattctatttcttgttatatattccatgtgcacatggaaagaatgtgcattctgttgttattaggtagagtgtggcatgaatatatcctgttggttga

SEQ ID NO: 339802 - DNA, 201 bp, Homo sapiens
gtgtgtgtgtgtgtgtgtgtgtgtgtgtgtgtgtgtgtgtatttcttttttagatgaagtcttgtgctgtcacccaggttggagtaaagtggtgtgatctyagctcactgcaacttccatctcttgggttcaagcgattctcatgcgtcagcctccctgagtagctgggattacagacatgcaccaccatgcctggctaat

SEQ ID NO: 339803 - DNA, 201 bp, Homo sapiens
tctgggttctctctatttctctttttttaagagatggggtctcacaatgttgctgatctcaaactccaggcttcaagtggtgctcccaccttggcctcccratggcttctctattctgttccattggtctatgtgtctgtttttatgccagtaccatgctgatttggttactacagctttgtagtatgttttgaagtcagg

SEQ ID NO: 339804 - DNA, 201 bp, Homo sapiens
tcaaggaaagtagctgtgttcattaaggacaatacttagtgctttcaattgctgacaaagggaacatgctgcatttccagcgacttcctaacagtgtcacytgtgtatacagagaaccctcaaagacctgatatgtgtatgtcagactcagaagattgcccaagaaaataactagtttgctaaatggattgtaaacaaaat

SEQ ID NO: 339805 - DNA, 201 bp, Homo sapiens
agcaccaataggatacctttcagtaaatttgcctttttcccaacagaaaattaaacatgggcacctgctagcttgtaagatctggcagtttttcacaagtwtcgtatcacttgaaattcctggtttctaagagaatagtaacatggctagaataggaaatagaaagcataaatgcccactttgagctttgcaactattact

SEQ ID NO: 339806 - DNA, 201 bp, Homo sapiens
ctatggggttggccaagctgctctgtgatccaggcaaggtgctgctcctggcagataggtctctgatcttgctaataataacctctcaccttcagcttctrcatctgctgcatggctttttctgctgcattgcctgctgaagcacagctgtgctcatgacagcctttctctataatcctgttccagtctcactcctcccaa

SEQ ID NO: 339807 - DNA, 201 bp, Homo sapiens
gctgcatggctttttctgctgcattgcctgctgaagcacagctgtgctcatgacagcctttctctataatcctgttccagtctcactcctcccaaaggtgytgggacaccccctggctaggtgcttaaggtcagggagaagcagtgatttacagctgtcgccttctctgtagttatgagaggggtgctgtccaggaccacc

SEQ ID NO: 339808 - DNA, 201 bp, Homo sapiens
tcctgatgtgctgtactgcactggtggcctgaggatgaaagaaaggtccactccgtaatgatagcccaaaggtgaaggaagatagccaatttcctaacccrtagggtgcatatctgagaccacctttgcaaaattatgactgagacagtggaagagatctaacttaaccgactccatcttgcttctaacctccaagctgtc

SEQ ID NO: 339809 - DNA, 201 bp, Homo sapiens
gagagtagatgttttaaaccatgatcaaaatttcatccagtgacttttcccctcttgcatataatgcatgacttaactatacctcaaaacaatgtgtttcrtttgggggacacaagaaatttcattacacggtaaaagataaaatcctaatagctaagctttcctcttctgtcctgtgcatctgccttggcagagttagct

SEQ ID NO: 339810 - DNA, 201 bp, Homo sapiens
agtagagaacacacatgttgaatgatccatttccatggctaagttcgtggcccctttttcctcctgctctctggctcatgcccttagcctcttaaagaagwgttacggaagagaaactccgagcagcctcctggcctgtttttcctgagccgtaaggtgggtgcttcactcttcacagggctagccccgtatagctttaat

SEQ ID NO: 339811 - DNA, 201 bp, Homo sapiens
tccagcagatgtcctaagagtttagaatgcccttaacttctcagttccaatgtcctggcagatcaagtggactatttaaagatggatcaagaataggagtkatatacacgccttcttgcctggtttttcaaacagagagaaggcaaagtagattcatcctattaaatactacatgtgcctcaagagcatgtcagtgaaata

SEQ ID NO: 339812 - DNA, 201 bp, Homo sapiens
cttgcttcctactacacccagataagaacagtatgacactggctccaaaaattccccagtctcctctgtagttaacccctgtccccctcaggggactcagwtcctggcaacagctggtctgttttctgacctatagttttgcatttctcagaatgctgtatgaatggaattgtacagtattatgaccctctgattccaatt

SEQ ID NO: 339813 - DNA, 201 bp, Homo sapiens
tacatgtgggaaaagtcaagcaaaaacttggcccaggggcctctggttccataacaccattggccgggcctctctgcctcagggcctctccggcataggtktcccatggttggggagtcctggaagtccagctttggggtctgggaaccagggaaccagggatcagaaagtcactggactccagggactatatcatagttt

SEQ ID NO: 339814 - DNA, 201 bp, Homo sapiens
agtaaaatgtgaccagaatagcattgacagtaatcaagcaagacgatggtagaagacggaggagttggcctggtgaccaatgcctgccagccctttctgcrcagaagaaatgccaggacccacagacatggctttccctggaaccactcctctgttggtggtctcactggtgcctgccgctagcagagagcagcatggtta

SEQ ID NO: 339815 - DNA, 201 bp, Homo sapiens
ctacagggagcaataggatgactggatgttagttggggatctgcttgtgtgagccctggtgcctgttgaaggtgttgtatctgacactaatcccgcctcaygtttgcagcccacagccccttgcattcaggagttcctcacccttctggccgtgtgccacacggttgttcctgagaaggatggagataacatcatctacca

SEQ ID NO: 339816 - DNA, 201 bp, Homo sapiens
attaaaactcaaccagaattggaagagacccaagacgtgacaagtaagtactgtgtgggtccctgaattggattctggaacagaaaagacattggtggaaraactggtgaatcttgaataaagtctgtaattggattagcattgtgccagtgttactttcgtagttttgacaattgtgctatggtgatgtaagatgctaac

SEQ ID NO: 339817 - DNA, 201 bp, Homo sapiens
atggtggctcacacctgtagtcccagcactttgggaagctgaggtgggtggatcacctgaggtcaggagtttgagaccagcctggacaacatggtgaaacyccatctctactaaaaacagacagtactaaaaaacatctctgctaaaaacataaaacactacctgggcatggtggtgcgcacctgtaatcccagctacttg

SEQ ID NO: 339818 - DNA, 201 bp, Homo sapiens
tcatcacccagatactaagcctagtactcaatagttattattattattattatctgagacagaatctcattctgtcgcccaggctggagtgcagtggtgcratctcggctcactgcaacctcttcctcctgggttcgagcctcagcctcctgagtagctaggattacaggcatgtgccaccatgcctggctaatttttgta

SEQ ID NO: 339819 - DNA, 201 bp, Homo sapiens
tcgtagctcattgcaggctccaactcctggcttcaagccctcctcctgcttcagcctcccaagaagctgggaccacaggcatgcaccatgcatgccttgcttttttttttttttttttttttaagagatggggtctcactatgttgctcagtctggtctcgaactcctgacttcaggagatcctcttgccttggcctctga

SEQ ID NO: 339820 - DNA, 201 bp, Homo sapiens
catacagtgttagagaaatgaactaaagtgaaatgaaattaaagcagaatataaagaccatgagagtaataacagtggtaacttgaggcccaatatataattttttttttgagacagggtctcactctgttgcccagtctggagtgcagtggtgcgatcttggcttaccgcaacctccacggctcaggtgatcctcccacc

SEQ ID NO: 339821 - DNA, 201 bp, Homo sapiens
ggttttgccacattgcaccagctgttctcctggactcaagtgatccacctgccctagcctctcaaagtgctgggattacaggcgtgagccacctggcaccratatatataattttaagttaaaacttttttgtgtatttttacatttttgaggcatgtaaatatattacctgtgcatttttttatttgtacgccttatgta

SEQ ID NO: 339822 - DNA, 201 bp, Homo sapiens
gtacaagtttttgcaaggatatgtgttttcattttttcctgggtatatgcccaggagtgaaatcactggctgaatggtaactgtatgtttaacctcttgargaaccatgaaactgttttccccagtggctgccttattttacactctcaccagcagtgtggaaaggttctaattcctctacatccttgccaatgctggtat

SEQ ID NO: 339823 - DNA, 201 bp, Homo sapiens
atagaagctccaggtggcttaggaagcgtggacagtggccttccctctggtttccatgagaagggcaaggcgggatgagcaggtttagaattggctgatakggataatttcagtgagctctggacataagggctgctctggttgtctggcatctggctctggaatgatcagggcaggcttgatgagtgagagtttcctaag

SEQ ID NO: 339824 - DNA, 201 bp, Homo sapiens
tccaatctcccgtctgtgtcttttcctgtcctgctgatactagaaagctgaaaaatcatcccctggcagcaagggttctgaaaatgactagcctgtcagartcacttatgtaagacttgaacacagagcagaattaagtgggtagagggatggtgtggtccagacatcagcttgctggcctgactggcaggcgagctgtgc

SEQ ID NO: 339825 - DNA, 201 bp, Homo sapiens
tgttgtacttggcactgcacgatgtcatggcctgtgtgccatgctctagactcacacacctggaggctggcattgtgtgggttctggtttctagtacaatygtgtgtaggtatagtgggtgtttcatggatgttgttttgctatgcattttaagaggcattgtcaaacctgagtggtggttttgtttattagcttgagaag

SEQ ID NO: 339826 - DNA, 201 bp, Homo sapiens
ttagttggcctccatattggtagggatccaattgtacacttgcacaaataaaacttttctttagtttcattcatgatgtgatttctcagcatcatgaacgwttagttataagccagcttcctactttgacatcctattccagagagcattattaacttgtcgaggctgtaagtctatccttgggctgtttgattgtggctt

SEQ ID NO: 339827 - DNA, 201 bp, Homo sapiens
gggcattgagagctgtccagccgagagtgctgtcatggaggtgtccaagcgggggcagaatgtccaggactaggcgggtgggatcagtgtgctgcctgggyggaaacgcctctctgatattgggtctagaagagacacgagctgccacctggcttcactcctcacccctcactgtatagttcaaacagggacttacgcaaa

SEQ ID NO: 339828 - DNA, 201 bp, Homo sapiens
acgcaaacagagtagcctattagagagccgaatgaaaagggaagtaaccctactgtttgtgaggttggaaagggtggtcggcatgctgacaagtaatgacrccatgaagcagcgttcatacagaactttccagctgcaggagttgtgctgagatgggaatttgcgttctaggtgagacgcttggcactggtgctacccttg

SEQ ID NO: 339829 - DNA, 201 bp, Homo sapiens
ctctttaggaaggatttaagacaacatcctgttcggaaggggcttgaagcactttataaaagagaggcaagggcacacgtcaaactagaagaatgaaagtragaagagagaaggctgcagagaggagcaagccccatccgtccccctgatggtcctgccagtgcatgggttacctctcattgcatttagtgcggtctgttg

SEQ ID NO: 339830 - DNA, 201 bp, Homo sapiens
tattatccttgattacattatgttgctctgtttttgaaagagaaagtattcaagcaagtgtcacttctatttcttgcaggcaactatggtcctgagctccrcacacttctggttgggattatttctggttcctactgcctgtttgattgaagatgtggcatggagagcgtaagtttaacagtgaagcggggaccctaagtc

SEQ ID NO: 339831 - DNA, 201 bp, Homo sapiens
cttacggaagaggtagtttatgttagaatacaggagagctgtttttaaaggtcccttggtagatgtgggagtgttgaattagagtgacctaaagcacagaktctcttcaatttttttgggcatgctgatggaaaagggagcacaggctgtcccctaggaggtcacgcgttctgcctgcctccattcaccagtggctgtctt

SEQ ID NO: 339832 - DNA, 201 bp, Homo sapiens
aaacacaataatgtaattaacttgtttcgaattttgtaaaatgattttattgcaaagttagctaaaaataaaactctagtgtttaaacaaaacaaaaccaraaaaccccactactgataaacaacctcagcaaagtctcaggatataaattcattgtacaaaaatcactagcattcctatacaccaacaacagtcaagtca

SEQ ID NO: 339833 - DNA, 201 bp, Homo sapiens
tcacatgtacacatggatgcagagcaatggaggtgagagtatgtactaagaaagtgtgcatggctcctggcttctggtagaagctctgtccagctataaarcaaacaatttttgttgttgtgaggaaagtgagtgcaacaagtcccctgtggatttctccttgaagtctttgtagcacattgaaatcccagggctgctttc

SEQ ID NO: 339834 - DNA, 201 bp, Homo sapiens
tcacagcacaacaatgagaccctgtctcaaaaaaaagaaaagaaaaagagagagagagaaagaagaaaggaaggaaagaaggaaggaaggagaggggaggrgaggagaggagggataggggagagaggggagggcaggagagaagagaggagaagagaagagaagagaagagcaaaactttggaattgtttcataggagtg

SEQ ID NO: 339835 - DNA, 201 bp, Homo sapiens
tgtacacatggatgcagagcaatggaggtgagagtatgtactaagaaagtgtgcatggctcctggcttctggtagaagctctgtccagctataaaacaaamaatttttgttgttgtgaggaaagtgagtgcaacaagtcccctgtggatttctccttgaagtctttgtagcacattgaaatcccagggctgctttccattc

SEQ ID NO: 339836 - DNA, 201 bp, Homo sapiens
acctgttttaattgctctggagaatgcctgattctctgagttattgcctagaggttttcagagtaaattacaagagtactacatagactttatattaagtygggtcaccccaaatattttatgaaaacctgcccagccatttctacatgacatggtaacaagcatagagatgaaaattttatttatctagattaggcaaaa

SEQ ID NO: 339837 - DNA, 201 bp, Homo sapiens
atatattccagtaattgcttcttggtatttgaatcaggccaaggataacatctatcagaaaggtcttttattgatattgaaattctgccccaacgcattcyctctcctacacacacacacacacacacacacacacacacacacacacaccttctctctctctctgcctgcccccaccatctcatattttcttgtaatcat

SEQ ID NO: 339838 - DNA, 201 bp, Homo sapiens
taatgtttcgtctattgcaggcatacctcagagatattgcagatttgggaccagtccatagcaataaagcaaatactgtaataaagcaagtcacactatctttttttttttttggttttccagtgcatataaaagttatgtttacacggtactgtactctattaagtgtgcaacagcatcacatctttaaaaaacccaatg

SEQ ID NO: 339839 - DNA, 201 bp, Homo sapiens
gatccttccagcagagactctcaaagtgccgggattgcaagtgtgagtcaccatgcccgacgcctgagtttacatagtagctatgaaatagtgacagtacrgcgtttataaacactaagaaagtagaacttgagttacttcgattctgtcattttatgtgaccacgtggggttttttacatctaacatttaagatagcaaa

SEQ ID NO: 339840 - DNA, 201 bp, Homo sapiens
tggaaatcattcaataagaaggcaggtgtgtgttgtttattacctccaaacatttgggaccctctcttcactgcataggggccgtgagtactggagttccraaaggagagtgggacacacatgaaacccattttaatgaaggaatgtccaagctggttccccagatgctgaaattagatggggacctactggggaagagcc

SEQ ID NO: 339841 - DNA, 201 bp, Homo sapiens
ataaatacttgtgctttattctcttttttttggacgataaaaatttttattattttatttactggcatgattagatgcagttttattttttttgtttttgrgacggagtctcactctgttgtccaggctggagtgccatgttgtgatttcggctcactgcaacctttgcctcctgggttcaagcaattctcctgcctcagc

SEQ ID NO: 339842 - DNA, 201 bp, Homo sapiens
agccaatatgccagaacatcatatttttaactcctttggtggcatgaatatggagctcctacctgagtctaaacacatgcagccgcttcccagacacggartcattgccatagatgattatgtgggatctgacagaagtttgttacttgaaaataatttcacacaagtcttccacgttggagggcagctgtgggctgcaga

SEQ ID NO: 339843 - DNA, 201 bp, Homo sapiens
ataagatcagtcctgaaaagtcaaccaaaagatgctcacgccagacattattgcacagtatcttgaatcaggcccagatatctaaaataagcctctttccmgtgatttttcaagaatcttgcttattatatagggtgcagcaactcattttgactttaaaggagtagtgtggcaggctcctggacacctggaggcactata

SEQ ID NO: 339844 - DNA, 201 bp, Homo sapiens
ggttcatggagtcaatttaaggaatatcccatgatatgtaaaaatatatatgtatattattaaattgtatatttgtaaagatgtggcccagatataaactktatttacctccagccatataataagtaaatatcacacagattagttgtgcagtccaactctcgtgcgtgtgcacagatcagcctcgggaccaaaatgcca

SEQ ID NO: 339845 - DNA, 201 bp, Homo sapiens
ctgccaatccttcaaaaactgactcagatgttaccattacctgaaggctttcctaagttctccacatcaaactgtggttcacttagccaaacctgtttgtygttaatacgttggaatattacctgctgtttcctgtagctagaagtggtgcttagtactatggttttcggaatcacagtactgaagaggcatctgagaact

SEQ ID NO: 339846 - DNA, 201 bp, Homo sapiens
gttttttccagtatgtataaaatgcttgtcttaattaatagtcattttctgctgggggtggggtaaggaatggccgttttaatgatattaatgtacagtgrattcttggctgtgaaggagtgttaccaaatattacagcttgtattaaaagtgtaaagatagaaataagtggtgcctgtttaaaaagctataagatttaga

SEQ ID NO: 339847 - DNA, 201 bp, Homo sapiens
atttcaaattttctggttcctttaggactgtgttaagctttgtgtgggctgatagccaagatggaatttggctcttagagaatcaacctatgagaaatttyggaggacaatttatgcaaccccctgcttacattgctaaccagtgtgtgggataaattttcaaaggttcaccaaggaagaagatataactttcttttgaat

SEQ ID NO: 339848 - DNA, 201 bp, Homo sapiens
ggagcttgcagtgagccgagattgcgccactgcagtccgcagtccggcctgggcgacagagcgagactccgtctcaaaaaaaaaaaaaaaaaaaaagtatmcagtgctcagacagagtcactttatagtgtgatgggaaaggtcacatgtaataatctatggtcctcttgctagtaagtgcatgcccctaaaccaggctat

SEQ ID NO: 339849 - DNA, 201 bp, Homo sapiens
gattgaatgggtctgaaattgctttgactccagtctcaagtttgctgatgataaaacttctattagatttgttaagtaggatttgttttttcggcggggcgggggggggtggtggtcacaactcattggaaatgcctgttaatcagtctctctctctctctcaagagatctattgacatatacccttcattcttccagttt

SEQ ID NO: 339850 - DNA, 201 bp, Homo sapiens
ttaaagtctgattagtaaaatcattttgtgttttacaactgttatacgtgttaaagtcaccttcacacgtataatttaacctcgtagacttcttaaaacayaacctgatataagtgccttcactttttatcacatcctcagccctttatattttttgttctcagtgtatctgacctagagactctatctctctagagatat

SEQ ID NO: 339851 - DNA, 201 bp, Homo sapiens
ggttattctgaggaaattggatctaacaagtgtttggttacagcttcctataaaggacagttacgtttagctttgttgaaaatccaattttatatttctcytagataataccgaatgatgagagagctcttccgctctccctgctgaaagttgttgattttctaattgagcagggctcatttgaggggagctgacagattt

SEQ ID NO: 339852 - DNA, 201 bp, Homo sapiens
ccaatatggaaaccaggaggccacgtcttggacatttgcgtatttcagaaaaagtcatcaaggcagatattgcccaccagttttgttccagatgtacccakttggaaacccttgaaaccagaaacattcatgagatagagttctggccaatgagacgggagctgagggcatctgaggaagccccacttcccggatcgaggt

SEQ ID NO: 339853 - DNA, 201 bp, Homo sapiens
ctcctgtccacaggctcccctgtctccaatgcactgggcttgtgcctgcctctgccctgcctaatatatgattgtgatagtaaagttaatgtgtcaactcracagggctatggggtgcccaggcatccagttgaacattattctgagtgtctgcgaggggatttctggatgaggttagcatctgtatcagtagagtgagga

SEQ ID NO: 339854 - DNA, 201 bp, Homo sapiens
agctttccatccagatcttatttgatgttgtagttcctgaaccctgtctccttgggaagtgtcttttctgacaaggtatgtcctccccgagaaccagtgcmcccttgactgagggcaaaagcgtttgggacctgaaaaggatgggtttaggcccttgcctttggataactcgatctcagagtggctgctgctccttacttg

SEQ ID NO: 339855 - DNA, 201 bp, Homo sapiens
ctcccatcttattacatttttaaaaagttgctacataatagttgtattaacacatattttaaaggtacatgtaataatttgatacattcatatagtgtgtwaagatcaaatcaaggtaattgggatatccaatgccttaaatctcttctagatattttgacgtgtacaacagattattgtaaactatagtcaccctgctga

SEQ ID NO: 339856 - DNA, 201 bp, Homo sapiens
tggtattggtgatgggaggtggtgagattctgggcatatagtattttgatagtaaagctgacagggtttgctgatgtattggatgtgggatagaagaaggwtaagacccgaggggtttggatctgagcaattggaaggatcaggttgccatttctgagaagaggaagaccataggaggagcaggtaaggtgggggaataag

SEQ ID NO: 339857 - DNA, 201 bp, Homo sapiens
gggggaagagtagattatttcctcataaatctttcattttatagttatcaaagtgccctccataaatgtattgcctgctcccttcttatcttgaagtatgrtacagatcactaagattcctgtttccctggacttggaaggaaggcacaatagggtgagcgaggtgccacacaagttattagaaactgctggggagagagg

SEQ ID NO: 339858 - DNA, 201 bp, Homo sapiens
tcaatatttaataaaaataaattgaattaattaatcctttccaaccttacagatatttctgattgatagatccattgtccagcaacaataatatatgactrtgtctatcttagtaaataaatttctaaaaagctcaaatactgggacatgaatggctcactgagagcaatagggtgtggagaaagagagagagggagcgag

SEQ ID NO: 339859 - DNA, 201 bp, Homo sapiens
gtgtggagaaagagagagagggagcgagcagagggagctggatgtacacgcagttgcagtcagtcacttgtttcctgagtagactatttgagtttttgaayggttattggtgtgattatgtctatcccatcaaattgttgatgaactttccagttttttttggaaaataaatattaaaggatacaattctgattatgttta

SEQ ID NO: 339860 - DNA, 201 bp, Homo sapiens
cctcctcccatgaatcataggtgttcttagtgacatctaaaatggtgaatccttgctgaaaggttttcaatttactttgcccagacccatcagaggaattrctgtctatggtagtatgaaatctatttcttaaataataagacttaaactctaaatgactccttgatccatgggctgcagaatggatattagataaacatg

SEQ ID NO: 339861 - DNA, 201 bp, Homo sapiens
cctcccatgaatcataggtgttcttagtgacatctaaaatggtgaatccttgctgaaaggttttcaatttactttgcccagacccatcagaggaattgctrtctatggtagtatgaaatctatttcttaaataataagacttaaactctaaatgactccttgatccatgggctgcagaatggatattagataaacatgcat

SEQ ID NO: 339862 - DNA, 201 bp, Homo sapiens
tgaactttccagttttttttggaaaataaatattaaaggatacaattctgattatgtttatatttcgtttcattttgttttcaacttaccctgtgaatttygtccatgatgttatggtatcttaagggatgaatctaatacagaattatgcacaatttttgtcatttgcctcccttaaaagaaaaaaaaaatgtccatgac

SEQ ID NO: 339863 - DNA, 201 bp, Homo sapiens
cctgtattacattaacaaagaaggcattgctaatgatggcatgtattcactgcctgaagtagaagagatgtgtattttccttgatagggaaaattcttttkttgttgttgttgttgttgttgtttttgagacggagcctcactctgtcatccaagctggaatgcagtggtgcaatctcggctcactgcaacctccacctcc

SEQ ID NO: 339864 - DNA, 201 bp, Homo sapiens
agttatctgtctcctttatgggctttctggctgcctgtgaagtgttgttttcccaaggttttacctctggtcctatcgtattcccactccacatctccccrtgtgccttccatttaatgtgtcggatggcctcattcatcttatacattagtgacttctcacaacaccagcttcatatggaatcatctggagaactttttt

SEQ ID NO: 339865 - DNA, 201 bp, Homo sapiens
tctctacattacagctttgcctcctctccttctcccttcccacatagttacatctctaattttaattaattcagggatccatgataacctctttaaattaygtaaataatgttcattgtagggctaaaaagtatgatttttttttctttcttgttcaggtttcagttttctctgtggtttctaatggcctttctttttgtc

SEQ ID NO: 339866 - DNA, 201 bp, Homo sapiens
acccatagcacagagcaaaacttgaagcagggccttagtaaacagttcagtaactgaatttttaaaatatatatatgtgattctttccttataaccctccsctgggagagtagacagacctttcgctctactttccaaaaccagaaaatgagacacaaagcaagttcacaccttgcccaggccacaggctcactgtggctg

SEQ ID NO: 339867 - DNA, 201 bp, Homo sapiens
caagatgggtttttatataccgctgctttcatttatgagaagtggatttccagaaatagaatttctagacaaagtatatgtttatattttatcttactacmtatggccagatcaaatttcaaaaaaaacctgaagcattttgacatttaaacagatatctttggtgccagtttatcagcccagacctgatatgcaaattag

SEQ ID NO: 339868 - DNA, 201 bp, Homo sapiens
ctcttgaacaccagtgattcttagactttgtcttttgaggtaatttcctttatcttgttgacaatctttgttcctttttattcttttttcttctctgtgtrttttcaaattgcctgtctttgagctcatttattcttacttctgcttgattcattctcctactgacagcctctaatgagtttttcagttcctcaaatacat

SEQ ID NO: 339869 - DNA, 201 bp, Homo sapiens
atcctaaatccctgctactcaaagtgtggtcattgtaccagtagcattgaactcacctgggaacttgttagaaatgtggaatctcaggcccaccccagacrtactgaatcagaatctgcattttaataagctctccaggagactggtgtgttcgagaagtaccatcctgcaatattctggtagactcattttgataggtgc

SEQ ID NO: 339870 - DNA, 201 bp, Homo sapiens
ttgctttatttcagtggtcaggattgctgtagaggtatgcatgatatgccatttgattttgtcctctaagccatagttaagaagactttgtattgtgagcyatcacatacatgagttttgtgtattttccctactttttaatgaacttaatgtcagctgttgattctggccagatttcacagtgacatcctgttatgccac

SEQ ID NO: 339871 - DNA, 201 bp, Homo sapiens
gggcaacaaagtgagaccttgtctcaaaaaaaaaaaaaaaataagcaaagaacataaacagacacttttcaaaagaagacatacacagtggccaacaagcwtacaaaataaagctcaacatcacagatcattagagaaatgaaaaatcaaaatgacagtgaaataccatctgacaccagtcagaatggctattattaaaaa

SEQ ID NO: 339872 - DNA, 201 bp, Homo sapiens
tgcagtgctgaggccaccgtggaaatgagatgttttctacattttttgcttatttttttcacttactgatttttaaagtttatgtataatagagtgcgccwctgccattaccaactggagactctcatgtagaaagtatttccaattttaaatgtggtaacggtgtcctatgtgagcatgagatattttcctgatatagca

SEQ ID NO: 339873 - DNA, 201 bp, Homo sapiens
ccaggcgccatggctcatgcctataatcccaacactttgggaggctgaggcgggcagatcacctgaggtcaggagtttgagaccagcctggccaacatggtgaaaccccatctctactaaaaatacaaaaattagctgggcatggtggcacacacctgtaatcccagctgctcgggaggctgaggcaggagaatcgcttga

SEQ ID NO: 339874 - DNA, 201 bp, Homo sapiens
cagcagagtctgagagggtctgttgaatgatttggtttctgttgtttcttgttaaccagttaactgagctctgtgagagtcccagggctgaattgtcgccrgtggtttagtttctgacaggcctgtaagtgagagaggcagacagacagagagacagacagacaccccctccccaaccgtcccatcaaattcttgacacct

SEQ ID NO: 339875 - DNA, 201 bp, Homo sapiens
gtggatttccagaaatagaatttctagacaaagtatatgtttatattttatcttactacatatggccagatcaaatttcaaaaaaaacctgaagcattttracatttaaacagatatctttggtgccagtttatcagcccagacctgatatgcaaattagtagatcgtgatgttattgccacttcagtaagaaaccatatg

SEQ ID NO: 339876 - DNA, 201 bp, Homo sapiens
tctcaaaaagctgcagcacctgcaactgataaaaattagtgcaaacatatcaaaagtctttgaagaaacatgtggccaatccagtgccaacttggacagartcagaacactggctgcttagaggaaatatcccaacattcagctaatcaacaatgttaaatgaaatgaagaatgaaactttttacatgactcagtattgct

SEQ ID NO: 339877 - DNA, 201 bp, Homo sapiens
agaaagtaaatgattcttgtgactaattaacaactattttcactagtcagtggtttctgtttctttgctttttagaaaatttagaaaacgacctaatcacratgtcagcagatagaagatttcaaataactttgcaatacagcaccatattatttttggcatacggttcagaagaaatctaaagtattgatggctcttgct

SEQ ID NO: 339878 - DNA, 201 bp, Homo sapiens
ggtttagtttctgacaggcctgtaagtgagagaggcagacagacagagagacagacagacaccccctccccaaccgtcccatcaaattcttgacacctggrtcatctgagcaaaacagagcatgcatttttttctcttactaagcaagtattcatagtggcgtcctttcaccacttggacacaccaatcattaaagaccaa

SEQ ID NO: 339879 - DNA, 201 bp, Homo sapiens
ggtggaatcacttgttcaaacgaaaactaaattaaacatatttatagacaatgctatctcaccagctgggtattacagtgttgtttccccagtttaccaarcttttatatttttacccatctgataagaaaaacagttatatccatttgtgtacatgtttaataaaaatgagatttcctgtgtttctaagccttttcttcc

SEQ ID NO: 339880 - DNA, 201 bp, Homo sapiens
caacaatcttccagtccttcttcctagatgcataaatacgaatcttttccttatttctatcctttagtgaccacttaattttcttttctttctttctttcttttttttttttttttttttttgagacagagtgttgctgttgtcacccagtctggagtgcagtggcaccatctcagctcactgcaacctccgcctcctggg

SEQ ID NO: 339881 - DNA, 201 bp, Homo sapiens
ctttgctatattagacatcttattgtaactttcgttgcaaagaaaattcactttttcattagctctcttagtctcaccaagaatgtttgagattttcttcrgccgtgtggcttgttctcctggaaagattatttcatgtgcgtttgtcatatcctcttatttttttctataatatttttggaagatgtctaggggaaaggg

SEQ ID NO: 339882 - DNA, 201 bp, Homo sapiens
aggactttttgttgttgtttttaatttatgatttatatctctttgaaagtccggcaaagacacatcgtatttctcaaatcaactttagagaaaaacaagartgtgaagctgagactcctccagtcaatgagaaagttttgataccaaacctattaaatgcaaattaaatctatttttctatgaacatgtgcatattatctc

SEQ ID NO: 339883 - DNA, 201 bp, Homo sapiens
gcatattatctctgaaagtagatgtatgccttaaatataaattttccttacaatatggatttctgtgatatcgggaatctatgttttataaaggaacaacygctgcagtccctgtggctcatgattccttagcagctgtgtccagctggtggtccacattcccgctacttcttcagtgaatggaaacatttaggtcaatat

SEQ ID NO: 339884 - DNA, 201 bp, Homo sapiens
acactttcgtgtttttagctcaagtacaaatttctgaactacacctaaactcattccgcttcattatttttgttctgaattcttaaacatagatacaaatrtacagtgtgtgatctggtgtccgttctgtccttcctgaaagggtatctgtccttgtggaagaacattttcttctgcagttagagctaaaataatgaattc

SEQ ID NO: 339885 - DNA, 201 bp, Homo sapiens
tgctgaaaacatgatccactcaccccaccaccacacacacacacacacacacacacacacacacacacacacacacacgccacaaacccagtgaattcaasacgccttctcaggtgacgggtccatgctgtgtgggctgcaacctccagtcccagcatgctgactccttcccgcttctccccgtcagcccctgacatcagt

SEQ ID NO: 339886 - DNA, 201 bp, Homo sapiens
tccactcaccccaccaccacacacacacacacacacacacacacacacacacacacacacacacgccacaaacccagtgaattcaagacgccttctcaggygacgggtccatgctgtgtgggctgcaacctccagtcccagcatgctgactccttcccgcttctccccgtcagcccctgacatcagtgtgggcagcagttc

SEQ ID NO: 339887 - DNA, 201 bp, Homo sapiens
actagggtacccttgctgagaaggtagtaaagtgtggctatagctacatgtaaatgtaactcaatgtgtcaggtgtccctgtaactaaaggcgcaaaagtstgaaaagaatggcaagtgaagggcacctggacggtgggcatgttcgtttcctgttgccactgcaacagattaccacaaaggtagtggcttaaaacaacag

SEQ ID NO: 339888 - DNA, 201 bp, Homo sapiens
agtaaacaagtgattgaaatactatgtgtcagaccttctgctaggacctgtagagtaaatgtcaccctagataggcagatttcctgtcctcccagagtctrtcatctatcaggaagtgtagcctttaaacaagcgctctgaagaagctgtgataaatgctgggttctccattattgtcatctctgaaggccattggtaacc

SEQ ID NO: 339889 - DNA, 201 bp, Homo sapiens
taaaagatcactgtcagcagggtgtgaagggtttaaaggagtagcgatgagaatagaagtggggagatcaatttgaaaaatatttatgtagctcttattaygtgtaaaacattgttccaggcactggaactatgatcataaacaagtcagacatagccctggcctcatggagcttacattctggcactgaggatgagggat

SEQ ID NO: 339890 - DNA, 201 bp, Homo sapiens
aggaatggaatttatttgggtgtggttgaagcatgaaacatctgtggtggttacccagaggggaacatcgaattgttattcacacgcctgctgttcatagyatatagctcctagaaggtgggtagatgtctctgcttatgttgtgtgaaaattaaagaagcacatgtatatcttccaatgtagaaaacaaagaccacattg

SEQ ID NO: 339891 - DNA, 201 bp, Homo sapiens
aaagttcactcatttgaatgaaatgtttgttgattataaaaaatgaatcctttgagcagaagttttgttagtttaaatgaaatgtttgtggaaagaaaaayaaagagtctgattcccaggcccttcctcagagcaataaaatcagaactctagaaattctacaaactccccgtggcacctctcttctccttagttacctgt

SEQ ID NO: 339892 - DNA, 201 bp, Homo sapiens
tgttcatagcatatagctcctagaaggtgggtagatgtctctgcttatgttgtgtgaaaattaaagaagcacatgtatatcttccaatgtagaaaacaaasaccacattggaagattttctcatcaggggcgccattttacaaactaaagctctttaggagaagatacacagcaatttccttgtcttgagttttgaaacat

SEQ ID NO: 339893 - DNA, 201 bp, Homo sapiens
atctctacgtgtggtttcagcagtgtcagttcttttttttgaggcagagtcttgctctgtcacccaggctggggtgcagtggtgcaatcttggctctatgmaacctccacctcccaggttcaagtgattctcctgcctcagccttttgaggagctgggattacaggtgtgcaccaccacgcctggctaatgtttgtatttt

SEQ ID NO: 339894 - DNA, 201 bp, Homo sapiens
aacaatcttccagtccttcttcctagatgcataaatacgaatcttttccttatttctatcctttagtgaccacttaattttcttttctttctttctttcttttttttttttttttttttttgagacagagtgttgctgttgtcacccagtctggagtgcagtggcaccatctcagctcactgcaacctccgcctcctgggt

SEQ ID NO: 339895 - DNA, 201 bp, Homo sapiens
aggctggtcttgaactcctgacctcaggtgatctgcctgcctcggccccccagagtgctggaattacaggcgtgagccactgtgcctggctcattttgttytgtgggtagaatgagactaaaaataccacgaaggaccaatgctgctaggatcaaatggatttcagctaaattttatgtcttttataatgcagagaacact

SEQ ID NO: 339896 - DNA, 201 bp, Homo sapiens
tgatttgtttgagttccttgcagattctggatattagtcctttattggatgtatagattgcaaagattttctcccattctgtgggttgtgtgtttactctrctaattgtttcttctgctgtgcagaagcttttttgtgtaattaaatcccatctatttatctttgtttttgttgcatttgcttttgggttcttggttacaa

SEQ ID NO: 339897 - DNA, 201 bp, Homo sapiens
gggatgtatttccatttgtttgtgttgtttataatttcttttagcagtgtttatatttttccttgtagaggtctctcacttccttggttaggtatattccttttttttttttttttttgcagctattgtagaaggggttgagttcttgatttgattctcaccttagtcgctgttggtgtatagaagaactactgatttctg

SEQ ID NO: 339898 - DNA, 201 bp, Homo sapiens
ctgttggtgtatagaagaactactgatttctgtacattaattttgtatcctgaaactttgctgaaatcatttgtcagttctaggggctttttggatgagtyttaagggttttctaggtatatgatcatatcatcagcaaacagtgacagtttgacttcctctttactgatttggatgccctttatttctttctcttttctg

SEQ ID NO: 339899 - DNA, 201 bp, Homo sapiens
ttaaagacagcagatacttggttggtgaattcttatccattctgccattctgtatattttaggtggagcatatatgccatttacattcaacgttagcattragatgtaaggtactattctattcatcatgctatttgttacctgaataccttattttattgtgttactgtttgataggtcctatgagattcaggctttaag

SEQ ID NO: 339900 - DNA, 201 bp, Homo sapiens
ccgctgtcagagatcccccttgcgtggtcctgcagccccatgtggaggcctgttggcagcttacctagctgttgctgggtttgtcatttgaaataaaatgygtctttagctagtgcgtaaaattgactagatatgaactcagggatcacatgagttgcaggggatttggttttgtttttctggaccagagaatcagaaagg

SEQ ID NO: 339901 - DNA, 201 bp, Homo sapiens
aactgtttaggcattgaagggtcagtgtagaatttagatctagaattttatgatcagggcaatttgggaaaataaacctgtcatgtcttgtaaggtgagcrgtagaaagaaaactactggcagagattccaggggacaacttagggagggttaaacccaggaatgggatagtgtttggagagggtgttttgaaaggagctt

SEQ ID NO: 339902 - DNA, 201 bp, Homo sapiens
ccacttccttgatcttggacttcgcaggctccagaactataagaaatgaatttccaggggttataatccatgcagtttatagtattttgttatagtcagcsgaaagaactaagacactccctctcctcctttccctatccttctggaagtatcaatcaaaacacatctctacatatttctagcatcccccttgtagtggac

SEQ ID NO: 339903 - DNA, 201 bp, Homo sapiens
ggccggagtgcaatgatgcaatctcggctcactacaacctccacctcccaggttcaagtgattctcctgcctcatcctcccaagtagctgggattacaggygccaaccaccacacgtgactattttttattagaaacggggttttgccatgttggccaggctggtctcgaactcctgagctcgggtgatccacccaccttg

SEQ ID NO: 339904 - DNA, 201 bp, Homo sapiens
atgtgtaaattccctaagctcatgactttactgaactataatttaaggtgccttttctcttcatgataagaagtagccatgtaaatagctgtgatttgctkccataaaattctgcttaagtcacattcacaagacagagaagaaactaaaaatattcttgtggaagccgtcattcatttatgactaaaaaaacagaaaact

SEQ ID NO: 339905 - DNA, 201 bp, Homo sapiens
aaatgccactgaattttatacttacaaatggttaaatgatagatattacgtgtatagtttaccacaatacaaatttttaacatctaagaagatacacacayacatatatacacacatgaatataagcatccataggcttcagattaattttgtctcttctccctaatttattatagaatgcaataggaagaaaaccaatga

SEQ ID NO: 339906 - DNA, 201 bp, Homo sapiens
gttcatcagggatattgttctgtagttttctctttttgttatgtcctttcctcattttggtattagggtgacactggctttatagaatgatttagggaggrttctctatcttgtggaattgtgtcaataggattggtaccaatgctttgaatgtctaatagaattcagctgtgaatatatctggtcctgggcttatttttt

SEQ ID NO: 339907 - DNA, 201 bp, Homo sapiens
gaggttgggaattcttgactcaaagtgggagagatgctcccaatgctgaaggaattcaagggttctcccagcactgggaaattgcccctctatttctctarggttcttcttgttactccctccccagaaaggtatcagtatcagctagagtgaagaatgatttggattcagagggcctgacattacttgaaacagcagaaa

SEQ ID NO: 339908 - DNA, 201 bp, Homo sapiens
atggttttggagaacagtatgatggtattttagtgcagaatcatcactgctactagaaaatacaaacccaagcttacagccctttgatgatgtgtcagtarcatttttacaaatgaagaataacacatttgctttttgtatgctatatttctgtataagtatatacattgaccctttatgtgttatttttcatataagttt

SEQ ID NO: 339909 - DNA, 201 bp, Homo sapiens
tacctgtgtgtgcatgcgtgcttcatttttcatggtgtgctctgtgtacattttttgcaaggtccaataggccataaatgacaaaaagatactgggaaccygtcattagcactctaaagttgtattctttccaccaggaacctttgccttttaattttagtcatttataatttattctgctcttcatgctttgtcggccct

SEQ ID NO: 339910 - DNA, 201 bp, Homo sapiens
gcttgtagccttgggtgacgccgagaatttaaatgtcgtcttgtgatttaaagtatctgtcaagcctacaaatgatgcagaaggctcaggaaagcatataygtccggacattttattagacttttcagtgtgggaccacaggcggcagctgtcagcagcatgaggtcatgctctagatacagagtgggtttctaagcctgt

SEQ ID NO: 339911 - DNA, 201 bp, Homo sapiens
tccaaagcaggtggtatacagaagttgaaaacattgtatcacttaatctattttatacatgggcccatattaaaaagcaaaaaagtcattcatggtctcargaagtatcttgagaattcatcagttccatctcctttcctcaaatacaactgctcagatcctctgaaactaaggacctcctgaacacaaaattataaacca

SEQ ID NO: 339912 - DNA, 201 bp, Homo sapiens
atgtcgtcttgtgatttaaagtatctgtcaagcctacaaatgatgcagaaggctcaggaaagcatatacgtccggacattttattagacttttcagtgtgrgaccacaggcggcagctgtcagcagcatgaggtcatgctctagatacagagtgggtttctaagcctgttttctagtcatatagccctcatacccctggta

SEQ ID NO: 339913 - DNA, 201 bp, Homo sapiens
tctccagttccccagcccaaggcaaccacttatttactttctgtctctatagatttacctgttctggacattgctttgcaactggcttttcccacttactrtaaagtcttcaaagggtcattcatgtcgtagcatttcaattctttttattgccaaaaaatatttcattgtatagatatatcacatgtagtttattcatca

SEQ ID NO: 339914 - DNA, 201 bp, Homo sapiens
ctttcatctccttttagttagtttttgtatatgttacaagataaaggtccagtttcatgcttttgcacatggatattcagtttttccagcaccatttgttraagagacagtcttttcctttttgagtggtcttggccagatgtatatttttaaaagatcactgtcagcagggtgtgaagggtttaaaggagtagcgatgag

SEQ ID NO: 339915 - DNA, 201 bp, Homo sapiens
cagtgttttcaaggttcatccacatccatgtatgtgtgcttcattctgttgtatgattgaataatattccattgtatggatataccacattttgtttatcyattcatcagttgatggacatttaggctatttccaccttttattgtctatgataaataatgctgctatgaacacgcatgtacaagtttttgcaaggatatg

SEQ ID NO: 339916 - DNA, 201 bp, Homo sapiens
ccattatatactgactgttttcaaaaatacccagtggcctcatctcatattatttctccattttaaaaattcacattgacttctttgggctccacagcacrtgcaggctgctgtctagtccttgggtcatttcctgggagtaaggaagagaaataaatcccttccagtaggaatatcttatggtaggcatggaaaagtaga

SEQ ID NO: 339917 - DNA, 201 bp, Homo sapiens
ttacacctgtgtgtttacttggccacctaaacatcaacatacttgaaaataaaatctattttctacaacctgtgtactgatgagcacccttatccatctcmatgctcagaagtggaatgtggaaggtttttttatgctcttactattccctaacctacacatccatctgtttccatccctcctctccttcaccagtatgtc

SEQ ID NO: 339918 - DNA, 201 bp, Homo sapiens
taaacatcaacatacttgaaaataaaatctattttctacaacctgtgtactgatgagcacccttatccatctcaatgctcagaagtggaatgtggaaggtktttttatgctcttactattccctaacctacacatccatctgtttccatccctcctctccttcaccagtatgtcttcaaatccacattctcaatgctgatg

SEQ ID NO: 339919 - DNA, 201 bp, Homo sapiens
aaaagggaacaaatacttgagagaggatctgatcactaacacctggcggagggggggactttttctcagggcagggttggaggtaggagagttttgtgatragatttgcctgtaaagaagattaagactgctctgtagagaaacacataggatctggcaagagtatgccaggaccatgcggttgcacaggacctgagccac

SEQ ID NO: 339920 - DNA, 201 bp, Homo sapiens
gaacaaatacttgagagaggatctgatcactaacacctggcggagggggggactttttctcagggcagggttggaggtaggagagttttgtgatgagattwgcctgtaaagaagattaagactgctctgtagagaaacacataggatctggcaagagtatgccaggaccatgcggttgcacaggacctgagccactgaggc

SEQ ID NO: 339921 - DNA, 201 bp, Homo sapiens
tttgtgatgagatttgcctgtaaagaagattaagactgctctgtagagaaacacataggatctggcaagagtatgccaggaccatgcggttgcacaggacytgagccactgaggccatgggaattattttagtgggactgggggtggcagggatttttttggtagggatgggagtggcagggataaagactgtaagcacca

SEQ ID NO: 339922 - DNA, 201 bp, Homo sapiens
tatggttctgcttgtatatagtgagtactcgtagagacaggaagtgccatggcagttgccggggctgggggaggggaaatgaagagctgctgtttaatagmcagagttgcagttttgccacatgaaaacgttttagagagccgttgcacaacagtgtgacttcggttaaccatactgaactttccttaaaatggctaagat

SEQ ID NO: 339923 - DNA, 201 bp, Homo sapiens; identical to SEQ ID NO: 71395

SEQ ID NO: 339924 - DNA, 201 bp, Homo sapiens; identical to SEQ ID NO: 71397

SEQ ID NO: 339925 - DNA, 201 bp, Homo sapiens
gtgcacatggccttttccctttaggagaaatggagttcagggggccagaaagatgagaaatggggttcttcagacttacctgtctaggccaccctcagtgytactcccttgtaccgacatggtgggagaatggttaatggaaggacagtggggcctttcactcctgcctcctgaacctccacctttgggagggtcagtggc

SEQ ID NO: 339926 - DNA, 201 bp, Homo sapiens
tttattccaacttctgtttcctcagctgcttcttctacagatgccagataacatggcagggccagctcagtttcccatcttaattttctgcctcgcttggyggggatgttcttggattcccttcctattttccctgatggttttggctatgcaggatagcctggcagttctgagcacaggatctctaagctagaccgcttc

SEQ ID NO: 339927 - DNA, 201 bp, Homo sapiens
gataaggaaaaatttagaaagtaggaggaagattgaacttactttgtcacaaatttatgtggtcacagaaggcactactgcaatgaaccctgtgttcctgrgtaggaatcatgtattaactgaacgcgacatgaggttgaaatgattatttgtaaactgttgactgtcagacgtttcagaggggcctgtgaggtatagagg

SEQ ID NO: 339928 - DNA, 201 bp, Homo sapiens
ggctgtgtggcttaaacagcagaaattgagtttgtcacagtctggaggctggaagtccatactcgagctacctacagattggtttctcatgcgagcactcyccttggcttacaggtggctgtgtgctctgtggtcttccctccgtgtatgcctgtgtcctcatctcctcttcttattaggacagcagccatgctggattag

SEQ ID NO: 339929 - DNA, 201 bp, Homo sapiens
gtacttcccttagtcctttcaaaagaactaaagcggggggaggggagaacttaatttttatacagattgttctgtattttcacaatgagatcatttcagtyacatcagtgataaaaataattaggaagtaatagtgggctgataattagattgggagcaacaagatggtgttattgatcctagcccagctgtgtccttatt

SEQ ID NO: 339930 - DNA, 201 bp, Homo sapiens
tctatgctttaattttgaatgtcttgctatttcatttctttgaaaataaagcagttccacaacattacagccctgtgctgtctactcattctcctttgggrattgcttgttttaattgattgattcacagaggagaaagaaaaacaatttgttgctttggcaagattggtttttctaaggatgctactgtcttgctgggtc

SEQ ID NO: 339931 - DNA, 201 bp, Homo sapiens
accctagatcacaaaactatgaaactgggtaagtggtggtgccatgtgctactttaatgtacttcttttactttgttgagctcttcttttcaaaaagcatytaaagattgaatgaagaaatatacaacaattctaactaaatgtttaatgaagaaattttgaagggaaaaaatagaccaaaaccactttcttataatctca

SEQ ID NO: 339932 - DNA, 201 bp, Homo sapiens
tgtaatgttgaggtcttcactaaataacgtgagtgccacatgtaaacattggcagccttgagctgcaaacgaagccaataactttttaaaaaaatgcattytcccccttttgtgtggccaaggggaacactgaaaagtgtcctgcagttcacacagcaccggaaacaaaggaaactttcagattaggtgtcactggggaag

SEQ ID NO: 339933 - DNA, 201 bp, Homo sapiens
  misc_feature (1)...(201): n = A,T,C or G
atttttgcattttacttttccaggagctttccaaagagagctaaggaagtaagaaggggccagaaagtcagcaactgtgtgattaaaaaaaaaatgtcttngcctccgtatgcaagaacttgctgtgtgcaggcgagtgggccaggcgcttacttaatcttaacagcgatgcttcctgtgtgatttcccttattttccaag

SEQ ID NO: 339934 - DNA, 201 bp, Homo sapiens
tctctgttgatccccagcgcctcctgctctggtggctccttggatgtgtagaagctgtctataattcctcacttgttaagaaaccgtaacctcaaaacaarcaggccttgcaggctttctgtttccatatatttgaaaagagaagagagaggcatgaagcctcttttggaagcagtaaacaacaggaagcctccagagctg

SEQ ID NO: 339935 - DNA, 201 bp, Homo sapiens
aggtgagctgccttgagcaaccctggcctgtaatattagttccaggatgtgggtaagtggtgtttttcttccatagaacactgatggcggttgaaaaaaaatacaggctaaagtacataaaacagaataagaattgggaacgaggaatgagggctgtggtttggagaggctaatctagttattttcagttgtgtgatcatt

SEQ ID NO: 339936 - DNA, 201 bp, Homo sapiens
ctttctttcatttataaagaaaggagtttatttcttacagttctggaggctgacaagaccaagattttggggacacatctggtgagggccttcttgctggyggggactctgttgagtcctgaggctgcttaaggcatccgatggcgagaggctgagtgcattcatatgctctaaaagagcactgagattcatttgcagcca

SEQ ID NO: 339937 - DNA, 201 bp, Homo sapiens
gtctttctttccttttccttccttccatcctttctttctttcatttataaagaaaggagtttatttcttacagttctggaggctgacaagaccaagatttyggggacacatctggtgagggccttcttgctggtggggactctgttgagtcctgaggctgcttaaggcatccgatggcgagaggctgagtgcattcatatg

SEQ ID NO: 339938 - DNA, 201 bp, Homo sapiens
ttcggggcccattgattgagaaatgagggttgcttcgaggtcgcggcttccggaaattctgttctcgagtcgggttgcgggtcaggttccaaagggacagyggccccggggtcacaatcactacctctgcccactgctttccgcagctgctggtctttggggtgagctgttgggttgcccgagcttcgggtaaggcgcgag

SEQ ID NO: 339939 - DNA, 201 bp, Homo sapiens
caggtgcttcctgatagctggggtgaagcagagttggaaggagggttggaaagagcgagggaggaacttagaattcccttggagtgaattcatatatgccytgccagggagtttgcaggtcattctcaacacaacgagaagctatgaacatttccagatttggcttttggaaagatgtctgtggaagcaagggatggaggg

SEQ ID NO: 339940 - DNA, 201 bp, Homo sapiens
aaggaaaacaggaatttatgccattaattcatcttactttcatggaatttttttcttttaaatgagaacttagtgtctttctttccttttccttccttccrtcctttctttctttcatttataaagaaaggagtttatttcttacagttctggaggctgacaagaccaagattttggggacacatctggtgagggccttct

SEQ ID NO: 339941 - DNA, 201 bp, Homo sapiens
taccacctcaaaaatcccgtcggtgcacttgctcttatcaagtacaaggcagcacttaaaacactgaggaagtacaggagccatgaacttgtccctgagargcctgttttagttggtggcttgtatgcatacctgtaatcccaggtatgcatcaacttgtatgcatcgtttctctgcagggcctcctcttccttgaagcac

SEQ ID NO: 339942 - DNA, 201 bp, Homo sapiens
cgactcgaatcgtattttatgactcgttttaaattttttcctcccggagcccgagacgctgggaatgttctgagcccctttggtcggtctccgccctcaasgaacttctagagcagcttctgcttcccagatggggagagggggtgggggccgcggcgtcccggcgaggccgcagagtctgttaactttttgttacagtcc

SEQ ID NO: 339943 - DNA, 201 bp, Homo sapiens
atttcaagtcgggtcttgctttgcctccacttgctgttattctgtaagcaggctaattgcaggttcagctttcctccaagcagcttatgtctgttttcaamggtaagtgttctgtgtcggtggtgtttatggagcaagatgtttgatggtgttggaaaaggtgaagcttttttccaccctgcctggccctgtgtggcgctt

SEQ ID NO: 339944 - DNA, 201 bp, Homo sapiens
tttgttcctgcatttgtttactcttcctttatctagcaactgtttatttttgccacagtgcaaataagccagtcctcacccccttggaggactgctatagyagatggatagaggttatgatgactctgtgtgtgtgtgtgtacgtgtgtgtgtgtgcacgcacgtgtgtgcgtgtgtgtgtgcattttcaggaaggatgtt

SEQ ID NO: 339945 - DNA, 201 bp, Homo sapiens
atagaaaagtgtacaaatcagaagtgcacagcctgacacttttcacaaggcaaacatacaagtatgttgttggtaacaagcgccaagatcaagaagtggcwgttcaaaaacccccaaagctacctctgtatccccttctggttaccgtccccatcccgaggacaaccactatctcaccttctaccaccaccagttagtttt

SEQ ID NO: 339946 - DNA, 201 bp, Homo sapiens
tgtacaagccagttaggaagaagtaagtactgatgacaagaaggagtgtgagatgagaaacagtagccttttctttgtctgtagcatctcaagttttatastctctgggatcttctctctgattagaaagtgcttcttttccacctggcaaggtggcacacacctgtaatcccaacactttgagaggctgtgctgggtgga

SEQ ID NO: 339947 - DNA, 201 bp, Homo sapiens
tggagtgcaatggcgcaatttcggctcactgcaacctctgcctcctgggttcaagcgattctcctgcctcagcctcctgagtagttggaattacaggcacrtgccaccatgcccggctaatttttttgtatcttttgtagagacggggtttcaccatgttggccaggctggtctcgaactcctaacctggtgatccacctg

SEQ ID NO: 339948 - DNA, 201 bp, Homo sapiens
ggtggacagctgctgggctgtgccaaggctcttaatctgggcccacagttgctctggagtctgtgaatctcctgaagttgagaagcgagatttgtgtataygtctttttttttttttttttttttgttgagacagagtctcaccctgtaacccagactggagtgcaatggcgcaatttcggctcactgcaacctctgcctc

SEQ ID NO: 339949 - DNA, 201 bp, Homo sapiens
ctcccagatggccgaaatctagaaaacctggaagagtccatgtcctctctcccccattcactgacccctaacacagatcatgtcaaccaggcttttgaccwgcagaacaaccaacccgtggctggtggacagctgctgggctgtgccaaggctcttaatctgggcccacagttgctctggagtctgtgaatctcctgaagt

SEQ ID NO: 339950 - DNA, 201 bp, Homo sapiens
gctggtggacagctgctgggctgtgccaaggctcttaatctgggcccacagttgctctggagtctgtgaatctcctgaagttgagaagcgagatttgtgtmtatgtctttttttttttttttttttttgttgagacagagtctcaccctgtaacccagactggagtgcaatggcgcaatttcggctcactgcaacctctgc

SEQ ID NO: 339951 - DNA, 201 bp, Homo sapiens
ttgaaaaaaaatacaggctaaagtacataaaacagaataagaattgggaacgaggaatgagggctgtggtttggagaggctaatctagttattttcagttktgtgatcatttgtttcagtgggactgagtgaaaaatgaactcctaaaataaaggcattagtgcggaagtgcaaagaactagtaagagatttagcttccac

SEQ ID NO: 339952 - DNA, 201 bp, Homo sapiens
aaagtgctgtttatttcattataatttataggccctataattccaaaaaattaatttaaacccaaaccttttttttttaattgtcggataggaaaagaagrcaaaaacctctttagaaagggggtgagtaattagagatgagtcagaggtgggatggttactatatttgagcattttgatctaggaggttcttagaaatgt

SEQ ID NO: 339953 - DNA, 201 bp, Homo sapiens
acattgaagggtaactagtacaggttatcctgtgcttatttttttttctttttcaagtatgtcagctcaaaagtgggaattgtcagatgctgttgaatagyattgaacagaaattgcttttgctggtgatcagaaaagatgccactcagaaaaaagggccagtgctggagatcctctcaggttgtgttccaggttccacgt

SEQ ID NO: 339954 - DNA, 201 bp, Homo sapiens
cctctcccttcaccagtcctgctgagagaggatccctgtcattcttccgggagaggcatgtcagcaggcgcagcgggagaggggatgagggaattgccacktgtccacggctctctggctcaaccaggcagggttggggcaaaccttcgccctctgtctcagaattgcaagcagtctaaagaagccatgcttggctcctgc

SEQ ID NO: 339955 - DNA, 201 bp, Homo sapiens
taagttctttagtggtgatttctgagatttcgatgcacccatcacccaagcaatgtacactgtacccaatgtttagtctttgattcctcaccaccctcccsccgagtccccaaagtccattatatcattcttaatgcttttgcgcaggagggcctttttaaaaagatgaaaaggtagaaagatgaggactgagagggtcag

SEQ ID NO: 339956 - DNA, 201 bp, Homo sapiens
agtactgacattaatgtattgagcatctactctgtatcaggctctgggattcaaagatttgttcatttcacaaatatcactgggtacctattttatgaacmctgttcctgccctcctgtagcttacattctagtagggagatgggcagtaaagaaataaacaagtagattaataaaaatataatgtcaccaagagtgaggg

SEQ ID NO: 339957 - DNA, 201 bp, Homo sapiens
atatgtttaatttaacctcagttttttaaaccagaatgcttctaccataaaagaattgtgatttcagttgtacttccatcaaggaatatgtgggaagatayacatattgtcaaaatggttgggatgggatagttacaaaggacacttttgtatgttgtatgggatcacttgcctgatagtataaggaacattgtatgaaaa

SEQ ID NO: 339958 - DNA, 201 bp, Homo sapiens
gcatgtttgtatcagtttacttacctgatttcactggattttttggctgctgtgtgctttgttgctttgtgaagtaaaggctttgtcagcagtcactgtghtaaagccggaacaactgggcgggacccgagggatgttttccttccagtgcccatggcacatctgcctgggtttggtaagtgtgagaaggcagactagtgg

SEQ ID NO: 339959 - DNA, 201 bp, Homo sapiens; identical to SEQ ID NO: 71486

SEQ ID NO: 339960 - DNA, 201 bp, Homo sapiens
tgtccaggccccagacgaccctccgaccttgtgccgggaaggccccgcggcgcggtgcgcaccgcgaactcccctgtggttctcaatagttggaattgaarggacgccgggtgggtccggcccgagacttagctgtgggagctcagctctgcgctgcagtcagagcaatttccgacgcccacatctttacctctactccct

SEQ ID NO: 339961 - DNA, 201 bp, Homo sapiens
cacaccagtagaggtggacttatctttcttctagtttcctttcatttgttttgttttactggtagcctgattcatatctggtaaccaactctcagaggggkgtgtgtgtgtgtgtttaggggcaacaagtatcttatcctgattggatttttttttttttgagatggagtctctctccgttgcccaggctggagtgcagtg

SEQ ID NO: 339962 - DNA, 201 bp, Homo sapiens
tcacaccagtagaggtggacttatctttcttctagtttcctttcatttgttttgttttactggtagcctgattcatatctggtaaccaactctcagagggktgtgtgtgtgtgtgtttaggggcaacaagtatcttatcctgattggatttttttttttttgagatggagtctctctccgttgcccaggctggagtgcagt

SEQ ID NO: 339963 - DNA, 201 bp, Homo sapiens
gtttgggaattaagttagccaaatattgtgtaattattgtttgttatacaaaaatatgccttagactgtacagcggcagaaactccctctaccacctcggyccccctttccattctgcgttatacaaaataagctgacacgttaatgctgtggcccacattaaacaaagtataccgtacgtgtgtgtgtgtgtatgtggca

SEQ ID NO: 339964 - DNA, 201 bp, Homo sapiens
tgatgatgaaagaattagatacctctgttagcttttctttatcacaccagtagaggtggacttatctttcttctagtttcctttcatttgttttgttttaytggtagcctgattcatatctggtaaccaactctcagaggggtgtgtgtgtgtgtgtttaggggcaacaagtatcttatcctgattggatttttttttttt

SEQ ID NO: 339965 - DNA, 201 bp, Homo sapiens
cgttcggggtttttggtaggtagagcagcccgtcactctggaaggccgggaccgcccactccacctcggtccacagctctcttcctgcgcagttcgcctcygcagcctctgcggggaagtgccggggctgctcgaggctcagttcttaggactgcaaggaggcagccccggcgtgcggcggtgcgcacagtctagagtggc

SEQ ID NO: 339966 - DNA, 201 bp, Homo sapiens
accactccccctcctcctgggatggtgattccagggccaggcggcaggctataactagcgcccttccaggtggaacccgccagagccccgaggcagcctasgattttctgagatcagacacacttgggccgggttgggaggaactggcaggaaaaggactgaacccttaatgtcaggcggttttgaagcacctggggcaag

SEQ ID NO: 339967 - DNA, 201 bp, Homo sapiens
atatttttccagctagagttgtattgcttgaaactttaaaatgacctgtcacagcttctgtgtttctagtttgatgttttagtctgaaaaaaaaaaaaaaactttttaatattttgaaaagtcaatatgtcatataacgtcattccacatatgtatgctgatttatctttttgtttataatatgttgtaggaataaggttt

SEQ ID NO: 339968 - DNA, 201 bp, Homo sapiens
tctaaagaagccatgcttggctcctgcttgccggtactcccagtgtgatttagtcctgggcccatcactcactgtggaggaactcagctaagtttgggaamcttccatgttagcatataaaagtaactgcagttattgataaggtctagctcagaattgggttgccctgatcagatcctgtttctgtttagaggagacaga

SEQ ID NO: 339969 - DNA, 201 bp, Homo sapiens
gtctgcaggctgggccctgccacctctcctctcccttcaccagtcctgctgagagaggatccctgtcattcttccgggagaggcatgtcagcaggcgcagygggagaggggatgagggaattgccacgtgtccacggctctctggctcaaccaggcagggttggggcaaaccttcgccctctgtctcagaattgcaagcag

SEQ ID NO: 339970 - DNA, 201 bp, Homo sapiens
ttctcctgcctcagcctccggagtgactgggactacaggtgcgtgccgccacgcccggctaattttttgtattttagtagagatggggtttcatcatgttrgccaggacggtctcgatctcctgaccttgtgatctgcccaccttggcctcccaaagtgctaggattacagatgtgagccaacacgcccagcccatatacc

SEQ ID NO: 339971 - DNA, 201 bp, Homo sapiens
tattcatggggttttaaaacatgcacatttactgcctatgttgacaggttgggaggtttcacatacaaatccagatttcctgctgcttttataaaggatcrgacagtaccatgcctgtctttcttatggcaacaaatggctggacctggtgagcccctgggcttgtgaatgggggaatcgtctctccttccgacattctgc

SEQ ID NO: 339972 - DNA, 201 bp, Homo sapiens
gtcgcggcttccggaaattctgttctcgagtcgggttgcgggtcaggttccaaagggacagtggccccggggtcacaatcactacctctgcccactgcttyccgcagctgctggtctttggggtgagctgttgggttgcccgagcttcgggtaaggcgcgagtgggcaggaggtctagatttcggcctccgataactgtct

SEQ ID NO: 339973 - DNA, 201 bp, Homo sapiens
cctccatctcccaggttcaagtgactctcctgcctcagcctcctgaatagctggaattacaggagcccgccatcatgcctggctaatttttttttttttttgtatttttagtagagactgggtttcgtcatgttggccaggctggtcttgaactcctggcctcaggtaatctgcccacctcagcctccaaagtgctgggat

SEQ ID NO: 339974 - DNA, 201 bp, Homo sapiens
gtcagttcgccgcccaggtcgtcctctggcgccgcttcccagcccgcccaggcgctgtccaggccccagacgaccctccgaccttgtgccgggaaggcccmgcggcgcggtgcgcaccgcgaactcccctgtggttctcaatagttggaattgaaaggacgccgggtgggtccggcccgagacttagctgtgggagctcag

SEQ ID NO: 339975 - DNA, 201 bp, Homo sapiens
caaggagcggcttgggcaaccccattcagcacggtgagggtacagagcagagtccctgataactgatgggcatcctttcataaaagaggaccttttatctttttttttttttttttttttttttaatgtcgtaggttaagacgtgctaactgacaaatctcagttgtaaaactgagaagggtttttctttttcctgagtgc

SEQ ID NO: 339976 - DNA, 201 bp, Homo sapiens
ccaaggagcggcttgggcaaccccattcagcacggtgagggtacagagcagagtccctgataactgatgggcatcctttcataaaagaggaccttttatcyttttttttttttttttttttttttaatgtcgtaggttaagacgtgctaactgacaaatctcagttgtaaaactgagaagggtttttctttttcctgagtg

SEQ ID NO: 339977 - DNA, 201 bp, Homo sapiens
ttacaggtgtgagccactgaacctggccaaaaatgtcttatataaagctgatctggcccaccccaactttatgcgctccactgagaacttggcccttactyactctgcagctgctagccctgctagtcaccaccccttacctgtgccaagatgacttgtatgcattgtttctctgcagggcctcctcttgctcgaagcacc

SEQ ID NO: 339978 - DNA, 201 bp, Homo sapiens
  misc_feature (1)...(201): n = A,T,C or G
tggtggttacacaattctatgcatttgtcaaaattcttggaactggacaccaagaatgatttttactatatctaagttaaacagtaagtttaaaaaacganaaagagtctttgttggagttcagaaaacgtggggtatttctgcaactaaacaaggaagtcattttcctaacgggccaggagaagtgggtggggtgaatgt

SEQ ID NO: 339979 - DNA, 201 bp, Homo sapiens; identical to SEQ ID NO: 71491

SEQ ID NO: 339980 - DNA, 201 bp, Homo sapiens
gttgcataatctatgggtttggacatacgtataatgacatggaagctacatgatattttcctacagggtagtttcactgccctaaaatattctgtgaatcrtctctttatgcccctcacccaacccccaggatcccagtgttttctttttgagtttagctgctgatgtttgtcggtttatcaggcactcaaaaaactgcac

SEQ ID NO: 339981 - DNA, 201 bp, Homo sapiens
cgaggggccatggtgagaggtgtatagaacaaagtaagaaatgctgtaggagcagagagagagaaagaggcccagagaaaaagacaccatccagctgggcwctgaagcacggataggagcttgctggctggttgtcctggaaactgatcagaatattcagggctgggaagctctgtgtgaaaaaggcccagagaagcacag

SEQ ID NO: 339982 - DNA, 201 bp, Homo sapiens
acaaattaattttacacagagaaagatgtttctaggcaagtgaaattctggtaattcatactatttctttgtatgaacaaataaaatatattttgccaacwtgtgggtacctttatgttttcttaagtattacagaaggacaaggtagcaatattttgtttaataatcccatgtgcgtgcatgcgcacacacacacacaca

SEQ ID NO: 339983 - DNA, 201 bp, Homo sapiens
gcctgctcacctctacctgagcccttgctcaggaggaggcgtttggcaaggacatttcacatggtttgtgggtgaatagtttcacaccagagtgggatccwctattgcatgtactcgactagcttttcattcttatcacacttcccttcctataaagttacgtatcttttaaagggaaatttaatacccaccttcgctttc

SEQ ID NO: 339984 - DNA, 201 bp, Homo sapiens
aagaattgtgatttcagttgtacttccatcaaggaatatgtgggaagatatacatattgtcaaaatggttgggatgggatagttacaaaggacacttttgyatgttgtatgggatcacttgcctgatagtataaggaacattgtatgaaaagatgaaaagatacttcatttttagaaactgatcagagatgtcactggtct

SEQ ID NO: 339985 - DNA, 201 bp, Homo sapiens
  misc_feature (1)...(201): n = A,T,C or G
ttggttaaacgtatagcaatatcacataatgatatgtttaatttaacctcagttttttaaaccagaatgcttctaccataaaagaattgtgatttcagttntacttccatcaaggaatatgtgggaagatatacatattgtcaaaatggttgggatgggatagttacaaaggacacttttgtatgttgtatgggatcactt

SEQ ID NO: 339986 - DNA, 201 bp, Homo sapiens
tccccgtgcctctctgttgatttataacagttgggtaaccagatagcaatatagtggcaattgagtagccatatagtaatacaggggcagttggttaaacrtatagcaatatcacataatgatatgtttaatttaacctcagttttttaaaccagaatgcttctaccataaaagaattgtgatttcagttgtacttccatc

SEQ ID NO: 339987 - DNA, 201 bp, Homo sapiens
gctctcggagaagcgcctgtatttgcatggcgttcggggtttttggtaggtagagcagcccgtcactctggaaggccgggaccgcccactccacctcggtycacagctctcttcctgcgcagttcgcctctgcagcctctgcggggaagtgccggggctgctcgaggctcagttcttaggactgcaaggaggcagccccgg

SEQ ID NO: 339988 - DNA, 201 bp, Homo sapiens
tttgtttgcttgcgtttctcagggacctgatgcccagaaccctggacgggcagatcaccatggagaagacgcccagttacttcgtcacgcgggaggccccygcgcgcatctcggccatgtccaaggacaccaagctcatcgtggtggtgcgggacccggtgaccagggccatctcggactacacgcagacgctgtccaagc

SEQ ID NO: 339989 - DNA, 201 bp, Homo sapiens
acagtgcaaataagccagtcctcacccccttggaggactgctatagtagatggatagaggttatgatgactctgtgtgtgtgtgtgtacgtgtgtgtgtgygcacgcacgtgtgtgcgtgtgtgtgtgcattttcaggaaggatgttgggaatgtaatagttatgaaaaaggaacaaggagtgtatagaaatatattagaa

SEQ ID NO: 339990 - DNA, 201 bp, Homo sapiens
aatgtcttgtaaactgtctagttgcagatggcttaacacaggggaaaaagaacttgggctttatctgacttgacctgctttttagtcaaatgcaaaataakttgcgagccgagactctctttaatcctcaatcacattagcctgatgacactgctacattaatttaagtggttaatggacaaagtgggtcaatccagcttt

SEQ ID NO: 339991 - DNA, 201 bp, Homo sapiens
ccttatctgtaagacagagacagaaaggactcagacgaggcagcatttctgtgtctttaatccgtctcaaactaccttctgcttactttttacctggcacrccatctgtacaattagtatttgctactttaaccatttgattcactctctgattttacttaactttaaaaggaaacatattttaagtaaaaagccatgatg

SEQ ID NO: 339992 - DNA, 201 bp, Homo sapiens
ggaaggccagcttggagtgtctgaggatggagtttgggcaagcatttggtggtggacttttccccaggattgctcactcatcagacactttcccgtctacrttccgggtttatagctaggctaatttaatttccagctgagaggctactccccatatgatggtaatctcaaatagttaatgagctagaagaggaggcagcc

SEQ ID NO: 339993 - DNA, 201 bp, Homo sapiens
ataaaggcattagtgcggaagtgcaaagaactagtaagagatttagcttccactttctaaattaatttttctctcatatatatatatacacacatcaccaycattatcatcatcattatcattatcatcatcatctcttttatatatatatatataaagtgctgtttatttcattataatttataggccctataattccaa

SEQ ID NO: 339994 - DNA, 201 bp, Homo sapiens
ccctgctgcctccttgggtagcttggatgactgtcctaagcaccttcgttctgtggtttgaagtactgagggaaagagagccattcttctccaactccccrctcggctccccaggccagcttctccagcccgatggtgtggagaggcaggtggtctgcaggctgggccctgccacctctcctctcccttcaccagtcctgc

SEQ ID NO: 339995 - DNA, 201 bp, Homo sapiens
tcagaatcatgcactgtggcccagttttttgaggccactggtggtcctggaagttcattgtgcttgtcatccccaaatcttaatggggtgacaagcctgcyttgcccttaggtttaattaaagaagtaggatctttcttgggttctgtcaccctgtgttcatgtgggcacacatacctggttagtatctcctaggcttgtc

SEQ ID NO: 339996 - DNA, 201 bp, Homo sapiens
gtgattcgagtaaggctcccaaaggaacaagcagcagttcccgatggtgtttgcaaatatggctgggacatgcttcctcatccccactcattgcccctgcrgaatccacacaccccctccctgctgcctccttgggtagcttggatgactgtcctaagcaccttcgttctgtggtttgaagtactgagggaaagagagcca

SEQ ID NO: 339997 - DNA, 201 bp, Homo sapiens
ctcccatcccctcctctaccaactcatcccttctctcccacctgccctttgtgctgccccccacaaccacaccactcagggtctcagctcttgggatcacrttgacacacccccacattttacactctgtggcccattgcttctgagctgtattgtccagcaccatgaggaccccacccatggagacactgggttttgtac

SEQ ID NO: 339998 - DNA, 201 bp, Homo sapiens
gatggggtttcatcatgttggccaggacggtctcgatctcctgaccttgtgatctgcccaccttggcctcccaaagtgctaggattacagatgtgagccamcacgcccagcccatatacctttctttgttttggtttgtttgttttttgagatgcagttttgctcttgttgcccaggctggagtgcaatggcaccatctcg

SEQ ID NO: 339999 - DNA, 201 bp, Homo sapiens
gattacaggcatgcgccaccacacacggctaattttgtatttttagtagaggcggggttccaccatgttgctcaggctggtctcgaactcctgacctcagstgatccaccagccttggcctcacaaagtgctgggattacaggcgtgagccaccgcacctggccccctccatcatttctaaggaggtgctgtgttatctct

SEQ ID NO: 340000 - DNA, 201 bp, Homo sapiens
cccttctctgaccgaggcctgctcccatcccctcctctaccaactcatcccttctctcccacctgccctttgtgctgccccccacaaccacaccactcagrgtctcagctcttgggatcacattgacacacccccacattttacactctgtggcccattgcttctgagctgtattgtccagcaccatgaggaccccaccca

SEQ ID NO: 340001 - DNA, 201 bp, Homo sapiens
tttctcccttttctccgcccccgtttctctttggggggaagaaatggataatcctctttccacccacttctataatgggtgcctgtaaggcgatcccgcarattcagtggataacagaaaataccttcatttccataatttggcccattaaatgacaggacgaagagaaagtgggaaggactgggatggagaggaggaaga

SEQ ID NO: 340002 - DNA, 201 bp, Homo sapiens
cctcccgagtagctgggattacagacgcccaccacaccacacccagctaattattgtgtgtgtgtgtgtggtgtgtgtgtgtgtgtatatatatatatatrtgtgtgtgtgtatatatatatttttagtagagacagggtttcaccatattggccaggctggtctcgaactcctgaccttgtgatccacccgccttggcct

SEQ ID NO: 340003 - DNA, 201 bp, Homo sapiens
gtttcgtttctcccttttctccgcccccgtttctctttggggggaagaaatggataatcctctttccacccacttctataatgggtgcctgtaaggcgatyccgcaaattcagtggataacagaaaataccttcatttccataatttggcccattaaatgacaggacgaagagaaagtgggaaggactgggatggagagga

SEQ ID NO: 340004 - DNA, 201 bp, Homo sapiens
ggtgaccatttaaaatccttttctatagtcaatgaataatacattcgtataaatcatgtttacttactttttcattcatctaacaaggattttttttttttaagacagggtcttgctctgtcacctaggctggagtgcagtggcacaacctctacctcctgggctcaagcgatcctcccacctcagtctcccgtgtagcag

SEQ ID NO: 340005 - DNA, 201 bp, Homo sapiens
ctttttgattgactaaaaaacgctgaatgaagaacgaagtcgcgtggaaaccctcgccgcgcgcctgcagcggacagcgcagcccgggaggttcggctgcsgacttgcgcccgggggctgcgctgcgagcggccacgcatggcggctggacccgggcggccgcaagggcttggctgggccgcgggaggcgggaggttcttc

SEQ ID NO: 340006 - DNA, 201 bp, Homo sapiens
catataaaccaatgcatacagcacctgcacctgtagaaggaaggaggaggaagcaggtgtgggcagggggagaaggtcagctgtggtggaacccaacaccmtttgcccgcctcacaagaagctctggagattgaacagcccttcagagatgtctgaagttgggctgggaagagcaaacctttagcttctacatcagtcact

SEQ ID NO: 340007 - DNA, 201 bp, Homo sapiens; identical to SEQ ID NO: 71488

SEQ ID NO: 340008 - DNA, 201 bp, Homo sapiens
ttgtgtaccggaaactctcttggctggatccagcccttcctcctgatgtgctgtcgggcttgtccctggtgccctcttctctgattgttccagtctgcctscgggcacttagcatatgctagtgctgccagttgacacagatacacaaagcagtaaacatcctgttcccaccgaagatccccaagtgtgtgggtggatggg

SEQ ID NO: 340009 - DNA, 201 bp, Homo sapiens
gaaagagagccattcttctccaactccccactcggctccccaggccagcttctccagcccgatggtgtggagaggcaggtggtctgcaggctgggccctgmcacctctcctctcccttcaccagtcctgctgagagaggatccctgtcattcttccgggagaggcatgtcagcaggcgcagcgggagaggggatgagggaa

SEQ ID NO: 340010 - DNA, 201 bp, Homo sapiens
gtgttgggcagcaggctcacagcctcaatagggagaaaagacaaaggcctcaaaatgacaggcagcctgacagaggaaggagtctgacacctcagcttgakgcgtctttggaattcctagctcatctcagaattatatcttagagtgataatatgggtggtagccagtggccaaacagcaagaactaagagtggcccttgc

SEQ ID NO: 340011 - DNA, 201 bp, Homo sapiens
aagttgaggcgtagttgaaaagtttgggggagcctgagtcgtttgattgggagaagaatctttgctagattccagtgttttttcatggtttttttttttttaaattgactttatttttaagagcatttataggttcacagcaagattgaagggaaggtacagatatttatttatttattgagatatggtctcactatgtgg

SEQ ID NO: 340012 - DNA, 201 bp, Homo sapiens
cctgagtaggtggaatggaaatctttcctggaatggaaagattgagcaactggtccacggaatgcggagactgaaataagccctcagcttccatcccaccrgttcttgggtccctcatttcccttattatcgcacttccttccccaaggaacagagcaggagctaaggatccagctccaagcagctgaggccaaggagcgg

SEQ ID NO: 340013 - DNA, 201 bp, Homo sapiens
atagtagaggctgagaaccttttttttctgagacagagtctcgcaatggtgtgatcttggctcaccgcaacctctcccgggttcaagcgattctcctgccycagcctccccagtagctgggattacaggcatgtgccaccacgaccagctaacgtttctattttcagtagaggggtttcttcatgttggtcaggctggtct

SEQ ID NO: 340014 - DNA, 201 bp, Homo sapiens
aagaaaagagaattgcaagctgcttgctggaggaatggccctttgttgccagggaagtaacccacatagggctggagccccaccgacccagaaaaaagaasggtgttagagaccgggaagctaggactcatcagagacaaaacgttggcccagcgtgtgcagagaagaatctgtccaagcaggaaagagcagaactacttc

SEQ ID NO: 340015 - DNA, 201 bp, Homo sapiens
tgtgtgtgtgtgttgcttgcgggtggaggtttagtgattttcatcaactctgtgttgactggtgttgcagagtgttttgcaagctctctgggtgaaggccwgtttacaaacatttacactgtgctaccaagggtacaagggaaggctgcttttcttgggaatgaagctgggagcagggaggggactacagaggcatgcgaa

SEQ ID NO: 340016 - DNA, 201 bp, Homo sapiens
ggctgagtgcctcattttaaggtacatttgacattgagcatcatctgatgacacctcctgggggtggtctgtaccaatgcccttggggtgcgttttgtacrtattcaaacaccaaatatttatagaggttctacttaatgtctgccagcttgtgccaccctactgctggctgtaggaggaagtggtatgtggggaggggtg

SEQ ID NO: 340017 - DNA, 201 bp, Homo sapiens
gaatttttttgtaaaagtggcaggacaaatgttatccttttacagatgaggaaagatggcacagagacgttgtgcacttgcctgaggccacacagcctgamcttgaactccacttttcttttgattcaccaggctgagtgcctcattttaaggtacatttgacattgagcatcatctgatgacacctcctgggggtggtct

SEQ ID NO: 340018 - DNA, 201 bp, Homo sapiens
  misc_feature (1)...(201): n = A,T,C or G
aaactgtgtattgagcaacttaataatgataataataatgacagtagtagtggctgatatttgttaagtatattccatatgtcaggtgtattctaagcatnttataattattaattgtttaatcctcattaaacttccatgaatacgtattggtggctccatttttgtggatgagaaaaagacgcccagaaaagttaaata

SEQ ID NO: 340019 - DNA, 201 bp, Homo sapiens
cggttccgctgcgcccgccgtcgccgacagtgaagtaagtacagtgcgggcggcggctcccggtgagtcacttcgtgagtgacactcagccccgggggtckcgctggggtcggagccggaaggaatgttctgtccccggaaccgcttgcagccaggagttggaggccctctggccccgcagaggctgggttgcaggcatcg

SEQ ID NO: 340020 - DNA, 201 bp, Homo sapiens
tggtaggtagagcagcccgtcactctggaaggccgggaccgcccactccacctcggtccacagctctcttcctgcgcagttcgcctctgcagcctctgcgrggaagtgccggggctgctcgaggctcagttcttaggactgcaaggaggcagccccggcgtgcggcggtgcgcacagtctagagtggccagggcgcgagag

SEQ ID NO: 340021 - DNA, 201 bp, Homo sapiens
taagatgctgacacagaagctaatgtgacttttcagcttatcaagaggatggccaataaaacttaaaggtgtggttagatgttttctcacttttgtgacaytaatttatcactgagtctcattcaaccaagtaatctaaaatactgtgcaaattctagcagtatgtcttcgataacttggatgttaggatagccaatatgt

SEQ ID NO: 340022 - DNA, 201 bp, Homo sapiens
tgaaacagtgagggtgcctgggattgggggagagaggagccaggaggctggctcagaggtggagaggctggaatggcacattaaagagagggcttttatcytacagacaagggagtttttcaggccagcagagctcctataccagagacattcacaagctttatatgagttgtgaattcaaattcttttcatgtattttca

SEQ ID NO: 340023 - DNA, 201 bp, Homo sapiens
ttatgtttacccaaatatttatcatttctggtgtttttctttccttcctgaagatcctccttctatctggtatatccttcagaccaaaggatctcatttaraatttttgttctgaggatctgttagctaggaattctgttagtttttctttatgaatatatctttacattgttttcattcttgaaagatatttttgctgga

SEQ ID NO: 340024 - DNA, 201 bp, Homo sapiens
ccctgccctcattctttatgctatagttgtcatttgtattccatgtatatatgttataaatcccacaaaacaggaatacttgatttaaatagtcatatgtwttttaaggaaattaagaagaaaaaaatctttatgtttacccaaatatttatcatttctggtgtttttctttccttcctgaagatcctccttctatctggt

SEQ ID NO: 340025 - DNA, 201 bp, Homo sapiens
tttttttttccagttgttgccctgggaattatcatatgcatccttaacttttcacaggctacttaagagttcatattatatcatttcatgtgaaatttaaraaccttataatgatataggtccatttttctaccccactgcccctgccctcattctttatgctatagttgtcatttgtattccatgtatatatgttataaa

SEQ ID NO: 340026 - DNA, 201 bp, Homo sapiens
cagactccatggctgggaagtccctgtcatttggaggggttcctttatgccccttctcattgatctctggggatattctagggtctggttctctggccaadccctggggagtgtatcagcttgaattttcttggtttggtttgaaatgatgccaggccatctgtgcacctagataagacctatgttactaagttacttact

SEQ ID NO: 340027 - DNA, 201 bp, Homo sapiens
atgtggagaaataggaacacttttacactgttggtgggactgtaaactagttcaacccttgtggaagtcagtgtggtgattcctcagggatctagaactasaaataccatttgagtaaggtaactttttaaagagaaggttccatggctctggcttccttctacatctgagttagcctgaactatcctattttttaaaaga

SEQ ID NO: 340028 - DNA, 201 bp, Homo sapiens
ccaagtgaagtgggtggaaatggtttgactgcctgctcagaaggtggaggtgcatgggctctggggtcagtagtctctgttgagccatatatcaataagcsttagggcaactcctcggcccctaatttcagttgaaaagaattacaaaacgtggtcattggccatgtggagctgacatatggagctgagataaatttgttt

SEQ ID NO: 340029 - DNA, 201 bp, Homo sapiens
tgaataggcatgtgtgcagctcactggctgccaggttttccctctgccagcagcgggatcgatgtgctgtgacccagccagtagtggggaaactgagacasacatcttcccttcccatgagctgggctgctcatgggaattatgtgagcagcttccaaggaatcacactttctgtgctgggacatactcagtatatggatt

SEQ ID NO: 340030 - DNA, 201 bp, Homo sapiens
tttcaacctctcatggtgttatttgctgtttaatatcatgttctcttggacacatgaatacttatggggtaagtgcagacttttagaggtgcctgggaccyctgtcctgtgaataggcatgtgtgcagctcactggctgccaggttttccctctgccagcagcgggatcgatgtgctgtgacccagccagtagtggggaaa

SEQ ID NO: 340031 - DNA, 201 bp, Homo sapiens
gggcccagttcccttgttcagatagcaagagaaaagtgctgttagcttttccttctgcagtatctctttcaacctctcatggtgttatttgctgtttaatrtcatgttctcttggacacatgaatacttatggggtaagtgcagacttttagaggtgcctgggacccctgtcctgtgaataggcatgtgtgcagctcactg

SEQ ID NO: 340032 - DNA, 201 bp, Homo sapiens
ttgccttttctggagacatttgcgttgttacaggaaacacccaaaagagatagctctctaatggtaggattttcagactctggagcagaggtgggatgggragttcgggcaggccattactaattgaaggggtgggttgcccctccacacctgtgggtgtttctcgttaggtggaacgagagacttggaaaagaaaaagac

SEQ ID NO: 340033 - DNA, 201 bp, Homo sapiens
caccctcggaagcacagacatggcccggcacgtggctcacgcctgtaatcccaacagtttgggaagctgaggcacgaggatcgcttgagttcacgagtcawgagttggagaccagcctgggcaacatggcgacaccttgtctgtactaaaaaatacaaaattagcccggtgtggtggcacgcccctttagtcccaaactac

SEQ ID NO: 340034 - DNA, 201 bp, Homo sapiens
actcttccctttaattggcacagtactttgctaaaatgatttcacctctagagcagtgtggttctcagtttagtcacaggaatgatatgaggattaagaaragagaacctataaagcccctcgtgtggtactcaacaaataccagcatccttactagactgcttgaagctacttccaaatagactgtcacttaaccaagtg

SEQ ID NO: 340035 - DNA, 201 bp, Homo sapiens
tcaattagaatgaatttctcatctttactccgctgatgtaaatgatgtctttatgagatgaagtccaagtaggaatgagcttgtaaattatctctgtcctyaggtcctgtgttaatttatccctgtcagtgttttgtgatcattatgtcatggaggatttcccctgccacaccatgctgtagggagttaacttttcatttg

SEQ ID NO: 340036 - DNA, 201 bp, Homo sapiens
cagataatttttgcatttttagtactgatggggtttcgctttgttagccaggctggtctcgatctcctgacctcaagcgatccacccaccttggcctcccmaagtgctggggttacaggcgtgagctaccgcacccttcctggagatggttttacaggtcagccttaccctggattgatgaaggagtgtggctgttcccta

SEQ ID NO: 340037 - DNA, 201 bp, Homo sapiens
agcttcctgttacggcttccagagtatacctattaggctacagttgagtacctcccatctagataataagcattcaattagaatgaatttctcatctttastccgctgatgtaaatgatgtctttatgagatgaagtccaagtaggaatgagcttgtaaattatctctgtcctcaggtcctgtgttaatttatccctgtca

SEQ ID NO: 340038 - DNA, 201 bp, Homo sapiens
gcaaggttctttgtgagataggatgtgccaacacggtcataggtctttaggttttggatcttcctctttgttcagatgaggaagccaaaatcctagtataytgagggacttacggaaaactaaaatactcagtgcttggatactttgttccttatttaactaagtctttatagaaccagaacatattggttttagcactaa

SEQ ID NO: 340039 - DNA, 201 bp, Homo sapiens
gtttgctagctctggttgtcctcttgtatcctggggtccagcagtgtcccttggagcccatagattgttccgagtctgactggaggatgaccttagcaagrttctttgtgagataggatgtgccaacacggtcataggtctttaggttttggatcttcctctttgttcagatgaggaagccaaaatcctagtatattgagg

SEQ ID NO: 340040 - DNA, 201 bp, Homo sapiens
tcaatttctgcaaaggaacaagctatagtaattttttttttgacagaatctcgctctgtcacccaggctggagtatagtggcacaatcttggctcactgcwagctctgcctcctgggttcacaccattctcctgcctcagcctcccgagtagctgggactacaggtgcccaccaccatgcccagctaattttttgtatttt

SEQ ID NO: 340041 - DNA, 201 bp, Homo sapiens
attaagaagaaaaaaatctttatgtttacccaaatatttatcatttctggtgtttttctttccttcctgaagatcctccttctatctggtatatccttcaraccaaaggatctcatttagaatttttgttctgaggatctgttagctaggaattctgttagtttttctttatgaatatatctttacattgttttcattctt

SEQ ID NO: 340042 - DNA, 201 bp, Homo sapiens
gggtccactgaaatgcactcatgagggcatgagatggagcttcctgttggtggtaggtagctctattgccagatctttataatcatcagataaccaccgtytcctagtgatttgcaatttatgaaacatgatccataattttatcactaagccctcacagagctcttatttccactttatagattaggaaatggagattta

SEQ ID NO: 340043 - DNA, 201 bp, Homo sapiens
gtttctccacatttgatactcgtatgtaccagataagtttgcctctttagcaatctcagtagaagacaatcaggtatttatttcttttttgtctctctccratttcttcacataacctaactgaaagaccataagtgagaaaggcagagaatcatcacagatctggaaagttcgggcttatttgagaactaaggatttgac

SEQ ID NO: 340044 - DNA, 201 bp, Homo sapiens
ttcatccgggaggcagcaacgcaaggagccaaaatagtttctttgccggtcagtatgggagcagccattctgttctagccactgtacacccaagcagaacrgtgtttgctagctctggttgtcctcttgtatcctggggtccagcagtgtcccttggagcccatagattgttccgagtctgactggaggatgaccttagca

SEQ ID NO: 340045 - DNA, 201 bp, Homo sapiens
ctgattctcctgcctcagcctcctgagtagctgggattacaggtgcccaccaccacacctggctaatttttgtatttttagtagagacggggtttcaccaygttggccaggctggtctgaaactcctgacctcaggtgatcacctgccttggcctcccaaagtgctgggattacaggcgtgagccatcacacccggcggaa

SEQ ID NO: 340046 - DNA, 201 bp, Homo sapiens
agctccagattttgacttggattcttgctgtgtcacttactttgttcagtgactttgtgcagctttccccctgcaagtcccctgtttctttatttgtaaartgatgttaatgatacctcacacaatgatgttaatgtgtgaaggacctggcacattgctttaaatgttattcctttgttgtttccttcgctcacagtattt

SEQ ID NO: 340047 - DNA, 201 bp, Homo sapiens
cccacaaaacaggaatacttgatttaaatagtcatatgtattttaaggaaattaagaagaaaaaaatctttatgtttacccaaatatttatcatttctggkgtttttctttccttcctgaagatcctccttctatctggtatatccttcagaccaaaggatctcatttagaatttttgttctgaggatctgttagctagga

SEQ ID NO: 340048 - DNA, 201 bp, Homo sapiens
aactttttaaagagaaggttccatggctctggcttccttctacatctgagttagcctgaactatcctattttttaaaagaaggatctatctacttgggttrgaaaaatgtcagatttataatgtacgatttacctctttcctgtctattgactacagggctgttgataatcaggtgtatgtggccacagcctctcctgccc

SEQ ID NO: 340049 - DNA, 201 bp, Homo sapiens
gggtgaaggataaaatactacaaattgggtgcagtatatactgctcgggtgatgggtgtacccaaatttcacaaatcaccactaaagaacttactcaggtyaccaaacactacctgttccccaataacctatggaaataaaacaactaaaataaataaataaaatgaaaaaaatagacccccacaaataatgggcagttgt

SEQ ID NO: 340050 - DNA, 201 bp, Homo sapiens
tatgaaacatgatccataattttatcactaagccctcacagagctcttatttccactttatagattaggaaatggagatttaaaatgccttcccataaggkcacagagctatttaaatgatagaacataaatctgtacgactaccttcttgttttcaatctcatactttcccctttggcctgtgagcttgggaggaaaaaa

SEQ ID NO: 340051 - DNA, 201 bp, Homo sapiens
attgacaaatgggatctaattaaactaaaagagcttctgcacagcaaaagaaactaccatcagagtgaataggcaacctacaaaatgggagaaaattttcrcaacctactcatctgacaaagggctaatatccagaatctacaatgaactccaacaaatttacaagaaaaaaacaaacaaccccatcaaaaagtgggcgaa

SEQ ID NO: 340052 - DNA, 201 bp, Homo sapiens
agggctcagagctcaatgtgtgtggtggggaggccttggaagatatgactagtgtgagattccagttggcctcctgcacattaggcttggggacattgaargactaagttgacttgaaaattttcttgaacttgcatcaggttccactgtccagaaatctttgaatgccagggcaaatggggaagaatcagaaaagaattc

SEQ ID NO: 340053 - DNA, 201 bp, Homo sapiens
taccatcagagtgaataggcaacctacaaaatgggagaaaattttcgcaacctactcatctgacaaagggctaatatccagaatctacaatgaactccaayaaatttacaagaaaaaaacaaacaaccccatcaaaaagtgggcgaaggacatgaacagacacttctcaaaagaagacatttatgcagccaaaaaacacat

SEQ ID NO: 340054 - DNA, 201 bp, Homo sapiens
tgcaggttagttacatatgtatacgtgtgccatgctggtgtgctgcacccattaactcgtcatttagcattaggtatatctcctaaagctatccctccccsctgcccccaccccacaacagtccccagagtgtgatgttccccttcgtgtgtccatgtgttctcattgttcaattcccacctatgagtgagaatatgcggt

SEQ ID NO: 340055 - DNA, 201 bp, Homo sapiens
cacaatgtgcaggttagttacatatgtatacgtgtgccatgctggtgtgctgcacccattaactcgtcatttagcattaggtatatctcctaaagctatcyctcccccctgcccccaccccacaacagtccccagagtgtgatgttccccttcgtgtgtccatgtgttctcattgttcaattcccacctatgagtgagaat

SEQ ID NO: 340056 - DNA, 201 bp, Homo sapiens; identical to SEQ ID NO: 71497

SEQ ID NO: 340057 - DNA, 201 bp, Homo sapiens
tgacctgtaagtggcgcggccgcgcgctgcagctcgagttcgggccgcggggggaggctttggagcggcgccggcggtggctcggccggctcagcccctcmgccccgcgtccccgccgtgcgcggccttccctgaggcgggcgtccgcgtgggtccgggatcgcgtggccgggcggccgggcgcactcccgggattccagg

SEQ ID NO: 340058 - DNA, 201 bp, Homo sapiens
aggaatgcagcatatatctcattggaggtaacttcctacccacaaggtataatgacctaaacattagaaacatctgaatgagtcaggtgtggtggcgtgcrcctgtattccctacttgggaagcttcagcttgggaagctgaagcagagagtttctttttcttatttatttattttttttgaggtgaggtcttgctttgtc

SEQ ID NO: 340059 - DNA, 201 bp, Homo sapiens
agtatccttggtctctattcattagatgccactcatacctcatcagttgtggcatcaaaggtatcttcagacattgtcagatgtccccccggggacataaytgccttccatttgagaactatggctctgtctgaatccagcagttcgatcttctgatagctgttttcttttgtctttgttctcagctttccgcttggccct

SEQ ID NO: 340060 - DNA, 201 bp, Homo sapiens
ccctctgccagcagcgggatcgatgtgctgtgacccagccagtagtggggaaactgagacagacatcttcccttcccatgagctgggctgctcatgggaaktatgtgagcagcttccaaggaatcacactttctgtgctgggacatactcagtatatggattggaggtagacgagaggcccatgaacaaacagtaagggac

SEQ ID NO: 340061 - DNA, 201 bp, Homo sapiens
ggtcccagctacataagaggctgagacaagaggattgcctgaactgagtaggtcaaggctgcagtggaccatgtttgtgccactgcactccagcctaggcracagaacaaggccctgcctcaaaataaaaaatattagctaatggaaagtgattatcataaaagctaaaagggaactttaaagaacagaagaaaagcaaat

SEQ ID NO: 340062 - DNA, 201 bp, Homo sapiens
gctctggcttccttctacatctgagttagcctgaactatcctattttttaaaagaaggatctatctacttgggttagaaaaatgtcagatttataatgtaygatttacctctttcctgtctattgactacagggctgttgataatcaggtgtatgtggccacagcctctcctgcccgggatgacaaagcctcctatgttgc

SEQ ID NO: 340063 - DNA, 201 bp, Homo sapiens
ctatgtatccatcagggtccagacaggacatggaaacaacactagtaactcgaacaaggaaaattatttatttatttatttatttttttggagactgagtytcactctgtcgtccaggctggagtgcagtggcgcgatcttggctcactgtaacctccaactcccaggttcaactgattctcctgcctcagcctcctgagt

SEQ ID NO: 340064 - DNA, 201 bp, Homo sapiens
atctgtaacaaagcacatcttgcacagcccttaatccatttaaccctgagtggacacagcacatgtttcagagagctcggggttgggagtaaggttatagwttaacagcatctcaaggcagaagaatttttcgtagtacagaacaaaatggagtctcctatgtctacttctttctacacagacacagtaataatctgatcg

SEQ ID NO: 340065 - DNA, 201 bp, Homo sapiens
gctgccttcatgcatctgtaacaaagcacatcttgcacagcccttaatccatttaaccctgagtggacacagcacatgtttcagagagctcggggttgggrgtaaggttatagtttaacagcatctcaaggcagaagaatttttcgtagtacagaacaaaatggagtctcctatgtctacttctttctacacagacacagt

SEQ ID NO: 340066 - DNA, 201 bp, Homo sapiens
gacaggataattcttcgttgtgttatggagggggttgtcctatgcattgtaggatgtttggcagtatccttggtctctattcattagatgccactcatacstcatcagttgtggcatcaaaggtatcttcagacattgtcagatgtccccccggggacataactgccttccatttgagaactatggctctgtctgaatcca

SEQ ID NO: 340067 - DNA, 201 bp, Homo sapiens
ggtggaacgagagacttggaaaagaaaaagacacaaacaaagtatagagaaagaagtaagggggcccaggggaccagcgttcggcatacggaggatcccgycggcctctgagttcccttagtatttatgatcattcttgggtgtttctcggagagggggatgtggcagggtcataggataatagtggagagaaggtcagca

SEQ ID NO: 340068 - DNA, 201 bp, Homo sapiens
cttgcgaccgtcctgtattatttctgtctcaaagtcacatgtgattttggtcatcaacaccacttttcttgtgtgtccatatgtgtgtgacttacgtgttygtattaaaggaattcagagccatatcttaattgctgctggcactgtctgacttggctgacatctttttatgtttgggaaagtttgagttcagttcctgct

SEQ ID NO: 340069 - DNA, 201 bp, Homo sapiens
tccctacactgcgtagtaagaagctggttcactctagattcttgtgcctggcatgggactttgcccatggatattgctctatctccagatagattttagaytattgacattttggacaggataattcttcgttgtgttatggagggggttgtcctatgcattgtaggatgtttggcagtatccttggtctctattcattag

SEQ ID NO: 340070 - DNA, 201 bp, Homo sapiens
aggggtgggttgcccctccacacctgtgggtgtttctcgttaggtggaacgagagacttggaaaagaaaaagacacaaacaaagtatagagaaagaagtargggggcccaggggaccagcgttcggcatacggaggatcccgccggcctctgagttcccttagtatttatgatcattcttgggtgtttctcggagaggggg

SEQ ID NO: 340071 - DNA, 201 bp, Homo sapiens
tatcaggcttttatccctttctcacaaaagaattgctctattctttttcttatggtatgtttcttctctcaatgaaaggctctatccctgaagaggatgckgggaaattatataacacctgtgctgtgtttgggcctgatggaactttactagcaaagtatagaaaggtaagtaggaagtgtggcataagaatttgttatc

SEQ ID NO: 340072 - DNA, 201 bp, Homo sapiens
aaaggcagagaatcatcacagatctggaaagttcgggcttatttgagaactaaggatttgacacgattttgccctttgatttgattgtagcttcctgttayggcttccagagtatacctattaggctacagttgagtacctcccatctagataataagcattcaattagaatgaatttctcatctttactccgctgatgta

SEQ ID NO: 340073 - DNA, 201 bp, Homo sapiens
ctaaggatttgacacgattttgccctttgatttgattgtagcttcctgttacggcttccagagtatacctattaggctacagttgagtacctcccatctakataataagcattcaattagaatgaatttctcatctttactccgctgatgtaaatgatgtctttatgagatgaagtccaagtaggaatgagcttgtaaatt

SEQ ID NO: 340074 - DNA, 201 bp, Homo sapiens
tctcctgcctcagcctcctgggtagctgggactacaggcacgcacaaccacccccggctaatttttttttctatttttagtagagacaaggtttcactackttggccaggctggtctcgaacccctgacctcaggtgatccgcccacctcggcctcccaaagtgctgggattacaggcatgagccaccgtgtccggcctga

SEQ ID NO: 340075 - DNA, 201 bp, Homo sapiens
ttcttatggagctccagtatatgtatattatatttttaaatatttttccaaggtcaccaggctctgtttttctgtttttgtctttccaatactttttcctwctcttctacagattagataatttctgttgatctttcagacttattcactgtttcttctgtcttcttcaatttcccgtaagccaacccagtgaaattttaa

SEQ ID NO: 340076 - DNA, 201 bp, Homo sapiens
gaagttttttgacactattttgttaaatatttttctgttcctttttcttatggagctccagtatatgtatattatatttttaaatatttttccaaggtcaycaggctctgtttttctgtttttgtctttccaatactttttccttctcttctacagattagataatttctgttgatctttcagacttattcactgtttctt

SEQ ID NO: 340077 - DNA, 201 bp, Homo sapiens
aacaaccccatcaaaaagtgggcgaaggacatgaacagacacttctcaaaagaagacatttatgcagccaaaaaacacatgaaaaaaatgctcaccatcastggccatcagagaaatgcaaatcaaaaccacaatgagataccatctcacaccagttagaatggcaatcattaaaaagtcaggaaacagcaggtgctggaa

SEQ ID NO: 340078 - DNA, 201 bp, Homo sapiens
gagatgacccagcatgggtctgttaagtctcgagggctccgaggtgaggtgctttggtgtacctggactgcgagctgcaatttttgttctatttgaggtgstgggactgccaccatgggcatggaagcgccatgtggcctgcaaggtgtattgctctcataaggccactccattctctccggccaccttgacttgctttaa

SEQ ID NO: 340079 - DNA, 201 bp, Homo sapiens
ggtcagcagataaacacgtgaacaaaggtctctgcatcatgaacaaggtaaagaattaagtgctgtgctttagatatgcatacacataaacatctcaatgycttaaagagcagtattgctgcccgcctgtcccccttccagccctaaggcggttttccctatcttagtagatgggacatagaatcgggttttataccgaga

SEQ ID NO: 340080 - DNA, 201 bp, Homo sapiens
aatctgtacgactaccttcttgttttcaatctcatactttcccctttggcctgtgagcttgggaggaaaaaacagagaccttgaatatcaccaaacatcartgaatccactcattctcttctgcatctttttcaggggggaggttctagccaaagctggcacagaagaagcaatcgtgtattcagacataggtaagatttt

SEQ ID NO: 340081 - DNA, 201 bp, Homo sapiens
tcttgggtgtttctcggagagggggatgtggcagggtcataggataatagtggagagaaggtcagcagataaacacgtgaacaaaggtctctgcatcatgracaaggtaaagaattaagtgctgtgctttagatatgcatacacataaacatctcaatgtcttaaagagcagtattgctgcccgcctgtcccccttccagc

SEQ ID NO: 340082 - DNA, 201 bp, Homo sapiens
ttatctctaagccagcaacaatgtgtggaaaaaaaatttgctatgaagttccctagtccctctcattatatcacacatgtattagggttttgactgattgrcacaggtggttattcttggccatttgcatttttatataagttttagactcagcctgtcaatttctgcaaaggaacaagctatagtaattttttttttgac

SEQ ID NO: 340083 - DNA, 201 bp, Homo sapiens
ttcttgggtgtttctcggagagggggatgtggcagggtcataggataatagtggagagaaggtcagcagataaacacgtgaacaaaggtctctgcatcatraacaaggtaaagaattaagtgctgtgctttagatatgcatacacataaacatctcaatgtcttaaagagcagtattgctgcccgcctgtcccccttccag

SEQ ID NO: 340084 - DNA, 201 bp, Homo sapiens; identical to SEQ ID NO: 71501

SEQ ID NO: 340085 - DNA, 201 bp, Homo sapiens
tagccataattagcctactcaaatccaagtgtaaaagtaaaatgatttgctttcgttttgttttccttgcttaggggatcatggacattgaagcatatctkgaaagaattggctataagaagtctaggaacaaattggacttggaaacattaactgacattcttcaacaccagatccgagctgttccctttgagaacctta

SEQ ID NO: 340086 - DNA, 201 bp, Homo sapiens; identical to SEQ ID NO: 71504

SEQ ID NO: 340087 - DNA, 201 bp, Homo sapiens; identical to SEQ ID NO: 71505

SEQ ID NO: 340088 - DNA, 201 bp, Homo sapiens
tcctctgtccccagtggtgtgtgtcccaaaggacccagttaatcctacaggcagcaagctcgtaataattcctgctcctcttgcactagctgataaaaagyccctaatgatcctggatgtccaggaagattgaattctgttgtttgcaatgcctatgggaattccagagggaagtttttgtttttttgaggcagagccttg

SEQ ID NO: 340089 - DNA, 201 bp, Homo sapiens
ctacatttcaagtataaggttgctcagaaagtgtggctggcacatacttggaagctaatgctgtcactactccacagcttagtggtgacagttacaggtcyttgattcaaactgttgggtttacagtcacagccactttatagctgtgagaacttggcctagtcacttagtttccctaaaactcagtttctttttcagtaa

SEQ ID NO: 340090 - DNA, 201 bp, Homo sapiens
atcaccattcatctcggggcaggtccctttgtacaaggtcatcctcaggccataccacatacaaaagagttatacctgaggtctgtacagcactgttacartcatagtctcaaaaggttaaggctctatgatggcaggtttaaaaaaccttttctaaaatatttaacaaaataaggggcatttatttttttttggttcaca

SEQ ID NO: 340091 - DNA, 201 bp, Homo sapiens
cggagcatgtcacacacaattagagcttgcggcgggggagctgaacccgatggaattgtaaggtataggtttggacttaaaacgtgagatcattttattasacgcagccaccatgttaattctttcattactctgaggaatgggctttctaaatcaggtgggatttatcagagatatagttgtgtctgtgacaattaaggc

SEQ ID NO: 340092 - DNA, 201 bp, Homo sapiens
accggtctctgatgatcaccatgtttctgggtcagtaccctggatgcagtacctccagtttcacatacaaaaagggagaaaggcaacttgtagattgggtkctgtgagtctggggaattagtgagaatttcctttatttgttatataactggttttccctctggagtccccatgatgagatcaggttgttcattttttagg

SEQ ID NO: 340093 - DNA, 201 bp, Homo sapiens
ggacttgttgtgaggattacatacgtgtattaaaagataactaatgtgtttaaggcaactttctcaacgggatttccctcttggttacttgtaacagtgaygctcaccctcctctgtccccagtggtgtgtgtcccaaaggacccagttaatcctacaggcagcaagctcgtaataattcctgctcctcttgcactagctg

SEQ ID NO: 340094 - DNA, 201 bp, Homo sapiens; identical to SEQ ID NO: 71506

SEQ ID NO: 340095 - DNA, 201 bp, Homo sapiens
gcaaaatttcgtaagaggctaagcagttgacagacagatactgggtatgatgagaatttagaagggtctcaataggatgtggcacaaaaatggtaagggggaactcataagaactcataattatttcttcaacagacgtgtacagaagggccatgctgttattactcttacacaaggaggcagccctcgagccacagggtc

SEQ ID NO: 340096 - DNA, 201 bp, Homo sapiens
aggtttggacttaaaacgtgagatcattttattacacgcagccaccatgttaattctttcattactctgaggaatgggctttctaaatcaggtgggatttrtcagagatatagttgtgtctgtgacaattaaggcagttgtaagctcatgatttattattatattaatgtctcccaatttgtttgtcatggtgaagtttta

SEQ ID NO: 340097 - DNA, 201 bp, Homo sapiens
ggcttgagtagttgtctttaattttgacttttaataatttaacaaaaatatattccagtggcaaacatgttgtatcgaactttcccagaattttctcttttgttttttagcttcaatttcttcatcatttcaggaaaatatttatctttacatacatttttcttaacttttaaatccaggggtacatgtacaggttcgtta

SEQ ID NO: 340098 - DNA, 201 bp, Homo sapiens
aaaaaatcagacatactgtttgctcttgaatgcttgaaacacaaaacaggtgacaccaccttcctcctcaaaaggaactttttaactgtcaactttctacstgcacgctgcccagagacttattttgtctggcccttgctgtcttcagcagtagcagctgtttttctttagatttgcttttctggcctggtgcaagtaacc

SEQ ID NO: 340099 - DNA, 201 bp, Homo sapiens
cagaggcttgagtagttgtctttaattttgacttttaataatttaacaaaaatatattccagtggcaaacatgttgtatcgaactttcccagaattttctcttttgttttttagcttcaatttcttcatcatttcaggaaaatatttatctttacatacatttttcttaacttttaaatccaggggtacatgtacaggttc

SEQ ID NO: 340100 - DNA, 201 bp, Homo sapiens
gtcttacaagaaacgctaaagggatttcctcatctgaaaggaaaggacgctaacatgcaacaagaaaatatgtgaacgtataaaactcactggtaagagtragtacacagacaaatttataatactctaagactgtaattgtggtgtgtaaaccacaatatctttagtatgaagactaaaagataaagctaccaaaaatga

SEQ ID NO: 340101 - DNA, 201 bp, Homo sapiens
ctatcaggatagctcagttattgcatttctcaagctcttttatgtttgatattacctttatattcatgttgcctttatgatcaagtgaaatactagccagratatttggagcaaactctttcccttcaatactttgaagatacacttctattacttcaccagtggatatttttgtgtaacattctcttgctgtcctgatgt

SEQ ID NO: 340102 - DNA, 201 bp, Homo sapiens
taaaatggagctacgagtactgcttacttaaaggacttgttgtgaggattacatacgtgtattaaaagataactaatgtgtttaaggcaactttctcaacrggatttccctcttggttacttgtaacagtgacgctcaccctcctctgtccccagtggtgtgtgtcccaaaggacccagttaatcctacaggcagcaagct

SEQ ID NO: 340103 - DNA, 201 bp, Homo sapiens
gtagctctgactcctcaggcataaaatgggaataatgcttttacagtttagtggcggaactaaactcccaaaattatttgttatatggatcaagtaataaygtcagtaatgtttttggtacaaagtcattatttaataaaagttattgttccatcttgcttgcccccccacccctgtcatctgcctgcttctttcttgatt

SEQ ID NO: 340104 - DNA, 201 bp, Homo sapiens; identical to SEQ ID NO: 71510

SEQ ID NO: 340105 - DNA, 201 bp, Homo sapiens; identical to SEQ ID NO: 71511

SEQ ID NO: 340106 - DNA, 201 bp, Homo sapiens
tcataatagcatcaaaaagaataaaatagagggtggaacaaggtggccaaatagaaccttccagtagtcattcccctgcagggacatcaagttcaacaaayatcctcacgagcccaggcggcacagtgtgaagacagagtctacctccttaggaagtaaaaggaatgttagtgtgggattttgcattggaggctagtgctg

SEQ ID NO: 340107 - DNA, 201 bp, Homo sapiens; identical to SEQ ID NO: 71503

SEQ ID NO: 340108 - DNA, 201 bp, Homo sapiens
aatctatgcagcaggcgtagatgattttatctcagtccacaattgtacttgtgctgattgtagccttaaggccttacagccctatctcataggcagactamctctgggttaaactgcttttaattcttctatgttgggctcttgtttataacttttttaagagaaagaatacaggtttctttagcaataaagaaaaagaaa

SEQ ID NO: 340109 - DNA, 201 bp, Homo sapiens
atttgcttttctggcctggtgcaagtaacccccaccacctgcctggccccagtcggcattaaatgggagcagtgagtggccttctggacaagaacaactgytgaatgatggtctttgggtgcggctagtccagcaaccccttttcatccagaggcccagtgagctggcttaggagggggctaggttgtagtgtcaatttag

SEQ ID NO: 340110 - DNA, 201 bp, Homo sapiens
agaattccacagaagagaggagactggcctagacagacagccccaggagctgagggcccaacaggctttctaccctggatgctgctcccatgccctgacaygaggcccactacaatggtatacttgtttgctctttcctaattaagaaacaaacaaacaaaaaatcagacatactgtttgctcttgaatgcttgaaacaca

SEQ ID NO: 340111 - DNA, 201 bp, Homo sapiens
agcactagaaataattattatacttataaccattgtatttttacatgtttaaaatatagccataattagcctactcaaatccaagtgtaaaagtaaaatgwtttgctttcgttttgttttccttgcttaggggatcatggacattgaagcatatcttgaaagaattggctataagaagtctaggaacaaattggacttgga

SEQ ID NO: 340112 - DNA, 201 bp, Homo sapiens; identical to SEQ ID NO: 71507

SEQ ID NO: 340113 - DNA, 201 bp, Homo sapiens
aagcactagaacagtaggaaacacattatagctattcagtgaactatttcttgagttaatcaatcaatggatgagtgaatcaatacagttctttgagcggraaactttgtataaggctcagctaaaagggaaattgagtgggtcaggtaccacggatactatacactctattgcatgattctcctgcctacatcagaagac

SEQ ID NO: 340114 - DNA, 201 bp, Homo sapiens
gaaaactagagacttcaccaatcagaaactgtcaactaacctctaactagggacttttcactctaaccaaccaaatagcttttctttgtctcactcctgcraacattttataaaagtttctctcctgccctctcctttcctcagcagagcattgagccacctgtagtctggtgctgcctggctcatgaattgctatctgtt

SEQ ID NO: 340115 - DNA, 201 bp, Homo sapiens
tgaaagcactagaaataattattatacttataaccattgtatttttacatgtttaaaatatagccataattagcctactcaaatccaagtgtaaaagtaawatgatttgctttcgttttgttttccttgcttaggggatcatggacattgaagcatatcttgaaagaattggctataagaagtctaggaacaaattggact

SEQ ID NO: 340116 - DNA, 201 bp, Homo sapiens
ggggtgcggtggcactatctcggctcactgcaagctccgcttcctgggttcacgccattctcctgcctcagcctcctgagtagctgggactacaggcaccygccattgtgcctggctaactttttgtatttttagtagagacagggtttcaccgtgttagccaggatggtctcgatctcctgacctcgtgatccgcccgcc

SEQ ID NO: 340117 - DNA, 201 bp, Homo sapiens; identical to SEQ ID NO: 71508

SEQ ID NO: 340118 - DNA, 201 bp, Homo sapiens
tgttctgttaaaaatcttttcattggcgggccatcagactgggtgactcctgtggtttcattttcactcattttactgtttaccagtaaacagtagaaaastagagacttcaccaatcagaaactgtcaactaacctctaactagggacttttcactctaaccaaccaaatagcttttctttgtctcactcctgcgaacat

SEQ ID NO: 340119 - DNA, 201 bp, Homo sapiens
ttcaccgtgttagccaggatggtctcgatctcctgacctcgtgatccgcccgcctcggcttcccaaagtgctgggattacaggcatgagcaaccgtgcccrgccctaacgtcatatttctatctccatataagccaaaatggcttgttcaaaagccataactctcataacttttctactctttgttctgtattggaaggag

SEQ ID NO: 340120 - DNA, 201 bp, Homo sapiens
ttagccaggatggtctcgatctcctgacctcgtgatccgcccgcctcggcttcccaaagtgctgggattacaggcatgagcaaccgtgcccggccctaacrtcatatttctatctccatataagccaaaatggcttgttcaaaagccataactctcataacttttctactctttgttctgtattggaaggagtcagtgttc

SEQ ID NO: 340121 - DNA, 201 bp, Homo sapiens
aacctccacctcccgggttcaagtgattctcctgcattagcctctcaaatagctgggactataggcatgtgccaccacacctcgcttttttttttttttttaattttttattagagatgggggtttcaccgtgttggccaggctggtctcgaactcctgacctcaagtgatccactcgcctcggcctcccaaagcgctggg

SEQ ID NO: 340122 - DNA, 201 bp, Homo sapiens
tgggattacaggcgtgagccaccacactagggacgaagttttattatggccgaaggacacttactggagagggtctccaggaggtatgaatgacaaaaaaattaactccttcaccgtcagaccgagagcatcaccccctgaacatggacttgcagaattccacagaagagaggagactggcctagacagacagccccagga

SEQ ID NO: 340123 - DNA, 201 bp, Homo sapiens
caacctccacctcccgggttcaagtgattctcctgcattagcctctcaaatagctgggactataggcatgtgccaccacacctcgcttttttttttttttttaattttttattagagatgggggtttcaccgtgttggccaggctggtctcgaactcctgacctcaagtgatccactcgcctcggcctcccaaagcgctgg

SEQ ID NO: 340124 - DNA, 201 bp, Homo sapiens
gcaacctccacctcccgggttcaagtgattctcctgcattagcctctcaaatagctgggactataggcatgtgccaccacacctcgcttttttttttttttttaattttttattagagatgggggtttcaccgtgttggccaggctggtctcgaactcctgacctcaagtgatccactcgcctcggcctcccaaagcgctg

SEQ ID NO: 340125 - DNA, 201 bp, Homo sapiens
gaaactttgtataaggctcagctaaaagggaaattgagtgggtcaggtaccacggatactatacactctattgcatgattctcctgcctacatcagaagaygtttataagcctattttaaaggataccagttggaatctctcttttattaatcaccaagagaaccatgaacaagctgtttatcatttgactcatcatttaa

SEQ ID NO: 340126 - DNA, 201 bp, Homo sapiens
aatcaatcccagtacttttggaggctgaggcaggcggatcacctgaggtcagaagttcaaggccagcctggccaacatggtgaaaccctgtctctattaawagtacatgggttaggccagggcgcggtggctcatgcctgtaatcccagcactttgggaggccgaggcgggtggatcacgaggtcaggagttcgagaccag

SEQ ID NO: 340127 - DNA, 201 bp, Homo sapiens
ttttcagctaaaggttatagtgaattctctgaagaatatgataaatacattcgtgccaagtggaaaagttatgcaggtggtggatgaaaaattggtaagaratattatttctcacaataaatgttaagcacatagaaaatgcgctgttatttatttaaaggcataattcagcaacctcttcgcagggacttgggcaaatct

SEQ ID NO: 340128 - DNA, 201 bp, Homo sapiens
tgcgctgagggagggtgggcagcatgaagcactacataaagaaaaatcttctaaatgaaattagaacttctgaaatttgggcttgctatgtaaattctgtrtatgttgcatacagctttttatttcttggtaaaattttgtgattgtactgaaaattttccttattttcagactactgtactgcctattaaagttgatttc

SEQ ID NO: 340129 - DNA, 201 bp, Homo sapiens
agcactttgcgaggccgaggcgggcgaatcatctgaggttgggagtttgacaccagactggccaacatggtaaaaccccttctctactaaaagaaaaatamaaaaaaaaaaaaaaaagtagccaggtgcggtcgcacatgtctgtaatcccaactacgtggaaggctgaggcacaagaattgcttgaacctgggaggcaga

SEQ ID NO: 340130 - DNA, 201 bp, Homo sapiens
gcactttgcgaggccgaggcgggcgaatcatctgaggttgggagtttgacaccagactggccaacatggtaaaaccccttctctactaaaagaaaaatacmaaaaaaaaaaaaaaagtagccaggtgcggtcgcacatgtctgtaatcccaactacgtggaaggctgaggcacaagaattgcttgaacctgggaggcagag

SEQ ID NO: 340131 - DNA, 201 bp, Homo sapiens
ttgaacctgcgaggcggaggttgcagtgagccgagatcgcgccactgcactgcagcttgggatacagagccagactccatctcaaaaaaaaaaaaaaaaaagaacacagaactgtttcgttctgtaggaagagtaggttgtattatattgatgataagtaagtcccaagtcacacccaaaatgtgatcataagtgaagata

SEQ ID NO: 340132 - DNA, 201 bp, Homo sapiens
cgttttcttaacttaaagagcaaaattgtgctgtactttccttttctggttctaatgctggataccactctgaagttgaataacaaacaggcaagaatttaaaaaggggaaggagagagaggaaagtaatccattaaaactgttacctgtatttctaacagtgactcccacagaaactccactgcggggatggaggggagg

SEQ ID NO: 340133 - DNA, 201 bp, Homo sapiens
acccctgaatccatctgagtcccattcagcatttctttcccactgctcacgggatgcctagcacttgctctcttatttgtatatgtgtgtgttgtgtcacytggactagtttccatgccacctaggtagccatgtgggttcaggtgatgttgctgatattatgaatggcatggacattgcaaacactaagtctcaaaaatg

SEQ ID NO: 340134 - DNA, 201 bp, Homo sapiens
cattccagctctttcttcaatggcctgctgtctgaaagtcttcctttctgtcatcactggcatcattctggccttcagtgacatgtctgccttactgattrattatgtctctctgttggtctcactgccccaattcattgaacatttaatgaggtgccttccatgtttgaggccgtttctactcccttttaggtgcacttt

SEQ ID NO: 340135 - DNA, 201 bp, Homo sapiens
gttgcagtgagccgagatcgcgccactgcactgcagcttgggatacagagccagactccatctcaaaaaaaaaaaaaaaaaagaacacagaactgtttcgktctgtaggaagagtaggttgtattatattgatgataagtaagtcccaagtcacacccaaaatgtgatcataagtgaagataaatggattgcttgagtgct

SEQ ID NO: 340136 - DNA, 201 bp, Homo sapiens
tggtggttcacgcctgtaatcccagctttttgggaggctgacacaggtggatcacgaggtcaggagttcaagaccagcctggccaagatggtgaaaccccrtctctactaaaaacataaaaattagccaggcatggtggtgggcatctgtaatcccggctacttgggagcctgaggcagagacttttttgaacctgcgagg

SEQ ID NO: 340137 - DNA, 201 bp, Homo sapiens
gagaaacatggattttggagtatttcttgggtaagtaaagaacaaagggtcaggcatggtggttcacgcctgtaatcccagctttttgggaggctgacacrggtggatcacgaggtcaggagttcaagaccagcctggccaagatggtgaaaccccatctctactaaaaacataaaaattagccaggcatggtggtgggca

SEQ ID NO: 340138 - DNA, 201 bp, Homo sapiens
ctgggaggcagaggtcgcagtgagctgagatcgcaccactgcactccagtctggccaacagaacgagactctgtctcaaaaataaattaattaatcaaaaytaattgtccagctttgatttagaatcttaactgctattacacgtctcttctgtctaccttcaaataggtcatctaatacatgggagaaacatggattttg

SEQ ID NO: 340139 - DNA, 201 bp, Homo sapiens
gaattgcttgaacctgggaggcagaggtcgcagtgagctgagatcgcaccactgcactccagtctggccaacagaacgagactctgtctcaaaaataaatwaattaatcaaaattaattgtccagctttgatttagaatcttaactgctattacacgtctcttctgtctaccttcaaataggtcatctaatacatgggaga

SEQ ID NO: 340140 - DNA, 201 bp, Homo sapiens
actgatatacctttaggtaaagttcacttagaagctttaaaaaaaaaagtaattaaattcttttacaagtttccattgaggtgtgatatacatacagcaargtgcacaggtcttagatatacagctcagtgaagcttcagaaatgcatgcatgcatgtagccatgactcagatcaagatacggaagagcccagcactccac

SEQ ID NO: 340141 - DNA, 201 bp, Homo sapiens
gatagtgaaccaaaacatgaccattgattccttttcccatattctgatcttacctggaaacccgtgctctcagattttgtggggttatctggcagatagayggtgacaacagtcccatctggtgaaggcttaggatattaggatgtttcttacttcttattgtttgaagaaacagttgtgaataaaaattaatcaaaatta

SEQ ID NO: 340142 - DNA, 201 bp, Homo sapiens
gttgatttcagacatgcaaaaaacctggaagaaatgttgcagggctagaaacattcttctcttcctcatagtttacttctacccatctacatgctttgatrgaagtgctcgcaggaggtgcttccttatcttcgtgtatgtcatgacatctgtccttttcttgaggcccagaacacacattctcccatcctttcccagcca

SEQ ID NO: 340143 - DNA, 201 bp, Homo sapiens
tgaaatattagagccaaattataacacctagcacttttacaaattgaattgaaactgaaaatccacttaatggtttaggattttagaagttttcttggaargaaaagacttattttaagaggcattgaaacgtataaaagagcaatatcagacttgatgttgtcttcacagattaactacttttgaaattgcttattccgt

SEQ ID NO: 340144 - DNA, 201 bp, Homo sapiens
aagaaaagacttattttaagaggcattgaaacgtataaaagagcaatatcagacttgatgttgtcttcacagattaactacttttgaaattgcttattccrttggcaagcatttgttattttctgaaacttaattttctttgcttttcagtggacagaggactgcagaaaatcaacctatcctccttcaggaccaacgtga

SEQ ID NO: 340145 - DNA, 201 bp, Homo sapiens
gcgaagatgaaacgtaatggcttagtaattaattgccaaagtaaacttgtaaactcatttttatgcatcagcttctcatactagttaacagcgtatgtcarcattgttgacattacctattgaatcagctttagcaatgattttcacgcagttgccagaaatctcatagaccccatctggcctaggaatttattgcacttc

SEQ ID NO: 340146 - DNA, 201 bp, Homo sapiens; identical to SEQ ID NO: 71519

SEQ ID NO: 340147 - DNA, 201 bp, Homo sapiens
gactacagtcacgtgccgccacacccagctacttttctgaatttttagtagagacggaggcttgctgtgtcacccaggctggtctcccaactcctgggctyaggcgatcttcccgcctcaacctcccaaagtgttctcccaaagtgttgggatcgtaggtgtgaaccgccatgcccggcctgggttggatatttctttgtc

SEQ ID NO: 340148 - DNA, 201 bp, Homo sapiens
tattaaagttgatttcagacatgcaaaaaacctggaagaaatgttgcagggctagaaacattcttctcttcctcatagtttacttctacccatctacatgmtttgatggaagtgctcgcaggaggtgcttccttatcttcgtgtatgtcatgacatctgtccttttcttgaggcccagaacacacattctcccatcctttc

SEQ ID NO: 340149 - DNA, 201 bp, Homo sapiens
ggtttatctctgtgagtgtgggaaggaaatggtaagaacggtatatgccagtggctagagggtgaattcgtgcagagagataaggagtgcttgttacgatrtttttgtggtgtgggtcaggttaggtcatccaagtggaattactctcgttcctgccttctctggagaatgatggaaaaataaggcaggaaaaacaatctg

SEQ ID NO: 340150 - DNA, 201 bp, Homo sapiens
tgcaggtttatctctgtgagtgtgggaaggaaatggtaagaacggtatatgccagtggctagagggtgaattcgtgcagagagataaggagtgcttgttaygatatttttgtggtgtgggtcaggttaggtcatccaagtggaattactctcgttcctgccttctctggagaatgatggaaaaataaggcaggaaaaacaa

SEQ ID NO: 340151 - DNA, 201 bp, Homo sapiens
gcaaaaggccgtgaacttaagttgtgatctggatgttagtagttgccattgagaataaatatatgatgtccaccactgaatttgctcaatgtctctggttygctaaaagaatgcagttacttcatcttagctgaagatcagccattaaccatgacacagggctatggatagaatagtgcaggtttatctctgtgagtgtgg

SEQ ID NO: 340152 - DNA, 201 bp, Homo sapiens
gcttggatgtaataagtgtttaataaatacccattacgtcacatttgtttgttaaatggctggaacattccacttggggaatgctttgagttcctagggaraaaaaaaatatgtttaggtgacattacatgtaattaccaagttggttaaaaaagtgagattcgtgaattttaagcagattatctcagcaaaaggccgtga

SEQ ID NO: 340153 - DNA, 201 bp, Homo sapiens
atcagacttgatgttgtcttcacagattaactacttttgaaattgcttattccgttggcaagcatttgttattttctgaaacttaattttctttgcttttyagtggacagaggactgcagaaaatcaacctatcctccttcaggaccaacgtgagtaaacatcagatgatcaaaactccctttgacctttgtgaagttttt

SEQ ID NO: 340154 - DNA, 201 bp, Homo sapiens
gtgccgtcgcgcagcacgcgccgccggtgagtgagcttgagccgaggcgcagagaggggcgtgcaggtgcgggcgcggatggaggcgcaggtgtggcggcrcgagcgggtacaaggaacacctcgtgctgggcagcttctttacgggggtctgtggtttcgtgcacaggggtgtgggtgcagagcgggctggcgaaccccg

SEQ ID NO: 340155 - DNA, 201 bp, Homo sapiens
ctgtcaggaataagctcctataaggagctggagattctttcctgagcctgtttatattcattacctgaaacagtgatcctgttgaagttgtttgctttagytatttggtgagactttagctaattttatatgattatactatattaatataaatatatacattatataacatgctttgcatatattaagttatattattta

SEQ ID NO: 340156 - DNA, 201 bp, Homo sapiens
ataccagcctcactttcccgtatttttcctgactggttcccagagtacaaagcacaggacaacttcgctaactcaccctgatctttgacctatactctggktataaatctgcctgtaccttacccttgagatgtcctgctctaggggatgatgcctgaagggaaacatttgatgaatcacagtaattgaggctcagatttc

SEQ ID NO: 340157 - DNA, 201 bp, Homo sapiens
tattttttatgaattatttaccatttgtacttcaatagtagcagaagacaaaaaaggtaattgtgcgctgagggagggtgggcagcatgaagcactacatraagaaaaatcttctaaatgaaattagaacttctgaaatttgggcttgctatgtaaattctgtgtatgttgcatacagctttttatttcttggtaaaattt

SEQ ID NO: 340158 - DNA, 201 bp, Homo sapiens
ggtttggaggaggggggttattatcaagaaatacaagctgaacatcgtatctgaattaaataacaagggttatgtaagtgggttattaaatatgactaaayggtcacaatcttactcttacatgactgataccacctcttaaccagatactatcaacccaatttgcaggtgtttaaaggcagtttttcccccagataggtg

SEQ ID NO: 340159 - DNA, 201 bp, Homo sapiens
gacccacttcataagatgtgcgaagatgaaacgtaatggcttagtaattaattgccaaagtaaacttgtaaactcatttttatgcatcagcttctcatackagttaacagcgtatgtcaacattgttgacattacctattgaatcagctttagcaatgattttcacgcagttgccagaaatctcatagaccccatctggcc

SEQ ID NO: 340160 - DNA, 201 bp, Homo sapiens
tgtgttcagtagctctgtaattaatttctcttaatgaatggggaggacattcaaagaggcttaagtttctatcaaataaccagaaaaattagagaattttytgacccaaacagtcttttaaaagcactttccagagagttttttttttttttttttttttctgagatggagtcttgctctgtctcccaggctggagtgcag

SEQ ID NO: 340161 - DNA, 201 bp, Homo sapiens
gtatgctatgatgcttaaatcttttatttctttatttttatttttttatattttatttctttatttttatttattgattgattttttttttgttttgagayagagtctcactctgtcacccaggctggaatgcagtggcacgatctcagctcgccgcaacctccgcctcctgggttctagcaattcccctgcctcagcttc

SEQ ID NO: 340162 - DNA, 201 bp, Homo sapiens
gggtaaccaaattctacactgttgttaagactttgcctctcatatattcttatagatgtatctaactgaccctcacaaaaaaccctttcatcatttcaagrtgatacacctctcattacaggtacagaggtgcagttccatggtacaccataaatcttgacttaccaccctacaaaagatggcatgaattgatgcttgaca

SEQ ID NO: 340163 - DNA, 201 bp, Homo sapiens
tttctgtgaccgcttatgattgtgttctcaacctagaagcactaggtagagaatgaactttctttccaaattttggtttgggtaaccaaattctacactgytgttaagactttgcctctcatatattcttatagatgtatctaactgaccctcacaaaaaaccctttcatcatttcaaggtgatacacctctcattacagg

SEQ ID NO: 340164 - DNA, 201 bp, Homo sapiens
aatacagcttgggcttggactttgtccagaaaaatgagaagagaagaggtatatagtagggaagattaggatggctgacagaatcatgaaggttcttgaarctgatcgtgggaagataatacatgttgccatctggggcttaaaaggtgatcttcctgaaggcaacactggagacattggtttggcaatagtgttacactc

SEQ ID NO: 340165 - DNA, 201 bp, Homo sapiens
tgtagaattcatccaccagaaatatggcccagcttcactgataagtgactggatgttgctatatcctcagaaattgctgcacgtaagttaaagagtaggargttggaggatatgacagaatacagcttgggcttggactttgtccagaaaaatgagaagagaagaggtatatagtagggaagattaggatggctgacagaa

SEQ ID NO: 340166 - DNA, 201 bp, Homo sapiens
ttgtggcacataccagagtcaccctgccagtctcaggagcagatcagtggaacagatgatggttatttttaggcataggtttatactgataaaccactaamtggcacacccttaaaagctatttcagtttagtaaccagggccagaaaataatgttcctatagcaacaaaaatagttgtagaattcatccaccagaaatat

SEQ ID NO: 340167 - DNA, 201 bp, Homo sapiens
acctgaatgtctgctagttaacagtttcataaaacctcatacatataccagggccccaagttacacagcattatttagagaaccaagtaattatttatgayagtggaaatataaatagaaccacagttcatgacttaggtaataacccatccccagctatggacataagtctagataacatttctatttaggagactggta

SEQ ID NO: 340168 - DNA, 201 bp, Homo sapiens
cccgccctcttgccttctgccacgattgtcagtttcctgaggcctccccagccatgcggaactgtgagtcgattaaacctctttactttataacttagcastgcgaaaacggactaatacagacagagtgggatagactgcatccctctgtgttctcacaggctgggaagggaggtgtggggcatgcaaggtatggagaaa

SEQ ID NO: 340169 - DNA, 201 bp, Homo sapiens
aggtggtataattcttccaactttgtttttctcaatatttatttaagttactgatttctctgagcagtatcttttattttcagggagaagacctcacatgycattcgttaaaattattcttagatattgatggtttgggaagctatttttaaaatttcaatttaagctttatggcatgtaacgaaaaatattttccccacg

SEQ ID NO: 340170 - DNA, 201 bp, Homo sapiens
acttggggtggggggcaaatggcattcccagagtaatacagtcctttgcctttggcccaggagtctgccagcatccaggaagctgtggcaggctaggtcawtagcttgcaagcagggtaaaatctcaggcccttcacagggccgcagctttggggcagctgggcagggtctaggcataccagcctccaggctgcctcccac

SEQ ID NO: 340171 - DNA, 201 bp, Homo sapiens
aaattaggtggtataattcttccaactttgtttttctcaatatttatttaagttactgatttctctgagcagtatcttttattttcagggagaagacctcrcatgccattcgttaaaattattcttagatattgatggtttgggaagctatttttaaaatttcaatttaagctttatggcatgtaacgaaaaatattttcc

SEQ ID NO: 340172 - DNA, 201 bp, Homo sapiens
tgagcctgtttatattcattacctgaaacagtgatcctgttgaagttgtttgctttagttatttggtgagactttagctaattttatatgattatactatrttaatataaatatatacattatataacatgctttgcatatattaagttatattatttaatattaaataacttctaaagcaaattctacaagtatagaaat

SEQ ID NO: 340173 - DNA, 201 bp, Homo sapiens
acttacagtgtggtaaggcaaatttgacagctaatgtttgaatcacaggtaatgtcaacctactttatatattccccatgttatcaaaagttaaaacaagrtgctagacctccattcttacacagctgtccagcagatacattttctgtgctcaagctacagttccaggagttttctgagctcaagctacagttccaggag

SEQ ID NO: 340174 - DNA, 201 bp, Homo sapiens
attacctgaaacagtgatcctgttgaagttgtttgctttagttatttggtgagactttagctaattttatatgattatactatattaatataaatatatasattatataacatgctttgcatatattaagttatattatttaatattaaataacttctaaagcaaattctacaagtatagaaatgctaatatatatcagaa

SEQ ID NO: 340175 - DNA, 201 bp, Homo sapiens
ctaaagcaaattctacaagtatagaaatgctaatatatatcagaacatctctgaattgaaaacgtccttaaagtaaaaataacttttctttcagctgaccrtatacacaaccttgatagatgttaccaaaggtcaattcgaaacttacctgcgggactgccctgacccttgtataggttggtgagcacacgtctggcctac

SEQ ID NO: 340176 - DNA, 201 bp, Homo sapiens
tatgtttgaatctgaggctcactatttataagctgtgtgatattgagagagttacctgacttctctgaacctcaattttatcatttggaaaacagaataawtataccatattgtaaaggtcttgttaggattgatcgtggtgactcggtaaataaagctcctagtgtaatgcctggccctcatcatcatgttgatcattac

SEQ ID NO: 340177 - DNA, 201 bp, Homo sapiens
gcaagatgtgcattgtcttcttttatacctgtaaggagaaattctttaaaatcatggtgggatatgatttagccattaaaattgatataatgttcagcagwtaaaagtagaatccagaatagtatatacagtttttcctgtaataggaaaatacacagaacatgtatgtggacacgattaaaggccttaaaataaaattgc

SEQ ID NO: 340178 - DNA, 201 bp, Homo sapiens
atgtagatatcagctcctaagaaaatggggaacttgaaaatgctttgagaagaacaaaattcgttcactatgattttgtttaaatgtacatttccaaaatygaatatacttttcttttctgtctaaatcacaacctgaatgtctgctagttaacagtttcataaaacctcatacatataccagggccccaagttacacagc

SEQ ID NO: 340179 - DNA, 201 bp, Homo sapiens
taatatggggaacaataattacttactgaattgtgggacaaaattttacatgtgaaattatggtctgtcagaaatggaattaatttgttgtgatgaaaagyttttttctagaatataagtattgtagcatttcatgtagatatcagctcctaagaaaatggggaacttgaaaatgctttgagaagaacaaaattcgttcac

SEQ ID NO: 340180 - DNA, 201 bp, Homo sapiens
aatcaggaatttatggcggatatagaggcatgatttgggattggttggatgttatgaggtgaggagcagctgattggagttcatagggatgagatgcatakctccaacaggccactgagttatctttgctactagacatagaaatctaaatgcacagttgaagggagaggggagactagtaatacctgcccataatatggg

SEQ ID NO: 340181 - DNA, 201 bp, Homo sapiens
attgtccgttgtgttgtgttcatcccctctcatcgcgtctctgagatccatgaacctacccaggactctaggctgaaaaagaatcaggaatttatggcggrtatagaggcatgatttgggattggttggatgttatgaggtgaggagcagctgattggagttcatagggatgagatgcatagctccaacaggccactgagt

SEQ ID NO: 340182 - DNA, 201 bp, Homo sapiens
agttgattggagaagcagcccatcttataactcgaggggtttcctgagcttggggttcctcagctgtgatacagatgatacatcataaattgggttgtcayacatcacctccttgggggacttggggtggggggcaaatggcattcccagagtaatacagtcctttgcctttggcccaggagtctgccagcatccaggaag

SEQ ID NO: 340183 - DNA, 201 bp, Homo sapiens
tttagaaaactgtttaacgagaggtaaaatgtgcaattatggctaagctttagtcattaaaataatttggtttattagattaaccagttctctcaaattckaattagtgcaggtttgatggtagagaggtttgtggggtctcatcatccccacttcattgtaatcccttcattgtccgttgtgttgtgttcatcccctctc

SEQ ID NO: 340184 - DNA, 201 bp, Homo sapiens
acaagcctggggaagtgtggctgggctcctcaaccttcacaacttggggaggttgctcagctcacatgaaaatcagtcctctctttttccctagggcactstgtccctcttatgttgataaagtgggtttcccagccaggtggcacaggggatgctagactggtgtgcgttgggcaattctctgtggcagttctggacatc

SEQ ID NO: 340185 - DNA, 201 bp, Homo sapiens
atgggcagatatgagggaagaaaaagataacctgtttggccagcatgactagtcaaatcaatgctgaagataaaggaactgatagccagatcacccctgartccatctgagtcccattcagcatttctttcccactgctcacgggatgcctagcacttgctctcttatttgtatatgtgtgtgttgtgtcacctggactag

SEQ ID NO: 340186 - DNA, 201 bp, Homo sapiens
tcacaaagtgaagcatagtttttgtttattggtgacaatttacaaaatacttgccagcttagcctcacatatgacagatgtgaccagcaggctccagaccwcaccgagctgcatgctggccccgtctacaagcctggggaagtgtggctgggctcctcaaccttcacaacttggggaggttgctcagctcacatgaaaatc

SEQ ID NO: 340187 - DNA, 201 bp, Homo sapiens
taagtgcgtagatttgggcagcatccatgggcagatatgagggaagaaaaagataacctgtttggccagcatgactagtcaaatcaatgctgaagataaargaactgatagccagatcacccctgaatccatctgagtcccattcagcatttctttcccactgctcacgggatgcctagcacttgctctcttatttgtata

SEQ ID NO: 340188 - DNA, 201 bp, Homo sapiens
gtaagttaccatggaaagatgatgaagggccctgtgctgtgtgccctgaaaatctggtttgggaggcaaatcccaggacaggttgcaacacacatggctgrtaagtgcagataatacatcctatcaggtcatttacttttagtgctaagtcagcctctctaacataaatattttccatctactttgttacatttgttcgtt

SEQ ID NO: 340189 - DNA, 201 bp, Homo sapiens
gcgctcttatgacacccgaattcttgactttacaagtaggattgagaaacagctctgtcctatgagacccacacttctgctgccatggaccaggccacccwgctgagcctggacaccactgtgtcactgccttctacttgttctgtgtcaattattaatgttcccatagggatcagaaaccctttggtgttaggagctgac

SEQ ID NO: 340190 - DNA, 201 bp, Homo sapiens
taatttgatgtttattttggctttggaacccagggcgtgcaaatgtcattattaggaagggataggagtcattacgtttcacttaatttgccgagttgatkctagtgatcaccagaagccctgaactacgcgcagattattctgttaggaattaaattgaggcattggttttattatctctgtgggaagctgtttgataga

SEQ ID NO: 340191 - DNA, 201 bp, Homo sapiens
gctgaatcctacctgtattccttcacacatcgagctcctcagtcactcatcttaattagagctcttgcttatccatttatgtaccaggccttgtgattgayaaggtgcttgacctagattacctcctcagcaaaccccggtatcacttgtaatcacacttgccagccatggaagtaacttgctgaaagttgcattaacaga

SEQ ID NO: 340192 - DNA, 201 bp, Homo sapiens
agttgtctagtaagaaatgtgcctgtaatttgatgtttattttggctttggaacccagggcgtgcaaatgtcattattaggaagggataggagtcattacrtttcacttaatttgccgagttgattctagtgatcaccagaagccctgaactacgcgcagattattctgttaggaattaaattgaggcattggttttatta

SEQ ID NO: 340193 - DNA, 201 bp, Homo sapiens; identical to SEQ ID NO: 71536

SEQ ID NO: 340194 - DNA, 201 bp, Homo sapiens; identical to SEQ ID NO: 71537

SEQ ID NO: 340195 - DNA, 201 bp, Homo sapiens; identical to SEQ ID NO: 71538

SEQ ID NO: 340196 - DNA, 201 bp, Homo sapiens
tagaaaaaggcggagttgagcaaattcacaaaacttgtgaacatgcgaggtgtttaaagctcatggttatttattatagtattccttttcagatattttgkggaaaatattggaatctcacatgtgttattgaaccggcaatataaaccatgagcttcatttgctcttgtggatataaccgtcatcatttctgtgaattat

SEQ ID NO: 340197 - DNA, 201 bp, Homo sapiens
ggtctcccaggactgccagctgtgcgtcaaggagggttaaggcagtcttaaagcattgggggtggagcaatgtgctgtcaggaataagctcctataaggarctggagattctttcctgagcctgtttatattcattacctgaaacagtgatcctgttgaagttgtttgctttagttatttggtgagactttagctaatttt

SEQ ID NO: 340198 - DNA, 201 bp, Homo sapiens
tgttttagaatatctcatttgaaaccatgtatgatgtcctgtcaacaaaacctgtcctcaacaaggtattttaaatgttatatgtatatttgccttttagrgaaagaatttggccctatgttttatctttctctgttatctttgatcagtttgagcacaaaaggtgtgttcagcttaggactgattttttattaaaaaatg

SEQ ID NO: 340199 - DNA, 201 bp, Homo sapiens
catactgtgtataaagcatagtgcttggatgtaataagtgtttaataaatacccattacgtcacatttgtttgttaaatggctggaacattccacttgggkaatgctttgagttcctagggaaaaaaaaaatatgtttaggtgacattacatgtaattaccaagttggttaaaaaagtgagattcgtgaattttaagcaga

SEQ ID NO: 340200 - DNA, 201 bp, Homo sapiens
gacagaaaggaatcattggatgtatatgagtaagtaggtttgttaaagcaaaagaagtagaaacaaaagcatacactgatatactttgagttttaaggcakgtagcctaagagggaatctctccttttgtatctagactcgatgctaagcagggtagatggtatgtggtacaaacaaattatgaccgttggaaacatccct

SEQ ID NO: 340201 - DNA, 201 bp, Homo sapiens
aggttgcagtgagccgagatcgcgccactgcactgcagcttgggatacagagccagactccatctcaaaaaaaaaaaaaaaaaagaacacagaactgtttygttctgtaggaagagtaggttgtattatattgatgataagtaagtcccaagtcacacccaaaatgtgatcataagtgaagataaatggattgcttgagtg

SEQ ID NO: 340202 - DNA, 201 bp, Homo sapiens
aggaaatgaagggtattgccgctgttactgatatacctttaggtaaagttcacttagaagctttaaaaaaaaaagtaattaaattcttttacaagtttccrttgaggtgtgatatacatacagcaaagtgcacaggtcttagatatacagctcagtgaagcttcagaaatgcatgcatgcatgtagccatgactcagatca

SEQ ID NO: 340203 - DNA, 201 bp, Homo sapiens
taatgttcagcagataaaagtagaatccagaatagtatatacagtttttcctgtaataggaaaatacacagaacatgtatgtggacacgattaaaggccttaaaataaaattgctccattgtgggtagggaattaatttgcttgacggtagttggttttatgggaattgggagagactttgatactttgatactgtcaggg

SEQ ID NO: 340204 - DNA, 201 bp, Homo sapiens
aatgttcagcagataaaagtagaatccagaatagtatatacagtttttcctgtaataggaaaatacacagaacatgtatgtggacacgattaaaggccttaaaataaaattgctccattgtgggtagggaattaatttgcttgacggtagttggttttatgggaattgggagagactttgatactttgatactgtcagggc

SEQ ID NO: 340205 - DNA, 201 bp, Homo sapiens
atgttcagcagataaaagtagaatccagaatagtatatacagtttttcctgtaataggaaaatacacagaacatgtatgtggacacgattaaaggccttaaaataaaattgctccattgtgggtagggaattaatttgcttgacggtagttggttttatgggaattgggagagactttgatactttgatactgtcagggcc

SEQ ID NO: 340206 - DNA, 201 bp, Homo sapiens
tgttcagcagataaaagtagaatccagaatagtatatacagtttttcctgtaataggaaaatacacagaacatgtatgtggacacgattaaaggccttaaaataaaattgctccattgtgggtagggaattaatttgcttgacggtagttggttttatgggaattgggagagactttgatactttgatactgtcagggccc

SEQ ID NO: 340207 - DNA, 201 bp, Homo sapiens
gttcagcagataaaagtagaatccagaatagtatatacagtttttcctgtaataggaaaatacacagaacatgtatgtggacacgattaaaggccttaaaataaaattgctccattgtgggtagggaattaatttgcttgacggtagttggttttatgggaattgggagagactttgatactttgatactgtcagggccct

SEQ ID NO: 340208 - DNA, 201 bp, Homo sapiens
tgcacttcatctgcttttccctacttctcccaaagagggaacacacaggtgtaatccattcacttattcaacaaatactgcttgcctactatgtgccagaytcctaaacgctgggaatgcgtcagccaatgagatagatgaggtccttcctctcatggagggtttattcacattcctttgacctaaatatcagtagcttaa

SEQ ID NO: 340209 - DNA, 201 bp, Homo sapiens
ctttgctcacagttgtctagtaagaaatgtgcctgtaatttgatgtttattttggctttggaacccagggcgtgcaaatgtcattattaggaagggatagsagtcattacgtttcacttaatttgccgagttgattctagtgatcaccagaagccctgaactacgcgcagattattctgttaggaattaaattgaggcatt

SEQ ID NO: 340210 - DNA, 201 bp, Homo sapiens
agtcttgctctgtctcccaggctggagtgcagtcacactatctcgtctcactgcaacttccacctcctggcttcaggcaattctcctacctcagccttccragtacctaggattacaggcacatgccaccagctaatttttgcattgttagtagtaacggggatttcgccatgttggccaggctggtcttgaagtcctgac

SEQ ID NO: 340211 - DNA, 201 bp, Homo sapiens
catgaacctacccaggactctaggctgaaaaagaatcaggaatttatggcggatatagaggcatgatttgggattggttggatgttatgaggtgaggagcrgctgattggagttcatagggatgagatgcatagctccaacaggccactgagttatctttgctactagacatagaaatctaaatgcacagttgaagggaga

SEQ ID NO: 340212 - DNA, 201 bp, Homo sapiens
ggcatccgttccaggaaacatggggaggggaaagcttgggggctaaagaatgaggatcgttttcatttggggtgtatgttaaatttcaggtggcagagagrcatccagcaggccactcggactggcactcagaagagagacactgagagtcactggcataatgatattatatttgaagcccttggagcagatgaacttacc

SEQ ID NO: 340213 - DNA, 201 bp, Homo sapiens
gtgcaggtttgatggtagagaggtttgtggggtctcatcatccccacttcattgtaatcccttcattgtccgttgtgttgtgttcatcccctctcatcgcrtctctgagatccatgaacctacccaggactctaggctgaaaaagaatcaggaatttatggcggatatagaggcatgatttgggattggttggatgttatg

SEQ ID NO: 340214 - DNA, 201 bp, Homo sapiens
cctctcaatggatataatagttcttatctagaacagcgattatcaaagtctagtctggccactggtgtcactttgggaagctgttttcacaggttttcaakgaaactggaaaaataagaatgcaaaactaaaattattaatttagaatgttaatctttactctgattgtatggacttcaagttttcattgttgcaaacgtg

SEQ ID NO: 340215 - DNA, 201 bp, Homo sapiens
aaagaccaccaggaacacaccataagctgaacaaattgggtttagtgttctttgaggcaaaggagaccacacaccatgagcgacggacggtaggttatagraaaaaacccattacagaatttgaacttcggttgcatgatttggggtaagactgaggaaccgggctttgctgtagatagaatgctgttagaaggtggggca

SEQ ID NO: 340216 - DNA, 201 bp, Homo sapiens
ctcacaataaatgttaagcacatagaaaatgcgctgttatttatttaaaggcataattcagcaacctcttcgcagggacttgggcaaatctgcatgaatcyagctcactgtcagaacttcagagggacttaaatttggggaattggtaatattagggttacagcatagcaaattatggtttcgtaaaaggggatgggacta

SEQ ID NO: 340217 - DNA, 201 bp, Homo sapiens
acggggcggggctccggctcggtccgactattgcccgcggtgggggagggggatggatcacgccacgcgccaaaggcgatcgcgactctccttctgcaggkagcctggaaggctctctctctttctctacgccacccttttcgtggcactgaaaagccccgtcctctcctcccagtcccgcctcctccgagcgttccccct

SEQ ID NO: 340218 - DNA, 201 bp, Homo sapiens
cggccccacctacggggcggggctccggctcggtccgactattgcccgcggtgggggagggggatggatcacgccacgcgccaaaggcgatcgcgactctycttctgcaggtagcctggaaggctctctctctttctctacgccacccttttcgtggcactgaaaagccccgtcctctcctcccagtcccgcctcctccga

SEQ ID NO: 340219 - DNA, 201 bp, Homo sapiens
ttttaaaatacttcattggaattttttgttttgttttgttttgttttgtttttttgagacagagtcatgctctgttgcccaggctggagtggtccagtggygccatctcgcctcacggcagcctccacctcccaggtgcaagcaattctcctgcttcatcctccagagtagctgggattacaggtacccaccaccacgccc

SEQ ID NO: 340220 - DNA, 201 bp, Homo sapiens
agagggaatctctccttttgtatctagactcgatgctaagcagggtagatggtatgtggtacaaacaaattatgaccgttggaaacatcccttcttccttratgatcgcagaacgcctgcaaagatgtgtctgaaccgcaccagccaagaggtacctttgcagggtcatctatagaaagaaactgttgccattaaagattc

SEQ ID NO: 340221 - DNA, 201 bp, Homo sapiens; identical to SEQ ID NO: 71543

SEQ ID NO: 340222 - DNA, 201 bp, Homo sapiens
gaggtacctttgcagggtcatctatagaaagaaactgttgccattaaagattcccttggttctggcatttttctttggccttcaagtaatttataaacgtyctatttttcatagtatctctagccactctccactgatttttttgtttcgttttcttaacttaaagagcaaaattgtgctgtactttccttttctggttct

SEQ ID NO: 340223 - DNA, 201 bp, Homo sapiens; identical to SEQ ID NO: 71524

SEQ ID NO: 340224 - DNA, 201 bp, Homo sapiens; identical to SEQ ID NO: 71526

SEQ ID NO: 340225 - DNA, 201 bp, Homo sapiens
cccgtggtcgagaatcattgccctagcggctgagtgctgtggccacatcctccctatgacacttgtacctgccaagcaccaaacccattatccctcacgtkcatgctctcggagcttttgtttcaggctatcctttatgttcatacttaccggacttcctcaaaacaaaaaaatgctggcaggagcaaaagaggatgaggc

SEQ ID NO: 340226 - DNA, 201 bp, Homo sapiens; identical to SEQ ID NO: 71527

SEQ ID NO: 340227 - DNA, 201 bp, Homo sapiens; identical to SEQ ID NO: 71528

SEQ ID NO: 340228 - DNA, 201 bp, Homo sapiens
tcacaggaagcctgccttcagttcacgggccctgccatacttgcgttttgcctataccatctttgagcaagtcacaatctcgtgacttgtgtttgggtgtktgccttgtgatctgggtgcctgcagtttcccccactgtattggaaatgctttaaggatagggatagccaaagctccacggtttttactccataggacacc

SEQ ID NO: 340229 - DNA, 201 bp, Homo sapiens
ttcacattcctttgacctaaatatcagtagcttaataggatgccatcccatcaaagcccagaagacaagtgaaaacattttcaagctcatgtgaattcttrtacacgtaggaaacatgcctctttgtattcagtgtttctgctgagttgtacataagaggacattataggaaaaacttgtctgcaaaatagttgttgatga

SEQ ID NO: 340230 - DNA, 201 bp, Homo sapiens
ctcacaggaagcctgccttcagttcacgggccctgccatacttgcgttttgcctataccatctttgagcaagtcacaatctcgtgacttgtgtttgggtgkgtgccttgtgatctgggtgcctgcagtttcccccactgtattggaaatgctttaaggatagggatagccaaagctccacggtttttactccataggacac

SEQ ID NO: 340231 - DNA, 201 bp, Homo sapiens
caaagcccagaagacaagtgaaaacattttcaagctcatgtgaattcttgtacacgtaggaaacatgcctctttgtattcagtgtttctgctgagttgtayataagaggacattataggaaaaacttgtctgcaaaatagttgttgatgaattcaagaattgaatgaatgaaaaattgtctggctagagttgtttggcttc

SEQ ID NO: 340232 - DNA, 201 bp, Homo sapiens
ttccctacactgtagttttaaaaaaatgcaaaaagtttcctatcatcccaccactcgctaacaatcattccctgaacgttctgaatatgcccccctaattwtcccatttgttccttcttttcttggtccttctccacagctctccctaaagtaaacatgccgcctttaccctgccaggacaaatccctccggcctttagca

SEQ ID NO: 340233 - DNA, 201 bp, Homo sapiens
gtgtttctgctgagttgtacataagaggacattataggaaaaacttgtctgcaaaatagttgttgatgaattcaagaattgaatgaatgaaaaattgtctkgctagagttgtttggcttctggtgggtatgaaaactgacatgaggtatgtaattttagattatccttcattgtctctttctgagtatttcaataagacaa

SEQ ID NO: 340234 - DNA, 201 bp, Homo sapiens
tatatttgccttttagggaaagaatttggccctatgttttatctttctctgttatctttgatcagtttgagcacaaaaggtgtgttcagcttaggactgaktttttattaaaaaatgtttttgtgtggctaaaactgtattttggaatacaagaaagaaattgatcactgaggcttgataggtcagaatattgtttatagc

SEQ ID NO: 340235 - DNA, 201 bp, Homo sapiens
caatatcaattaaagaacaaagcatgtgatttttgagtgatttttcttgactgtcaacataccgataactgatcagttgttgatatttattagatgatcawtgccaagtttgaagtgactgaagagttagcctctgaatcatctgtataaaacaactacaggcgaggatgttttcgaagaagctgagaaaataatgattga

SEQ ID NO: 340236 - DNA, 201 bp, Homo sapiens
atgaattcaagaattgaatgaatgaaaaattgtctggctagagttgtttggcttctggtgggtatgaaaactgacatgaggtatgtaattttagattatcyttcattgtctctttctgagtatttcaataagacaagcacacaagggctttctggacttttaaaattcactattagaagcatacattatttcattgagggt

SEQ ID NO: 340237 - DNA, 201 bp, Homo sapiens
tggttctggcatttttctttggccttcaagtaatttataaacgtcctatttttcatagtatctctagccactctccactgatttttttgtttcgttttctwaacttaaagagcaaaattgtgctgtactttccttttctggttctaatgctggataccactctgaagttgaataacaaacaggcaagaatttaaaaagggg

SEQ ID NO: 340238 - DNA, 201 bp, Homo sapiens
acattcgtgccaagtggaaaagttatgcaggtggtggatgaaaaattggtaagaaatattatttctcacaataaatgttaagcacatagaaaatgcgctgktatttatttaaaggcataattcagcaacctcttcgcagggacttgggcaaatctgcatgaatctagctcactgtcagaacttcagagggacttaaatttg

SEQ ID NO: 340239 - DNA, 201 bp, Homo sapiens
actgacatgaggtatgtaattttagattatccttcattgtctctttctgagtatttcaataagacaagcacacaagggctttctggacttttaaaattcaytattagaagcatacattatttcattgagggtctcctaattctttcgggctcaaatattttaaggagctgtacaagttatgccattttttaagggtatggc

SEQ ID NO: 340240 - DNA, 201 bp, Homo sapiens
agtattgtgtccagggaaaatgaaattattttacatgtcattgagaacccttgtcctggactttgggaagaacatcaatatcaattaaagaacaaagcatktgatttttgagtgatttttcttgactgtcaacataccgataactgatcagttgttgatatttattagatgatcattgccaagtttgaagtgactgaagag

SEQ ID NO: 340241 - DNA, 201 bp, Homo sapiens
ttctgtgctcaagctacagttccaggagttttctgagctcaagctacagttccaggagttttctgagctcaagctacagttccaagagttttctgagctcmagctacagttccaagagttttcttacctactctactttatcttattttggatttgtacttttttaaaacaattattttactttcacagaactggttctcc

SEQ ID NO: 340242 - DNA, 201 bp, Homo sapiens
atttgtacttttttaaaacaattattttactttcacagaactggttctccagaggaaaggagataaaagacacttgatatgttgaatgagtaacaaaagartcataaatctgtgtggactttttttgataagtttaggagaaggttccattttgccactaagcttggacaacttcccctaaaagagtctgttcattccttg

SEQ ID NO: 340243 - DNA, 201 bp, Homo sapiens
ctgtgtggactttttttgataagtttaggagaaggttccattttgccactaagcttggacaacttcccctaaaagagtctgttcattccttgtctcaggcmgtgacgtcagtgttgggggccgtcctcacctcaaggagcgcagagtctggtattgacaaggaacgcaaacagatgattataaagcagtgtcataaacatg

SEQ ID NO: 340244 - DNA, 201 bp, Homo sapiens; identical to SEQ ID NO: 71512

SEQ ID NO: 340245 - DNA, 201 bp, Homo sapiens
tggacaacttcccctaaaagagtctgttcattccttgtctcaggcagtgacgtcagtgttgggggccgtcctcacctcaaggagcgcagagtctggtattracaaggaacgcaaacagatgattataaagcagtgtcataaacatgttgatgagagtgtgcacaaatgctgtgggaggaaaggagggtatgaatattttca

SEQ ID NO: 340246 - DNA, 201 bp, Homo sapiens
tttagcaatgattttcacgcagttgccagaaatctcatagaccccatctggcctaggaatttattgcacttcatctgcttttccctacttctcccaaagarggaacacacaggtgtaatccattcacttattcaacaaatactgcttgcctactatgtgccagactcctaaacgctgggaatgcgtcagccaatgagatag

SEQ ID NO: 340247 - DNA, 201 bp, Homo sapiens; identical to SEQ ID NO: 71534

SEQ ID NO: 340248 - DNA, 201 bp, Homo sapiens; identical to SEQ ID NO: 71535

SEQ ID NO: 340249 - DNA, 201 bp, Homo sapiens
tgttgccattaaagattcccttggttctggcatttttctttggccttcaagtaatttataaacgtcctatttttcatagtatctctagccactctccactratttttttgtttcgttttcttaacttaaagagcaaaattgtgctgtactttccttttctggttctaatgctggataccactctgaagttgaataacaaac

SEQ ID NO: 340250 - DNA, 201 bp, Homo sapiens
gaaaaaaaatgacccacacacaaaagaacagtcatacagtaaaatcttcatttaaatggtagtacagaccaggcacagtggcttatgcctgtaatcctcaygctttgggtggctgagatagacagatgacttgcacccaggggtttgagaccagtctgagcaacatggcgaaaccccgtctctataaaaaatacaaaaatt

SEQ ID NO: 340251 - DNA, 201 bp, Homo sapiens
atggcaggtatttcccgtcagtgataatcaggttagagctcttaagccatagttgattttttcatagaaaaccaattcacatgaaccttccctactagatmattctattccaggatttctgtgaccgcttatgattgtgttctcaacctagaagcactaggtagagaatgaactttctttccaaattttggtttgggtaac

SEQ ID NO: 340252 - DNA, 201 bp, Homo sapiens
ttacaaagtctaacctcttctggttcctgactggttatatagtccagcctcttccgggtcctgactggttacatagtgtcacctcttccggttcctgacaytgtgttcatctcttccaggtattctagaatggattctgggaaagaaagatgccatgtggatagggttcctcactagaacagttctggaaaatagcacaag

SEQ ID NO: 340253 - DNA, 201 bp, Homo sapiens
tcaggcgttcattctctgcccttcagtttcctgtccaaaaagcgttgccagtgataccccacctacttatctcacatactagaatcaaaaatgctttgaaytttttaaaaagccttttatggttttgatttatttttgccttccccattacccaagctaggcctttatatcccactctgaagtacagtgagcgacagggcc

SEQ ID NO: 340254 - DNA, 201 bp, Homo sapiens
cgatgctaagcagggtagatggtatgtggtacaaacaaattatgaccgttggaaacatcccttcttccttgatgatcgcagaacgcctgcaaagatgtgtytgaaccgcaccagccaagaggtacctttgcagggtcatctatagaaagaaactgttgccattaaagattcccttggttctggcatttttctttggccttc

SEQ ID NO: 340255 - DNA, 201 bp, Homo sapiens
tcattggatgtatatgagtaagtaggtttgttaaagcaaaagaagtagaaacaaaagcatacactgatatactttgagttttaaggcatgtagcctaagarggaatctctccttttgtatctagactcgatgctaagcagggtagatggtatgtggtacaaacaaattatgaccgttggaaacatcccttcttccttgatg

SEQ ID NO: 340256 - DNA, 201 bp, Homo sapiens
gtgccttctggttacaaagtccaacctcttccggttcccgactggttacaaagtctaacctcttctggttcctgactggttatatagtccagcctcttccrggtcctgactggttacatagtgtcacctcttccggttcctgacattgtgttcatctcttccaggtattctagaatggattctgggaaagaaagatgccat

SEQ ID NO: 340257 - DNA, 201 bp, Homo sapiens; identical to SEQ ID NO: 71529

SEQ ID NO: 340258 - DNA, 201 bp, Homo sapiens; identical to SEQ ID NO: 71530

SEQ ID NO: 340259 - DNA, 201 bp, Homo sapiens; identical to SEQ ID NO: 71551

SEQ ID NO: 340260 - DNA, 201 bp, Homo sapiens
tctaatgctggataccactctgaagttgaataacaaacaggcaagaatttaaaaaggggaaggagagagaggaaagtaatccattaaaactgttacctgtrtttctaacagtgactcccacagaaactccactgcggggatggaggggaggttgattaaagaatgtcttggtttctggtggcccatgtgtgtagataaggc

SEQ ID NO: 340261 - DNA, 201 bp, Homo sapiens
ggggtgaaaggggagggatagcattaggacaaatacctaatgcatgtagggcttgaaacttagatgatgggttgatgggtgcagcaaaccaccatggcacrtgtgtacctatgtaacaaacctgcacgttcagcacatgtgtcccagaacttaaagtaaaatttaaaaataaatgaagttatttactaaaattaaaaaaaa

SEQ ID NO: 340262 - DNA, 201 bp, Homo sapiens
ttatagtgaattctctgaagaatatgataaatacattcgtgccaagtggaaaagttatgcaggtggtggatgaaaaattggtaagaaatattatttctcamaataaatgttaagcacatagaaaatgcgctgttatttatttaaaggcataattcagcaacctcttcgcagggacttgggcaaatctgcatgaatctagct

SEQ ID NO: 340263 - DNA, 201 bp, Homo sapiens
ttctaaatgaaattagaacttctgaaatttgggcttgctatgtaaattctgtgtatgttgcatacagctttttatttcttggtaaaattttgtgattgtastgaaaattttccttattttcagactactgtactgcctattaaagttgatttcagacatgcaaaaaacctggaagaaatgttgcagggctagaaacattct

SEQ ID NO: 340264 - DNA, 201 bp, Homo sapiens
actacataaagaaaaatcttctaaatgaaattagaacttctgaaatttgggcttgctatgtaaattctgtgtatgttgcatacagctttttatttcttggyaaaattttgtgattgtactgaaaattttccttattttcagactactgtactgcctattaaagttgatttcagacatgcaaaaaacctggaagaaatgttg

SEQ ID NO: 340265 - DNA, 201 bp, Homo sapiens
tgaatcacagtaattgaggctcagatttctgtgtcctggtagaaccatgtgatagtgaaccaaaacatgaccattgattccttttcccatattctgatctwacctggaaacccgtgctctcagattttgtggggttatctggcagatagacggtgacaacagtcccatctggtgaaggcttaggatattaggatgtttctt

SEQ ID NO: 340266 - DNA, 201 bp, Homo sapiens
cgcccgaaggctgcctccttggtgacttgtttcatcttgagtctagagagtccaggctggggaagaaaaccacctccagccggccgttccagcacagcccyactggccaaagcacacactcacacaatgaaaacactgaaactttttcttaaaacaaatttttctcccattgtcatggttctgtatattaacacaaaattt

SEQ ID NO: 340267 - DNA, 201 bp, Homo sapiens
atcagctcctaagaaaatggggaacttgaaaatgctttgagaagaacaaaattcgttcactatgattttgtttaaatgtacatttccaaaattgaatatacttttcttttctgtctaaatcacaacctgaatgtctgctagttaacagtttcataaaacctcatacatataccagggccccaagttacacagcattattta

SEQ ID NO: 340268 - DNA, 201 bp, Homo sapiens
tcagctcctaagaaaatggggaacttgaaaatgctttgagaagaacaaaattcgttcactatgattttgtttaaatgtacatttccaaaattgaatatacttttcttttctgtctaaatcacaacctgaatgtctgctagttaacagtttcataaaacctcatacatataccagggccccaagttacacagcattatttag

SEQ ID NO: 340269 - DNA, 201 bp, Homo sapiens
ttcattatgtcttttagtaagcattttatttatttttcagctaaaggttatagtgaattctctgaagaatatgataaatacattcgtgccaagtggaaaarttatgcaggtggtggatgaaaaattggtaagaaatattatttctcacaataaatgttaagcacatagaaaatgcgctgttatttatttaaaggcataatt

SEQ ID NO: 340270 - DNA, 201 bp, Homo sapiens
cagctcctaagaaaatggggaacttgaaaatgctttgagaagaacaaaattcgttcactatgattttgtttaaatgtacatttccaaaattgaatatacttttcttttctgtctaaatcacaacctgaatgtctgctagttaacagtttcataaaacctcatacatataccagggccccaagttacacagcattatttaga

SEQ ID NO: 340271 - DNA, 201 bp, Homo sapiens
agctcctaagaaaatggggaacttgaaaatgctttgagaagaacaaaattcgttcactatgattttgtttaaatgtacatttccaaaattgaatatacttttcttttctgtctaaatcacaacctgaatgtctgctagttaacagtttcataaaacctcatacatataccagggccccaagttacacagcattatttagag

SEQ ID NO: 340272 - DNA, 201 bp, Homo sapiens
tcccactctgaagtacagtgagcgacagggccttaaagcgcatggttgatgtttctgacttcgttgctttgtctttttctcagggactgttcagtcttacrctgaatgaacgtttcagtataaatggtggttatctgggtaagtagagcattctcaagtgaaatgggaatctcagagcttttttatgaggaaggctggact

SEQ ID NO: 340273 - DNA, 201 bp, Homo sapiens
gctcctaagaaaatggggaacttgaaaatgctttgagaagaacaaaattcgttcactatgattttgtttaaatgtacatttccaaaattgaatatacttttcttttctgtctaaatcacaacctgaatgtctgctagttaacagtttcataaaacctcatacatataccagggccccaagttacacagcattatttagaga

SEQ ID NO: 340274 - DNA, 201 bp, Homo sapiens
acttaccaccctacaaaagatggcatgaattgatgcttgacaaggcaccaatggtatgctatgatgcttaaatcttttatttctttatttttatttttttwtattttatttctttatttttatttattgattgattttttttttgttttgagacagagtctcactctgtcacccaggctggaatgcagtggcacgatctca

SEQ ID NO: 340275 - DNA, 201 bp, Homo sapiens
tttcgggctcaaatattttaaggagctgtacaagttatgccattttttaagggtatggcgctttcattgagaccttaatatgttctctttatatttttgtkttttttttagaatgttgtgttcagtagctctgtaattaatttctcttaatgaatggggaggacattcaaagaggcttaagtttctatcaaataaccagaa

SEQ ID NO: 340276 - DNA, 201 bp, Homo sapiens
ccattacccaagctaggcctttatatcccactctgaagtacagtgagcgacagggccttaaagcgcatggttgatgtttctgacttcgttgctttgtcttyttctcagggactgttcagtcttacactgaatgaacgtttcagtataaatggtggttatctgggtaagtagagcattctcaagtgaaatgggaatctcaga

SEQ ID NO: 340277 - DNA, 201 bp, Homo sapiens
ttgcaggatgtttagcagctcaggatgcccggcctggggtgggtgtctcttttttgtggggctgtcatgtgcattgcaggatgtttagcagtgtccctggyccttacccactggatgctggtaacaccccctcagttgtgacaaccaaaaatgtccttagatgttaccaaatctcccgtggtcgagaatcattgccctagc

SEQ ID NO: 340278 - DNA, 201 bp, Homo sapiens
attatgatagcagtatctagaaaaaattatatgtccaagaactagatttcaaagcatgcttttattatatttgtttatattatattatatattttttattrttattatgttaaatgcttttattaatatatttgttttccagcctggcctacttggcaactttcctggcccttttgaagaggaaatgaagggtattgccgc

SEQ ID NO: 340279 - DNA, 201 bp, Homo sapiens
cttattgtttgaagaaacagttgtgaataaaaattaatcaaaattagaggccaggcacagtggcttacacctgtaatgccagcactttgcgaggccgaggygggcgaatcatctgaggttgggagtttgacaccagactggccaacatggtaaaaccccttctctactaaaagaaaaatacaaaaaaaaaaaaaaaagtag

SEQ ID NO: 340280 - DNA, 201 bp, Homo sapiens
gtttgaagaaacagttgtgaataaaaattaatcaaaattagaggccaggcacagtggcttacacctgtaatgccagcactttgcgaggccgaggcgggcgratcatctgaggttgggagtttgacaccagactggccaacatggtaaaaccccttctctactaaaagaaaaatacaaaaaaaaaaaaaaaagtagccaggt

SEQ ID NO: 340281 - DNA, 201 bp, Homo sapiens
ctcactcataagtgagagctgaacaaagagaacacgtgaacacagggaggggaacatcacgcaccagggcctgtcagggggtggggtgaaaggggagggakagcattaggacaaatacctaatgcatgtagggcttgaaacttagatgatgggttgatgggtgcagcaaaccaccatggcacatgtgtacctatgtaacaa

SEQ ID NO: 340282 - DNA, 201 bp, Homo sapiens
aacagaaaaccgaacactgcatgttctcactcataagtgagagctgaacaaagagaacacgtgaacacagggaggggaacatcacgcaccagggcctgtcrgggggtggggtgaaaggggagggatagcattaggacaaatacctaatgcatgtagggcttgaaacttagatgatgggttgatgggtgcagcaaaccacca

SEQ ID NO: 340283 - DNA, 201 bp, Homo sapiens
tatttttgccttccccattacccaagctaggcctttatatcccactctgaagtacagtgagcgacagggccttaaagcgcatggttgatgtttctgacttsgttgctttgtctttttctcagggactgttcagtcttacactgaatgaacgtttcagtataaatggtggttatctgggtaagtagagcattctcaagtgaa

SEQ ID NO: 340284 - DNA, 201 bp, Homo sapiens
ttctgttgttgagtgaaaggcatggacagtaagggtggaagatgatctcttgaggccactttgtttctccttcagattagaggggcttcctaagattcccrcttcccatctcagtgttcaccatacagggtcagggattgcttttcccagaggcattgctcaccatccttttttagaaaacacattgtggctggccatggt

SEQ ID NO: 340285 - DNA, 201 bp, Homo sapiens
ggctgggtgtcaagggctgggagtcacaatctgatttctagtcctgggtcttccgctcacttaggcaagtcaggcgttcattctctgcccttcagtttcckgtccaaaaagcgttgccagtgataccccacctacttatctcacatactagaatcaaaaatgctttgaactttttaaaaagccttttatggttttgattta

SEQ ID NO: 340286 - DNA, 201 bp, Homo sapiens
acaaaaattagccaggcatggtgacacgtgcctgcctgtagtcccagctactcaggaggctgaggtgggaggatcacctgagcccaaggaggtcgagactrcagtgagctgggatcagtccactgcacttcaccctgagtgatagagtgagactctgtcttaaaaaaacaaaataaataaatacaaaatgtactacatatt

SEQ ID NO: 340287 - DNA, 201 bp, Homo sapiens
cacagtggcttatgcctgtaatcctcacgctttgggtggctgagatagacagatgacttgcacccaggggtttgagaccagtctgagcaacatggcgaaamcccgtctctataaaaaatacaaaaattagccaggcatggtgacacgtgcctgcctgtagtcccagctactcaggaggctgaggtgggaggatcacctgag

SEQ ID NO: 340288 - DNA, 201 bp, Homo sapiens
taaaaatatttgtcaagctccagcttaatcctttgaggaactattgcagaatttcttaagtgaacctctgacactcatgtggaattactcatgttttcttygtgcagactgtgtgttttatagcaaataaatgaattacttaaaaagcactagggatactgacattatgaaaggcacctatgaatatttttggtgtacaga

SEQ ID NO: 340289 - DNA, 201 bp, Homo sapiens
tttactattaaatatttattttaaattactcatattaaaaaataaaaatatttgtcaagctccagcttaatcctttgaggaactattgcagaatttcttargtgaacctctgacactcatgtggaattactcatgttttctttgtgcagactgtgtgttttatagcaaataaatgaattacttaaaaagcactagggatac

SEQ ID NO: 340290 - DNA, 201 bp, Homo sapiens
tccgggtcctgactggttacatagtgtcacctcttccggttcctgacattgtgttcatctcttccaggtattctagaatggattctgggaaagaaagatgycatgtggatagggttcctcactagaacagttctggaaaatagcacaaggtaaagtgtttcgttgctttactattaaatatttattttaaattactcatat

SEQ ID NO: 340291 - DNA, 201 bp, Homo sapiens
taaatgcttttattaatatatttgttttccagcctggcctacttggcaactttcctggcccttttgaagaggaaatgaagggtattgccgctgttactgawatacctttaggtaaagttcacttagaagctttaaaaaaaaaagtaattaaattcttttacaagtttccattgaggtgtgatatacatacagcaaagtgca

SEQ ID NO: 340292 - DNA, 201 bp, Homo sapiens
ccactgcactgcagcttgggatacagagccagactccatctcaaaaaaaaaaaaaaaaaagaacacagaactgtttcgttctgtaggaagagtaggttgtrttatattgatgataagtaagtcccaagtcacacccaaaatgtgatcataagtgaagataaatggattgcttgagtgctgagacaagagggacatgctctt

SEQ ID NO: 340293 - DNA, 201 bp, Homo sapiens
caccgaagcccacgaccaaagcggggcgcccccagcgcttggggccgccttgcctcggcccagccgcgcacctggacccctaaggcagcccccttcccggsgctccgctgtcccgcggccccgcagcaccgcccagcccgcgccagacccgcctccagccgcagggaactacctaccgtgcgccggcccctgggctgaaag

SEQ ID NO: 340294 - DNA, 201 bp, Homo sapiens
cacaatggctaatgcctataatcccaaaactttgggaggccagggcctgaggattgctagaggttaggtattcaagacaagcctgggcaacatagtgagaccccccccccccgcccccatctctacagaagatttttttggcatggtggcacatgcctgtagtcctggctactcaggagactgaaatggagtatcacttga

SEQ ID NO: 340295 - DNA, 201 bp, Homo sapiens
gacccgcctccagccgcagggaactacctaccgtgcgccggcccctgggctgaaaggcctctgactacgggctatgtaacagcgccaccaacgagcgggayggacagagcgactccttccgacttccggaggaagcggaacgctaccggaaatcgcggggagggtcaaaggagacccggtctccgaggctcatggcgatgc

SEQ ID NO: 340296 - DNA, 201 bp, Homo sapiens
agcaggcttctgtgtctttgacacgtctccaatattctctaagttctgctttccttctgccacaacaagaggttccagcctcattttacactttctttgcygcaaccctggtatcagccatttctccaaaaagctgtttccttttagtgaagaatgatatttagaagtcaggttctgggctcatggttcttggagtgtgtc

SEQ ID NO: 340297 - DNA, 201 bp, Homo sapiens
agtgcctttcaaacagcagttttcagttttaatgaagtccaaatttatcagtttgtccttttaatatagtgcttttggtttggtatataagaaatctttgmctaacctaaggttacgaaggtttatgttttcttcttgaagtttagagtttttactacgtatacttaagcataatttatatctacagtttataggtttgtc

SEQ ID NO: 340298 - DNA, 201 bp, Homo sapiens
actactttaataagtttgtatggttaaatgtttgcatcttactagaatttttatgtttgaaatccctgccccagtagcctgtttcctggaagtctttagcratcacatttgctattggaggagctttactggctggaatgaagcacgtcaagaaagaaaaggcagagagtaagtagattatcatctgctcagccctgtata

SEQ ID NO: 340299 - DNA, 201 bp, Homo sapiens
agtcactgatccagcagctccccatggcccatcccaagagttgagatgcagaggggatgggatgtctcactgcagtgctttgtctcaacagccaactatgrtttctttgtccctttgaacctggaacgtgtgtgcccctggagcctacagcctgaattaaaagcaaggttctggcctgtttgccttaattaagcctacaca

SEQ ID NO: 340300 - DNA, 201 bp, Homo sapiens
atttactgtaacaggccgggcatggtgggcctgtaatcccagcactttgggagaccaaagtgggtggatcacctgaggtcaggagtttgagaccagcctgrccaacatggtgaagccccgtctctactaaaaatacaaaaattagccaggcacggtggtgcacacctataatcccagatattcgggaggctgaggcaggag

SEQ ID NO: 340301 - DNA, 201 bp, Homo sapiens
ctaaagtttaccgtgattgagaagtcagaggacttttataatttgtcacttgagccccatccagagttccatgtatacgttgaaattgaaacaaaaagtgraacttagttatgtgtggatctgcctttttcttggggttctctcgagttctaattctgacccagaaataacttgagagccactaccctgtggtaagagaag

SEQ ID NO: 340302 - DNA, 201 bp, Homo sapiens
accgcgcccggccataattggttttaaagtcattactggagctagggtcacacatagtaacaatcgtggtacttgagcttttttttttttttttttttttwtttatttacatgaagagaactgacttagggaactttcccctggagatgaatgcctttgtagttcagatcccagacctaactgcatccacagaaactttga

SEQ ID NO: 340303 - DNA, 201 bp, Homo sapiens
gcatttgttatttttttgtatttttggtgatagtcattcaaattgggatgagatacctaattgtggttttgatttgcatttcccttgtgattggtgatgtygagcattttttcatatacttgttggccatctgtatgccttctattgagaaatgtctatttagatcatttgccctttttaaaaatgttatttgtctttttg

SEQ ID NO: 340304 - DNA, 201 bp, Homo sapiens
ttgtatttttggtgatagtcattcaaattgggatgagatacctaattgtggttttgatttgcatttcccttgtgattggtgatgttgagcattttttcatwtacttgttggccatctgtatgccttctattgagaaatgtctatttagatcatttgccctttttaaaaatgttatttgtctttttggtgttgagatgattg

SEQ ID NO: 340305 - DNA, 201 bp, Homo sapiens
gaaccttacagtgccttgtgaaataggacaaatggtattatcaccagttttatgggtgaataaaaaggtgaagctaggaattgttatggatagttagtgcrtaagtaagaaatgggtttctcaattcctgatgcagtgctctttatattttgtcacagagaaaggatttgaacttggccttcatgtatcaactaagttaat

SEQ ID NO: 340306 - DNA, 201 bp, Homo sapiens
aaaacatgaataaacccaagaacttactaaagaaagcagtttttcaccaacacttaattccatgtgatgtctgtttgtaacatgtttagggtctgaggagrtatcttactcaaaaatgaaggtatttttcaacaagcattgctattccacaaacattgactgctttatgaaagcctgcagcagctatttcttagaaggtga

SEQ ID NO: 340307 - DNA, 201 bp, Homo sapiens
cttggctcacttcgacctccgcctcccggattcaagcaattctcctccctcagcctctcgcgtagctgggattacaggcatgtgctcccacgcctggctartttttgtatttttagtagagaaggagttttgccatgttggccaggcgaggccagggggtctcgaattcctgacctcaggtggtctgccctgcccacctca

SEQ ID NO: 340308 - DNA, 201 bp, Homo sapiens
ttgtttaattgacacataacagttgtacatatttatggggtacagagtccctatcctccccaaccctttccagcctctagtatccacaattcttctctctrcttctgtgagatcaacttttttagtttccacgtatgaatatgcagtatttatctttctgtgcctgacttttttcatttaacatattaatagtatcctcca

SEQ ID NO: 340309 - DNA, 201 bp, Homo sapiens
aaacacctctgtatgctagttaaaagctgttaggcacttttaaagactacagattatagtagaattgagagtggatgcttaggttctaattcatctgtgaraatgggcaagtttaatttctctagactcaagtttcttcagcatatgtgcttaaaaatcaggaatctgaattttaattatggtaacattgatttaataact

SEQ ID NO: 340310 - DNA, 201 bp, Homo sapiens
ccccagtagaggtatcagaaattgctcttctggagaaccagttttaggccatggagaactgcatttttaggttgaatgagaattctgaaaagcaaaagatraaaggtttatttgcccattgactatatgccttggacagttaggcgttaaatatgtgctttttaatgataaggaacagaaattctgttgtacttgtgtagc

SEQ ID NO: 340311 - DNA, 201 bp, Homo sapiens
gctttgtctcaacagccaactatgatttctttgtccctttgaacctggaacgtgtgtgcccctggagcctacagcctgaattaaaagcaaggttctggccygtttgccttaattaagcctacacagtaatcctgtcttccagatgtggtgcctcgtagaattagggaaacttggattccttggagtaaaagatgagaaaaa

SEQ ID NO: 340312 - DNA, 201 bp, Homo sapiens
agagaaggcctgaaagaagacagcgtggagaaagtgtcagcaagcttcagcaacagcaggaggcagatggtaggagagtgggcctcaggtgtggtgtggcrgagcagagtagccacacttaggccccagagacagtgtcttctcaccctcagttgaaggggcaggaaatcaatcgctctagtcacccccaagctggaggac

SEQ ID NO: 340313 - DNA, 201 bp, Homo sapiens
tattgtaactctcttctctttaatatactcatttatttcatcaatttcctgtgtgtaactaaggtcccgtcaccactatcacctccccacccagctgccckccttagcaccctcaggatcagactccctatgccaggccacccaccgcaccccacttgtttagacattcagctctaggccactgcagcccctccctgcccc

SEQ ID NO: 340314 - DNA, 201 bp, Homo sapiens
gatatgtaaccttgtattatccaccacagataatactactgtatatgggtctcctcctcctaaaggccatcccttctccatccccttccccgtcctcttcytcttcacctgaatgttaagatgtccatctgcttccaaaacacctagctgtccagcacgtcctatactctcctgttattgctggttttctttgtcttttcc

SEQ ID NO: 340315 - DNA, 201 bp, Homo sapiens
aatactactgtatatgggtctcctcctcctaaaggccatcccttctccatccccttccccgtcctcttcctcttcacctgaatgttaagatgtccatctgyttccaaaacacctagctgtccagcacgtcctatactctcctgttattgctggttttctttgtcttttcccttagggtgtgaatacggactaattggaact

SEQ ID NO: 340316 - DNA, 201 bp, Homo sapiens; identical to SEQ ID NO: 71650

SEQ ID NO: 340317 - DNA, 201 bp, Homo sapiens
cactgcagtgctttgtctcaacagccaactatgatttctttgtccctttgaacctggaacgtgtgtgcccctggagcctacagcctgaattaaaagcaagsttctggcctgtttgccttaattaagcctacacagtaatcctgtcttccagatgtggtgcctcgtagaattagggaaacttggattccttggagtaaaaga

SEQ ID NO: 340318 - DNA, 201 bp, Homo sapiens
atttgactgggcaagatgaaatctggagggtacgaagatgagtaagatgtagtcgagcctttgaggtgcacacggaagggaaacagacacagaagtaaagkattttactagatgcgattctgccaggccagaaggaagcttaccatgttgtgagagcaaaagcaagtcccagccttgagatttgagaaggcttcctagaga

SEQ ID NO: 340319 - DNA, 201 bp, Homo sapiens
gagatcatggagcaaacacaagcctgggcactgaaatttatactcacaacacagataatccagaatatggatattaatgtttttaattacaaatgaaaacraaaatatgtaagtcttatggaaacttcttggaccttgtagaatgtatctttggccccattttgagaaatactggcctactgccataagaatttgactttt

SEQ ID NO: 340320 - DNA, 201 bp, Homo sapiens; identical to SEQ ID NO: 71642

SEQ ID NO: 340321 - DNA, 201 bp, Homo sapiens
gggaaacttctgttatcatttaaggacctgcaggaagtaagggggtacctttaaggttaatgttgagatgtaatggaatgaagttttcttaatcccaaacracagcaacaacaggcaagcttctggcttttgagtggactcttcagagtgatcgaactgggtataccaaatatttggaattccatagaaagctggatctgc

SEQ ID NO: 340322 - DNA, 201 bp, Homo sapiens
agtttctttagtttcacaaagaaacaaaagctaggaaagttgtggcgggaaaattctagaatatggaagctttttttgactttagtttggaatttcaagtrcaattctaacgtttgttttatttaaaaaatgtattattaaataatctgaaaagtcttcctaaataatttgagagtatttatttgctgacatgttgcgtca

SEQ ID NO: 340323 - DNA, 201 bp, Homo sapiens
tgttattgctggttttctttgtcttttcccttagggtgtgaatacggactaattggaactctctttcagatagcattacaactctgccagatctaactccrcttttcatcagcattgacccagagagggacacaaaagaagccatcgcaaattatgtgaaaggtatttttttaaataatactttacatttatttagcctta

SEQ ID NO: 340324 - DNA, 201 bp, Homo sapiens
gaatgccccttagcttggatttgtctgatgtttcctcattcaggtcattcgggttgtgtacctttggcaggaatatcacaaaagtgatgctgtattctccrtgcatctggtcagataccacatagtaccagttgtcccattactgataatgtccagtttgatcacttgattaatgtgtgtctaacaggttttctactgaaa

SEQ ID NO: 340325 - DNA, 201 bp, Homo sapiens
agaatatggatattaatgtttttaattacaaatgaaaacaaaaatatgtaagtcttatggaaacttcttggaccttgtagaatgtatctttggccccattwtgagaaatactggcctactgccataagaatttgacttttgatgagattcgatgaggaattcatgctgtacatttgctaaatcatccaatagggggagaca

SEQ ID NO: 340326 - DNA, 201 bp, Homo sapiens
tcatacaccctcttcagagggcagtttaacagtatttctcacatttaaagttatatactttttatgcaagagattctactttttggactttatcctataartataccctatggcattgtttttaaagagaaaaaactgaaaatccagtaaccattttttaactactgtgtataatctaacgtagaacaatgtccaatatat

SEQ ID NO: 340327 - DNA, 201 bp, Homo sapiens
tttttggactttatcctataaatataccctatggcattgtttttaaagagaaaaaactgaaaatccagtaaccattttttaactactgtgtataatctaaygtagaacaatgtccaatatattgttaaatgagaaagcaagtactgtagaatatattgttacttgtgtataaaaaaaataagtggtagtggatatatacac

SEQ ID NO: 340328 - DNA, 201 bp, Homo sapiens
ttttttatttacatgaagagaactgacttagggaactttcccctggagatgaatgcctttgtagttcagatcccagacctaactgcatccacagaaacttkgagcattttctcatccctgaaacattttgcacatttaacatcatggcctgtgtgtatgtatattaaaaactactttaataagtttgtatggttaaatgtt

SEQ ID NO: 340329 - DNA, 201 bp, Homo sapiens
gtatacagtcctaaactaggtaacactccatagtcttgatgcttagaactcataactcagagtcagaaagtcaaatcagaaagcagttgtacaaataaacscaaacagcctgcaaaacttaaattgaaaacattcagttacattgacaagagattttgctgaaaccaaagtgctgctcagggcaagaagggagggggtttt

SEQ ID NO: 340330 - DNA, 201 bp, Homo sapiens
ttaccaaaaaattgcaaagatagcataggttctacatacctttcacccagcttcccctaatattaacatcttgtataaccatgacacatttttcatgactragaaattttaaatggcacacaactattaaattacagattgtatttggatttcacttgtttttctatcaatgtcttttatttgttccaggatccaagctag

SEQ ID NO: 340331 - DNA, 201 bp, Homo sapiens
gcaagcttctggcttttgagtggactcttcagagtgatcgaactgggtataccaaatatttggaattccatagaaagctggatctgcacattattgtattwtatatatataatactatattattatatagatattagttagaaaatacttttgaaaaaagaatacaaatagctttcaaacctaaatgtgcagtttcataat

SEQ ID NO: 340332 - DNA, 201 bp, Homo sapiens
ccaaaagaatttcaggttctagctgatgtgacaagcaataaccagtgcagatgtttaggacacaaaagattttagacaatttttgttaggaatttgctatratagacttaagcctattccataaataatagatgctgtaaaggttatttaagcattaatgtaaagttctcttatcttgcagcatacattcagtaaaataag

SEQ ID NO: 340333 - DNA, 201 bp, Homo sapiens; identical to SEQ ID NO: 71641

SEQ ID NO: 340334 - DNA, 201 bp, Homo sapiens
tattttgtcacagagaaaggatttgaacttggccttcatgtatcaactaagttaatcgagccttgaattgagagtaaggacacattgcttctaactccagygctgtaactcattctctgcattgtaaaatcagaacaaacatatattctggaagtatgttcattggtagattaaagatgaataattaaatacaaacatatt

SEQ ID NO: 340335 - DNA, 201 bp, Homo sapiens
taactccagcgctgtaactcattctctgcattgtaaaatcagaacaaacatatattctggaagtatgttcattggtagattaaagatgaataattaaatayaaacatattttgaactcagtgcatgttttataaatttaaaacatttactgtaacaggccgggcatggtgggcctgtaatcccagcactttgggagaccaa

SEQ ID NO: 340336 - DNA, 201 bp, Homo sapiens
ttaggcacttttaaagactacagattatagtagaattgagagtggatgcttaggttctaattcatctgtgaaaatgggcaagtttaatttctctagactcwagtttcttcagcatatgtgcttaaaaatcaggaatctgaattttaattatggtaacattgatttaataactggttaaaagcactaaagaatagttttata

SEQ ID NO: 340337 - DNA, 201 bp, Homo sapiens
tgttttccaaaatggtatatttctgcattcctgccagcagtatatgagagtcccagctcctccacagcatcaccactcttggtgtggccagtctttttaaytttagccactctagtaggtgcttagtgatatctcattgtggttttggcatacattttcttaatgactgttaatgttaagcttctttttatgctcttattt

SEQ ID NO: 340338 - DNA, 201 bp, Homo sapiens
agtgaagtgtctgttcatatcttttgaccgctttttatggagttctttgttttcacattatgtgtatatgtattatttatattctggatacaagttaggtrtgtgatttgcaaatattttctgccagtctgtggctcgtcatttcagtctcttaacagtgcctttcaaacagcagttttcagttttaatgaagtccaaatt

SEQ ID NO: 340339 - DNA, 201 bp, Homo sapiens
tagaacttggaagacctctgtagacctctgtattagaataaatgtcaatgtgctctgtcacaacccaaaggaatattgaggagtgacctctgacaagttcracagatacagataaaataatatttttgttgtgtactacaaggtaatttatattaagaacactcagaaaataagtcccacatactgtagtttgtttttttt

SEQ ID NO: 340340 - DNA, 201 bp, Homo sapiens
gaactacctaccgtgcgccggcccctgggctgaaaggcctctgactacgggctatgtaacagcgccaccaacgagcgggacggacagagcgactccttcckacttccggaggaagcggaacgctaccggaaatcgcggggagggtcaaaggagacccggtctccgaggctcatggcgatgctggtcctagtacccggacga

SEQ ID NO: 340341 - DNA, 201 bp, Homo sapiens
ctctcagtggacatggtgagaaaatagatatatttatgtacatctatatttatttatatctatatagatagaagttcacactagtacctgcagtgtatttscagtactgcagggttcagcctagctctctttctctccatagttgactcttgtttcctattgtaactctcttctctttaatatactcatttatttcatcaa

SEQ ID NO: 340342 - DNA, 201 bp, Homo sapiens
ctgtagacctctgtattagaataaatgtcaatgtgctctgtcacaacccaaaggaatattgaggagtgacctctgacaagttcgacagatacagataaaayaatatttttgttgtgtactacaaggtaatttatattaagaacactcagaaaataagtcccacatactgtagtttgttttttttaacagagaatagagaaa

SEQ ID NO: 340343 - DNA, 201 bp, Homo sapiens
cccacccagctgccctccttagcaccctcaggatcagactccctatgccaggccacccaccgcaccccacttgtttagacattcagctctaggccactgcrgcccctccctgcccccagcatggacacagctaatggcttaggactgaattgttcctgaaaaagaagaaatattttttccttttttacaacataccatagc

SEQ ID NO: 340344 - DNA, 201 bp, Homo sapiens
ttattcagtggaggagacaaaaatttccttggggagaaaaatgtttcttttcctgtttctgtttgaattactaatattaaaactaaatattgttcaaattkatagattatttaaactaatgattagttttctgatttcttctcataaagcgtggtaagcagaattttggcagtaatgaatgacaaccagttctttctaaaa

SEQ ID NO: 340345 - DNA, 201 bp, Homo sapiens
tgccaggccacccaccgcaccccacttgtttagacattcagctctaggccactgcagcccctccctgcccccagcatggacacagctaatggcttaggacygaattgttcctgaaaaagaagaaatattttttccttttttacaacataccatagcatttcatttgattttgttttaatgttttgtgcttatttttctgaa

SEQ ID NO: 340346 - DNA, 201 bp, Homo sapiens
ttaaatgagaaagcaagtactgtagaatatattgttacttgtgtataaaaaaaataagtggtagtggatatatacacatagtagatgcagagaatttcttyggaaggatacagaaggaactgatggcattggttcactctaaggggaactgaggcactctgggtgtgaagagggggagggacattttcattgtatacatta

SEQ ID NO: 340347 - DNA, 201 bp, Homo sapiens; identical to SEQ ID NO: 71647

SEQ ID NO: 340348 - DNA, 201 bp, Homo sapiens
ccacttttcatcagcattgacccagagagggacacaaaagaagccatcgcaaattatgtgaaaggtatttttttaaataatactttacatttatttagccktaaagtttttggaatatcagttcatttgaaccttacagtgccttgtgaaataggacaaatggtattatcaccagttttatgggtgaataaaaaggtgaag

SEQ ID NO: 340349 - DNA, 201 bp, Homo sapiens
tccctcacaactcatactggggagcgtaaaactgacaaggactacttgggtcagtggttattgatttattttggcttcactcattgccctgatgtctgtcyagaagaactagaaaagatgattcaagtcgtggatgaaataggtaagaaagccatcactaactaaacaaagtatatgtttacttcatgttaccaggttttt

SEQ ID NO: 340350 - DNA, 201 bp, Homo sapiens; identical to SEQ ID NO: 71640

SEQ ID NO: 340351 - DNA, 201 bp, Homo sapiens; identical to SEQ ID NO: 71643

SEQ ID NO: 340352 - DNA, 201 bp, Homo sapiens; identical to SEQ ID NO: 71645

SEQ ID NO: 340353 - DNA, 201 bp, Homo sapiens
agactccacgcgcccctcgaagcccggggtgagtgcacacctggaacccttctggtgctcgtcgcggctgtcggccagcccagcggccacatcccacttgrtcgtaacctcagacactactccgcctcccctaaagttgtccttagcttgcgcgccttacctgggtcatggaatttcatcctacatttcccgtgccttgcg

SEQ ID NO: 340354 - DNA, 201 bp, Homo sapiens
cacagataatactactgtatatgggtctcctcctcctaaaggccatcccttctccatccccttccccgtcctcttcctcttcacctgaatgttaagatgtycatctgcttccaaaacacctagctgtccagcacgtcctatactctcctgttattgctggttttctttgtcttttcccttagggtgtgaatacggactaat

SEQ ID NO: 340355 - DNA, 201 bp, Homo sapiens
atgttaaaagatatactgtggatagatttgactgggcaagatgaaatctggagggtacgaagatgagtaagatgtagtcgagcctttgaggtgcacacggmagggaaacagacacagaagtaaagtattttactagatgcgattctgccaggccagaaggaagcttaccatgttgtgagagcaaaagcaagtcccagcctt

SEQ ID NO: 340356 - DNA, 201 bp, Homo sapiens
gcaggagaattcgcgtgaacctggcaggcggaggtagcagtgagctgacatcacgccactgatcttcagcctgggcaacagagctagactctgtcttaaarataaataaaacatttactatgacaaagtaactgttgtttaattgacacataacagttgtacatatttatggggtacagagtccctatcctccccaaccct

SEQ ID NO: 340357 - DNA, 201 bp, Homo sapiens
acaaagtaactgttgtttaattgacacataacagttgtacatatttatggggtacagagtccctatcctccccaaccctttccagcctctagtatccacarttcttctctctacttctgtgagatcaacttttttagtttccacgtatgaatatgcagtatttatctttctgtgcctgacttttttcatttaacatattaa

SEQ ID NO: 340358 - DNA, 201 bp, Homo sapiens
cttgttggccatctgtatgccttctattgagaaatgtctatttagatcatttgccctttttaaaaatgttatttgtctttttggtgttgagatgattgagkacattctggatattaactccctagtctgatgaatagtttgcacatattttctcccattctccaggttgtctcttcattctgtttattgtttcctgtgctg

SEQ ID NO: 340359 - DNA, 201 bp, Homo sapiens; identical to SEQ ID NO: 71644

SEQ ID NO: 340360 - DNA, 201 bp, Homo sapiens
aatggctaatgcctataatcccaaaactttgggaggccagggcctgaggattgctagaggttaggtattcaagacaagcctgggcaacatagtgagacccsccccccccgcccccatctctacagaagatttttttggcatggtggcacatgcctgtagtcctggctactcaggagactgaaatggagtatcacttgagcc

SEQ ID NO: 340361 - DNA, 201 bp, Homo sapiens
ccagtctgtggctcgtcatttcagtctcttaacagtgcctttcaaacagcagttttcagttttaatgaagtccaaatttatcagtttgtccttttaatatrgtgcttttggtttggtatataagaaatctttgactaacctaaggttacgaaggtttatgttttcttcttgaagtttagagtttttactacgtatacttaa

SEQ ID NO: 340362 - DNA, 201 bp, Homo sapiens
cccttctggtgctcgtcgcggctgtcggccagcccagcggccacatcccacttggtcgtaacctcagacactactccgcctcccctaaagttgtccttagyttgcgcgccttacctgggtcatggaatttcatcctacatttcccgtgccttgcgggtagtcccagttctccacagagaacttgagactttacaccctctc

SEQ ID NO: 340363 - DNA, 201 bp, Homo sapiens
aaagtatatgtttacttcatgttaccaggtttttcacacccttgtattattgttaggtggggttttgcaattatgtgatttgtaagaacataaaatctcarcatttggcttgtttgttgctttgaatcttgtgaccttattctccactgaaagaagcttgttttgatgttaaatgttagatcacttaaaaatgtcagtgtg

SEQ ID NO: 340364 - DNA, 201 bp, Homo sapiens
actactgtatatgggtctcctcctcctaaaggccatcccttctccatccccttccccgtcctcttcctcttcacctgaatgttaagatgtccatctgcttycaaaacacctagctgtccagcacgtcctatactctcctgttattgctggttttctttgtcttttcccttagggtgtgaatacggactaattggaactctc

SEQ ID NO: 340365 - DNA, 201 bp, Homo sapiens
tagccttaaagtttttggaatatcagttcatttgaaccttacagtgccttgtgaaataggacaaatggtattatcaccagttttatgggtgaataaaaagrtgaagctaggaattgttatggatagttagtgcgtaagtaagaaatgggtttctcaattcctgatgcagtgctctttatattttgtcacagagaaaggatt

SEQ ID NO: 340366 - DNA, 201 bp, Homo sapiens
tgctgttaaatgttgggctgtcatttcagtagtttgatgaatccagttgttttaagtgacctctaccggttcacttacatgaattccaaaaacttaatagyagatacacgctgtgaatgatttgcccttatttcagaactttgttaagattgcgttttggggatgactagtattaattaaccagtttttttaaatcagaag

SEQ ID NO: 340367 - DNA, 201 bp, Homo sapiens
gatatgaacttagttatgaagcaaatttttttccccatatgatgccatgaaaagttatagtatttaatttatgataataattttaagctttagtatatctsagaactacatgtgactactccttaaaaatcaatttaaaatgtgatacaagtgattagaaaatattccctccaggtctttactagatagtcataaaaagat

SEQ ID NO: 340368 - DNA, 201 bp, Homo sapiens
gcaaatttttttccccatatgatgccatgaaaagttatagtatttaatttatgataataattttaagctttagtatatctgagaactacatgtgactactycttaaaaatcaatttaaaatgtgatacaagtgattagaaaatattccctccaggtctttactagatagtcataaaaagatttgacttatatattacaaag

SEQ ID NO: 340369 - DNA, 201 bp, Homo sapiens
tggccagtgatgaagcctggctgggtctggtgggccagcaggtcccgctaaggaggctcatggtgcatacagtttgtccttgttaagtggcgatggggatgggggggttcattgtttttccttaagattattaggtggctttacagaattgaagtctgtgtccgaaggctccccattccaaccccgaaatagagacagagg

SEQ ID NO: 340370 - DNA, 201 bp, Homo sapiens
ggggctcatgctggcgttcatatcgattccccagtgagccaaccccactgagaagccctgttctgtaaactcttcttcaaccttccctcacctctgcttcycttcttcagccccacagtgaagaacatctgagctcaaatccagataagtgacataagtgacctgctttgtaaagccatagagatggcctgtccttggaaa

SEQ ID NO: 340371 - DNA, 201 bp, Homo sapiens
agtttctgcttgggcagaaggagcaacttgcagcctctctaagtccctttcaacgttcctcagctccgcgcttacagagggtggatctcagaaccaggagracaaacagctgctcattgagtcctgagagtgcctgagtgggggcgtccaaggaggccgtggtgtgggcggagcagctggtacagtttgcgcatgggcagt

SEQ ID NO: 340372 - DNA, 201 bp, Homo sapiens
ggtgctgcaagatgtgttgttttcctccaatgcttgaattcttggctccaagagaacattttatttagcctagcctcctaggccatctttttgttggggartcatttgttgcaggataatatcaaaagcacttggacagagaaatcgattagaactgccagtgaaaccaactctggctgtgtagtatgtgctggtgtggga

SEQ ID NO: 340373 - DNA, 201 bp, Homo sapiens
agtgttcccggagaaagtctttggaaggagcactggagtaggagtcagggaagctgagctgtccacctgattccaccacgacctgagtgacctttttcaartcacttttcctctccccgtctcagtttctgcttgggcagaaggagcaacttgcagcctctctaagtccctttcaacgttcctcagctccgcgcttacaga

SEQ ID NO: 340374 - DNA, 201 bp, Homo sapiens
ctgccagtgaaaccaactctggctgtgtagtatgtgctggtgtgggaaaggacctagcctggggctgtggcaatcccgattcatggtgctttcaagtcagrttttcttggaattctgggtttgctggggtcttctgagtggggttgcctgtgctcccctagagggcagccatgaaatgggagcggtggtgcagatgggagg

SEQ ID NO: 340375 - DNA, 201 bp, Homo sapiens
ccacatgtttaccttctcacagcttgccacccctggaagcctacaactgcattcgtcttgtcacctttctcttctttctttctttctctctttcctttcctttcttttcctttcctttcctttcctttcctttcctttcctttcctttcctttcctttcctttcctttcctttcctttcctcctttccctcttttttttcc

SEQ ID NO: 340376 - DNA, 201 bp, Homo sapiens
cacatgtttaccttctcacagcttgccacccctggaagcctacaactgcattcgtcttgtcacctttctcttctttctttctttctctctttcctttcctttcttttcctttcctttcctttcctttcctttcctttcctttcctttcctttcctttcctttcctttcctttcctttcctcctttccctcttttttttcct

SEQ ID NO: 340377 - DNA, 201 bp, Homo sapiens
acatgtttaccttctcacagcttgccacccctggaagcctacaactgcattcgtcttgtcacctttctcttctttctttctttctctctttcctttcctttcttttcctttcctttcctttcctttcctttcctttcctttcctttcctttcctttcctttcctttcctttcctttcctcctttccctcttttttttcctt

SEQ ID NO: 340378 - DNA, 201 bp, Homo sapiens
agtataagaaaagttaaattgcctatgatcttatcacttaatgctagtcactgttaacatttactaacattccctcgaggtgtttttctgtgcttgtacgmacacacacacacacagccagcatcagactgtgtatacagtttaaggcattatttatatgagggcaaaactagacacagtctaacatccagccatggacaa

SEQ ID NO: 340379 - DNA, 201 bp, Homo sapiens
ttaaaacggtttccccactcctggatgtctcagagtcttggatgtggtaatgtgcatcattaatctggaagagaaggaaagacttgtgtgcagggattccmaaacttacacagtagatgagtttttcatggtgttctggagaacacagtttgagaaacactttcacaatgaatccaggcctcaacatacatcagctgctct

SEQ ID NO: 340380 - DNA, 201 bp, Homo sapiens
gcctggggacaggcaccacacaatggcggatccactttggatccactcagtatctccatagctctttattgctgtgattgccccagtcatttagggaactygtcactcatgcagagcgtcactcagcggtggtgcttaggagcatcagcttgcatcggggcaggcttggttccaaagcccaggcctcctccatgtggctcc

SEQ ID NO: 340381 - DNA, 201 bp, Homo sapiens
acttctgtgacgtccagcgctacaacatcctggaggtaacccagccagcccagctggccagatgaaggtgtgggcctgggggtggcttcagggaccgactygccgctatcactctgcctctgtaggaagtgggcaggagaatgggcctggaaacgcacaagctggcctcgctctggaaagaccaggctgtcgttgagatca

SEQ ID NO: 340382 - DNA, 201 bp, Homo sapiens
caaccagccggccctggtccaaggcatcctggagcgagtggtggatggccccacaccccaccagacagtgcgcctggaggccctggatgagagtggtgagycccgggctagaaagccagtgctgcctggcaccctctggccgccccacctggctgaggggctgagcctgggcctgccggtgacagccatccctgtccttcc

SEQ ID NO: 340383 - DNA, 201 bp, Homo sapiens
ggcatttctccacagcagcctcggaacctctatcgccaccctccggggggcccacctgtcccccgcctgcccttcaaggtgctctttgatttctccccagmagaattcacctgctgcatccatcatcagaagaggccaggaatgcggcctgctgggtgggcagggccaagaagaaggcagccgtgcaggcccaggaagccg

SEQ ID NO: 340384 - DNA, 201 bp, Homo sapiens
ggggggcccacctgtcccccgcctgcccttcaaggtgctctttgatttctccccagcagaattcacctgctgcatccatcatcagaagaggccaggaatgyggcctgctgggtgggcagggccaagaagaaggcagccgtgcaggcccaggaagccgtaggagacttgccaacctccaggagggggccagccctggaccct

SEQ ID NO: 340385 - DNA, 201 bp, Homo sapiens
tttaccttctcacagcttgccacccctggaagcctacaactgcattcgtcttgtcacctttctcttctttctttctttctctctttcctttcctttcttttcctttcctttcctttcctttcctttcctttcctttcctttcctttcctttcctttcctttcctttcctttcctcctttccctcttttttttccttttttt

SEQ ID NO: 340386 - DNA, 201 bp, Homo sapiens
ttaccttctcacagcttgccacccctggaagcctacaactgcattcgtcttgtcacctttctcttctttctttctttctctctttcctttcctttcttttcctttcctttcctttcctttcctttcctttcctttcctttcctttcctttcctttcctttcctttcctttcctcctttccctcttttttttcctttttttt

SEQ ID NO: 340387 - DNA, 201 bp, Homo sapiens
accttctcacagcttgccacccctggaagcctacaactgcattcgtcttgtcacctttctcttctttctttctttctctctttcctttcctttcttttcctttcctttcctttcctttcctttcctttcctttcctttcctttcctttcctttcctttcctttcctttcctcctttccctcttttttttcctttttttttt

SEQ ID NO: 340388 - DNA, 201 bp, Homo sapiens
ccttctcacagcttgccacccctggaagcctacaactgcattcgtcttgtcacctttctcttctttctttctttctctctttcctttcctttcttttcctttcctttcctttcctttcctttcctttcctttcctttcctttcctttcctttcctttcctttcctttcctcctttccctcttttttttccttttttttttg

SEQ ID NO: 340389 - DNA, 201 bp, Homo sapiens
ttctcacagcttgccacccctggaagcctacaactgcattcgtcttgtcacctttctcttctttctttctttctctctttcctttcctttcttttcctttcctttcctttcctttcctttcctttcctttcctttcctttcctttcctttcctttcctttcctttcctcctttccctcttttttttccttttttttttgag

SEQ ID NO: 340390 - DNA, 201 bp, Homo sapiens
tctcacagcttgccacccctggaagcctacaactgcattcgtcttgtcacctttctcttctttctttctttctctctttcctttcctttcttttcctttcctttcctttcctttcctttcctttcctttcctttcctttcctttcctttcctttcctttcctttcctcctttccctcttttttttccttttttttttgaga

SEQ ID NO: 340391 - DNA, 201 bp, Homo sapiens
ctcacagcttgccacccctggaagcctacaactgcattcgtcttgtcacctttctcttctttctttctttctctctttcctttcctttcttttcctttcctttcctttcctttcctttcctttcctttcctttcctttcctttcctttcctttcctttcctttcctcctttccctcttttttttccttttttttttgagac

SEQ ID NO: 340392 - DNA, 201 bp, Homo sapiens
ggcaggacgagaagcggagacccaagagaagagagattccattgaaagtcttggtcaagtgagtggcagtggcagtggctagtagtgatgtgtgaactatmtctctcccttctagtcagcctctgcctccagtccttgaagggcaagaacacaaggaatggttatgctttttgcttttgtttttgagacagggtcttactc

SEQ ID NO: 340393 - DNA, 201 bp, Homo sapiens
gccctcccttgtgggagttcagtgacaggggtggggcgcaggccagccttctctcccaggctcatgatgggtgtgaagggtcctctaccactccagcatcygcgagccgagccaagccaggaccccgccctgccctcacatctcctttcttttctgaaggtagaggcctggaaaacccatgtctggcaggacgagaagcgg

SEQ ID NO: 340394 - DNA, 201 bp, Homo sapiens
agtcaccatcctctttgcgacagagacaggaaaatcagaggcgctggcctgggacctgggggccttattcagctgtgccttcaaccccaaggtactggctyagtgggatggctgttgttttttctgcttgtgtgcaggggagtctaggaaaagttaaaacggtttccccactcctggatgtctcagagtcttggatgtggt

SEQ ID NO: 340395 - DNA, 201 bp, Homo sapiens
gactcacagcctttggacctcagcaaaggtacctgcttctctgcagcacatggggcttgtttgtgttggggtctgagccctaagcccatggtcaaggagamccccaggtctttctgaacagagacagctggcctcggggcctccctctcactgcatgcaagagcctgttagggcataatactcaaggtgctgagggaggct

SEQ ID NO: 340396 - DNA, 201 bp, Homo sapiens
gtagctttggctcagctctgctcatgcccttttggctctgcgggaggaagaagataagaggaagagggaagatggggatggggaggcagttggtcagaccraccatgaacaattcactcccaccctctggactcagtttccctatttgtcaaatgaggttactggcagagggaactccaagatgcccctccacccttggat

SEQ ID NO: 340397 - DNA, 201 bp, Homo sapiens
gtcaagtgagtggcagtggcagtggctagtagtgatgtgtgaactatatctctcccttctagtcagcctctgcctccagtccttgaagggcaagaacacarggaatggttatgctttttgcttttgtttttgagacagggtcttactctgtcacccaggctggggtgtagtggtgccatcacagctcactgcagcctctgc

SEQ ID NO: 340398 - DNA, 201 bp, Homo sapiens
agtgacctttttcaagtcacttttcctctccccgtctcagtttctgcttgggcagaaggagcaacttgcagcctctctaagtccctttcaacgttcctcasctccgcgcttacagagggtggatctcagaaccaggaggacaaacagctgctcattgagtcctgagagtgcctgagtgggggcgtccaaggaggccgtggt

SEQ ID NO: 340399 - DNA, 201 bp, Homo sapiens
cccccatctacacaagaccaccacatagccacacaaccccaccgccccagaggagcctttcccatggactacaaagggtagggcgccccctggatgtgtgragcatgacggccctgagtgtatctgtcagaggcggcaaaaaatgccagtggctaagaggatgggcttggggatgagcaagtggctttgccactcagtagc

SEQ ID NO: 340400 - DNA, 201 bp, Homo sapiens
caggtctatggggctataagttcttttctttctttccctctttccttcctttccttcctgtcctttcctcccttcccctcccttcccttccctttctttcttttttttttttggaaacagccttgactgcccagcctcaagcaatccttctgcctcagcctcccgagtagctgggactacaggcacaagacaccatgcctg

SEQ ID NO: 340401 - DNA, 201 bp, Homo sapiens
tccacagaaaggccattttgttcagagttacccactctccttaatcaggagttcattctttaaatagttttgatgctgtttcaaaaggctttggtgctgaytggaaatctcaaggttgttgttgttggtggtggtggtagtgtgtgtgtgtgtgtgtgtgtgtgtgtttcaaagcctttctgactgagtccctccctccct

SEQ ID NO: 340402 - DNA, 201 bp, Homo sapiens
acccactctccttaatcaggagttcattctttaaatagttttgatgctgtttcaaaaggctttggtgctgactggaaatctcaaggttgttgttgttggtggtggtggtagtgtgtgtgtgtgtgtgtgtgtgtgtgtttcaaagcctttctgactgagtccctccctccctttgggatatttttgaagtctgggagggga

SEQ ID NO: 340403 - DNA, 201 bp, Homo sapiens
gaacttgaaccccagctttctgacactggagtccttaattgctctgttgtgttgcattctcagcatttagcacagagcctggcacatacttgaagcttaayataggtttgcatgaatgaatgagtgcatgaatgcataatttaataaatggcatcctatgtgtccaatacgtctctctggctgggattaactcagaatcaa

SEQ ID NO: 340404 - DNA, 201 bp, Homo sapiens
ggtagttcacacctgtaattccagcactttgggaggctgaggcaggaggattacttgaggccagtagttcgagaccagcctgggcaacatagtgagactctataaaataataataataataataataataataataataaggaaaaaaattagctgagcaagatggcacatgcctgcagtcctagctacttgggaggctga

SEQ ID NO: 340405 - DNA, 201 bp, Homo sapiens
tcgcgcccttccgcagtttctggcagcaacggctccatgactcccagcacaagggtaaggctggaggcttcccaggtgggaggggcaccagggggccagcrcctgcctaggagcagaactgcagccccacaaacggttcctgacctctctcgagggaaggcctcccaagtttgcttccctgtgcgggcctctgcgggttag

SEQ ID NO: 340406 - DNA, 201 bp, Homo sapiens
gtagttcacacctgtaattccagcactttgggaggctgaggcaggaggattacttgaggccagtagttcgagaccagcctgggcaacatagtgagactctataaaataataataataataataataataataataataaggaaaaaaattagctgagcaagatggcacatgcctgcagtcctagctacttgggaggctgag

SEQ ID NO: 340407 - DNA, 201 bp, Homo sapiens
acctgtaattccagcactttgggaggctgaggcaggaggattacttgaggccagtagttcgagaccagcctgggcaacatagtgagactctataaaataataataataataataataataataataataaggaaaaaaattagctgagcaagatggcacatgcctgcagtcctagctacttgggaggctgaggcaggagga

SEQ ID NO: 340408 - DNA, 201 bp, Homo sapiens
ccctcagccccctagaagagctccaccttgtgcacacaactctgggggagaaggtggcacagatacccccctgcccttagggagcttctagtttaaggtckttcctccagtgactacctaggtcacctcttaactactgtgtctgtttcagtctcacagccatagagagcctggggacaggcaccacacaatggcggatcc

SEQ ID NO: 340409 - DNA, 201 bp, Homo sapiens
cagggtttgtcctggcaacaaggaaaggtttcttctgatatccatgtatgtccaaggcggatgctttctttaggcagaggctgtagccaagccctcggggrgctccaagggctgctgggaaggggtgggcccccctcctccccagagggaagctcctggggccctcttaagcacccctgcctgtggggatgcctcatccca

SEQ ID NO: 340410 - DNA, 201 bp, Homo sapiens
gtctcagctacaggtacgggactgaggcgggaggattgcttgagcccaggtggttggggcttcagtgagctatgatggcaccactgtactccagcctgggygactgagtgagaccctgtctcaaaacaaaaacaaagcaatatttataatagtagcaatagctactatgtgccaagcccagacacctctttgagtccttgc

SEQ ID NO: 340411 - DNA, 201 bp, Homo sapiens
gtatgttggccagtctggtctcaaactcctgacctccagtaatccacccaccgcggcctccaaaagtgctgggattacaggcatgagccaccatgcccggyctggaccaaggatctttatttgtggaataaaaggaagaaaaagaaaaacccaacggccacctcagcaggatgccccaagggtggtgttcagatgtcactg

SEQ ID NO: 340412 - DNA, 201 bp, Homo sapiens
gctgctagcctgtggccatgttggggtctgagccccagccttccagctgcgaaggcagccaagtgtcgtagagaaggtgtcacagaggcgattccaggctktagtggtgaactctccactctgcacccccaggtgctgtgccctgtgccctgtctaagatagtcctgaaggtttctgcatatttaagatatccccaatgtc

SEQ ID NO: 340413 - DNA, 201 bp, Homo sapiens
gccagagactgagtccggagtagggagaaaaacctgactcacacccactggggttcagccagtggaagagaggagatctaggtgggagaaagccaggtggwccccaaggaggaggtgccacaggggtggagaagaggtgcagggagccggagcagccagagaggagccaggtggccaggagagctggccccagaggagggt

SEQ ID NO: 340414 - DNA, 201 bp, Homo sapiens
cttcgatgcccgcagctgttccactgcccgggaaatgtttgaacacatctgcagacacgtgcgttactccaccaacaatggcaacatcaggtcggtgcacrtttcccagggctgcagaggggcttgccttgcctgagaatcttagccaaaagatgcagcacttgggtctaggggaggcatctccagctccaggagaaacca

SEQ ID NO: 340415 - DNA, 201 bp, Homo sapiens
ctttcctatgacatatttaatatatttctgtgaatggcctacctgtttgtatttacaaattcatatttaaaggaaacttgtatcactctcacaaatggaargcagcaaaacataaattcaatgaaaacaaaatgaagttaatgaattttagctagatactattccctggccaaggcctgctctttgtttgttttgtttgtt

SEQ ID NO: 340416 - DNA, 201 bp, Homo sapiens
accagccccgggctctgaggatctgacagtgggtggcgcagagccaggccttgcccttggggagctctccagcatacaccccaccctcccctcccagcgcyctgcaaagcaggcgtcaatgccattgttaatgcacagaggaggaacctgactgttagacaggttgatgggttttccagggtcgcacggcttctgggagat

SEQ ID NO: 340417 - DNA, 201 bp, Homo sapiens
ttataatagtagcaatagctactatgtgccaagcccagacacctctttgagtccttgctgtcaccctatcaggtaagtgtgcttcgaagttacacgaaacmcacggctcagtgtttggcccatggtaagggcctaaaaagtggtagccccagtggtggggatgctgctgctgctgaccattaaccgcagtctgctccacct

SEQ ID NO: 340418 - DNA, 201 bp, Homo sapiens; identical to SEQ ID NO: 71652

SEQ ID NO: 340419 - DNA, 201 bp, Homo sapiens
gcccagacacctctttgagtccttgctgtcaccctatcaggtaagtgtgcttcgaagttacacgaaacacacggctcagtgtttggcccatggtaagggcytaaaaagtggtagccccagtggtggggatgctgctgctgctgaccattaaccgcagtctgctccaccttcttccaggcagcctgtgagacgtttgatgtc

SEQ ID NO: 340420 - DNA, 201 bp, Homo sapiens
agggcctaaaaagtggtagccccagtggtggggatgctgctgctgctgaccattaaccgcagtctgctccaccttcttccaggcagcctgtgagacgtttsatgtccgaggcaaacagcacattcagatccccaagctctacacctccaatgtgacctgggacccgcaccactacaggctcgtgcaggactcacagccttt

SEQ ID NO: 340421 - DNA, 201 bp, Homo sapiens
ccatagagatggcctgtccttggaaatttctgttcaagaccaaattccaccagtatgcaatgaatggggaaaaagacatcaacaacaatgtggagaaagcyccctgtgccacctccaggtgagttttccctgggggaacctcctgcttgtctccttgggcacccatgccctgtcggcaccgatgactcagaattcctctct

SEQ ID NO: 340422 - DNA, 201 bp, Homo sapiens
aagggctggctttgcaccacacatcctgactcctggggactcccagcaccagccctgatgctggcaggatgtggatacgtcccagaaaatctgtgagcctytgctgtctcctcaccgtggctgactgtgtccttccactgcctgagcgtctccaggacttcctcaccaccctccttcagggtaaacttcaaaagatgggcc

SEQ ID NO: 340423 - DNA, 201 bp, Homo sapiens
tcctggtggaactctcctgtgaggatggccaaggcctgaactacctgccgggggagcaccttggggtttgcccaggcaaccagccggccctggtccaaggyatcctggagcgagtggtggatggccccacaccccaccagacagtgcgcctggaggccctggatgagagtggtgagtcccgggctagaaagccagtgctgc

SEQ ID NO: 340424 - DNA, 201 bp, Homo sapiens
cccctgtggggccgccgacccctgggagttccgggaggaaagggagggatctggggtttaggagacgctcggagccccttggcccataaagaaggcactgrggtcacactggtgtggctgcctgtagcagggacagcgatgacaggtgggtctcaagagtccagtgagcttggccctttttcagaaggacctgggggaggt

SEQ ID NO: 340425 - DNA, 201 bp, Homo sapiens
tgcccccctgctcactcagccaggccctcacctacttcctggacatcaccacacccccacccagctgctgctccaaaagctggcccaggtggccacagaaragcctgagagacgaggctggaggccctgtgccaggtgaagatcagggctggtgggcagtgggggtatgtggggggtcccagcatgtggggagccagagtc

SEQ ID NO: 340426 - DNA, 201 bp, Homo sapiens
cggagccccttggcccataaagaaggcactggggtcacactggtgtggctgcctgtagcagggacagcgatgacaggtgggtctcaagagtccagtgagcwtggccctttttcagaaggacctgggggaggtgctggtgcctggacagaagtgaagcagcctgcaggacgtgggaaatcaaataggagcttcttgtcctct

SEQ ID NO: 340427 - DNA, 201 bp, Homo sapiens
cgtgtttcaccaggagatgctgaactacgtcctgtcccctttctactactatcaggttaggggccttcctcttctctccttcctgggggctcagatgtggytgtatgtgtgtgtgtgtgtgtgcacctcattgttacacatgtagggcacgacgggaagcaggagtatgttgttagagctttccaggccccactcaaggat

SEQ ID NO: 340428 - DNA, 201 bp, Homo sapiens
ccgctggcccatgtctaggacacagttgtgttgagtgaactgaatttttccaagtgtctgcaggatgcaaccagagtgcactgccttgaacattagctagraaggggagccgcccttatccgtctttgctttccccaaaactggaataaacttgtcacttaagatgtattgggggatggatgatgtggatgaatggataaa

SEQ ID NO: 340429 - DNA, 201 bp, Homo sapiens
aactaacttgcacccctctcacaagtctcccttcctctcaggagctgctcccgaaattcgccaactcaccctgggcctctgtctggcgttgtatcctctcytctgcccttccccagcacctttgcctgcctccatcagagtttctatcaggccgtgtgaaaatgactgattttccttggcttccccacccagttagactag

SEQ ID NO: 340430 - DNA, 201 bp, Homo sapiens
tcgtctcagcaccatggacagtgcctggcacatggacttgtttgttgagtgagtgaatgaatgaatgaatactgggttgtgacagtcttttccccaaagcrggacaggcgccctgagtcactgacatcacccttggcttttagccctcagagtacagcaagtggaagttcaccaacagccccacattcctggaggtgctag

SEQ ID NO: 340431 - DNA, 201 bp, Homo sapiens
caaagcgggacaggcgccctgagtcactgacatcacccttggcttttagccctcagagtacagcaagtggaagttcaccaacagccccacattcctggagytgctagaggagttcccgtccctgcgggtgtctgctggcttcctgctttcccagctccccattctgaagcccaggttctactccatcagctcctcccggga

SEQ ID NO: 340432 - DNA, 201 bp, Homo sapiens
ccacacatcctgactcctggggactcccagcaccagccctgatgctggcaggatgtggatacgtcccagaaaatctgtgagcctctgctgtctcctcaccrtggctgactgtgtccttccactgcctgagcgtctccaggacttcctcaccaccctccttcagggtaaacttcaaaagatgggcccttgtttcctcctctg

SEQ ID NO: 340433 - DNA, 201 bp, Homo sapiens
atctgttcatcaactcagattcagctccctcatcagttcaaggagggagggaacacccacagcccagagttgttaacagtattaggaggtgtgtgggagasatctctaggaaccaggcactaaaccaagccttctgtatgtatatgatcagttacattgtggggtaggcactgtgtgcattttacaggtggcacagaaagt

SEQ ID NO: 340434 - DNA, 201 bp, Homo sapiens
aatttttatatttttagtagagatggtgtttttccatgttgcccaggttggttccgaactcctggcctcaagtgatccgcttgcctcagcctcccaaagcrctgggattataggcataagccacggtgccgggccagctttctttattgtttggtttcctccactagaatgtaagctccatggggcagggaccttgtctgt

SEQ ID NO: 340435 - DNA, 201 bp, Homo sapiens
tggccaacatgctgcttgaggtgggcggcctggagttcccagggtgccccttcaatggctggtacatgggcacagagatcggagtccgggacttctgtgaygtccagcgctacaacatcctggaggtaacccagccagcccagctggccagatgaaggtgtgggcctgggggtggcttcagggaccgactcgccgctatca

SEQ ID NO: 340436 - DNA, 201 bp, Homo sapiens
atgataacatccccctcaatgcagtggccaaagtcagaaagtgggatgagctgggtgtggtggctcacgcctgtaatctcagcactttgggaggccgtggygggtggatcacttgaggtcaggagtctgagacaatcctggccaacatggcaaaaccccgtctctactaaaaatacaaaaataattagacaggaatggtgg

SEQ ID NO: 340437 - DNA, 201 bp, Homo sapiens
cctctgcgtattgagatttactctgtagcagacattgggctgggctcttcttcctggccgttgaatgaaccaaattcagtcctgactcacagcctttgtaytccctgttccctttgcatgacatgccttttcctcagaatttttctaggctcatttcttcttgtcaaaaggtatttcctataatgtcacctcctctgagaa

SEQ ID NO: 340438 - DNA, 201 bp, Homo sapiens
agattctagaaaggagcagcccaggcctcttctgccctcctgccaatgctcttagctgtccctctcctgtcgggatcatatagggctgcagtgacttcaaragtcctactggcccagcccctgctctaggcagttctcataattgcaaaaatacctctgcgtattgagatttactctgtagcagacattgggctgggctct

SEQ ID NO: 340439 - DNA, 201 bp, Homo sapiens
gttgaactcactttttgtctgcgccccctgggcctgggtgggaaacagacagactgggagaatggcaccgtggagaaggcaggctgaacagggactgtgcrggggttctgttaaaacaaaaggcaccgggcagtgaggagaagcattaatagagccaaggagaagccgaaaggcagaggcaagggcaagagggagagacca

SEQ ID NO: 340440 - DNA, 201 bp, Homo sapiens
ttacccactctccttaatcaggagttcattctttaaatagttttgatgctgtttcaaaaggctttggtgctgactggaaatctcaaggttgttgttgttgktggtggtggtagtgtgtgtgtgtgtgtgtgtgtgtgtgtttcaaagcctttctgactgagtccctccctccctttgggatatttttgaagtctgggaggg

SEQ ID NO: 340441 - DNA, 201 bp, Homo sapiens
cccactctccttaatcaggagttcattctttaaatagttttgatgctgtttcaaaaggctttggtgctgactggaaatctcaaggttgttgttgttggtgktggtggtagtgtgtgtgtgtgtgtgtgtgtgtgtgtttcaaagcctttctgactgagtccctccctccctttgggatatttttgaagtctgggaggggag

SEQ ID NO: 340442 - DNA, 201 bp, Homo sapiens
ccttaatcaggagttcattctttaaatagttttgatgctgtttcaaaaggctttggtgctgactggaaatctcaaggttgttgttgttggtggtggtggtrgtgtgtgtgtgtgtgtgtgtgtgtgtgtttcaaagcctttctgactgagtccctccctccctttgggatatttttgaagtctgggaggggaggagagaag

SEQ ID NO: 340443 - DNA, 201 bp, Homo sapiens
acacaagttgctacagtttagttggagtgagagacaagctaaacttgtcagctgacaaccaggtccttggccaggtagccccatatgtaaaccaacttccrtggtgggctgtgagccttctcctgcaagctgtggccaggtttccagaagaaaggaaaaaacagtgtttttattcatcctggcttgagaactctgtcattc

SEQ ID NO: 340444 - DNA, 201 bp, Homo sapiens
cccaagctctacacctccaatgtgacctgggacccgcaccactacaggctcgtgcaggactcacagcctttggacctcagcaaaggtacctgcttctctgyagcacatggggcttgtttgtgttggggtctgagccctaagcccatggtcaaggagacccccaggtctttctgaacagagacagctggcctcggggcctcc

SEQ ID NO: 340445 - DNA, 201 bp, Homo sapiens
ggcagaggatgcttccgggaccagggacagcatatgcaaaaacatggtggcccgagagggccttgagtgagctgcagaggctgcgtgagctttgtggtttrggggtgaggcagcgaggttgattggggtcagactgggaggaatttgtatgccctgctggggaatttgggctttatttgaagggctgggggctgtgaagat

SEQ ID NO: 340446 - DNA, 201 bp, Homo sapiens
ttcatcaactcagattcagctccctcatcagttcaaggagggagggaacacccacagcccagagttgttaacagtattaggaggtgtgtgggagagatctstaggaaccaggcactaaaccaagccttctgtatgtatatgatcagttacattgtggggtaggcactgtgtgcattttacaggtggcacagaaagtcacac

SEQ ID NO: 340447 - DNA, 201 bp, Homo sapiens
agtcctccaccactccactgtcccactactcttgggacaatttaatgagatcagatgtgaagagcactcaacccttggtaggaggccagtggttcttagtsttcccaatcatgcagcctgaacgcaggggagattctgcattgattattcattcactcactcagctattcagtgggtgcctggcactggggtgggtatgga

SEQ ID NO: 340448 - DNA, 201 bp, Homo sapiens
ggccacccatagatccttccccactctaagacaaggcagggcctggggtctaggagagacctgagagaaaaccctgttttttccccttgcagaagtctccrgaatctctggtcaagctggatgcaaccccattgtcctccccacggcatgtgaggatcaaaaactggggcagcgggatgactttccaagacacacttcacc

SEQ ID NO: 340449 - DNA, 201 bp, Homo sapiens
acaatttaatgagatcagatgtgaagagcactcaacccttggtaggaggccagtggttcttagtcttcccaatcatgcagcctgaacgcaggggagattcygcattgattattcattcactcactcagctattcagtgggtgcctggcactggggtgggtatggaaatacaacagagatcagccctgccctcagggagcat

SEQ ID NO: 340450 - DNA, 201 bp, Homo sapiens
tagtcttcccaatcatgcagcctgaacgcaggggagattctgcattgattattcattcactcactcagctattcagtgggtgcctggcactggggtgggtrtggaaatacaacagagatcagccctgccctcagggagcatctagaggcggcagtggagagataggcatagaaataattagatgattttcattgtgctgaa

SEQ ID NO: 340451 - DNA, 201 bp, Homo sapiens
cacctgggggcctctcagctcaccccgatgggagaaggggatgagctcagtgggcaggaggacgccttccgcagctgggccgtgcaaaccttcaaggtcakttcccagccagagctgccccacagcagggacatgacagggtgcattcatgcctaggacatctgtgctgggcgtcccaggtggcatgacctctgcctgtgg

SEQ ID NO: 340452 - DNA, 201 bp, Homo sapiens
ccccaaagccagccctggagggagctgtctctggtgagaggcatcttgcccttctgatgtcctatttcagttcctgcttctgtggattgaattaatccccrtgtaaggccatctcattgttgatcttcctgctgtcttcctgtcccccagggcaaaaatagaggaacatctggccagggtggaagcggtaacaaaggagat

SEQ ID NO: 340453 - DNA, 201 bp, Homo sapiens
tattcattcactcactcagctattcagtgggtgcctggcactggggtgggtatggaaatacaacagagatcagccctgccctcagggagcatctagaggcrgcagtggagagataggcatagaaataattagatgattttcattgtgctgaagccaagaaggaaaggtcagggtcactgagggaagcagagcagggggtga

SEQ ID NO: 340454 - DNA, 201 bp, Homo sapiens
agctcatccgctatgctggctaccagatgccagatggcagcatcagaggggaccctgccaacgtggaattcactcaggtacccggcccagcctcagccgcyggccattggggcggggagccccgtggtgagcgagtgacagagtggagcccagaggagacacgcagcccgggcttacagactcacagggcccgtcttgttc

SEQ ID NO: 340455 - DNA, 201 bp, Homo sapiens
cactggggtgggtatggaaatacaacagagatcagccctgccctcagggagcatctagaggcggcagtggagagataggcatagaaataattagatgattytcattgtgctgaagccaagaaggaaaggtcagggtcactgagggaagcagagcagggggtgacgctgccatagagcgggaggccaacatctcgtccaggt

SEQ ID NO: 340456 - DNA, 201 bp, Homo sapiens
tgccatagagcgggaggccaacatctcgtccaggtggtctcggctccaccactggccgctgccccctgccctgccctctgtaactgagcattgcctgggtkggcaaagctgggagctgcccacacttccgagccctctgtcctcaagaagcaaaaacacagtttctaaaaccttggcagagactctatttgccctgctaga

SEQ ID NO: 340457 - DNA, 201 bp, Homo sapiens
atctcgtccaggtggtctcggctccaccactggccgctgccccctgccctgccctctgtaactgagcattgcctgggttggcaaagctgggagctgcccayacttccgagccctctgtcctcaagaagcaaaaacacagtttctaaaaccttggcagagactctatttgccctgctagagaacagccacccagaccaggag

SEQ ID NO: 340458 - DNA, 201 bp, Homo sapiens
gccacccagaccaggagaggagaggcagacgtgtcctgtgagatcaaagtttaatcccgaggaaaaccagggggacctctgcagttggttggaggccttcytcaagtgctgggccattgtaaagggaacacaacccagagagacctcctgggtttctacaagcccaggagggcccactgaggaggaaagcaaggtgccaga

SEQ ID NO: 340459 - DNA, 201 bp, Homo sapiens
acttctgatcagcctcaaagcctctgtctacccagtctttgatgggcatggtctggatgggctgttgcaggtcttcgatgcccgcagctgttccactgccygggaaatgtttgaacacatctgcagacacgtgcgttactccaccaacaatggcaacatcaggtcggtgcacgtttcccagggctgcagaggggcttgcct

SEQ ID NO: 340460 - DNA, 201 bp, Homo sapiens
gtgggcaggccctcaacatctttgggcttactgtccccgtagggtggaagatggaaggtcacgttgctgacagttaagaacctgggcttggcatcagggcracctgggtctgagtcctgactttgctctttcctgtacttatgttcctgggcctggtgcttaacctcctagagccttgagatccttggctataaaatagat

SEQ ID NO: 340461 - DNA, 201 bp, Homo sapiens
gctcagctatctttgtttttaaaaaagactaataggcaatgagagaggtattaaaggtctattagcaccaatatgagactgtctctccagtgctccgaagratgaaaatgtaattgaaggggaataactaaaaaataaattatgaaaagggagtaaatactcaccatgggatttgacgctagttctgctgggtcacatacc

SEQ ID NO: 340462 - DNA, 201 bp, Homo sapiens
agctgtggccaggtttccagaagaaaggaaaaaacagtgtttttattcatcctggcttgagaactctgtcattccctctctttctagaaactgaagaaatygctcttcatgctgaaagagctcaacaacaaattcaggtaaagctttttccgttgtcctactcctagccctgccctgtggacccaaagtctgggttcaggg

SEQ ID NO: 340463 - DNA, 201 bp, Homo sapiens; identical to SEQ ID NO: 71667

SEQ ID NO: 340464 - DNA, 201 bp, Homo sapiens
acaacaaattcaggtaaagctttttccgttgtcctactcctagccctgccctgtggacccaaagtctgggttcaggggatggaactgggtgtgcacagggkgtcttctcagaaccgtgcaggcacagagacctgggtctaaggtctgtactcagaatgtgtcgagggtcaaaccacagaaaccaagtccctctcacaggtc

SEQ ID NO: 340465 - DNA, 201 bp, Homo sapiens
gtcacgttgctgacagttaagaacctgggcttggcatcagggcgacctgggtctgagtcctgactttgctctttcctgtacttatgttcctgggcctggtrcttaacctcctagagccttgagatccttggctataaaatagatgcaaaaatacctccctcccagactcagtgagaccctgcctgtgggttgcttcaccca

SEQ ID NO: 340466 - DNA, 201 bp, Homo sapiens
ttactgttgtcatgctcaggtgcagaggggggaatattgctggaagctttgtttggggagggaggtctcccagcagtggggtggttcccacctcacccagyagctccttatggcaggggtgtccttggggataaatatcatcagtgttttgtctttgtgctttttttctctaatcaaggaaaagttgtcgagacactcttc

SEQ ID NO: 340467 - DNA, 201 bp, Homo sapiens
acctctttgagtccttgctgtcaccctatcaggtaagtgtgcttcgaagttacacgaaacacacggctcagtgtttggcccatggtaagggcctaaaaagkggtagccccagtggtggggatgctgctgctgctgaccattaaccgcagtctgctccaccttcttccaggcagcctgtgagacgtttgatgtccgaggcaa

SEQ ID NO: 340468 - DNA, 201 bp, Homo sapiens
gcttggtggtgttggaacccatttgcttctcccagaggaaaattgtatttttccaagtcacaagtacataccttgaacccctgcttccctgagcaagagawcctgggggtgtgaacggggaatggcagcctctcctcacagggaccctggcaatctaagacatgaccagctgagcaggttcagtggccttttgtatctgaa

SEQ ID NO: 340469 - DNA, 201 bp, Homo sapiens
aaattcgccaactcaccctgggcctctgtctggcgttgtatcctctcttctgcccttccccagcacctttgcctgcctccatcagagtttctatcaggccrtgtgaaaatgactgattttccttggcttccccacccagttagactagactctaatgcagagaaagggctgtgtctttcccttctataacgccgatgcctt

SEQ ID NO: 340470 - DNA, 201 bp, Homo sapiens
gggtgaaggagcattttccagatcctctatgggctgctgtttgggccagtagctttggctcagctctgctcatgcccttttggctctgcgggaggaagaakataagaggaagagggaagatggggatggggaggcagttggtcagaccgaccatgaacaattcactcccaccctctggactcagtttccctatttgtcaaa

SEQ ID NO: 340471 - DNA, 201 bp, Homo sapiens
tctgtaatagaaatgtagaataagtaaataaaccaagataaatcacgtgttttaaataaagcttaagtcatgaaaaacaagtggctggggctgggcgcggyggctcctgcctgtaatcccagcactttgggaggctaaggtgggaggatcacttgaggccaggagtttgaggccagcctgggcaacatggtgaaaccccat

SEQ ID NO: 340472 - DNA, 201 bp, Homo sapiens
cccgcgcagagccaggtaccccgcgggccgaagtccgccctgggagggaagcggtgggctccgagcccgggcggggccccatctctctctgggagaaatcsgagggcggggatgtgcgctctgtgggattcctgagggtttactaaaagcgttttcctcttttagaacgcttgagaggtcgcaattcaggagcccaggcgg

SEQ ID NO: 340473 - DNA, 201 bp, Homo sapiens
ccgcgagccgagccaagccaggaccccgccctgccctcacatctcctttcttttctgaaggtagaggcctggaaaacccatgtctggcaggacgagaagcrgagacccaagagaagagagattccattgaaagtcttggtcaagtgagtggcagtggcagtggctagtagtgatgtgtgaactatatctctcccttctagt

SEQ ID NO: 340474 - DNA, 201 bp, Homo sapiens
tatgctggcattagcagccacactgtcggtaggaccggcccacctggtaacctgcggccacctgtgcttttacgtctactcttggttaaccacgagccacktttccagcttggactctaagcatctgctccacttcctctccttcctcattgaactctttcactaaaaggagagtgcaagagagacttaaactgtttgatt

SEQ ID NO: 340475 - DNA, 201 bp, Homo sapiens
cagatgccagatggcagcatcagaggggaccctgccaacgtggaattcactcaggtacccggcccagcctcagccgccggccattggggcggggagccccrtggtgagcgagtgacagagtggagcccagaggagacacgcagcccgggcttacagactcacagggcccgtcttgttccccagctgtgcatcgacctgggc

SEQ ID NO: 340476 - DNA, 201 bp, Homo sapiens
ttccccagctgtgcatcgacctgggctggaagcccaagtacggccgcttcgatgtggtccccctggtcctgcaggccaatggccgtgaccctgagctcttygaaatcccacctgaccttgtgcttgaggtggccatggaacatcccaagtaagtaggctgagggtgctgggggcaagggcgagtcaacacacagcccttct

SEQ ID NO: 340477 - DNA, 201 bp, Homo sapiens
gctggagggcggccgatgcttccaccacggccatcagaggggctcttctgtccccagggccgcgttaccccctgagcctggggtgtcagaatagactctcrgccttcacacatttgtcccatcagggcacctcttgggcccagtgctctgtgcccagtgctggggccactgggcatcctgtgtggagcaggagcagagagt

SEQ ID NO: 340478 - DNA, 201 bp, Homo sapiens
ggagcaagtgggaatttatagccaaggatcagggtggggtctgtggatggaaaattaccaagaaaaacttcaggcatagggggaattctgcctcacccaayctaacaggattcttgcttaggacaggctaaggtgatcagacatcgcctgggggaggatggaggatgaggaccctgatcagatggggaggacgacaagcta

SEQ ID NO: 340479 - DNA, 201 bp, Homo sapiens
atggagatgtcccgggactttccatttttaggttcctaaattgaatttcccaacacctagaagcaacacttagaagctgccctgtatcagatcaaggagcttttttttttttttttttttttttgagacggagtctcggtctgtcgtccaggctggagtgcagtggcgcgattcccgcttactgcaacctccgtctcctgg

SEQ ID NO: 340480 - DNA, 201 bp, Homo sapiens
tcagctcatccgctatgctggctaccagatgccagatggcagcatcagaggggaccctgccaacgtggaattcactcaggtacccggcccagcctcagccrccggccattggggcggggagccccgtggtgagcgagtgacagagtggagcccagaggagacacgcagcccgggcttacagactcacagggcccgtcttgt

SEQ ID NO: 340481 - DNA, 201 bp, Homo sapiens
cacactgtcggtaggaccggcccacctggtaacctgcggccacctgtgcttttacgtctactcttggttaaccacgagccacttttccagcttggactctragcatctgctccacttcctctccttcctcattgaactctttcactaaaaggagagtgcaagagagacttaaactgtttgattcattcttaagaactttca

SEQ ID NO: 340482 - DNA, 201 bp, Homo sapiens
agcacacactgttccccatgactgggtcaccccataggcagatcaggcctgtgcttgacgggggaggggaagatggaacaggaagagccccccggtgtttsgggaagggctggctttgcaccacacatcctgactcctggggactcccagcaccagccctgatgctggcaggatgtggatacgtcccagaaaatctgtgag

SEQ ID NO: 340483 - DNA, 201 bp, Homo sapiens
ctcacgaccgcctcccacaggcccagctccccagccatcctgtgtgtgcgtgggcctggggtgtctgaggactggccccctcttctcctgtcctcttcagygccagcggcttccacctccccgaggatccctcccatccttgcatcctcatcgggcctggcacaggcatcgcgcccttccgcagtttctggcagcaacggc

SEQ ID NO: 340484 - DNA, 201 bp, Homo sapiens
ggcccataaagaaggcactggggtcacactggtgtggctgcctgtagcagggacagcgatgacaggtgggtctcaagagtccagtgagcttggcccttttwcagaaggacctgggggaggtgctggtgcctggacagaagtgaagcagcctgcaggacgtgggaaatcaaataggagcttcttgtcctctccaccccctca

SEQ ID NO: 340485 - DNA, 201 bp, Homo sapiens
cttgtgggagttcagtgacaggggtggggcgcaggccagccttctctcccaggctcatgatgggtgtgaagggtcctctaccactccagcatccgcgagcygagccaagccaggaccccgccctgccctcacatctcctttcttttctgaaggtagaggcctggaaaacccatgtctggcaggacgagaagcggagaccca

SEQ ID NO: 340486 - DNA, 201 bp, Homo sapiens
tgtgtgtgcgtgggcctggggtgtctgaggactggccccctcttctcctgtcctcttcagtgccagcggcttccacctccccgaggatccctcccatcctygcatcctcatcgggcctggcacaggcatcgcgcccttccgcagtttctggcagcaacggctccatgactcccagcacaagggtaaggctggaggcttccc

SEQ ID NO: 340487 - DNA, 201 bp, Homo sapiens
tccgattggctgagggaattctgcatccgcactttcagttctgtgactatggatgagtgatctgaatgcgctgggcctcagtttcctcatctgtaaagtgrggataatgctattaaatagctagtgggagtgaagtgagaattccagttgggcttggagccctggcgccctctggtggccaacatggtaacaacagcccgg

SEQ ID NO: 340488 - DNA, 201 bp, Homo sapiens
tgggcatagggagatgggggtggagtgacggggacagacaacgcaaacacagttacaatggggtgctttgaactggcatggcacagatacgtacagactcygtggggtcatgggggagcgtccaacaatattccaggcggggaggactcccagaggagcgacatttaggcagagcatggaagggcaattaggcgtgtgctg

SEQ ID NO: 340489 - DNA, 201 bp, Homo sapiens
tggcaggtagacccaggggaatcaggcccagaaaggttctggaccccaagagaatcttagcagtggctgagatctgagctgggtgggctgtcagatggccytactgcacatcctggaccagttggcagctttgagaagtcgggtgaatgtgttccatttttccatctgtagaatgggggcaggagagtctccctggcctct

SEQ ID NO: 340490 - DNA, 201 bp, Homo sapiens
ggaggagttggggggaggaggtgggtccacccagagtgcaacatccactcaggtgagggaggggtgatgttactggaagaggaagcagccgtgcaaagggratttcatcctgaaagcaatgagagccaatgaatatattttgattttaaaaagtaattttctaatctgttcaggtgtcatgaaaccaagagcctattctaa

SEQ ID NO: 340491 - DNA, 201 bp, Homo sapiens
agcaggaaacagcccagggaacgctggggagtgtaattttaaatagggtggccagggaaggcagagctggaaggtggcatctgagaataaacctgagatgrtgaggaggagccctgtggatactgaaggaaacactctgggctgttctggaggggcagcaggtacaaaggccccgggggtgggagttaagctggcgtgttt

SEQ ID NO: 340492 - DNA, 201 bp, Homo sapiens
ggcggaaaggatccagtcagatagaagaggggatgaagaaaaaaatatcacacatcaattcattcaactctcccaacgatccacaaggaaggaattttagytatcccattttaaagatgaggaccctgaagcccagaaagttaaagtaattttcaagatctcataattagcaaatgacagagctgggattcagatccaggc

SEQ ID NO: 340493 - DNA, 201 bp, Homo sapiens
agtatcttgggtgggggatgaacgctgggcaggaaatgggtatgctaagtaaagctttggagatggttagagggcccgcaccagagcaggtgctgagcagsgttagggtctaaaccagattcaagcacaatctaagtataacagttgggaagacagatggctcatgaaggtccatgtgatagggaagctgggcaaccccag

SEQ ID NO: 340494 - DNA, 201 bp, Homo sapiens
gcccccatctacacaagaccaccacatagccacacaaccccaccgccccagaggagcctttcccatggactacaaagggtagggcgccccctggatgtgtrcagcatgacggccctgagtgtatctgtcagaggcggcaaaaaatgccagtggctaagaggatgggcttggggatgagcaagtggctttgccactcagtag

SEQ ID NO: 340495 - DNA, 201 bp, Homo sapiens; identical to SEQ ID NO: 71668

SEQ ID NO: 340496 - DNA, 201 bp, Homo sapiens
cagttaatgaacaagtcaagggacaggcttgaggctcgctcaggtggaaagacaaagcaatctgcaataacgcaatagtgcaactgaaaccaaagcccccrtctacacaagaccaccacatagccacacaaccccaccgccccagaggagcctttcccatggactacaaagggtagggcgccccctggatgtgtgcagcat

SEQ ID NO: 340497 - DNA, 201 bp, Homo sapiens
cacataataaaagaggagcaagtaataatgctgagttagaacaacaactgcaaaatctttaaaagaaaggtagctacagcttgagtgctttccccagtaayagacctaaaactacagttgataatgagagctgctgggaagtgtctttcagggtcaggcaaaggcacccctgtttcaacgacctccgggctcttcctcacc

SEQ ID NO: 340498 - DNA, 201 bp, Homo sapiens
aagccagtgctgcctggcaccctctggccgccccacctggctgaggggctgagcctgggcctgccggtgacagccatccctgtccttcctgctgagagggygggccaccaaagcttatgtgaaagcagctgtggaaacagtcccagcccataaggcatggccccctggccttagtttccctaatgataacatccccctcaa

SEQ ID NO: 340499 - DNA, 201 bp, Homo sapiens
tcccgtccctgcgggtgtctgctggcttcctgctttcccagctccccattctgaagcccaggttctactccatcagctcctcccgggatcacacgcccacrgagatccacctgactgtggccgtggtcacctaccacacccgaggtgagccaggggcagaggctctggaacagccccgctccgcccattattggacatctg

SEQ ID NO: 340500 - DNA, 201 bp, Homo sapiens
cccttcgcttttcattttgcaaggctagtggatacccccgaagtggcccttcacccccagcctgcccaccacaaacagaacctccgccctccctgagaaaycacttacataggtggggtgggggtacatcataggtgggttggcgggagtctgctgaaaagaaaccaggaaattcaatgggagagcgcatgtgtgcgcgag

SEQ ID NO: 340501 - DNA, 201 bp, Homo sapiens
ttgcaggtcttcgatgcccgcagctgttccactgcccgggaaatgtttgaacacatctgcagacacgtgcgttactccaccaacaatggcaacatcaggtyggtgcacgtttcccagggctgcagaggggcttgccttgcctgagaatcttagccaaaagatgcagcacttgggtctaggggaggcatctccagctccagg

SEQ ID NO: 340502 - DNA, 201 bp, Homo sapiens
ctcctccatgtggctccacaccaggaacataagagcaatcagacctcttccagtgtgggcatgaggatacaacaagatcatgtcaatattggcattcatartggtcgggcacagtggagcatgcctgcaatccaagcactttaggaggctgaggtgggcagattgcttgagcccaggagcttgaaactagcctgagtaaca

SEQ ID NO: 340503 - DNA, 201 bp, Homo sapiens
gagtggcctgctggctggggccagcctctcagaccctcggtccttcctactgtctgctcggccacccagggcctctgtgttgaactcactttttgtctgcrccccctgggcctgggtgggaaacagacagactgggagaatggcaccgtggagaaggcaggctgaacagggactgtgcgggggttctgttaaaacaaaagg

SEQ ID NO: 340504 - DNA, 201 bp, Homo sapiens
tgcatttaaaatgcaaaaaaataaaaataaaaagtccctgataatgtgttaatagatagctaatagtttagctttcttaaatcatattatgttttactcasttaaattagccagagttagcaaccttttctgtaatgggaaaaatatagtaaatatttttggctttgtgggccatggagtctgttgcaactaatcaactct

SEQ ID NO: 340505 - DNA, 201 bp, Homo sapiens
cagggccatagtttacctacccctaaattatacatttgaattttattttatttgtttttgtttgtttgtttttcttttttctttcttttttttttttttartagagttggggtcttgctatgttgccagagcaagagctggtctcaaactcctggcctcaagcagtcctcctgccttggcctcccaaagtgctgggattac

SEQ ID NO: 340506 - DNA, 201 bp, Homo sapiens; identical to SEQ ID NO: 71688

SEQ ID NO: 340507 - DNA, 201 bp, Homo sapiens
ccttcagagcctcgtgtttcatccattcttaactttcttccctgtgtccatttccacatccttccaacccaccctgctcatttgtgcaatagtgatctttytaaagcacccatctgatcatgttgttctcctggtaaaaagttttctatggctccctctatccacattctaaagtcaaatggtgtcaggaaccaggctggt

SEQ ID NO: 340508 - DNA, 201 bp, Homo sapiens
cctgataatgtgttaatagatagctaatagtttagctttcttaaatcatattatgttttactcagttaaattagccagagttagcaaccttttctgtaatrggaaaaatatagtaaatatttttggctttgtgggccatggagtctgttgcaactaatcaactctgccattgtcatgtgaaagcagccgtagacagtatgt

SEQ ID NO: 340509 - DNA, 201 bp, Homo sapiens
ggcctcaccaattcctttggttttggtggtactaatgcaacactttgtattgctggactgtagaacatataatttgtaattaaatactgatttttaaatgytatatgtgaagaaattatgcatttatgtattgatacccagatatactttatgttagggtttctccaccttggcactattaatatttgggtaagataattc

SEQ ID NO: 340510 - DNA, 201 bp, Homo sapiens
attgatttgacatgtcttattctttttgtctttatgttggcacctagtgattaacggagataaaaatctttgggacgtggagcagaaattgttcatgactygggccacgtccccttggctttcctctaactttttttaagctttgctagtttcctgtgttttcccaacatcctactataagtgttggtggttcctctactt

SEQ ID NO: 340511 - DNA, 201 bp, Homo sapiens
agaacaggggtcaagaaacattttctgtaaagggccacatagtgttttaggctttgtgagccataaggtctgtctcaactatttaactctgcctctgcagytgttgctccacagacaatacttgaaaataaatgggcatggttatgttctagtgaaattttatttacaaatccaggcagcctgcttggacaaaaaaaaaaa

SEQ ID NO: 340512 - DNA, 201 bp, Homo sapiens
tcccacccttttccagatcaaagaaaaggtgataagaggtagatacaaaaatgatggtctttttatttttctgaaagattttgtcacctcttagccaagaygattttgtgatattacaaaagaaatagcacattaaaactgtatgtttcatatgagttcagcttcagagaaaatattgtaggtattttcacactattattt

SEQ ID NO: 340513 - DNA, 201 bp, Homo sapiens
caatcctctcacctcagcttcctgagtagctgggactacaggaatgcgccactgagaccagttttcttttttttgaatttgtttgtagagatggggtttcrctttatttcccaggctgagagattctgtagttctaacaggtgatggtgatactgctggtttaaggactacatttaagttaactgttatagattagtgcat

SEQ ID NO: 340514 - DNA, 201 bp, Homo sapiens
ttgtaatgggagaaggtgcagctgtgctggtgctggaagaatatgaacatgctgttcaaagaagagcccggatctatgcagaagttttgggctatggactytcaggtgatgctggtcacataactgcccctgatcctgaaggagaaggtgccttaaggtaaagatgggttatttccttcgaaatatttcttcaaataagac

SEQ ID NO: 340515 - DNA, 201 bp, Homo sapiens
cactaaaggcacaggaatggaaaactgagaaaagatttattggcctcaccaattcctttggttttggtggtactaatgcaacactttgtattgctggactrtagaacatataatttgtaattaaatactgatttttaaatgctatatgtgaagaaattatgcatttatgtattgatacccagatatactttatgttagggt

SEQ ID NO: 340516 - DNA, 201 bp, Homo sapiens
actaaaggcacaggaatggaaaactgagaaaagatttattggcctcaccaattcctttggttttggtggtactaatgcaacactttgtattgctggactgyagaacatataatttgtaattaaatactgatttttaaatgctatatgtgaagaaattatgcatttatgtattgatacccagatatactttatgttagggtt

SEQ ID NO: 340517 - DNA, 201 bp, Homo sapiens
aagtcacaactgcaaagaaacttccttttctcgagcgggggtgggacttggccgggtcccgaggcccctggccggcgggctcggacgttaggagcagaacyagctccaggtcccggtctgtccgggcgtcgctgccctctgaagctcaggccggacgccccagtccctggccgaacaaggtgccgcggcccacccaccccg

SEQ ID NO: 340518 - DNA, 201 bp, Homo sapiens
tgtttaacaccatcctgattgcttcctaatctattccaatagcactctcttccccagttgtgacaaccaaaagtgtttccagatattgccaaatgttttckggggaacaaaataaccccacccctcctgcatcccgccacctatgagaaccatggatctatattttcctaatactttaggtcaaacaattttctataacat

SEQ ID NO: 340519 - DNA, 201 bp, Homo sapiens
aatgatggtctttttatttttctgaaagattttgtcacctcttagccaagacgattttgtgatattacaaaagaaatagcacattaaaactgtatgtttcwtatgagttcagcttcagagaaaatattgtaggtattttcacactattattttaaagacagcaatgaaaagagatcaagtttaggtacttactcatcaagt

SEQ ID NO: 340520 - DNA, 201 bp, Homo sapiens
ggcctccaaaaaggtctccggggtgttctggcagagctcagccacggccggggacgccgagcctgaggagctgcccaatgccgccgccgccatgcttgagygccagcgggcgccgccgccgcccctcgctctccgcgtcccacactgagcaggcgcctcagcgcgcagcagctaccgcagccaccggcaggggcggggtcc

SEQ ID NO: 340521 - DNA, 201 bp, Homo sapiens
aagaattaaataaaagaaatttaaaaatgcttaaaaattaagcataagaattttttttaaaaaattaaagatcattaaaaaatgattactttttttggatrtgtgcctagcagtaggattactggatcatatggtagttctatttttagtttttttgaggaaacttcatactctttttcttagtttacatactaatttgta

SEQ ID NO: 340522 - DNA, 201 bp, Homo sapiens
tttataaaacaattgctactagacctaagaaatgagatagacaacaacacaataatagtggagacttcaatactcactgacagcactagacaggtctgcaraattggcatagaagggacataccttaaggtaatcaaaactttgtatgacaaactcacagccaacagtacactgaacagggaaaagtagaaagcattcccc

SEQ ID NO: 340523 - DNA, 201 bp, Homo sapiens; identical to SEQ ID NO: 71705

SEQ ID NO: 340524 - DNA, 201 bp, Homo sapiens
ggaagtcctctctgaggagatgacatttgagctgtgacttgaaacatctcaggtacctgaaactctcaggtaagagtgtttcaggcagaaggattaatgtrtgtaaaggatttccagcagaagtaaccgtgaaacagaaataagctgcatagggaggcagagaccaggacacatggggtcttgaggaatgtggcaaaagac

SEQ ID NO: 340525 - DNA, 201 bp, Homo sapiens
ttctaaattttaaagcctcaaaataaagggttgcataaaattaaagagagggcaagtaggctcaagccttgatttgttgtgtgtgtgtgtgtgtgtgtttktttttttaactaaagaagtgaatttgctaatctaacttccattgattaattaccacgatttgacaaaattatacacattgtacttttttcttatgaagtc

SEQ ID NO: 340526 - DNA, 201 bp, Homo sapiens
tgtaagattcacttttcttcatgcctctctgcttccctccccaggttccatttcaggccctgaagtaacagtagtgaacaaagtagtagatataatcccayctcacatagagcttacattctagtaggttaaacagccagtagatgtgaaaacaagatgagtgcaaagaagaaaataagaccaggtaatagaataaaaagt

SEQ ID NO: 340527 - DNA, 201 bp, Homo sapiens
ggttctaaattttaaagcctcaaaataaagggttgcataaaattaaagagagggcaagtaggctcaagccttgatttgttgtgtgtgtgtgtgtgtgtgtktttttttttaactaaagaagtgaatttgctaatctaacttccattgattaattaccacgatttgacaaaattatacacattgtacttttttcttatgaag

SEQ ID NO: 340528 - DNA, 201 bp, Homo sapiens
ctacctgtctgtagtaggaaatgaaaagagtctgaagtaaacagaaaaactgagttgagctgccacacagaaggggtttcttctgtgacaggagaggagtytcagtatttttttttgtttttacttcaaatgaatattttggtgttatcttttggaatcttgtggtgtagtttaattttatgacacatcgaaagtagttat

SEQ ID NO: 340529 - DNA, 201 bp, Homo sapiens
gataaataataaaacgaactagttaattttaaaactaattttatctcataaaccaacaataaggcaacctcttagtcttagtctagatctgtgtgcgagcytttttttttttttttttttttttttttttttttttttttttttttttttttttttttgagacagagtttcactcttgttgcccaggctggagtgcaatgg

SEQ ID NO: 340530 - DNA, 201 bp, Homo sapiens
ggcttttagctaaaacctgatttgtgagcacacatgaatactaatagagtctagctacctgtctgtagtaggaaatgaaaagagtctgaagtaaacagaaraactgagttgagctgccacacagaaggggtttcttctgtgacaggagaggagtctcagtatttttttttgtttttacttcaaatgaatattttggtgtta

SEQ ID NO: 340531 - DNA, 201 bp, Homo sapiens
ctgccacctccatcagagtaggtactggtatctatggctgagacttgaagacagatcacatcacaggactctttgcagacactctctaataccagttcagrgcccagtagctctactggtttgctagacccagaagagcaataacaatcactgcagtccagctctcaggaagccccattcctagaggaagggaagagcacc

SEQ ID NO: 340532 - DNA, 201 bp, Homo sapiens
ttaatttatcattttgggaatcagtagaagtagttatttcttcattgattggacatttaaaaatcacaacaagtatagtttaaaatttcagtaaaatgtarcaacgctccacagagaaattcttacgagtctcagttctttaaaataagggtcatacatgcaacccaaggaccaaatgtggttcactttaggcttttagct

SEQ ID NO: 340533 - DNA, 201 bp, Homo sapiens
accaggaaaaccaaaagaattcacagaccctttgaaaaaagcagcttgctgctgcaaattccatgagacagaggaaaacctgtgagtgcccgaagtgtgayggggaaagtccactggggaacctgaaaatccagatcacgggagaagggtttaaccttacctagagctgaaattaatttagagagctgagtgaaatataaa

SEQ ID NO: 340534 - DNA, 201 bp, Homo sapiens
aattttgtgcccattaaccaatctctttctattgcccagtcccttctatccctccaagcctttggtaactgccattccactcttctttatttttttaaatytttatttaattttgtaatatctttttacaatcactcttttcttctatgggatcaattgttttagctcccacatatgagtgagaacatgtgttatttgtct

SEQ ID NO: 340535 - DNA, 201 bp, Homo sapiens
tgttcttgtcgtctcccccattgtctttaggcttccctaagaactcctcattagagtctgcatttatcctgcttggtgttcgtttagttgtaatccattgwtattatactggagccctattggtgtgatggtaaggtatcaaggagaaggttctataatcttttgattaaatctcagtattttagtgggcctatatctctg

SEQ ID NO: 340536 - DNA, 201 bp, Homo sapiens
ccagcttgggaaacagagcaagacccctctctcaaaaaaaaaaaaaaaaaaaaaaaaaaagaatgtatcttaaactgaagcgagaccccccccatctcaaraaaaaaaaatgtaccttaacagcacagaatgtaatttactgtttttacttatagtaaaaacaaccattggtttagggaagaaagaaaatcaggtgactat

SEQ ID NO: 340537 - DNA, 201 bp, Homo sapiens
aagaaatggtagtggtttgtataaagtccatgaaggcagggttttttgtcatttctgttccctgtgttgctagctcctggaataatgctggtgcattacaratgttaggtactcaataaagatttgttgaattaagtactgatggtggagatggagagaagtagatggatccaggatttctttttgtgacagaatcaacag

SEQ ID NO: 340538 - DNA, 201 bp, Homo sapiens
ttagattaatgggggtaaatggtagaagagtatgtgtttgtttatgatactgagagaaagaagacagaaacaagagccactaacaccctgaatctgagtgraaaaaacctcatactccaagtattttgttttgttttgttcactctacaagtatttttttttttctgttctctctacaacaatcaactcagacctctgacc

SEQ ID NO: 340539 - DNA, 201 bp, Homo sapiens
ttgaattttgtggaatcagctttgcagataaattttaaaaaggtaatgttttgaaattttcacttttttatcatagcgtttctggttaaactatcaactgyttaggaatgaataagtgacgtattctcttccgtttattttataggcttttacgttttattttattttattttaatttttcgagacagtctcaccctcttg

SEQ ID NO: 340540 - DNA, 201 bp, Homo sapiens
tccacttgtatcaaaaatcagttctgtaatataaatctaatacaataaaaatggataaaatttttatttgttgaattttgtggaatcagctttgcagatamattttaaaaaggtaatgttttgaaattttcacttttttatcatagcgtttctggttaaactatcaactgtttaggaatgaataagtgacgtattctcttc

SEQ ID NO: 340541 - DNA, 201 bp, Homo sapiens
tttatactagaagtgtctaagaatatttgtttccacttaatgaaagtattgaatttcttttatggactttgtgaatttttctagtgggtttcttaatgttmttactgatttatagaagttctttatgtatttagaaatttatctttttgagacagagttttgctgttgtcgcccagattggagtgcagtggcgcgatctcg

SEQ ID NO: 340542 - DNA, 201 bp, Homo sapiens
ggcgttgtccaaacttgagtggagcaattgacagttccacatctaggtttgtcaacaacaaataacagttggctatacatatctactctgagtagtttaaraacattttctttggagagtgattgttcagttgttacataatctctaactcactgattctaaaaattttcagattaaattaatgggcatacctggaagaaa

SEQ ID NO: 340543 - DNA, 201 bp, Homo sapiens
gaagtatctgttttcatcaaagaggatgaatttaattctttcatgggaaaaaataatcaaatgtatgatcaatccatatgactgatttttgcatgaacatrtatacatatatattctatttgatactgtatatataaatacattatattgtgaattaattccttcacagatgtgtattgattgcccattaaatacaggcta

SEQ ID NO: 340544 - DNA, 201 bp, Homo sapiens
tgactttactagcactcctgctaaagtaggatagcaacactcaccttttagagacctacacattacaaaaccgagcttacagaatgcacacaataaatttwaaaaaaattttttaaagccaacaggcaaaaatatgtctatcaaataactcacgatgttaggaacaatcaacagttgtaaaaaaaattttttttctctaca

SEQ ID NO: 340545 - DNA, 201 bp, Homo sapiens
ttccttgaaatacagctgctttgctgggtatctgtgggaatgacggacttcagggtgcttgctgtatggtgaactgaacttgagtgaatcttagcagcctmagtagaacaataattttaagagtgtattaaagaagagcttcaaacaatatagtccaaactgaacctctagggagccatagcagcctgacatgtagtaatc

SEQ ID NO: 340546 - DNA, 201 bp, Homo sapiens
taaattggaagtatacatggaaatcttaaaaattcttatccaaattctacaaatggaataaattggaagtatacacagaaatatttacagtgggaactacragtggattcatgtttgattttcaacataaaatggaataaccaaaaacaagactcattgcaagtaccggtttaccagcaacaatttgagattccttgaaat

SEQ ID NO: 340547 - DNA, 201 bp, Homo sapiens
ttgtaccatatacctctctttcatgacatgtattcaacaaatagaaatgaaaataaattatttgtctctctctaataatgtttacattagattgtaaacarttcttagggagagaccttgtctttttctactcacttttgtactctcagtattcatatatctggcatagtacccgatacatagtaagtgtttagtaaagat

SEQ ID NO: 340548 - DNA, 201 bp, Homo sapiens
aaacacaccaaaataaacttaaagctattcacatgacctcagtagatctgatcatattcttgatagattttcataggaattaattaacttataggaagctyttaaagttaatttaccaagatacttgagtgggaacttgttcacttgtaaaatatattggatagattaaaaaagtgagtcacatataaacagctgctagtg

SEQ ID NO: 340549 - DNA, 201 bp, Homo sapiens
tcagctccaagaaagcaagttgtggggagattagagtatatttttagtttccatagcctgccttagaaataataaaggctatgggagttatgagccaggarccatgaatgaaaatctggaggtatatatacacatatcataatatcacactgagtcagagaaggccttgcagaagaagtaatatctgagttggcttttgga

SEQ ID NO: 340550 - DNA, 201 bp, Homo sapiens
gctttgtaacaggcattagggcagtataatagactgtcctttgcccttagggagctaaagttgagtcactggagagcatttaataaaatgtttaggaaatwtgcaatgaaaaatgcttgaaagaaaaataactcatcacaatatcagtatcaagcagttccaaacaaattaaagttgtatttatctactttttctaaattt

SEQ ID NO: 340551 - DNA, 201 bp, Homo sapiens; identical to SEQ ID NO: 71712

SEQ ID NO: 340552 - DNA, 201 bp, Homo sapiens
ttcatatatctggcatagtacccgatacatagtaagtgtttagtaaagattggtgaatgtaaaaatgtacgtggcataaattctgcatcaccctagggctrtgtagagcactgtaagaacctcactttgttgagtgtcctttggatggtcttagatactttttggttttgatgagttttatccctctctttgtcactacag

SEQ ID NO: 340553 - DNA, 201 bp, Homo sapiens
gtaattattttaaaatgcaaacatttgaagagaaccagtaattgatttacatagcattatcgtgtaagagttagcaaagcatttttaaaatgggacttaamattttttttaccttatgtaaatttttagtgcagtgtaacttttactgaagaatatacaggaaaatgcacaaattataaatgtacagcttaatgaatgttt

SEQ ID NO: 340554 - DNA, 201 bp, Homo sapiens
ttatatatggataaaaacatgtaataatgtaccatagaaatcttcattgctatagggattactgtaaaaaatttagtaaactataaacttaaagcacagtrtacagaaataataaaagtcatgtgatatttgtgttgtccctatttagaaataacttgtgtggtctacatgttaaaaagttgttttccttgtgtttccatt

SEQ ID NO: 340555 - DNA, 201 bp, Homo sapiens
acaaggaaactccactgagaaaaggccccacatgttaatggtgctgagactgagaaaccctaatctaatacacagaataaagagttgagaataaaattttytttgtatttcacaaccatctgtgattctcaaattacatatagtaaagaacaatgtttttgttttaatttccaatcccttatggacctataacttttgtaa

SEQ ID NO: 340556 - DNA, 201 bp, Homo sapiens
gctttcatcatacaggaatctacttttatttctctgagcccctagttaaggatattgtttaaatgaggaacattgacccttaattgggtgttactgtttartagtcctactttcagctggattatacctggagtatgtaacagaagtacaaatactctgttttcctttcctttcttcttggtcttgataatgactatttgg

SEQ ID NO: 340557 - DNA, 201 bp, Homo sapiens
tgtaggattattttatagttcagttttcttaagtgataagaaagagaggctcacttgtgagacagtgtagcatggaagccaggaatgcgaatgttctgcartgcacaaggaaactccactgagaaaaggccccacatgttaatggtgctgagactgagaaaccctaatctaatacacagaataaagagttgagaataaaat

SEQ ID NO: 340558 - DNA, 201 bp, Homo sapiens
ttataagaatttttaaacaattgtgaaagcaggaagaaactagaaaattagcccagagaaagacccagcatgtagagatctgaaagctgtgaggaaaagartagattaaaatagctcaagcagttttgaaccagtaggatatatcatcctggtggtactgacatgtttatcaccctgtgaaatacattgagtgtcaggaaa

SEQ ID NO: 340559 - DNA, 201 bp, Homo sapiens
ttccagatacaggtaaaacatctttttggaggaggaagaacccatttttgaaaagtggtaacaaaatatatcttggcctactaaattgtatgtgaagatakgagatggagaacatggatgaggctacctctactgatgtttttacccattttctcattctcttgtatattgaagtggttttcagagaatggagttaggtct

SEQ ID NO: 340560 - DNA, 201 bp, Homo sapiens; identical to SEQ ID NO: 71707

SEQ ID NO: 340561 - DNA, 201 bp, Homo sapiens
atgtgttatgatttattcctgaatttatgccccatattttgttcttagttcttataactctaaaacatccaaatttcttcagctctttaaaaaattgtcaratttcctctactgcattaatacttctgatctaaattgtacctgctgcctttcactgtgggggttatttccaacagcacaaccattatcaataccttaatt

SEQ ID NO: 340562 - DNA, 201 bp, Homo sapiens
attcaaatatttattaagcatctagtgtatagcaagcagaacactaagtgttggggatatagcagtgaacaaaactaagtacctaccattatgggaaagasacacacacacacactagtgaaaagtgctaggaagaccaatgggagaacagagtgagtgacgactagtaagatgctgtttgatacaagattttcagggatg

SEQ ID NO: 340563 - DNA, 201 bp, Homo sapiens
tctagccaggcgtggtggcttatgcctgtaatcccagcactttgggaggctgaggcgggcggatcacaaggtcaggagttcgagaccagcctggccaatakggtgaaaccccatctctactaaaaatacaaaaataagctgggcatggtggtggcacctgtgctcccagctactcagaaagctgagggaggagaatcactt

SEQ ID NO: 340564 - DNA, 201 bp, Homo sapiens
ggccaacatggtgaaaccccgtctgtactaaaaatgcaaaaattagccgggctaatttgcagttgcagatgcccataatcccagctactcgggagtctgargcaggagaatcgcttgaaaccggaaggcggaggttgcagtgagtagagattgcaccactgcactgcagcctgggcaaaagagcgaaactccgtctcaaaa

SEQ ID NO: 340565 - DNA, 201 bp, Homo sapiens
gactttatctcacaggggtccttggggagggctgccagtggaattggggaaagaccacagggagaatgaaacttgcagctgaacacgaattttcctggacyggggtgtgtaggggaggtggcaaatgggaaatgcagatactgcagatacaagcacagaagccaaggcagacggagaggggtgaagcctgaaaaccctgat

SEQ ID NO: 340566 - DNA, 201 bp, Homo sapiens
caccagccactttctgacctgttgtattgtttgatcactaatctgacctgttgtattgtttgatcacattctgccatatatttaaattatttgtgttcatycctttcctcaggattgtgaacaccttgaaagcagtactaccgtttaattatttttcaccaaatgttctaacattgtgcctcatatattctagatttctaa

SEQ ID NO: 340567 - DNA, 201 bp, Homo sapiens
tttagtgttcttgaattgtctggtaattttataattggagtaacttctgaaaagaatgttacaaatagatcccaaaaaacaacttccaaattagcaggcayctttaaatacttcaaaagagtaaaattttaatcaaaatgattattagaaagaaagataatattttagataaaattgaattaaactaagctaaaatttttg

SEQ ID NO: 340568 - DNA, 201 bp, Homo sapiens
ttaaacctcttctttataaattacccagttgcaggtatttcatcatagcagcataagaacaaactggtacatctaggttgtaacatattgcagaatttccytcttttttttttttttggcagtttttacagttttatttaaacacaaaacatgcacatgagctgtctactcattttcttcgctgtgcagcctggcattggg

SEQ ID NO: 340569 - DNA, 201 bp, Homo sapiens; identical to SEQ ID NO: 71703

SEQ ID NO: 340570 - DNA, 201 bp, Homo sapiens
ctaataggatgattttttaaatgtctggaattctgtgatttctgccttttgtgattgtttcatgtttacttgtgtatatacctgataacaaattcaatgtwtcccatttttaaatgtttttcaaaatcaaatttatttttctacctcccttgtacttcaggatcaattcctaactgactatagttccctaagaggtcattg

SEQ ID NO: 340571 - DNA, 201 bp, Homo sapiens; identical to SEQ ID NO: 71708

SEQ ID NO: 340572 - DNA, 201 bp, Homo sapiens
ttagtagagacgaagtttcaccatgttggccaggctggtctcgaactcctgacctcagatgatctgcctaccttggcctcccaaagtgctgggattagagstgtgagccgccacacctggctagcttgtcaaattttatgaaaaaatattttataattttaattgggattatattaaattatagattaatttgtggaaggt

SEQ ID NO: 340573 - DNA, 201 bp, Homo sapiens; identical to SEQ ID NO: 71709

SEQ ID NO: 340574 - DNA, 201 bp, Homo sapiens
catgatcttggctcactgcaacctctgcatcccaggttcaggtgattctcccgcctcagcctcccaagtagctgggatcacaggcacctaccaccaaacccagaaaatttttgtagtttttagtagagacgaagtttcaccatgttggccaggctggtctcgaactcctgacctcagatgatctgcctaccttggcctccc

SEQ ID NO: 340575 - DNA, 201 bp, Homo sapiens
ggctatcttttttgaaagaacagttgacattttttatgtaatcgagaatagccgtttattagcctattgaaattcttaaagtagtagcattgttttataarcaagaatattttaatattctttttgaatattaaagaataaaaatattctttttgttcattgaaaattttgcggactcattttaaatattatgagttattt

SEQ ID NO: 340576 - DNA, 201 bp, Homo sapiens
ttaaagaataaaaatattctttttgttcattgaaaattttgcggactcattttaaatattatgagttattttggattaaactgtctcatttcaaagttctwtgaaacaaaatttcagtattggtagtacctgacaaaaaatgtgttgtcttatttatcagtgtaactgtgccttggatatgacacagactcatatttatgt

SEQ ID NO: 340577 - DNA, 201 bp, Homo sapiens
gcacatttcagctactcaataaccacaagttagtgacaaccctactggacagtaggaataggaattatttccattattgctgaaaattctattggatggcratattttagaaacagcaggatatgggaagaggaagagtaacaagtgaaggaaacttatatagtgaaataagtggtatggtaggcataatgagtatatcaa

SEQ ID NO: 340578 - DNA, 201 bp, Homo sapiens
aaatattttataaaatattaatgttattttggactagaatgcaaagattgcctgggattttaaggttaaaatacaagcttttgtaataattttacacatgmagaagactgtttcatgctatacctctcagctgctctcctagcttagggaactaggaaaggacactgaggaaatggttgaggactcaggatgagaaagaat

SEQ ID NO: 340579 - DNA, 201 bp, Homo sapiens
aagggaaaggaagagtgagttgaggtgcctactatctggactgccaagtgaaaacataggcctggaaattcgataagaagtcaagccttgaaatacacttyaggatgataggtaaagccatgcaggtaaatgagattgctaaaattgagaggacagggtggagaggtaggattacagaggttctagaaaacagtgtagcac

SEQ ID NO: 340580 - DNA, 201 bp, Homo sapiens
ctgtactaaaaatgcaaaaattagccgggctaatttgcagttgcagatgcccataatcccagctactcgggagtctgaggcaggagaatcgcttgaaaccrgaaggcggaggttgcagtgagtagagattgcaccactgcactgcagcctgggcaaaagagcgaaactccgtctcaaaaaataaaaaataaaaccattatg

SEQ ID NO: 340581 - DNA, 201 bp, Homo sapiens
aactggtccccttccttatacaaaaattaactcaagatggattaaagacctaaaacactttactttttttgttttgttttgttttgtttgtttgtttgtttttgagaccgagtctcattctgtcacccaggctggagtgcagtggcacaatcttggctcactgcaagctctgcctcccgggttcactccattttcctgcct

SEQ ID NO: 340582 - DNA, 201 bp, Homo sapiens
tccaagaaaagtcactgatttcagttgagctttttattgttttaaaggtgagagtattgacctctgcttgctagaaactggaagatgaaaccagaaatccmtctgaaggcttaactatatgtgtctcttccttttttaaccatttgaccaattttcacaaatgtcatttatatattttgctaccctttgtattttggtaat

SEQ ID NO: 340583 - DNA, 201 bp, Homo sapiens
aaactggtccccttccttatacaaaaattaactcaagatggattaaagacctaaaacactttactttttttgttttgttttgttttgtttgtttgtttgtttttgagaccgagtctcattctgtcacccaggctggagtgcagtggcacaatcttggctcactgcaagctctgcctcccgggttcactccattttcctgcc

SEQ ID NO: 340584 - DNA, 201 bp, Homo sapiens
gtaacatattgcagaatttccttcttttttttttttttggcagtttttacagttttatttaaacacaaaacatgcacatgagctgtctactcattttcttygctgtgcagcctggcattggggttggtgactctgatggccagctgggtggctctttccatgatggctttgcagttcttggaggaaacattgtgagcaatc

SEQ ID NO: 340585 - DNA, 201 bp, Homo sapiens
gaaactggtccccttccttatacaaaaattaactcaagatggattaaagacctaaaacactttactttttttgttttgttttgttttgtttgtttgtttgtttttgagaccgagtctcattctgtcacccaggctggagtgcagtggcacaatcttggctcactgcaagctctgcctcccgggttcactccattttcctgc

SEQ ID NO: 340586 - DNA, 201 bp, Homo sapiens
tgaaactggtccccttccttatacaaaaattaactcaagatggattaaagacctaaaacactttactttttttgttttgttttgttttgtttgtttgtttgtttttgagaccgagtctcattctgtcacccaggctggagtgcagtggcacaatcttggctcactgcaagctctgcctcccgggttcactccattttcctg

SEQ ID NO: 340587 - DNA, 201 bp, Homo sapiens
ctcagcctcctgaatagctgggactacaggcgcctgccaccacgcccagctaatattttgtatttttagtagaggcagggtttcactgtgttaggatggtytcgatctcctgacctcgtgatccacctgcctcagcctcccaaagtgctgggattacaggcgtgagccaccgtgcccagcctaattgtggaggatttttaa

SEQ ID NO: 340588 - DNA, 201 bp, Homo sapiens
acagcacgcctggctaattttgtatttttagtagagatgggatttctccatgttggtcaggttggtctcgaactcttgacctcaggcgatccgcccgcctyggcctcccaaagtattgggattacaggcgtgagccgccgtgcccagcctggaaagttttaagtagggaaaaatatttttgaagattattctagcttgctg

SEQ ID NO: 340589 - DNA, 201 bp, Homo sapiens
attaatatgtcttgaatataagaacgttttctggaactctcagactcaaaattttaacctatagtggccaagtacttaagattggaagaacttgacacttacctgtcttgtggtgtctgctattggcacagtgagtattttgatgatcatatgggctaatcctgttaaccagcatgaaaaaacctagaacttttcaagcag

SEQ ID NO: 340590 - DNA, 201 bp, Homo sapiens
aatatatatttaccactctgaagactaattgtacttatttgagatgtagctctttttcgtacctaagagttattaatactatttcagtaaaaaaaaaaaaatttaataaaccctgtgtgatcccattgtaacagaaaggctgatgttttctgttgtgaaatacaaatgcaaggaaaaaatcatttctttgtttcaaaggat

SEQ ID NO: 340591 - DNA, 201 bp, Homo sapiens
tcgctcttgttgcccaggctggagtgcggtgatgcaatctcggcttaccacaaccttcgcctcctggattcaagcgattctcctgcctcagcctcctgagwagctgggattaaaggcatacgacagcacgcctggctaattttgtatttttagtagagatgggatttctccatgttggtcaggttggtctcgaactcttga

SEQ ID NO: 340592 - DNA, 201 bp, Homo sapiens; identical to SEQ ID NO: 71701

SEQ ID NO: 340593 - DNA, 201 bp, Homo sapiens
ttttttgaggaaccaccatactgttttccacagtgactgtatcattttatattcctgctaacagtgcacaagtgttctaatttcccctgtttttaccaacrcttattattttctgatttttcaatagtagccatgctaatggggatgaagcggtatgtcactgtagttttgatttgcattttcctaattcatgatattgag

SEQ ID NO: 340594 - DNA, 201 bp, Homo sapiens
gatttgagagtgatatactttctgtattgttacatatcagaaaatatatttattttgcccctgtacatgattagtttaactgggaatgaattctgtgttcytaatcatttcccctcagattttcaaaaaaaattgcttcattgtttccaatgaaatatctgacatcaaataattttttctttgcgtgtaatgtttcttctt

SEQ ID NO: 340595 - DNA, 201 bp, Homo sapiens
tcatcattcaaatatttattaagcatctagtgtatagcaagcagaacactaagtgttggggatatagcagtgaacaaaactaagtacctaccattatgggraagagacacacacacacactagtgaaaagtgctaggaagaccaatgggagaacagagtgagtgacgactagtaagatgctgtttgatacaagattttcag

SEQ ID NO: 340596 - DNA, 201 bp, Homo sapiens
gattatctataccaatcgaaacttgtactggtgcttttatttagatcctactcccaagtatgtatttatttttaaaaatttatgtaagctatattttttttggctataataactttcctaataattcttttagataggatttgagagtgatatactttctgtattgttacatatcagaaaatatatttattttgcccctgt

SEQ ID NO: 340597 - DNA, 201 bp, Homo sapiens
acagggatttaaagtggaaggggccattagatgcatagatcagagctctgtattgatccatgcttgtattcaagaattccgcatatccttatttaaatatrtccttaatagtatatacaaaaggaaaaaaatagatagatcttaggctctgacacaaatgtggctgtctcctaatactaatgttatgaagtttatgggtat

SEQ ID NO: 340598 - DNA, 201 bp, Homo sapiens
attggtagtctttaacttagttggtcatttcatggtttttctcctgctgcaagtggttcaagtgctgacccagttgctcgtatcaaaaaaaaaaaaaaaaagcacgagtcatctctaatgtgttcttttccttttccaaatactcttgacttcatagtacagtcaccaaaacttattgattttatttcctaagttcttttc

SEQ ID NO: 340599 - DNA, 201 bp, Homo sapiens
tgttcctttttattgttgaataatattccattttaaggatatgccacatattgtttccattcatcagttgatggacatttgggttgtttcccatgtttgcctattatgaataatgctgctgtgaacattcacatacaaatttttgtgtagacatatgtttttatttctcttgagtagattcctaggagtggaaccactggg

SEQ ID NO: 340600 - DNA, 201 bp, Homo sapiens
tctagctctttgtgtaacatttttgaagttcttcgtattgcaggatatatcagtattttgttcctttttattgttgaataatattccattttaaggatatrccacatattgtttccattcatcagttgatggacatttgggttgtttcccatgtttgcctattatgaataatgctgctgtgaacattcacatacaaatttt

SEQ ID NO: 340601 - DNA, 201 bp, Homo sapiens
ttcaaggcttcagtgagctatgattgcaccactgcattccagcctgggtgacagagtgagaccctgtgtctaaaataatacacttgaaaataaaaatatgrtcagagcaattggaattgtacaacagtagtcaattgcattaagataagtgtaaagttcaaactgtagtagtaagtgcagtattagtgaggaaggggtttc

SEQ ID NO: 340602 - DNA, 201 bp, Homo sapiens
agagacggggtttctccatgtgtgccaggctggtctcaaaactcctgacctcaagtgatccacctgccttggcctcccaaagtgctggattacagatgtgmaccaccacacccagccctttttttaagttcttaatcttacaattcagatatagttccaggtctttaaaatcctgtccgtcaccagaaagcctctaaacac

SEQ ID NO: 340603 - DNA, 201 bp, Homo sapiens
tctgcctccctagttcaagcaatattcatgtatcagcctcccgagtagctgggattacaagtgtgcactaacatgcccggctaattttggtatttttagtrgagatggggttccaccatgttggctaggctggtcttgaacacctaacctcaagtgatccgactgcctcagcctcccaaagtgctgggattaccggtgtga

SEQ ID NO: 340604 - DNA, 201 bp, Homo sapiens
ttccatttgataggaaattatcctgtttacaaaaatctcttttgaccaaggtccttacatattcttctcctaagtttttactgtcagaaaaattcttgtgwtatttctgtaagtctaacaagcacctcaatggatttttatgcccctccctgagatcatgtgcattccattttgaataccttaggtcttcatcagttttgc

SEQ ID NO: 340605 - DNA, 201 bp, Homo sapiens
tatatggtactttcaactatttgcccctgagctagagtatgagttagatgtttctaaaaagatcaagtctaacatgaatatatatatatatatatgtgtgkatacagatctttaataatatttactaaatgtttttatttttatttttttttttagacagagtctcgctctgtcacccgggctggagtgcagtggcaccat

SEQ ID NO: 340606 - DNA, 201 bp, Homo sapiens
actctctaataccagttcagagcccagtagctctactggtttgctagacccagaagagcaataacaatcactgcagtccagctctcaggaagccccattcmtagaggaagggaagagcaccacatcaagggagcaccccatggggccaaagaatctgaacagcagcccttgagcccctgatccttcctctgacatagtcta

SEQ ID NO: 340607 - DNA, 201 bp, Homo sapiens
aaaattgtcaaatttcctctactgcattaatacttctgatctaaattgtacctgctgcctttcactgtgggggttatttccaacagcacaaccattatcartaccttaattcaataaaaaagcttctttaggtttaaggtaattaagaatgcattaatttaatgatagtggatgctagcaaattagtgaaattttattatt

SEQ ID NO: 340608 - DNA, 201 bp, Homo sapiens
gtgttttatatggtactttcaactatttgcccctgagctagagtatgagttagatgtttctaaaaagatcaagtctaacatgaatatatatatatatatawgtgtgtatacagatctttaataatatttactaaatgtttttatttttatttttttttttagacagagtctcgctctgtcacccgggctggagtgcagtgg

SEQ ID NO: 340609 - DNA, 201 bp, Homo sapiens
atactgtctgtgtcaagaatatgtcttgggccaggtgcggtggctcacgcctgtaatccccagcactttgggaggctgaggcgggtggatcacctgaggtygagagttcgagaccagcctggtcgacatggtgaaaccctgtctctacttaaaaaatgcaaaattagccaggagtggtggtgcacccctgtaatcctagct

SEQ ID NO: 340610 - DNA, 201 bp, Homo sapiens
gtaatttactgttttacattatagaatttgttgtagcattttattttaaagcattcttagcatatttataggtattctttaaatgagtcactactgaaatrcatgatttttatttcttttgttttgttcggattaccttcctattactgttaaccatccatagttttggattgactatcagggtgtacttttcgttatcgt

SEQ ID NO: 340611 - DNA, 201 bp, Homo sapiens
agaatcacttgaacctgggaggcggaggttgcagtgagccgagattgcgccactgcactccagcctgggtgacagagcaagactccgtctcaaaaaaaaaraaaaaattaaacatttctgtttagcatagaggtaatgtaaattctcttaaaaatcttgattttgataattaaggttttttttctttttaaaccagatata

SEQ ID NO: 340612 - DNA, 201 bp, Homo sapiens
atcattcaaatatttattaagcatctagtgtatagcaagcagaacactaagtgttggggatatagcagtgaacaaaactaagtacctaccattatgggaaagagacacacacacacactagtgaaaagtgctaggaagaccaatgggagaacagagtgagtgacgactagtaagatgctgtttgatacaagattttcaggg

SEQ ID NO: 340613 - DNA, 201 bp, Homo sapiens
cagaaaccatattcagaattaatccatatgaatagaccattgactcacttttatgagtagagagacattatttattgattaagagtaggttttggagtcarctgtctttgtgtaaattcagctctgctacttcctgtgcatcactgagcaagtaatttaatctctatgactcagtttcttcatgtagaaataagaatgata

SEQ ID NO: 340614 - DNA, 201 bp, Homo sapiens
ctaaattttaaagcctcaaaataaagggttgcataaaattaaagagagggcaagtaggctcaagccttgatttgttgtgtgtgtgtgtgtgtgtgtttttktttttaactaaagaagtgaatttgctaatctaacttccattgattaattaccacgatttgacaaaattatacacattgtacttttttcttatgaagtctt

SEQ ID NO: 340615 - DNA, 201 bp, Homo sapiens
aattaaagagtagttgcatttaaaaggattcttcattttcagcaggattagtcataaaactcattttaaagagttgaacttcttaatataaaagaagatgwtttaccaaaatttggttagaatgcagtcctttagaattgcactttttggggacatctgcattcaaataatacctgtcttctagggtaaaagatgccatgg

SEQ ID NO: 340616 - DNA, 201 bp, Homo sapiens
aatgctgttttacgtttttcctctccagatgaaaactttatggagtggagaaaatacagaatttggggaattcagctgatgaaagtgtttatttcttggtrtatgcttgcatatatctgatattggctagaaattgttggtggcatgattactgttatattaaaatttattttaagataccacatgattaatcttccaaaa

SEQ ID NO: 340617 - DNA, 201 bp, Homo sapiens
aatacattgtcatttcatttcaccttttttcttgttttgagtaatttactgttttacattatagaatttgttgtagcattttattttaaagcattcttagyatatttataggtattctttaaatgagtcactactgaaatacatgatttttatttcttttgttttgttcggattaccttcctattactgttaaccatccat

SEQ ID NO: 340618 - DNA, 201 bp, Homo sapiens
agaattctttttgatttctttttttttttttttgagacggagtctagttctatcgcccaggctggagtgcagtagcatgatctcggctcactgcaacctcygcctcctgggttcaagcgattctcctgcctcagcctcccgagtagttgggattatagttgcctgccactgcgcccagccaatttttgtatttttagtaga

SEQ ID NO: 340619 - DNA, 201 bp, Homo sapiens
actagtaagaactgggattcaaagtagatctctctgactccaaagtcttgctttgttcgtattattttactctgctccctgtattataaaaaaaaaaaaaagcattaattttccattatttatgaaaagtaatgtttttattttttcaactatttaatactgtttctaataattattgatgtcttacattaaaactgactt

SEQ ID NO: 340620 - DNA, 201 bp, Homo sapiens
tgtacaaaatacccattttaattacactactatatatactaaatcttaattgtatttttctttaaatggaagaaaatctaaatatactctggaatcttcarttggtgattggtaatgcagttagtggaacagttttgcaacagccttgccgtatggtggtaaattaacgaagttcctttaaaatcatttttactaaacctt

SEQ ID NO: 340621 - DNA, 201 bp, Homo sapiens
tattgccattttgattatttttttatatgtcttatagcttttttgtccatctttcttcccttgctgccttcttttgtgtttcattgattttttttttttttagtgacatgttttgattttcttctaatttctctttgtgtatattctacagatattttccttgactttaccttgccattacataacatatcttcaggtgat

SEQ ID NO: 340622 - DNA, 201 bp, Homo sapiens
gggaggatcacttgagcctgggaggttgaggctgcagtgagccattgtcatgccactgcactccagtgtgggcaacaaaatgagaccctctcttaaaaaamaaaagtgctattgaattgagtttgccagtatttttggggggattttttgcatcagtctttatcacgggtattgttctgtagtcctcttgttctgtcttct

SEQ ID NO: 340623 - DNA, 201 bp, Homo sapiens
tcatagcagaagtctaagcatttgttactgtcttaagtatctcttatctcttccttgcccctttgtttagaagggtatttctgaaggagcatagacaggggacagtttgttgctttttgcttcattaatggtgggtagataacatggcctctccatttacatataggtgaaatatggttagaatgaacatcatgggatggc

SEQ ID NO: 340624 - DNA, 201 bp, Homo sapiens
attttcatagcagaagtctaagcatttgttactgtcttaagtatctcttatctcttccttgcccctttgtttagaagggtatttctgaaggagcatagacaggggacagtttgttgctttttgcttcattaatggtgggtagataacatggcctctccatttacatataggtgaaatatggttagaatgaacatcatggga

SEQ ID NO: 340625 - DNA, 201 bp, Homo sapiens
actcatcttttatactctgataagacagaataaggagacatctgggatatacctgtctttttctactaaccttttactttcatacaaaaagctaaggagtrtatttccttttcagaatatgtgtacttagtatagcataatgctaagagtatgggctgtgaaatcagatcatctagtttcataattcacctttgtcaagta

SEQ ID NO: 340626 - DNA, 201 bp, Homo sapiens
ttaacagtgacatttaaaaaccttaagactgatagtacattgactttatgttagaactgctggaagtttaacttggctgacagtttgagttttgatttagrtaggactggtatgatgtctatgtatataaatttgttattacatagcactgtgtcttttggtattaagttacttttaaactgttttccttgagaaggtcag

SEQ ID NO: 340627 - DNA, 201 bp, Homo sapiens
tacattgactttatgttagaactgctggaagtttaacttggctgacagtttgagttttgatttagataggactggtatgatgtctatgtatataaatttgytattacatagcactgtgtcttttggtattaagttacttttaaactgttttccttgagaaggtcaggattgaaaatctagactctgtaaatagagttgaaa

SEQ ID NO: 340628 - DNA, 201 bp, Homo sapiens
tttttttttttttttttttttttttttttttttacagtgaatctaacattataagcatttggaataatgggaaaggcattccagtagtagaacacaaggtrgagaaagtttatgttcctgctttaatttttggacagcttttaacatccagtaactatgatgatgatgagaaaaaagttacaggtaaagtctgaatggaat

SEQ ID NO: 340629 - DNA, 201 bp, Homo sapiens
taattatgatgtgtcttggtgtagttttctttagatttatccttggagttctttgagcttctttaatttgtatatgcatttatgtcctcagatttggaaarttttcagctattatttcttcaaataggctctttctccatttctccctttcttctcctttgaggcttacataatgtatatgttgttctgatagatagtggc

SEQ ID NO: 340630 - DNA, 201 bp, Homo sapiens
tcatttgtataatggctgtatgagacaaggccatattgactactttcctcagtgtttttgattaattattaagtatatcaataagtacattagtttatgcyctcctaacatgcacagtattatgtggtagcctcctggaaagtgtaagacagacattaacactaccagataactaaggccaaagttgttggcttttattct

SEQ ID NO: 340631 - DNA, 201 bp, Homo sapiens
gttatatatatgttacattatttgatactgtctgcagttcttgcatgctttgtctattttattcactctacttccactttttgtattggtttaatttctatcccctctcttcaagtttagtcatttgcagtctctgcatcaagtttcctgaagagcctgtcaaagacattcctcatgccttctatgttttttgtttttaac

SEQ ID NO: 340632 - DNA, 201 bp, Homo sapiens
tgagccagactttcataaactatgtgccctttccaatgaaatttatttattatagtctccatagttagatttatctcttcactgtcccctacacaagttakgcttgtttttgtcactttgtctttacatatttgccttccatctggaattactttttcacttctctttactagtctaaatcttaactgttcttcagggcta

SEQ ID NO: 340633 - DNA, 201 bp, Homo sapiens
gcacaagtaaatgtgaaagcgagagaaaggggacaaatgcgtatacacagaatatatgggggaggaaaaacttgaacatttttaaacttagcaatagaatrtgtatgttttcagtttggggaaaaatcatttttgtaggtggttttatggttactttaagagccctttttttaaggcctatttttgtctttcaatattatt

SEQ ID NO: 340634 - DNA, 201 bp, Homo sapiens
cttattttaaggaataattctggtaaatgcaaaatctaggatattaatcatgattatatcctaatttatcattacatagacctgcctgagttcaatctaaytatattggcacttttaacttctcatactttctgactttaatttacatttaggaggttttttttcatattttctattacgactaaagcaatagaaaaaaat

SEQ ID NO: 340635 - DNA, 201 bp, Homo sapiens
cctttgccgccctcaattgacccttgaagcagcccctgctctcccttcaaatggaaaacccacagacacacacacaaacaaaaaccccaagtcttcctttsggttgctacccgcaatgacgtttcccccctcgggtcccgcccctccagggggcttggaattttgggattggccgagaggctgtggcgacaaggcccggat

SEQ ID NO: 340636 - DNA, 201 bp, Homo sapiens
atagtaatgggctagatccaggactcttaggctagaactttttttctcacctaagaaataactgtattcagggccacacaaggaacagcaccagttctccrtggcatcccctctttaactccagaatctggaaagcccttgaagatgttttgtaaaatatgtttgtaagacatgatatgagggtagctcatgctgtgaggg

SEQ ID NO: 340637 - DNA, 201 bp, Homo sapiens
aagaaataactgtattcagggccacacaaggaacagcaccagttctccatggcatcccctctttaactccagaatctggaaagcccttgaagatgttttgkaaaatatgtttgtaagacatgatatgagggtagctcatgctgtgagggtagctgctctaccttttattcaactgaaggatatcttcctcagtgtgtttct

SEQ ID NO: 340638 - DNA, 201 bp, Homo sapiens
gatccagttgatccagttttctctgctgtccatttttgtatcctttgagttgcattctttttaacatttttgtatagcagatttttatttttgtacatttktgcacataaacttcttgtgtggaggagaggttaaattttaatagctaatggacaaagtatataggatatatagtacaacctagctcttattctttctttt

SEQ ID NO: 340639 - DNA, 201 bp, Homo sapiens; identical to SEQ ID NO: 71741

SEQ ID NO: 340640 - DNA, 201 bp, Homo sapiens
attcaggaactccttcaggcccagattttaattatattttaaatatgtctctgtggtctcttactaaagaaaaagttgaagaactgattaaacagagagaygcaaaagtatgaacttttgtgggttaaatagtttgaaactatttcagtgttatctgtatctttttctttttccaaaaataagtattttgatttatccttc

SEQ ID NO: 340641 - DNA, 201 bp, Homo sapiens
caattaaaggtaaagttggcaaacctaaggtgaagaaactccagttggaagagacaatgccctcaccttatggcagaagaataattcctgaaattacagcyatgaaggcagatgccagcaaaaagttgctgaagaagaagaaggtatgacatacctcttgtcattgatagactcatttctataatgaaatatatgtataat

SEQ ID NO: 340642 - DNA, 201 bp, Homo sapiens
tgagaaactggttatttacaagagtctctgtagccaacacactgggtgacctacccatgtcccttaccacttagtgcatattgggcaatatctgcctttckttgcctgaggacttcctctttgccactgtgctggaatattaacacccccctgctcccagctgcctttaactagcagattgaggaaagttggtctataaat

SEQ ID NO: 340643 - DNA, 201 bp, Homo sapiens
tcattttttaatgttatttactatagtttaatttcatgtactttaagccatccttatgatacatattaaaattcttactttaaatcttgtatatgaagagyttattcagaggaatttaaggcctttttgattttgcttttgttttatgttttcatagtgctgaaatctttaatattccttaatttgaaacttttaaacctt

SEQ ID NO: 340644 - DNA, 201 bp, Homo sapiens
tagaaccttgggtaaattgcagtgatgcctgtataacttcattttttttttccaaagcattatccaagtcaaatcatcagagtaaagagacatcagaatgyctgggagatttaatataagcctattcctctatcattcctttcaaacaaagtgctttatttaacagactttatttaacttagttaagtattagtgaaaatg

SEQ ID NO: 340645 - DNA, 201 bp, Homo sapiens
tagatttcaggctccttgatggcatgctggcaatttagttagctacaaatggcgttttggttgtttgagtgtttggaaactactgttaaaggagtttggtrccactaggtgattctttaaggccagaatgttgtctttcaattggcagttcacttttggagtagatggagatggcataaaaacatcttagtatatacctgc

SEQ ID NO: 340646 - DNA, 201 bp, Homo sapiens
ttcaagaggaatgataaacgtgaagtaaaagttgcccagttggctggctctgttgctgagatgtcggcttatcatcatggagaagtaagcattaagattgraatcaattgagaactgtaattattgtcttgaagaatgataattacacatagtatttttcctttagtaaagtctttggaaatgtaaaagaattaagagaat

SEQ ID NO: 340647 - DNA, 201 bp, Homo sapiens
atatacgacagttttctaaatctgtaagggcaccagtgtgattgcagattggttgttacctgagagattaaaaccgtcataagaacaaatttaatcagtghgtatacttcttgtttcgtattttttttgtgtatggaatttttaaggtcacttaattgattcactatcattttttaatacacacatctatacatttagaca

SEQ ID NO: 340648 - DNA, 201 bp, Homo sapiens
aacatctggcccctacttaaatattaccttttctccttccacctccaatgatgagaataagaggttaggtaggtgaaaaaaaatgctgcatgtgctgagtytaggtctgagaaggaatatgtatttgacattttatagttaatactggtggttctcatatggtgccacttaatgtgggatatgcaattggttgttactagt

SEQ ID NO: 340649 - DNA, 201 bp, Homo sapiens
gatttactttatttgtgattagtttctttcatcgtattaactgtgggtataagcatgcttgcactacaaactaatatgcttaatttgataactttaaaggrtagactttaatgtttcctaaaacaattgttttgccaagaactaaagtagggaattatgtaactaattgcatttttagctttgtattgaccattgtaaagg

SEQ ID NO: 340650 - DNA, 201 bp, Homo sapiens
caaaacaaacgtgttagtatgtactcactttgttacagaatctcaagtaacaattttactggtgttcttgaaaagcaaattgtatctttgctttattcccytgaattgttacaactatatcttgaagtaacattttaaaagagctcttttaaaaataggctttaaacctggccagcggaaagttttatttacctgtttcaa

SEQ ID NO: 340651 - DNA, 201 bp, Homo sapiens
aataagattttatatgagaagttaatagtaattattttcattaactattaccatatgtagatgtttatattaagcagtgatgcacatacagttgtgtccakgtatttatttatataattttgtatattactcattgaggtgtttaattttgtagttaatgctgctgacaataaacagagggataagaacatgacttgtatt

SEQ ID NO: 340652 - DNA, 201 bp, Homo sapiens
caggttgtatgaacagaagctatgaattcaagcttaattgatcagttggaaagggacaattgaggatgagaaattctgtttcagttgtgttaatctgtcartgttagaccatagactcatggtactggtactcaagagagaagtcaatgctatttacctttttctctacagcttccaaactacaaaaactttaaaggcacg

SEQ ID NO: 340653 - DNA, 201 bp, Homo sapiens
gggatcatcatattaactgggtaagttgccctctctccccttaccccagattttgatttttagtgacctggacattgctcaggggacaactttctgctgayaaacaggagttgaaagagactattatttcaggtttctgttacaaaaacatataaaagtctcaggggagaacctcctgtgtttgccactagtgagccagtg

SEQ ID NO: 340654 - DNA, 201 bp, Homo sapiens
ttcaagcttaattgatcagttggaaagggacaattgaggatgagaaattctgtttcagttgtgttaatctgtcaatgttagaccatagactcatggtactrgtactcaagagagaagtcaatgctatttacctttttctctacagcttccaaactacaaaaactttaaaggcacgattcaagaacttggtcaaaaccagta

SEQ ID NO: 340655 - DNA, 201 bp, Homo sapiens
gccactagtgagccagtgagcaatgtaaattaccatttgttgagaatgggaacgtaaaagacaaattggattctagtgttaatttctactttctactctgscaaggctgccaatcttatttgtgtattttgattttgtttttgcatagcctctagtgagaaagttggggttgcagaagtaataaataggtgtaaacattgc

SEQ ID NO: 340656 - DNA, 201 bp, Homo sapiens
attttttctacctcattgaatttagagaggctaggtatctattttgttttaaattgctttactcctcagtaagcagtgtgtctaggaatcagtgctgaatrtagtccaaaggaggcatagcaatttagttcagtcactttgttttacaaattaaaaaattgaggctcaaagaggttaaataagaatccctaagaatggtcc

SEQ ID NO: 340657 - DNA, 201 bp, Homo sapiens
acttcctaaacataagcgaagtttaaggagtgatagttcttaatactagtctttacttcctttcataacttttaaatctattgaaaaaaaatctagaaacygaagaagacatcttttgatcaggattcagatgtggacatcttcccctcagacttccctactgagccaccttctctgccacgaaccggtcgggctaggaaa

SEQ ID NO: 340658 - DNA, 201 bp, Homo sapiens
ggtggaaaagaatcacagtgactgggaaagtagtactcaagatatgcaggattgaaagcctttataaattcaaaaatgctatttccctgattcatttgatsaaatatgacatcccaagattatttaagtctatcttcgtacttgtccagtctagctgtcaagggattttaaagatataaaattgctatttagttgttttat

SEQ ID NO: 340659 - DNA, 201 bp, Homo sapiens
tcaatttgactgggtatagtcctgtgaatgtccacctcagtgtcaacctacaggagggcagatgtgatcagaaaggcctgcattattcctgttacacagcyatgtgcagagaggagtggcctctgaggaagacacaggacctctacctaggaggagtagtaaagccctctccatcctgcccatattcccatcaggtctcct

SEQ ID NO: 340660 - DNA, 201 bp, Homo sapiens
agactgtttccttttaacttggatttatttgaccagggctaatttgattttttttttaattgaattcatttgactgtggctgatttttccaattagtctgrcccttttccagaagtacactatttcttttaggtaaatgaatgacatcagctcccccgcatccctttttatgttgatttccacattgacctcttccattca

SEQ ID NO: 340661 - DNA, 201 bp, Homo sapiens; identical to SEQ ID NO: 71739

SEQ ID NO: 340662 - DNA, 201 bp, Homo sapiens
attataacaattttatttttactaatgacatttctataaatatggatacataccttattgctattcttttgctttaggtaccagagtgagaaaaacacctrcatcatctggtaaacctagtgcaaagaaagtgaagaaacggaatccttggtcagatgatgaatccaagtcagaaagtgatttggaagaaacagaacctgt

SEQ ID NO: 340663 - DNA, 201 bp, Homo sapiens
catttcaagtaagggatgtgttatatattgtacatgatgcatacatatgcattatatatatactgaattactaaatatcagctctgatattgacttttttkggtatgttttcaacaggtaaaaaaccatatatgggtttttattaattgccttattgaaaatccaacttttgattctcagactaaggaaaacatgactctg

SEQ ID NO: 340664 - DNA, 201 bp, Homo sapiens
gaaaaaatatttgtatagagtattactagattcttttgattgtgctctttttctggtagttgaaataatgccttcaattttcataaacgtttattttgtartgaacttttcattataacaattttatttttactaatgacatttctataaatatggatacataccttattgctattcttttgctttaggtaccagagtgag

SEQ ID NO: 340665 - DNA, 201 bp, Homo sapiens
taatggaacatttttattttagaacatattgtagaccgtaaagacctaattagggtataatttgatatgtgcctacagtaaaaagtataaactttggaatragttttggaggtaagtttcatggggagaaactgtttatttaaatttagaaacacctcatattccaggttttcaaacctctaaaccctatattattagaaa

SEQ ID NO: 340666 - DNA, 201 bp, Homo sapiens
caatttacctgtcccttcacatcctctttttgtcaagtacacatagaaatgaatttcttttttaaaggtcaagggttaaggaatagatctgggaaatgccrctaaggtttggatcggtgcacttagaactgttgtaagtgagaggaaatgaaagtatacgtactgaaggtgattcacctatttgagctgccagtgtaagat

SEQ ID NO: 340667 - DNA, 201 bp, Homo sapiens
tagtttctttcatcgtattaactgtgggtataagcatgcttgcactacaaactaatatgcttaatttgataactttaaagggtagactttaatgtttcctraaacaattgttttgccaagaactaaagtagggaattatgtaactaattgcatttttagctttgtattgaccattgtaaaggtcagatttcccctaacaga

SEQ ID NO: 340668 - DNA, 201 bp, Homo sapiens
tacgttggtattgttagtattatcagtgttgtttaagtactaagccattagtatttcagaagttaaagttaggaagaaggaaaaaattgccttatagaacrgtctttctagcaaagttggacataaatttctctaaagtgaatcatgtttctttcctgatttttattataaagtttggtttatattccttccacagtttta

SEQ ID NO: 340669 - DNA, 201 bp, Homo sapiens
  misc_feature (1)...(201): n = A,T,C or G
gcaattagtcaaaatttctagtttaaagttcctactagcttattaaatatctgccccaggtaagcaaaagcttaggttttgtggtctcctacagacacttntgtctctccagacttcaggatggccagctctcctgtgatctcagttcttcagtgggttcatgaaaaacccattaatttgttgtctgatcacccgttttct

SEQ ID NO: 340670 - DNA, 201 bp, Homo sapiens
ttaatgaatctcttactagtaccaagatatatgtaccgtggtctttttgaaagaggtcagtatttgtgctttgtgtttgaaggatgacacttaaaaaaaamcccacaaatctaattgagatgtgtgctatttaagacagcaagtaaataatatggattgttccctcaaggattttaaaaattcacaacagacaacatcatt

SEQ ID NO: 340671 - DNA, 201 bp, Homo sapiens
tctgccctctattctctttccccagctgcagcaggtttccaccagtgttctcagcctgtgtccttgaggtttcctgccctgcagaataagcctttttttgktttttttttttttttttttggtaagggagatagatctgggttgatttcccagtgactactgtttctgtctcccagctagcaccatgggagtgcagagggg

SEQ ID NO: 340672 - DNA, 201 bp, Homo sapiens
tatattgacaactgcttcttataaaaagggtgctactgacagcagcaaaacattttaatcacttatgtttgcgtgccagggtacattgcaaaataacttgycatgctcttattgttgaaattctttgaatgttgtatattactccgattatgtagaatgaaagtatgaagggactagggccaggagagaaaatgtcagata

SEQ ID NO: 340673 - DNA, 201 bp, Homo sapiens
ttccctaatggcttgtgaacaagtaaacaaaaacttaacactgaaaagtgtttctgccttggaggctatcattactgtaaaaaaattttttttaactaactgtgtagttatgtcattaaacaagtaataaaccacttttaatttaaagtgacattaacaattgaacaaatgacatttgattaactgaactggcagttacac

SEQ ID NO: 340674 - DNA, 201 bp, Homo sapiens
caacagacaacatcattacagacacatgtattgaatgtagcagaacaacaattttgaaaagtcctgcttattctgaatgcagtagaaccatattgagaaaytggttatttacaagagtctctgtagccaacacactgggtgacctacccatgtcccttaccacttagtgcatattgggcaatatctgcctttcgttgcctg

SEQ ID NO: 340675 - DNA, 201 bp, Homo sapiens
tttccctaatggcttgtgaacaagtaaacaaaaacttaacactgaaaagtgtttctgccttggaggctatcattactgtaaaaaaattttttttaactaactgtgtagttatgtcattaaacaagtaataaaccacttttaatttaaagtgacattaacaattgaacaaatgacatttgattaactgaactggcagttaca

SEQ ID NO: 340676 - DNA, 201 bp, Homo sapiens
atttccctaatggcttgtgaacaagtaaacaaaaacttaacactgaaaagtgtttctgccttggaggctatcattactgtaaaaaaattttttttaactaactgtgtagttatgtcattaaacaagtaataaaccacttttaatttaaagtgacattaacaattgaacaaatgacatttgattaactgaactggcagttac

SEQ ID NO: 340677 - DNA, 201 bp, Homo sapiens
ggtaccactaggtgattctttaaggccagaatgttgtctttcaattggcagttcacttttggagtagatggagatggcataaaaacatcttagtatatacytgcagatggctttctaggaaaaaacaaacaaacaaaacaaacgtgttagtatgtactcactttgttacagaatctcaagtaacaattttactggtgttct

SEQ ID NO: 340678 - DNA, 201 bp, Homo sapiens
aatttccctaatggcttgtgaacaagtaaacaaaaacttaacactgaaaagtgtttctgccttggaggctatcattactgtaaaaaaattttttttaactaactgtgtagttatgtcattaaacaagtaataaaccacttttaatttaaagtgacattaacaattgaacaaatgacatttgattaactgaactggcagtta

SEQ ID NO: 340679 - DNA, 201 bp, Homo sapiens; identical to SEQ ID NO: 71733

SEQ ID NO: 340680 - DNA, 201 bp, Homo sapiens
attaatgaatctcttactagtaccaagatatatgtaccgtggtctttttgaaagaggtcagtatttgtgctttgtgtttgaaggatgacacttaaaaaaaaccccacaaatctaattgagatgtgtgctatttaagacagcaagtaaataatatggattgttccctcaaggattttaaaaattcacaacagacaacatcat

SEQ ID NO: 340681 - DNA, 201 bp, Homo sapiens
gggtcttgctttgtcacccaggctggagtgcagtagcatgaacacagctcactgccgccttgactttccgggctcaaatgatcctcttgcctcagcccccscaagtagctgggactacaggtgtgtgccaccacacccagctaatttttgtatttttgtagagatggggttttggtttgttgcccaggctggtcttggact

SEQ ID NO: 340682 - DNA, 201 bp, Homo sapiens
gattggacgagacagatacggagtttttccactcaggggcaaaattcttaatgtacgggaagcttctcataaacaggtatgtatgtgtgtgtatatatatrtgtatacacacatgcacacatacatatgacatttctaatactttactaaacttctcgaatttttaaatgtaatttctgactcgtatatttcaacacttca

SEQ ID NO: 340683 - DNA, 201 bp, Homo sapiens
tgagtaaaacttgtattttttttattgttgttattaagagttgattaggtagttttcttgatttactttatttgtgattagtttctttcatcgtattaackgtgggtataagcatgcttgcactacaaactaatatgcttaatttgataactttaaagggtagactttaatgtttcctaaaacaattgttttgccaagaac

SEQ ID NO: 340684 - DNA, 201 bp, Homo sapiens
agtctgattgttaggcttaaaaatcttcagtgactccccactgactatgcacaaattcttggtatacagtgttagcacctgtatgcctctgtgtgtttctyctcctggctactttgttctcacttttccttgagttctagcagactattacatttaaaaacctaattctttaaacatttaattcctgttagatggctttgt

SEQ ID NO: 340685 - DNA, 201 bp, Homo sapiens; identical to SEQ ID NO: 71738

SEQ ID NO: 340686 - DNA, 201 bp, Homo sapiens
ttcttaatataaaatgtataacttactaaggaaattgtgcagttttggtgtgagaaaatcattgtcagaattaatatttataaactatcatgtataaataytgtcttggtaatagtttaacagtgacatttaaaaaccttaagactgatagtacattgactttatgttagaactgctggaagtttaacttggctgacagtt

SEQ ID NO: 340687 - DNA, 201 bp, Homo sapiens
tttggtgtgagaaaatcattgtcagaattaatatttataaactatcatgtataaatattgtcttggtaatagtttaacagtgacatttaaaaaccttaagwctgatagtacattgactttatgttagaactgctggaagtttaacttggctgacagtttgagttttgatttagataggactggtatgatgtctatgtatat

SEQ ID NO: 340688 - DNA, 201 bp, Homo sapiens; identical to SEQ ID NO: 71731

SEQ ID NO: 340689 - DNA, 201 bp, Homo sapiens
ttggggtcaagggttcatgtccttcagaattctccagcatttcttgaatgagaggtggcattgatccaggaatttccattttcaaggtaattacacgctcygcaccttttcaaaagagataatggaaatatggttaagataaggagttaagctatgacagataaccagggaccaattttcatatattttaacagaggtgtt

SEQ ID NO: 340690 - DNA, 201 bp, Homo sapiens
taaaaaattactgtctttgttatttcatagtaaaactaactctgaagagaagatagaagtttttatccaaaaagttaagagaaagtttaggtgtcggtacwgtggctcacgcctgtaatctcagcactttgggaggctgaggagggaggatcacttgaggtcaggagttcaagaccagcctgggtaacatggcaagaccct

SEQ ID NO: 340691 - DNA, 201 bp, Homo sapiens
ctgctttggcctcccaaagtgctgggattacaggcatgagccactgtgcccggcctatatactcgatttcttaatgataataacgaataagaattttagartaggccaggtgcagtgactcatgtctataatcccagcactttgggaggctgagctgggcagatcactagctcaggagttgaagaccagcctgggcaacat

SEQ ID NO: 340692 - DNA, 201 bp, Homo sapiens
attacattgttgaacatccatttggtgtctggagaatcagagaattggttgctggtgttgaaagcacctgagaattggtgttagaattgaagtgaggaaarcaaacaaacaaacaaacaaaaaaaacacagcggttggtttattggctctgtagccaaaatgtcttatttttttaaaatctcaactctcgttctgagactc

SEQ ID NO: 340693 - DNA, 201 bp, Homo sapiens
gggtcccgcccctccagggggcttggaattttgggattggccgagaggctgtggcgacaaggcccggattggacagcatggcgctgactgacagcgggggsggccgccgcgccctccctctctccccggtgtgcaaatgtgtgtgtgcggtgttatgccggacaagagggaggtgaccgtggcggcggcggcggcggctct

SEQ ID NO: 340694 - DNA, 201 bp, Homo sapiens
atttgtggatgtctatctgattaaaaacaaatgtggaggctgggcgcggtggctcacgcctgtaatcccagcactttgggaggccaaggcgggtggattaygaggtcaggagttcgagaccagcctggccaacatggtgaaaccccgtgtctcctaaaaatacaaaaattagccagtcgtggtggcgtgcttctgtaatcc

SEQ ID NO: 340695 - DNA, 201 bp, Homo sapiens
cagcgggggcggccgccgcgccctccctctctccccggtgtgcaaatgtgtgtgtgcggtgttatgccggacaagagggaggtgaccgtggcggcggcggyggcggctctgtttattgtccctctcggtgtgtgtgtgtgaggaaatcggggctgcagcgaggctaaggctgcctttgaagcagcggcggcgaccgggacg

SEQ ID NO: 340696 - DNA, 201 bp, Homo sapiens
catacctgtgcacacatgtatacacaagacacatacacacacatacatacactcatgggtgtgtcctgcagctgtctggctgtgctggtcccagctcttayactcccaccccttcccaggccctgtgatgcctccatgttaccgccagagggcctgggcttgtggaagtggtgccccgtgggcacctctccttcccgacca

SEQ ID NO: 340697 - DNA, 201 bp, Homo sapiens; identical to SEQ ID NO: 71759

SEQ ID NO: 340698 - DNA, 201 bp, Homo sapiens
ctccaccgcacctctcttgattacagatgggggaaattgtgtcctagaatgattaggaaacatgtgcacccaattccagtccagtcctcacagcagccctsggggtaggcaccacaatcgcagcagaggctcaggagctcactgtaacctccgcctttcaggttcaaacaatttttctgcctcagcctcccaagtagctgg

SEQ ID NO: 340699 - DNA, 201 bp, Homo sapiens; identical to SEQ ID NO: 71763

SEQ ID NO: 340700 - DNA, 201 bp, Homo sapiens
catccccaacataagcttcaggctctctcccatcttcagtttcagccctcggacggccttccacccatgcttccgcccaaaatgatttttccaacacagaytcctaatcacgatatgatgtccctgactcagactctccctggctccccatcctgtgggcctaagtcctgcctctgcccaagaggcctagtggaaaggtag

SEQ ID NO: 340701 - DNA, 201 bp, Homo sapiens
agtgagtggctctgcctcgcgtgggtggggagcagggatgcgttttcagccaggagatggcttggggtttgggttcagctgggcagccagtgccatggatrtttacctggtgcacttggaggtcacagggcacactctgtcctgatcttagtgcagatacctttcaggtaccgtagacccccccagcctcagcagctggag

SEQ ID NO: 340702 - DNA, 201 bp, Homo sapiens
gagtttgaagctgtagtgagctatgattgcaccactgcactccagctggtatgacagagtgagactgtctcttaaaaaaaataataaaagtattaacaggyagagtcccaagtagaaaactgaggttgagggtaggaggagaattcaggtatgtccactgaaaaagttaaccaagatggtgatccagctgcatatttggct

SEQ ID NO: 340703 - DNA, 201 bp, Homo sapiens
cccagggtgataaggtcactgggctggggtctgggacagcctgggaatgggtgggcaggcacagctgggctgtgatggtggctctgctgcacagtgggagrgggccctggcagggcagtgggtggatggggtgtcttccaggcctggggtgcttttggagcgcttatggggatgggctgccccgagatgaggctgggctgg

SEQ ID NO: 340704 - DNA, 201 bp, Homo sapiens
aggtatgtccactgaaaaagttaaccaagatggtgatccagctgcatatttggcttggagctccctggcagtcagaacaaaaggagaaacatgatggtttytacggcacctattaagatgaagaagtaggccggtgcagtgactcatgcctgtaatcccagcactttgggagaacgaggcgggcggatcacttgaggtcgg

SEQ ID NO: 340705 - DNA, 201 bp, Homo sapiens
catggggccagctgcacactgtctgacggagcagttgttgggctcaatttcagagggcctctgcaattcaggccatcccaggggctgcaggggagggggtwtctatgggccctagggctctgaggctgtgtctcagggttgaggggtgatggatcccgggctctagggccctcctcgtggctgtaggcagtcatgaccagc

SEQ ID NO: 340706 - DNA, 201 bp, Homo sapiens
gactcatgcctgtaatcccagcactttgggagaacgaggcgggcggatcacttgaggtcgggagtttgagatcagcctggccaacatggagaaaccctgtytctactaaaactacaaaattagccaggcatggtagtgcatgcctgtaatcccagctacctgggaggctgaggcaggaaaatcacttgaacctgggaggta

SEQ ID NO: 340707 - DNA, 201 bp, Homo sapiens
tttgatcctggttctgccattacctggctgtgtgaccctgggcaagttgctgacctcctctgtgggtcagtctcctcatctgtaaaatggggatggtgatrctaatgcccctcctcgggctggagggagtcttcagcaagctcagttgctcagtcaggtgttcactgtggctgtcttctcatcattaggagccaacagtag

SEQ ID NO: 340708 - DNA, 201 bp, Homo sapiens
ctcatgcctgtaatcccagcactttgggagaacgaggcgggcggatcacttgaggtcgggagtttgagatcagcctggccaacatggagaaaccctgtctytactaaaactacaaaattagccaggcatggtagtgcatgcctgtaatcccagctacctgggaggctgaggcaggaaaatcacttgaacctgggaggtaga

SEQ ID NO: 340709 - DNA, 201 bp, Homo sapiens
cagacccgacacctgggccctctaccccttgtccctgcatgctgcctgctaatacctgctcctcttaccaccccagacccttcttatctcatgcttcctcyctagggctgctacttctctattcctgttcccctaattggttctccttgctgcagctagtgcagcttgggacagcaccatctatggttccctactgccctg

SEQ ID NO: 340710 - DNA, 201 bp, Homo sapiens
gtgccaccatgcctggctaattttttttgtattttagtagagatgtggtttcgccgtgttggccaagctggtctcgaactcctgaactcaggtcatctgcscacctcggcctcccaaagtgctggggttacaggcgtgagccaccgcacccaccctattttttatattgggctgaagtttaagactctggtctaagtactt

SEQ ID NO: 340711 - DNA, 201 bp, Homo sapiens
agaggtgttttttttttttttttttttggagaaggaatctcgctttgttgcccaggctcgagtacagtggtgcgatctcagctcacagcaacctctgcctyttggttcaagcgattctcctgcctcagcctcccaagtagctaggattacaggcacctgccaccatgcccggctaatttttgtatttttagtagagacgga

SEQ ID NO: 340712 - DNA, 201 bp, Homo sapiens
gaagaatgtttcagaatcccaggcctggagggtggaggggacttgatcttccaaaggggagaagaatgcttgggaggccggatggaagggaataaaacatygtggctcgtacacggtgcagttagggaggccagagccccaggccacacaaggtcttgcaggccgtgggaggagtgtatatgttgttccagggaccttgga

SEQ ID NO: 340713 - DNA, 201 bp, Homo sapiens
tgcactgctgacttggagccctctgcacctcctgttctgggcacaagagggcagccaagggcctcagaacgctgaggaaccctggccaactagctttaagmaatgcattgtgtaaactgctctttactgagcccagagcttgccaggagcctggtagggttgtggctctggctctcatttctaccaaaggaagtgtgcttg

SEQ ID NO: 340714 - DNA, 201 bp, Homo sapiens
tcaagcaatccatctgcctcggcctcccaaagtgctgggattacaggcatgagccactgctcctggccctcatgtatagctttgaaggaagaatgtttcaraatcccaggcctggagggtggaggggacttgatcttccaaaggggagaagaatgcttgggaggccggatggaagggaataaaacatcgtggctcgtacac

SEQ ID NO: 340715 - DNA, 201 bp, Homo sapiens
gcagctagtgcagcttgggacagcaccatctatggttccctactgccctgacgacaatgtgtgagcctgtgctaggagaccaggccctgtgtgataagctyagcctgccctgttccagctgcacccaccttctctggatcatggactcacttctctgcccacagatacctttttcccttgacctctgcatctggataactc

SEQ ID NO: 340716 - DNA, 201 bp, Homo sapiens
ttccctactgccctgacgacaatgtgtgagcctgtgctaggagaccaggccctgtgtgataagctcagcctgccctgttccagctgcacccaccttctctrgatcatggactcacttctctgcccacagatacctttttcccttgacctctgcatctggataactcctattcactcttcacctcctgcaaatgccaccacc

SEQ ID NO: 340717 - DNA, 201 bp, Homo sapiens
cttcagtgatgaataagcctccacgtctcccccactgcgggtgtggcaacaaagaatccccacagcaaaattaggtttcacattgtgtgtgtggttttttwaaaaaaatgtgccacacactgcctagttatttggagatagaggaatgtttcacatgcaaatgtatgaggatctaacccagccctggatcactacctactg

SEQ ID NO: 340718 - DNA, 201 bp, Homo sapiens
gaatattactgcccatccccaaaactatgatttcctggaagatttcagtatttagtctactatatttctttttttgctttttttttttttttttttttgaracagagtctcactctgtcctccaggctggagtgcaggggtgtgaccttggctcactgcaacctctgcctcctgggttcaagtgattctcctgcctcagcc

SEQ ID NO: 340719 - DNA, 201 bp, Homo sapiens
ctgcctcctgggttcaagtgattctcctgcctcagcctcccgagtagctgggattacaggcacacgccactctgcctggctaatttttgtatttttagtaragacggggtttcaccatgttggcgaggctggtcttgaactcctgacctcaagtgatccgcctgcctcggcctcccaaagtgctgggattacaggcgtgag

SEQ ID NO: 340720 - DNA, 201 bp, Homo sapiens
catattaagttgtaggaagaagggcatggctggcaaagggagtagggagtggaaagaatgatggtgctgatagcacctggcagttctgcatgctccaaccygcgctgtgctccaggacttactccctgaatcctcgcagacagacaggggcccacagaggtgagggcatgcaaatagcaggggcagaattggcgctggcct

SEQ ID NO: 340721 - DNA, 201 bp, Homo sapiens; identical to SEQ ID NO: 71762

SEQ ID NO: 340722 - DNA, 201 bp, Homo sapiens
ctctggatcatggactcacttctctgcccacagatacctttttcccttgacctctgcatctggataactcctattcactcttcacctcctgcaaatgccaycacccccagaaagcctctctaataacccccacccagttctcctcttcatcaccacactcatcacactgcaaataagtgtctgcaagtgtcctggcatgag

SEQ ID NO: 340723 - DNA, 201 bp, Homo sapiens
cgcgctacaacatcaccttcatgggcctggagaagctgcatccctttgatgccggaaaatggggcaaagtgatcaatttcctaaaaggtatggaaggtccsccttggactctcatctgcttcctccaacccacctgtcctctccgtcctcatccccaacataagcttcaggctctctcccatcttcagtttcagccctcgg

SEQ ID NO: 340724 - DNA, 201 bp, Homo sapiens
ccgggaaaggcagccagtttaagcagctgttgttgaggggcccttgtctgcggctgaggggctagtggtgctgggcaatggctggtgggtcagtccaggcrggctcgggagggagctgctttctgccgaggctgccccagctgtgcgtctgtctttttccacacggtaggctacacacaacccagctgtaccagcatgtgc

SEQ ID NO: 340725 - DNA, 201 bp, Homo sapiens; identical to SEQ ID NO: 71761

SEQ ID NO: 340726 - DNA, 201 bp, Homo sapiens
ttttgtccggccctgagtggcctggctacagcacctcttggccctctgaggttcgtcacccctctgccatcacacccatccctggccaccctctccctgcytgctgcctgctgtctgtcattgaacatgctcgtgtttctcccatcctaaaactcctcctcctggttggtgaacgcaatggccacacttcccactttcctc

SEQ ID NO: 340727 - DNA, 201 bp, Homo sapiens
ctcccaagtagctaggattacaggcacctgccaccatgcccggctaatttttgtatttttagtagagacggagttttcaccatgttggccaggctggtctygaactcctgacctcaagcaatccatctgcctcggcctcccaaagtgctgggattacaggcatgagccactgctcctggccctcatgtatagctttgaagg

SEQ ID NO: 340728 - DNA, 201 bp, Homo sapiens
aaagtgatcaatttcctaaaaggtatggaaggtcccccttggactctcatctgcttcctccaacccacctgtcctctccgtcctcatccccaacataagcytcaggctctctcccatcttcagtttcagccctcggacggccttccacccatgcttccgcccaaaatgatttttccaacacagactcctaatcacgatatg

SEQ ID NO: 340729 - DNA, 201 bp, Homo sapiens
agggtcaacatccctgacccttgtgccacctgctcctgaaggttgtctagcacacctgagctctccttgtgactatcagtggcttgggaaacatggggatygctgtgtgtacgatgttcattgctccctggccagagggactggccactgtccacagtggctggggaggctaccccttctcagaaggcccacaagccagca

SEQ ID NO: 340730 - DNA, 201 bp, Homo sapiens
aacgctgaggaaccctggccaactagctttaagaaatgcattgtgtaaactgctctttactgagcccagagcttgccaggagcctggtagggttgtggctstggctctcatttctaccaaaggaagtgtgcttgaccagggagttcatccaagggcacctggaaactgtcctcaaggcatttcccggggaaccaatttctc

SEQ ID NO: 340731 - DNA, 201 bp, Homo sapiens
tttttttttttttttggagaaggaatctcgctttgttgcccaggctcgagtacagtggtgcgatctcagctcacagcaacctctgcctcttggttcaagcrattctcctgcctcagcctcccaagtagctaggattacaggcacctgccaccatgcccggctaatttttgtatttttagtagagacggagttttcaccatg

SEQ ID NO: 340732 - DNA, 201 bp, Homo sapiens
acaagagggcagccaagggcctcagaacgctgaggaaccctggccaactagctttaagaaatgcattgtgtaaactgctctttactgagcccagagcttgycaggagcctggtagggttgtggctctggctctcatttctaccaaaggaagtgtgcttgaccagggagttcatccaagggcacctggaaactgtcctcaag

SEQ ID NO: 340733 - DNA, 201 bp, Homo sapiens
catttgaggggccttcaggggaactgtgttgggcaggctgcatgcctggccttggtcccccaaaagcctgaaagcagcttactatgtgatatataataatrcaaaatagctgggtgtagtggcatgcacttgtagtcctagctacttgggagcctgaggcaggagaccttgagcccaggagtttgaagctgtagtgagcta

SEQ ID NO: 340734 - DNA, 201 bp, Homo sapiens
cacagcacttgacaatttacaaagctctttttcaccaggctctttttttctttttcgagacgtagtttcactcttgttgcccaggctggagtgcaatggcrcgatctcggctcaccgcaacctccgcctcccaggttcaaacaattctcctgcctcagcctcctgagtagctgagattacaggcatgcaccaccatgcccg

SEQ ID NO: 340735 - DNA, 201 bp, Homo sapiens
ggggtgagggacgctcgggacgggtgtttccaggccctcccggcgcgccaggccagccccgcgcccctgctcggtggcccgagggacgcgcgccggccgckggcctgggcccggacccggagcggtcgggcgatgtgcgcgggtctgacgtctgcgctgcccagccccctggctacgcggacgcccccacggaggcagcca

SEQ ID NO: 340736 - DNA, 201 bp, Homo sapiens
gaaggacacagctcctattagtggctgaagttctgagggctgaggcattcagttcagtgctctttgtaggaacagaggggaggttggggcgggggcttgcwttggaatctggtactgccagcctgccttggtgggggtggggtcagggatgcctcaggttatctgccccaagagtgtgggagccctgacccccaggctccc

SEQ ID NO: 340737 - DNA, 201 bp, Homo sapiens
cttggactctcatctgcttcctccaacccacctgtcctctccgtcctcatccccaacataagcttcaggctctctcccatcttcagtttcagccctcggayggccttccacccatgcttccgcccaaaatgatttttccaacacagactcctaatcacgatatgatgtccctgactcagactctccctggctccccatcct

SEQ ID NO: 340738 - DNA, 201 bp, Homo sapiens
cctgggctcaagcaatccacctgcctcaacctcccaaagtgctgggattacaggcgtgaaccaccacacctggccaagaccctgtctctttaaatgaattaaaaaaaaaaaaagggcggggggaaggtggagggggaattcctaagaagagtttttctcactctgagggtcaacatccctgacccttgtgccacctgctcc

SEQ ID NO: 340739 - DNA, 201 bp, Homo sapiens
aaggggcggctcctcagctccactgtgggcccggcatggccagagcacctggtcttcaaagagaagccaggaatccagattattaagtgacatttcctgattttttttttgagactgagtctcgctcttgttgagcaggctgaagtgcagtggcacgatctcagctcactgtaacctccgcctcccgggttcaaacaattt

SEQ ID NO: 340740 - DNA, 201 bp, Homo sapiens
aaattcaggcctggacttggatctgtgtttgaatctaggctctcagtggctgtgggcaaatcacttcacgctttgtgcctcagtttcctcctctgtaaatrgcgatgataatcccttccttccctagggtggcttgagggtcaaggaggctaggcaggtaaagcaccagtctgggtccccctcacatccagaattcgcagg

SEQ ID NO: 340741 - DNA, 201 bp, Homo sapiens
taggtacctgggagagactgaccagtgcctccatctgacgtgggatccttgtctaaggaggtccccgggtggttccccagccccctctttgcgtacttccrgtggcagggagcttcctcccttccagagagcgtgtgccatccttgggcagctcagcatggtctgaagcctgccttgtgtcttccctgaaggactccacct

SEQ ID NO: 340742 - DNA, 201 bp, Homo sapiens
caggcaggtcccagcaccgggctgcagaacagcccactaaccttccacctggcaggccagggcctggctgaccacacccgtgccattctccttgttcgccrgccactgatacaggaagagggacgtgtgggaggagcccgcatcaaacacgatcccaaactggggagacagtgggatgagtgggaggcaacacctgtggac

SEQ ID NO: 340743 - DNA, 201 bp, Homo sapiens
cagaacagcccactaaccttccacctggcaggccagggcctggctgaccacacccgtgccattctccttgttcgccggccactgatacaggaagagggacrtgtgggaggagcccgcatcaaacacgatcccaaactggggagacagtgggatgagtgggaggcaacacctgtggacccggcccggcctcccctgccggcg

SEQ ID NO: 340744 - DNA, 201 bp, Homo sapiens
gggcaggagcacgctggtggcctccaccaggaggagaatgagtgccgtgaggcctgagacccccgaggcccccagcagggccaagaagacctgctccttcygggacagccccatggtgcaggtggtactggttcctgtggggggacggccgtgggcacccaggctgcacttggtgtccccatcccgccctccagaggcaga

SEQ ID NO: 340745 - DNA, 201 bp, Homo sapiens
gaaagctgcctaaccacagccccatctccgccctgtgctgctgaggggaccccggctgcccacaggttccaggaggctctgtctgacttctggctggccckggagcagctgaggggccacgctgccatcgactacacgcagctgggcctgcggttcaagctgcaagcctgggaggtgaggccgggcagggctcactgtgct

SEQ ID NO: 340746 - DNA, 201 bp, Homo sapiens
ccccatctccgccctgtgctgctgaggggaccccggctgcccacaggttccaggaggctctgtctgacttctggctggccctggagcagctgaggggccaygctgccatcgactacacgcagctgggcctgcggttcaagctgcaagcctgggaggtgaggccgggcagggctcactgtgctgctggctgtggggtgtcca

SEQ ID NO: 340747 - DNA, 201 bp, Homo sapiens
tggctgagaccatggcttctgcagccactccccgtgggtgccaaggccatgcctgcctcacctgagcaacctcatgccagccgtggcccccaggaacgtgkgtgttttccgatgctgggcctctgggatcagcaccagcgcctcctccaagcagccctgcaggctctcaccagcctgtgcagcattagaagtgtaggagga

SEQ ID NO: 340748 - DNA, 201 bp, Homo sapiens
gcgaggtcccggggggtctccctgtgtccctgccacagatagcgaggtccctgggggggtccctgtgtccctgccacagatagcaaggtctcacgggggcrggggctgcagtccgacggtctgggccacgtcacgcccacacttgggtcagagccaggcaacacccctaaagtcacaggaatggggagctgctcaccccca

SEQ ID NO: 340749 - DNA, 201 bp, Homo sapiens
actgggtccccatccccgaggaggagtcgctgcagagggcctggcaggacgcagctgcctgccccagggggctgcagctgcagtgcagggtgagccaagggcgaggcaggggcaggggcaccctgaggggcggtggaggcccctcctcccagtgcccggcccgacctgcagcccactctcctgcctcagggagccgggggt

SEQ ID NO: 340750 - DNA, 201 bp, Homo sapiens
gcacgaagaggagccgacctgtccagcctgcgggcactgctgggccaagccctccctcaccaggcccagcttgggcaactcaggtgggccagaaagccccyggtggctgcggtggagctgggcaccgccccgactgaggcagctgctggaagagggggtggcagaggtcactgccctccctgcaggccccacccaggaggc

SEQ ID NO: 340751 - DNA, 201 bp, Homo sapiens
gctgagaccatggcttctgcagccactccccgtgggtgccaaggccatgcctgcctcacctgagcaacctcatgccagccgtggcccccaggaacgtgggygttttccgatgctgggcctctgggatcagcaccagcgcctcctccaagcagccctgcaggctctcaccagcctgtgcagcattagaagtgtaggaggaga

SEQ ID NO: 340752 - DNA, 201 bp, Homo sapiens
tgccgggcagtggtagagagcccctccctggccccaccgaccagttacgtggtgcgggttgcggccccttcttggcgggccagaggctgggcccagctgcrgccgtggccacagcctcctacctggagtggcacggcctggagctgtcctctgcccttgcctcccccggccctgctggccgtgctgcccagaatgaggctc

SEQ ID NO: 340753 - DNA, 201 bp, Homo sapiens; identical to SEQ ID NO: 71771

SEQ ID NO: 340754 - DNA, 201 bp, Homo sapiens; identical to SEQ ID NO: 71767

SEQ ID NO: 340755 - DNA, 201 bp, Homo sapiens
ggaggaagctgctggtgcatgggtgccggctgccctccacccacagggcccactttggtggtagtggctgtgtcagtcttgctctgtcctacagggctgcyggcaatgggggggcctggccccggcccctgtgaggaccccgcgggtgctggggtaagaggctctagacccttcacctgtcagtcacctgagggaggctga

SEQ ID NO: 340756 - DNA, 201 bp, Homo sapiens; identical to SEQ ID NO: 71769

SEQ ID NO: 340757 - DNA, 201 bp, Homo sapiens
tctgcggctgcaggcctggttggtcaccccgtctgcatctgctggatacccaccccctccagagacggggctcactgccgccacggcaggtccccaggggygaggtcttccggccccaccggtggcacctgaagcacttggagcccgtggatttcctgggcaaggccaaggtaaaggtggggacggcgtcctggggcatgg

SEQ ID NO: 340758 - DNA, 201 bp, Homo sapiens; identical to SEQ ID NO: 71770

SEQ ID NO: 340759 - DNA, 201 bp, Homo sapiens
gcgtgtccacagggtgatggaccatcaaggtaatgctgtctgacacatttgcgataggctccaggacaaggcaaagttccaagactgtggtccatcagcartaaattaaagatgcagacaggaaacagttaagacggcaaataagatacacggtacattctgtgcaaatttaaatgtgttatttgcagggagtgcaagaaa

SEQ ID NO: 340760 - DNA, 201 bp, Homo sapiens
gcttcaagtgatcttccttgcatcggcctcccagagtgctggtgttacaagtgcgagccactgcactgggctgaaagcctgcttctttagaaggttattaraatgtgcactcctcagaacaggcactctacccagtcacaaatgctaatgcctttgtgggccaggcaggtgatataaaggaacacatgtttgtttttgtca

SEQ ID NO: 340761 - DNA, 201 bp, Homo sapiens
cttgcatcggcctcccagagtgctggtgttacaagtgcgagccactgcactgggctgaaagcctgcttctttagaaggttattagaatgtgcactcctcaraacaggcactctacccagtcacaaatgctaatgcctttgtgggccaggcaggtgatataaaggaacacatgtttgtttttgtcagttatgggcagtgtta

SEQ ID NO: 340762 - DNA, 201 bp, Homo sapiens
tacccagtcacaaatgctaatgcctttgtgggccaggcaggtgatataaaggaacacatgtttgtttttgtcagttatgggcagtgttaggaattcaatawgctggagagaggaccctgtcgaatgacattcagcattagttaaatgaaaaacactaggcatgcccaaccaaactgtcggaggttgtgatctctgctattt

SEQ ID NO: 340763 - DNA, 201 bp, Homo sapiens
ttagtgggagcactgcccctcatcaccatctacctgcaggctggagggcagactgagaggttggtggctgccacgacacagccctgcacacaggggctgcytgacactcacaagggtctaacacctgttctagggaccttgttcagtgaccactctcactggcaggaagtatttcttgcgtataaataagaattcctgatg

SEQ ID NO: 340764 - DNA, 201 bp, Homo sapiens
tgtttaggggctaccttaccttcaggaggccagggctttggcagcacatgggaaaaggtttcagtagttttaacttaaaactgtgctgcaggctttcccarccgtggcgtggtcggcattttgggctggatcactcttcgttttggaggactgtcctgtgcgctttataggatgtttagcagcagctctggcttctaccca

SEQ ID NO: 340765 - DNA, 201 bp, Homo sapiens
gtttaggggctaccttaccttcaggaggccagggctttggcagcacatgggaaaaggtttcagtagttttaacttaaaactgtgctgcaggctttcccaaycgtggcgtggtcggcattttgggctggatcactcttcgttttggaggactgtcctgtgcgctttataggatgtttagcagcagctctggcttctacccat

SEQ ID NO: 340766 - DNA, 201 bp, Homo sapiens
ctttataggatgtttagcagcagctctggcttctacccattagatgccaatcgtgtccccaccccaccccctaagttgtacaattaaaacgtttccagacwgtgccaaatgtccccggggagaatgaactcactctggctgagaactacggctttagcggaagctctcttagccatatacaagaaggggaagggcctgctc

SEQ ID NO: 340767 - DNA, 201 bp, Homo sapiens
ggcagggtggccttgtgggcctgtgaccggtgccccccacacacagagccctgcacttggagggaccctgtgcttggtttaaagctctgccgtggtcatcwtgaaattttaagtttgtgaacaaggtatccctgatttgcattttgttgtggactttgcaaattacatagcaggtttcaggcctagaaatctgacctacct

SEQ ID NO: 340768 - DNA, 201 bp, Homo sapiens
gctccctggagttgactggtgtggactccaggcttgtatctgtcagtgtgtgtttgggcacagggatagggagaccagaccctgaaaaagacagtaatatkttccagggagcatctagcatcatctagcatgttttattttcttttgctgtttcgagacaggatcttgctctatcacccaggctggagtgcagtggtatga

SEQ ID NO: 340769 - DNA, 201 bp, Homo sapiens
aattttggggaactaataaatgtccatgaaatcatcacaatttatgttcagagattgcagtaaagacagacataagaaattataaaagtattaatttggaraacttaataaatgtccatgaaatcttcacaatttatgttcttctgccatggcttcagccagtccctccgttcggggtccctgacttcctgcaacacctga

SEQ ID NO: 340770 - DNA, 201 bp, Homo sapiens
tcgttgatggaaagggctgtagctccccagctagctctgtcgtggttggttgaactagaccaggagcttgtaggtgaaaggtttgagatggcaggtgataygcatgtgtctgtttggaggcagagagatgaacaaagggagggatgtccagtggtgtcttcaggtctacatgcctagatgctggagggatgaagtcatggg

SEQ ID NO: 340771 - DNA, 201 bp, Homo sapiens
taagatgcactgagctcataccagctatgtagtcttggaaagctatttaaactctctctgcctcagcttccttctctgtagaatgggaatttggatgcctrttttacagagtgttttaaaagttagaaatatgtgtaacatgagtagagtagtagccacttggtacgtgttagatatttttgttactataagacaacgcta

SEQ ID NO: 340772 - DNA, 201 bp, Homo sapiens
ttgattcaagatttagagctccttttagcagttcttgtagtggtgacttggtagtggtgaattttctcagcatttgtttgtatccttctttcatatatgaygcttatttttgctggatacagaattcttggctgataattgttttgatggaggaggctgaagatatggccccagtcctttctagcttgtagggtatctgct

SEQ ID NO: 340773 - DNA, 201 bp, Homo sapiens
ggattgggttaagtcaaagaccttgtcttcgagctctgaatttctttcttctacttgttcaattctattgctgagactttccagagcattttgcattactrgaagtatgtccaatgtttcctgatgttttaactgttttttctttattctatctatttccttgaatatttctcccttcacttcttgtattgatttttggat

SEQ ID NO: 340774 - DNA, 201 bp, Homo sapiens; identical to SEQ ID NO: 71781

SEQ ID NO: 340775 - DNA, 201 bp, Homo sapiens
tcagtttctctccccgcaaaatgcaagtaataaaaaataatgtccctagctcacgagagtctttgcaagctttacagagtggtcagctcgtccatggaacrtaaatatctattcaaagggaatggaagaaagcattatgcatagacttttacacttggaggaaatggccaaccagaaaaatcatttggggccagagtgttg

SEQ ID NO: 340776 - DNA, 201 bp, Homo sapiens
cctttcacattattctatgtttccatgtcatataattttacatagtataatttttatgattaaacaatacttttcataattttaatataatgtcatgttcycatgtaatgtttaatccaaatatttcacataatgcttaatacatttctctcaatcttttttatttatttgggacaaagtcttactctgtcacccaggctg

SEQ ID NO: 340777 - DNA, 201 bp, Homo sapiens; identical to SEQ ID NO: 71784

SEQ ID NO: 340778 - DNA, 201 bp, Homo sapiens
atcccagcactttgggaggctgaggtgggtggatcacctgaggtcaggagtttgagatcagccaacatggtgaacccctgtctctactaaaaaaataaaarattagctcagcacagtggtgcatgcctgtaaccccagctatttgggaggctgaggcaggggaaccgcttgaacccaggaggtggaggttgcagtgagttg

SEQ ID NO: 340779 - DNA, 201 bp, Homo sapiens
gggcagggattctgttacaatgtaaaccagagcctgctgctcttgctgaatccctctggcttcccatctctcgcagcaaaagcctttctttcctctctgaytaatccctgcccttcctttctccattgcttctgcagtggcttctttgccgctccttgcttgtgccagacctcagcctttcccagtttctctgcctttcct

SEQ ID NO: 340780 - DNA, 201 bp, Homo sapiens
aggggcatttaatgccattaaatgacttagcacatgtaaagcgccctgttcgtagttcaagctaaaaaatggttataactattcgttgtaaaatggaaacracctccttggactttcgtttgaaaatgaaactggaaggtcattgagtatagggactgtttctttgcttccttaacatggattacagggtctgccccagta

SEQ ID NO: 340781 - DNA, 201 bp, Homo sapiens
gcggagcttgcattgagccgagatttccccactgcactccagcctgggtgacagagcgagactccgtctcaaaaaataaaataaaataaaataaataaatwcataaataaagcttgggctggagaagagatagaaggaaggaggaactcagaagaaaacttcaacacaaaggctttgggtttcaatgctcacacccttcca

SEQ ID NO: 340782 - DNA, 201 bp, Homo sapiens
gtggtggcgcgtgcctgtagtcccagctacagctctcagttgggaggctgaggcagaagaatcgcttgaacctgggaggtggaggttgcagtgagccgagrtcgcaccactgcactccagcctgggcgacagagcgagactgtatctcaaaaagagaaaaataaataaaaattaaaattaaaaaaataaaaaagaggaata

SEQ ID NO: 340783 - DNA, 201 bp, Homo sapiens
cgtaggtgtctcggtgcttgaactgcgggctgctgatgttggccagagaggaagatgatgaaaccaggcaggaagcgggcatttctgagacgatgtggggyggtgcacctgcaccctgggcctcctggtgcctttgcagggccccagcgcgggagggcaaagtgaaggagcccatgtggggttgctgtgtctgtggagccc

SEQ ID NO: 340784 - DNA, 201 bp, Homo sapiens
tgcaccctgggcctcctggtgcctttgcagggccccagcgcgggagggcaaagtgaaggagcccatgtggggttgctgtgtctgtggagccctctttgagkggcagaggctcaggcttctccgggctcctggtgatgggctgtcttcccctttcactgtggtttcccgtgtgagtctggggtcatcctttatgtgtccctg

SEQ ID NO: 340785 - DNA, 201 bp, Homo sapiens
atggaacactgaagaaacacaatctgtttatttatattcccacctaaattttagcttctttcttaagtgaattttttttccctgaagtcttgtacatgggrtccattctgaaatggattattgaccaggcatgaggccactctagtgttccaagctaagaagctttaagaggaaaagtctcctgtgtctgttgcacatggt

SEQ ID NO: 340786 - DNA, 201 bp, Homo sapiens
acatgctttaaaaaaaatgacagatgggagaagtgaagacctggcttttgcactcactaaaaattactccagaacttgtttcctccttggtcttcagtttyctcacttgacagttgaggggttggaccagatcaggtgttggcaccttgagggcatattcctgtggtgaggggatactgagaccagctcctatgcagcagg

SEQ ID NO: 340787 - DNA, 201 bp, Homo sapiens
ccaaccctgtcgctataggtccattgcgaatattattatcatcactatttttcaggtggagaaactgatgaaccagttaaatatttgaataaaaacatctrttggcatggaaaagtgattatttcctaagctactgagtaaaacacagctgcactggcagttttaactctgttttcttgtcaatttttgttctttcaggaa

SEQ ID NO: 340788 - DNA, 201 bp, Homo sapiens
gccttgttaaggtatgagaccaaaactaccttgagatgttggggcccagagcaagaaaagtcatggaggcatgggtggctagatggaggcatgggtggctrgatggaggcatgggtggctagaggcctcaggaaggtcattcaccacttgcctttgccgggtgttcccagacacttccaagactctgactgtagaagtgat

SEQ ID NO: 340789 - DNA, 201 bp, Homo sapiens
agacaattccaaaaagccttctggcatggacactctgaggtttcttcatgcttatgtccaagttcactccttttccctcctgcctcttacatcctctctgyggtgcactgtcctggttccccgtctcactctgtctcccaggctagagtgcagtggcatgatctcggctcactgcaacctccgcctcccaggttcaagtga

SEQ ID NO: 340790 - DNA, 201 bp, Homo sapiens; identical to SEQ ID NO: 71794

SEQ ID NO: 340791 - DNA, 201 bp, Homo sapiens; identical to SEQ ID NO: 71796

SEQ ID NO: 340792 - DNA, 201 bp, Homo sapiens
gattggtgtatttacaatccctgagctagacataaaggttctccaaggccccaccagactcaggagcccagctggcttcacccagtggatcccgcaccggygctgcaggtggagctgcctgccagtcccgcgccctgcgcctgcactcctcagcctttgggtggtcgatgggactgggcgctgtggagcagggggtggtgc

SEQ ID NO: 340793 - DNA, 201 bp, Homo sapiens
ccaaccactaatttagtagctaaaacaacagtaacttaccctgctacagatctggaggccagatgtctgaaatgagtcttagggggctaaaatcaaggcaycagcaggactgttttcttggggagtctctagggaggattccttccttgccttttccagcttctggcatttctgagctatggccatatcattctcaactct

SEQ ID NO: 340794 - DNA, 201 bp, Homo sapiens
cttttgccatataccgtaacattcacagattccaggaattagaccctgcttatctttgggagctatccttcattctaccagacagaagttacaaattcccrcatctagaaggcacagataggtaaccttaaagagggaagcaggatgaacgtaaggcattagggagtggtggggtctacagtgaacctgtaagcacatgcc

SEQ ID NO: 340795 - DNA, 201 bp, Homo sapiens
ggaagacatggagggtctgggaggagaactggttattttttttttggagtgaacagatttcgaattaacatctagttggtgccatatcctatcagtgtgayttataaattctctcatttgatccttgcagggattttataagattagcattattatcctcacttacatatgagtaaaatgaagttcagatagtttgagtca

SEQ ID NO: 340796 - DNA, 201 bp, Homo sapiens
ctctctctctctctgatgttatcatcctaattattggaagacatggagggtctgggaggagaactggttattttttttttggagtgaacagatttcgaatkaacatctagttggtgccatatcctatcagtgtgacttataaattctctcatttgatccttgcagggattttataagattagcattattatcctcacttac

SEQ ID NO: 340797 - DNA, 201 bp, Homo sapiens
tttatattcccacctaaattttagcttctttcttaagtgaattttttttccctgaagtcttgtacatgggatccattctgaaatggattattgaccaggcrtgaggccactctagtgttccaagctaagaagctttaagaggaaaagtctcctgtgtctgttgcacatggtcagaagccagtagaatgatctcggaatcaa

SEQ ID NO: 340798 - DNA, 201 bp, Homo sapiens
aacaataaatgtttatttctcacagttctggaggctaaagtccaacatcagggtactagcatggtcaggttttggtgagggctctttcctggcttgcagayggcccccttcttgctgtattctcacaaggagaatacagttcaagaccagcctggtcaacatagcaagaccccatctctacaataataataaattaataag

SEQ ID NO: 340799 - DNA, 201 bp, Homo sapiens
atttgcttgaactgtctgccaggctgactcagaggtgcaggtgacagcacactgtaatcatgtttacttatgtacgttgatttgcaatatgttaactttgygccttgatctcatttcttctctgctttcccccttctctacccctggtttaattttgagtcaagtcaatgctgctgctgctaggagttacgggcagtggct

SEQ ID NO: 340800 - DNA, 201 bp, Homo sapiens
ggagctcaagatgccctggaatgtcaccccaaattttgcatgtaggaatacttttctggggagagagttcatccattcatgaacatttaccagattctccraagggcgtgggttgccaaatgcttaggaacttccgctttcagtgtttagcaggttagcggggaaatattagtcccattatttaagctgagatttgcgagg

SEQ ID NO: 340801 - DNA, 201 bp, Homo sapiens
ttagattaagcagtttcctttttcttcttgcactagcctcatgatgtttttgttttccagcaactttgctgcttaaagtgtgatccaaagacgagcagtayaggcctcacatgggcttgttagaaatacagatcccaggcccagccttacctactgaatctgcggtttaatcaacataaaatccacagcagattcatatgt

SEQ ID NO: 340802 - DNA, 201 bp, Homo sapiens
tctgcttgacatcatttaggttctttagacctcagtttctctccccgcaaaatgcaagtaataaaaaataatgtccctagctcacgagagtctttgcaagstttacagagtggtcagctcgtccatggaacataaatatctattcaaagggaatggaagaaagcattatgcatagacttttacacttggaggaaatggcca

SEQ ID NO: 340803 - DNA, 201 bp, Homo sapiens
agggctatgttgtgtacctagggggtagctaaatccatttgtgcaaaccaagttagcatgaagatatcaattttttaaaaatacaacaaacaggctgggcrtggtggctcatgcctatagtcccagcactttgggaggccgaggcaggtggattacttgaggtcagcagtttgcaaccagcctggccaacatgctgaaatc

SEQ ID NO: 340804 - DNA, 201 bp, Homo sapiens
cggtaagatcctaatgagctctgtaaccctatctttgtagtcctatcaacggagactcaaaggagatatgccataatgttatcaaggaatctctctggtcrtgggactcagggttttcattttcttttttctttctttttttttttttttgagatggagtgttgctctcttacccaggctagagcgcagtggcgcgatctc

SEQ ID NO: 340805 - DNA, 201 bp, Homo sapiens
aggttacaccggagctggaaagaggtaggaatggagattccaatccaggtctctctgagtccagagcccatatgcccttcctatctttgctactcatagcrtagtcattgaaccagcatggtggatatcacttacatgcttggtagaagtgcacagattcacatcctacccccaggtctgctttttaacaagacttatgca

SEQ ID NO: 340806 - DNA, 201 bp, Homo sapiens
acaaagaagtgggctgtgtgcggtggctcctacctgtaatcccagtgctttgggattacactgggtaatcctccaggatcgctcgaggccaggaattccasactagcctggacaacctggtgagaccttgtctttacaaaaaattataaaaagtggctgggcgcggtggctcacgtctgtaatcccagcactttgggaggc

SEQ ID NO: 340807 - DNA, 201 bp, Homo sapiens
tggtggcacccatctgtagtcccaactattttggaggctgaggtaggagaatcacttgagcccgggaggtggaggttgcagtgagcccagattgtgccacygcactccagcctgggcgacagagcaagactctgtctcaaaaaaaaaaattaatacaagttattaaatagctgagcatagttgtgtgaatctgtagtgcca

SEQ ID NO: 340808 - DNA, 201 bp, Homo sapiens
tgagcccagattgtgccaccgcactccagcctgggcgacagagcaagactctgtctcaaaaaaaaaaattaatacaagttattaaatagctgagcatagtkgtgtgaatctgtagtgccagctaactcgggtggctgaactgggagaatcacttgagtccaggagttcaaggctgcagtgagccataatggtgccaccgta

SEQ ID NO: 340809 - DNA, 201 bp, Homo sapiens
gccagggatgtgtgatggctgcagtttcaggtgcctgcaatcttatcccgcctactccagcttcatctccaaccctctcctcatgttcctcacattgcacrtgtttctgttccttgaacatatgcttttccctgcctcagggcctttgcactggctgttgcctcttattggcgaggtctctcctcaggcttcaagcagctg

SEQ ID NO: 340810 - DNA, 201 bp, Homo sapiens
cctacgggctgagtattccgtatctggaatgcttgggaccagaagtatttcagattttggatttttaaagagtttggactatttgcattatacttaaccgrctgagcatccctaatcctcccatgagtatttcctttgagtgtcaggtcagtgctcaaacagtttcggagtttggagtattttggattttcagatttggga

SEQ ID NO: 340811 - DNA, 201 bp, Homo sapiens
gatgtcagtcatcaaaatggttgatgcaaccatcgttcaggaggctcacccagccagggatgtgtgatggctgcagtttcaggtgcctgcaatcttatccygcctactccagcttcatctccaaccctctcctcatgttcctcacattgcacatgtttctgttccttgaacatatgcttttccctgcctcagggcctttgc

SEQ ID NO: 340812 - DNA, 201 bp, Homo sapiens
agaggagagagagagagagagagagagagacagaggagagagagagagagagacagaggagagagagagagagagagacagagagagagagagagagagasagagacagagagagagagaacaggattccttttgagcttctccccgcatggacaactaagccagcattctgatgttggaatgccaaacaggcaccaaata

SEQ ID NO: 340813 - DNA, 201 bp, Homo sapiens
agattttggatttttaaagagtttggactatttgcattatacttaaccggctgagcatccctaatcctcccatgagtatttcctttgagtgtcaggtcagygctcaaacagtttcggagtttggagtattttggattttcagatttgggatgcgctgcctatactaactttttaaataatcatcttatttatattttagtt

SEQ ID NO: 340814 - DNA, 201 bp, Homo sapiens
ggcggatcacctgaggtcaggagttcgagaccagcctggccaacatggcaaaaccctgtctccactaaaagtacaaaaattatctgggcatattggcacaygcctgtagtcccagctactctggaggctgaggcaggagaatcgcttaaacctgggaggcggaggttgcagtgagctgagatcgtgtcactgcactccagc

SEQ ID NO: 340815 - DNA, 201 bp, Homo sapiens
tcaggtgatccacctgcctcggcctcccaaagtgctgggattacaaagtgcgtgggtggcacccaggcagaaatgggatttagatgtcagtcatcaaaatsgttgatgcaaccatcgttcaggaggctcacccagccagggatgtgtgatggctgcagtttcaggtgcctgcaatcttatcccgcctactccagcttcatc

SEQ ID NO: 340816 - DNA, 201 bp, Homo sapiens
tgtagtcctatcaacggagactcaaaggagatatgccataatgttatcaaggaatctctctggtcatgggactcagggttttcattttcttttttctttctttttttttttttttgagatggagtgttgctctcttacccaggctagagcgcagtggcgcgatctcggctcactgcaacctctgcctccctggttcaagag

SEQ ID NO: 340817 - DNA, 201 bp, Homo sapiens
gatctgcctacctcggcttcccgaaatgctgggattacaggcatgagccactgcacctggccttctttttcttcttcttgttctttttttttttttttttatttcaatcctgttccttctgtatttttttatttttattttttaatttttaatctatgttaaaaatctctttttaatctatgttaaaaatccagtagaaag

SEQ ID NO: 340818 - DNA, 201 bp, Homo sapiens
tgaggttaagtaacacgcccagagttggtgagtggccaagccaatattcaaactcagatttcctcattctagagccttattctttcagggctgggcagaaytggggaatcagcaaagagaatccatcaagatttggccagctttcccatatggctgtcaaagagcaggaggccaggcgtggtggttcacatctgtaattcc

SEQ ID NO: 340819 - DNA, 201 bp, Homo sapiens
tcggcttcccgaaatgctgggattacaggcatgagccactgcacctggccttctttttcttcttcttgttctttttttttttttttttatttcaatcctgytccttctgtatttttttatttttattttttaatttttaatctatgttaaaaatctctttttaatctatgttaaaaatccagtagaaagccaggtgcagtg

SEQ ID NO: 340820 - DNA, 201 bp, Homo sapiens
ctgaggtgggaggatggcttgaggaggaggttgcagtgagctgagattatgccactgcacttcagcctgggtgacagagccagatcctgtctcaaaaaaaraaaaaaagaaaaaaagaaaaaaaaatcaaacagagaaataatgggtggcttaggagagagagaaaaacaggaaagaatgtaaatgactcatggagttgca

SEQ ID NO: 340821 - DNA, 201 bp, Homo sapiens
tcaccctgctggccaggctggtctcgaactcctgacctcaagtgatctgctggcctcggtctcccaaagtgctgggatcacaggcatgagccactgcaccyggcccatcttatatattctgtcctattgacagacctgctattacatgaagtcccaattgttgacttcggaaaacgctgagttgcacgccatacacagagg

SEQ ID NO: 340822 - DNA, 201 bp, Homo sapiens
ggctggaagggacggagatagggaaagctgcaaagactgggtgaggagtttggattgaccctgcaggctgcaatgagccctagtacgtttcttttgtttctttcttctttcttttttgagatggagttttgctctcgttgcccaggctggagtgcaatggcgcgatctcggctcaccgcaacctctgcctcccaggttcaa

SEQ ID NO: 340823 - DNA, 201 bp, Homo sapiens
tgtgcttccagctactcgggaggctgcggtgggagaactgcttgaacccaggaggcagaggttgcagtgagctgagattgtgccgctgcgctccagcctgmgtgacaagaacgagactccgtctcaaaaaacaaaaacaaaaaaactcctgggctcaagtgaccctactcagcctctcaagtggctaggactataggtatg

SEQ ID NO: 340824 - DNA, 201 bp, Homo sapiens
ctggagttgactggtgtggactccaggcttgtatctgtcagtgtgtgtttgggcacagggatagggagaccagaccctgaaaaagacagtaatatgttccwgggagcatctagcatcatctagcatgttttattttcttttgctgtttcgagacaggatcttgctctatcacccaggctggagtgcagtggtatgatcata

SEQ ID NO: 340825 - DNA, 201 bp, Homo sapiens
gtctgggttagagaaggttgtctgtgatgccagggtctagtggaagatggcaaaatggtggggcgggggacaagtggttattgcagcagtccatttcagasagaccccttgcccatccatccccagggagccaccaccagagaggccagtgggctgagagctgcaggtgttcatttccccctgcatgagggaagccctgcc

SEQ ID NO: 340826 - DNA, 201 bp, Homo sapiens
ctggagtgcagtggcacaatctgggctcactgcaacctccgcctcctgggttcaagccattctcttgctggctgggattacaggcacgcgtcaccatgccyggctaatttttgtatttttagtagagacagggtttcaccatgttggccaggctggtcttgaactcctgacctcaggtgatccacccacctcggccttcca

SEQ ID NO: 340827 - DNA, 201 bp, Homo sapiens
gcccagctggtctcaaactcctgacctcaaatgatccgcctgcctcggcctcccaaagtgctgggattacaggtgtgagccactacgcctggcaaaaaaataaaataaaataaaatttatttaattgtggacttttataattgaatttttagcaatggccatgtttaacaactggtttgcaaaatacttgaaatttgagcc

SEQ ID NO: 340828 - DNA, 201 bp, Homo sapiens
caaatctcagaacaaaattatttaaatcacattacatttaggagtgaatgcacgtcacattaaactgtgtgacacagttgtgggtcgtgggatctcattgrcaatattgggaagggctgtgtgtgggaccagtggattttgccccgatcgagtcacgctttcttcagatagttgttgaagttgttccacctgccctgttcc

SEQ ID NO: 340829 - DNA, 201 bp, Homo sapiens
gctagatacagagtgccgattggtgtatttacaatccctgagctagacataaaggttctccaaggccccaccagactcaggagcccagctggcttcacccrgtggatcccgcaccggcgctgcaggtggagctgcctgccagtcccgcgccctgcgcctgcactcctcagcctttgggtggtcgatgggactgggcgctgt

SEQ ID NO: 340830 - DNA, 201 bp, Homo sapiens
tttttaaaattaaaaaaattttttttctaatagagatggggtcttgctatgttgcccaggttggtctggaactcctggggtcaggtgatcctcctgtctcrgcatcccagagtgttgggattacaggcgtgagccgctgtgcccagccattatgttttattttaatgttagtaacgctttggcttgcatagcacattttta

SEQ ID NO: 340831 - DNA, 201 bp, Homo sapiens
aggcacctgccaccacacccagctaattttttaaaaaatattattggtagagacagggtttcaccatgttgaccaggctggtcttgaactcctgacctcargtgatccacctgcctcggcctcccaaagtgttgggattacaggcgtgagccaccgcacctggtcctaacacatacattttctttataaggcacatcaaag

SEQ ID NO: 340832 - DNA, 201 bp, Homo sapiens
gtcaagttgatataaatatgaatacagaaaagtgaaagagaatgtgtgggagagggggcgggggatccattcacatggatcccattggttttagagataaycagtgttaatatcggtgtgtacctgggtgatgtcataagatgaaagaagggtcttgcacgtgacctgcctccacagacacaagtacaggatggggaaaat

SEQ ID NO: 340833 - DNA, 201 bp, Homo sapiens
ctttggaattggatcttaagaactgattaagtgttttggggcaagataacagggagaatactgctgagagaggaataacatagatgaggcacaggaagtargtgaggtgcttgggacactggcatatagaaagagtctttgacagggaaggaaggtcaggctggaagggacggagatagggaaagctgcaaagactgggtg

SEQ ID NO: 340834 - DNA, 201 bp, Homo sapiens; identical to SEQ ID NO: 71786

SEQ ID NO: 340835 - DNA, 201 bp, Homo sapiens
gaggcagggttttgccatcttggcccagctggtctcaaactcctgacctcaaatgatccgcctgcctcggcctcccaaagtgctgggattacaggtgtgakccactacgcctggcaaaaaaataaaataaaataaaatttatttaattgtggacttttataattgaatttttagcaatggccatgtttaacaactggtttg

SEQ ID NO: 340836 - DNA, 201 bp, Homo sapiens
aacttcatccctccatccatctaaccattaatttatttcatccattcaaaaaatatttagtgtacaactgtacaaggtttttaatgtacattgtctccagttcttacaagagtgagagggtggcagtcatagctccatttacagatgaagaaaaagagaggctaggccgggcgcggtggctcacgcctgtaatcccagcac

SEQ ID NO: 340837 - DNA, 201 bp, Homo sapiens
tagccgggcgtggtggcgggcgcctgtagtcccagctactcgggaggctgaggcaggagaatggcgtgaacctgggaggcggagcttgcagagacagagcygagatctgcactccagcctgggcgagagtgtgagactccgtctcaaaaaaaaaaaaaaaaaaaaagaaggagagaggctcagagagggtaagtaatttgc

SEQ ID NO: 340838 - DNA, 201 bp, Homo sapiens
ctgtgtattagtccacagactaatacacacaatcgcaccattcttgaattagagggaaccaaaaaggtctatctgtctgtctgtctgccagttctatctawctgtcatctatctatctatctatcaattgatcgatcgatcgatcgaaacaccaatactccaagagataaaataaactcacattgctataaagaactacct

SEQ ID NO: 340839 - DNA, 201 bp, Homo sapiens
aatgagaattcactcaccatcatgagaacagcaaagggaaaatccgctctcatgacccagtcgccttccaccaggcccctcctccaacactggggattacrattcgtcatgagatttgggtggggacacagagccaaaccgtatcaggctgttttccctgctgtcaaactcaatcctgacctatgaccctcagctgtctcc

SEQ ID NO: 340840 - DNA, 201 bp, Homo sapiens
tggtctcaaactcctgacctcaaatgatccgcctgcctcggcctcccaaagtgctgggattacaggtgtgagccactacgcctggcaaaaaaataaaataraataaaatttatttaattgtggacttttataattgaatttttagcaatggccatgtttaacaactggtttgcaaaatacttgaaatttgagccagatcta

SEQ ID NO: 340841 - DNA, 201 bp, Homo sapiens
gggagggcaaagtgaaggagcccatgtggggttgctgtgtctgtggagccctctttgaggggcagaggctcaggcttctccgggctcctggtgatgggctstcttcccctttcactgtggtttcccgtgtgagtctggggtcatcctttatgtgtccctgtggacaccgtctcggccccagagagcaaagcctggcttgta

SEQ ID NO: 340842 - DNA, 201 bp, Homo sapiens
catgttttattttcttttgctgtttcgagacaggatcttgctctatcacccaggctggagtgcagtggtatgatcatagctcactgcagcgttgacctccyaggctcaaacaatcctctcacctcagcttccaagtagctaggaccacaggtgtgcaccaccatgcctggttaacttttgtatttttttgtagggaggggt

SEQ ID NO: 340843 - DNA, 201 bp, Homo sapiens
tatgtgtccttgaaattcctgtgatcaacttgagacaaccatttatctcttagaaaggaacaaggctggccaggcacagtggctcacgcctgtaatcccakcactttgggaggccgaggagggcagctcacccgaggtcaggagtttgaggccaacctagccaacgtagcaaaaccccatctctactaaaaatacaaaatt

SEQ ID NO: 340844 - DNA, 201 bp, Homo sapiens
aaaatggggaaggcagacgcccctgtcttgggacttgtgtccagggttttatgcatagcaaagagaactgagtgcaagcacagtcccaggcggcagaccckgggagccagggtgcaggggggatttgagggcacagttggctatagagcaaggctgtaaggtggtgtaaaccagggtgagctaaggagaaccctggggcca

SEQ ID NO: 340845 - DNA, 201 bp, Homo sapiens; identical to SEQ ID NO: 71791

SEQ ID NO: 340846 - DNA, 201 bp, Homo sapiens
cccaaggtattgggattacaggcatgagtcaccgagttctgccaatttttctattagtaagctctgccaccctttctcaggtgctgttccaccccaacagyggggcagctggagagtttggagccctgcagactgtccgcctggagcgttacaaggccttctacattaccggtgagtgaggggccacttagccctgcctcc

SEQ ID NO: 340847 - DNA, 201 bp, Homo sapiens
ttggggcctccaaggccaagtccctggaaaggtttgcacacacagagcagccaccttgctggcccgttgtgtgtcgattcaggctatctgggtattgctcktaattgccattgaatgacattgacattgtgagcctgtgttgtccctgtgcagttctaagatttccctcttctccatcttccctggtcccaaagattctac

SEQ ID NO: 340848 - DNA, 201 bp, Homo sapiens
tgggtggggacacagagccaaaccgtatcaggctgttttccctgctgtcaaactcaatcctgacctatgaccctcagctgtctccaggaggtctccactakcactcccgtcatcgtattagtctggcaggataattgtagttacctagaaactgaagcattgtgcgcctcaattctggtgcagagaaggaaatgctgattt

SEQ ID NO: 340849 - DNA, 201 bp, Homo sapiens
tagctcattgcagcctcaaactcctgagctcaagggattccccccacctcattctcctgagtaccttggactacaggagtgtgccactgcgccccctgcgtttttttttttttttttctgagatagggtcttgctctgttgcccaggctggagtgcagtggcatcattacagctcactgcagcctcaacctcctggattca

SEQ ID NO: 340850 - DNA, 201 bp, Homo sapiens
aaccaggcatctggagagctgtgattcatgtgtacttttgacagcttccttcctatattgatataaacaagaaagccataatgggtcttctcaaacaaacmaaaaaaatgcatagacaagttctccaaagtccatctatgtttctgagaatgagccatcccacagttttgcttcctcgtggattttggaagttgcctctgg

SEQ ID NO: 340851 - DNA, 201 bp, Homo sapiens
agctcattgcagcctcaaactcctgagctcaagggattccccccacctcattctcctgagtaccttggactacaggagtgtgccactgcgccccctgcgtttttttttttttttttctgagatagggtcttgctctgttgcccaggctggagtgcagtggcatcattacagctcactgcagcctcaacctcctggattcaa

SEQ ID NO: 340852 - DNA, 201 bp, Homo sapiens
agggtcttgcacgtgacctgcctccacagacacaagtacaggatggggaaaatgcatttattccacagatatttattgccatgtccaactatgggtcaatyattactccagggactggggagatggcagtcatgagcagaccaaacagaaagctctttgtttaggggctaccttaccttcaggaggccagggctttggcag

SEQ ID NO: 340853 - DNA, 201 bp, Homo sapiens
aatgagtgaaagaccctttggacagcaggtccagcaagggccttacatccaacattctcccagctccagagggctcagcacactcttggcagcctgttttktttttttgtttttttttttgagatggagtcttgctctgtcacccaggctggagtgcagtggtgtgatctcagctcactgcaacctccgcctcctgggttc

SEQ ID NO: 340854 - DNA, 201 bp, Homo sapiens
agtgaaagaccctttggacagcaggtccagcaagggccttacatccaacattctcccagctccagagggctcagcacactcttggcagcctgttttttttktttgtttttttttttgagatggagtcttgctctgtcacccaggctggagtgcagtggtgtgatctcagctcactgcaacctccgcctcctgggttcaagc

SEQ ID NO: 340855 - DNA, 201 bp, Homo sapiens
ctggagtgcagcggcacaatcttggctcactgcaacctccacctcctgggttcaagcgattctcctgcctcagcctcccaagtagctggtattacaggcgytcaccaccacgcctagataatttttgtatttttagtagagacagggtttcactgtgttggccaggctggtgtcaaactcctgacctcaggagatctgcct

SEQ ID NO: 340856 - DNA, 201 bp, Homo sapiens
aagttgatataaatatgaatacagaaaagtgaaagagaatgtgtgggagagggggcgggggatccattcacatggatcccattggttttagagataaccartgttaatatcggtgtgtacctgggtgatgtcataagatgaaagaagggtcttgcacgtgacctgcctccacagacacaagtacaggatggggaaaatgca

SEQ ID NO: 340857 - DNA, 201 bp, Homo sapiens
gatgaaagaagggtcttgcacgtgacctgcctccacagacacaagtacaggatggggaaaatgcatttattccacagatatttattgccatgtccaactaygggtcaatcattactccagggactggggagatggcagtcatgagcagaccaaacagaaagctctttgtttaggggctaccttaccttcaggaggccaggg

SEQ ID NO: 340858 - DNA, 201 bp, Homo sapiens
ggctgagtgcagtggctcctgcctgtaatctcagcactttgggaggccgaggcaggtggatcacttgaggtcaggagtttgagaccaacctggccaacacrgcgaaaccccatctctactaaaaatacaaaaattagctgggtgtgttggcatgcacctgtagacccaactacttaggaggctgatgcaggagaatcgctt

SEQ ID NO: 340859 - DNA, 201 bp, Homo sapiens
cttagagaattgaaaactgaggcattgagaagctagatatgtggcagagctgggatttgagcccaggcaacagctggctgcagagcctgggtgctgaaccrctgcaccattctgcctcttgtaggagcagaaatccaggtggaactgaaaggaaaaacaagcaggtagagaagttaagccagcccataggagaggctgtgg

SEQ ID NO: 340860 - DNA, 201 bp, Homo sapiens
aggagggcaccgggtcccagcactggcttactggcctggcagagttccagttaatgtcaccagcactgccttgttaaggtatgagaccaaaactaccttgrgatgttggggcccagagcaagaaaagtcatggaggcatgggtggctagatggaggcatgggtggctagatggaggcatgggtggctagaggcctcaggaa

SEQ ID NO: 340861 - DNA, 201 bp, Homo sapiens
agggctcaggacttcaacatatcttttggggggacgcagcccaacccacagcaagcagccatggctcagaggctgataggtaggttgagccagagcatgaygggttatggtggctgagacttggggctacaaaatggcatgaccaatcagcgtgctaccatgggttagagagagtgcttcgggtgagggacaaccatcatt

SEQ ID NO: 340862 - DNA, 201 bp, Homo sapiens
ttgagtgcctactgttttctattcctcctatttgttgagcacctactgtgtgccaggaactatgcttagtgctggtgccacaaagatcaacaaagccccarccgcaaggaataatagtctagaatagtgtttctttgattttaatatgcagacagtcccctggggatcttgctaacctacagttctgacccaagagggctg

SEQ ID NO: 340863 - DNA, 201 bp, Homo sapiens
gccacaaagatcaacaaagccccagccgcaaggaataatagtctagaatagtgtttctttgattttaatatgcagacagtcccctggggatcttgctaacmtacagttctgacccaagagggctgggttgctgatgggagttttgcatttctaaggttctcctaggtgacgctgatgtggttggtccagggaccaaacttt

SEQ ID NO: 340864 - DNA, 201 bp, Homo sapiens
gctttggggattttcctggaggagagggaggatccctgaggcaccagatgagccaggagagccttctgcagagtcacctcttggttctcctgtttcagcascagcgggaggcccttcctgctctatgtggctctggcccacatgcacgtgcccttacctgtgactcagctaccagcagcgccacggggcagaagcctgtat

SEQ ID NO: 340865 - DNA, 201 bp, Homo sapiens
aaagtgtggtccctaaccagcatcattagcaccacctgagaaattgttaacagtacaaattttagggcttcaccccgggccaaaagaatcagaagcactcrggatgggtcccaggaatctgtgtttaaacaagtcctttgggcgataatgcaggttaaaatttgagaactacctgtctagagctacacagtctggtatgtc

SEQ ID NO: 340866 - DNA, 201 bp, Homo sapiens
gagccttctgcagagtcacctcttggttctcctgtttcagcaccagcgggaggcccttcctgctctatgtggctctggcccacatgcacgtgcccttaccygtgactcagctaccagcagcgccacggggcagaagcctgtatggtgcagggctctgggagatggacagtctggtgggccagatcaaggacaaagttgacc

SEQ ID NO: 340867 - DNA, 201 bp, Homo sapiens
atagctcattgcagcctcaaactcctgagctcaagggattccccccacctcattctcctgagtaccttggactacaggagtgtgccactgcgccccctgcrtttttttttttttttttctgagatagggtcttgctctgttgcccaggctggagtgcagtggcatcattacagctcactgcagcctcaacctcctggattc

SEQ ID NO: 340868 - DNA, 201 bp, Homo sapiens
cttcctgctctatgtggctctggcccacatgcacgtgcccttacctgtgactcagctaccagcagcgccacggggcagaagcctgtatggtgcagggctcygggagatggacagtctggtgggccagatcaaggacaaagttgaccacacagtgaaggaaaacacattcctctggtttacaggtaaagtagtaaaagccag

SEQ ID NO: 340869 - DNA, 201 bp, Homo sapiens
ccactgatccaaaatgaccaatgagagaagccagtgacaaaatctccaggaatatccccaagttcaaagaacgccaaagttggaaaagacctcagtcatctttttttttttttttgagacaaagtcttgctctgtcgcccaggctggagtgcagaggtgcgatctcagctcactgcaaactccaccttccaggttcaagcg

SEQ ID NO: 340870 - DNA, 201 bp, Homo sapiens
caccttccaggttcaagcgattctcctgcttcagcctcctgagtagctgggattacagacgtgcaccaccacacccgccaccatgtctggtatttttagtrgagacggggtttcaccatgtcggccaggctggccttgaactcctgacctccagtgatctgccctcctcagcctcccaaagtgctgggattacaggcgtga

SEQ ID NO: 340871 - DNA, 201 bp, Homo sapiens; identical to SEQ ID NO: 71793

SEQ ID NO: 340872 - DNA, 201 bp, Homo sapiens
gggtttcaccatgtcggccaggctggccttgaactcctgacctccagtgatctgccctcctcagcctcccaaagtgctgggattacaggcgtgagccaccrtgcttggctgacctcagcgatctttattccaaccaccttattggacaaatgaggaaactgaggccaaggagaatggaaggcatccccgaggccagccagc

SEQ ID NO: 340873 - DNA, 201 bp, Homo sapiens
gcccgcctttcagcctcccaatcctgtactagttttttgtttttgtttttgttttttgagatggagtctcgctctgtcacccaggctggagtgcagtggcrtgatcttggctcactgcaagctctgcctccctggttcacgccattctcctgcctcagcctcccgagtagctgggactacaggcgcccgccacctcgcccg

SEQ ID NO: 340874 - DNA, 201 bp, Homo sapiens
aggaagatgatgaaaccaggcaggaagcgggcatttctgagacgatgtggggcggtgcacctgcaccctgggcctcctggtgcctttgcagggccccagcrcgggagggcaaagtgaaggagcccatgtggggttgctgtgtctgtggagccctctttgaggggcagaggctcaggcttctccgggctcctggtgatgggc

SEQ ID NO: 340875 - DNA, 201 bp, Homo sapiens
tcacattgctataaagaactacctgagacagggtaatttataaagaaaagaggtttaattgactcacagttctgtaggctgtacaggaagcatggctaggraggcctcaggaaacttacaatcatggcagaaggcgaaggggaagcgtgtatgtcctacatgtttggagcaggaggaagagagtgaaggggaaggcgccac

SEQ ID NO: 340876 - DNA, 201 bp, Homo sapiens
ggctggagtgcagtggcgtgatcttggctcactgcaagctctgcctccctggttcacgccattctcctgcctcagcctcccgagtagctgggactacaggygcccgccacctcgcccgccttatttttttgtatttttagtagagacagggtttcaccgtgttagccaggatggtcttgatctcctgacctcgtgatccac

SEQ ID NO: 340877 - DNA, 201 bp, Homo sapiens
ttgtgattgtttctatttgcttgtctgtctctctaattttgggggcagtagtttgccctgtgacttcacttctccaaaagacctaataagagttgctgaatttttttttttttttttttttttttttgagatggagtctcacattgttgcctgggctggagtgcagtggcacgatctcggctcccgggttcacgtggttct

SEQ ID NO: 340878 - DNA, 201 bp, Homo sapiens; identical to SEQ ID NO: 71797

SEQ ID NO: 340879 - DNA, 201 bp, Homo sapiens
tggccaaccagaaaaatcatttggggccagagtgttgtatttatgtgcatatgcattgttgcattaaagcatttagttctgctccgtgagtacgtaggaartgaatactctatggtctgtggtttccacacaggaaccttcaaagagactgttacactgacgtggccctccctctttatgaaaacctcaacattgtggagc

SEQ ID NO: 340880 - DNA, 201 bp, Homo sapiens
ctgaatgggaaaaggagccggtagaaggcatgactcctgggtcacagagctagctgggcctctgttccttttgaggtctgggaccgtgcattgcacctacrcgggcaatacagggcttgataagcaggagtgtatcgggcatcaggatgagcagcggcccagcatgtttgaaatcagacatttcttagttttctttttttg

SEQ ID NO: 340881 - DNA, 201 bp, Homo sapiens
tcttattaattaattaatcattattattgtaaagatgggctcttgctatgttgccgaggctgattttgaactcctgggctcaagcagtccttccacttcascttcccaaaatgctgggattataggtatgaggcaccactcccagccaagtcctcttttcacaaatgcacttatctcatcatggaagctgatggaaccctc

SEQ ID NO: 340882 - DNA, 201 bp, Homo sapiens
tcccaaaatgctgggattataggtatgaggcaccactcccagccaagtcctcttttcacaaatgcacttatctcatcatggaagctgatggaaccctcatwaccttatctaaatctaattaccacctaaagggcccatgtccacatatggacacactggggattcgggtttccacatatgaatttcggagggacacaaaca

SEQ ID NO: 340883 - DNA, 201 bp, Homo sapiens
caggtgcacgccactatgcctggctaattttttgtatttttagtagagatggggcttcaccatgttgaccaggctggtcttgaactcctgacctcaggtgrtctgcctgccttggcttcccaaagtgctgagattacaggcatgagccaccgcacccagccccattttccttatagcacttgagctcaacgtttgagctta

SEQ ID NO: 340884 - DNA, 201 bp, Homo sapiens
ttctgagaatgagccatcccacagttttgcttcctcgtggattttggaagttgcctctggtaacgccacataaatagtgggaatatagcagcccaccctcmtggaatttctgtgactgagacgcaagtactgtgactgatctgaagcagcaacttcactcccatcttctgcatgtccgcgtgcatcgtatatcagttgaca

SEQ ID NO: 340885 - DNA, 201 bp, Homo sapiens
atatttagatctctgatccatttccagttaatttttgtatgtggcataagtaagggtccaacttcattgttttacatgttgacatccagttttcccagcaycatttattgaaaacactgtcctttccccattgaatggtcttggcacccttgttaaaaatcatttgatcatacatgtgagggataatttccactgtctatt

SEQ ID NO: 340886 - DNA, 201 bp, Homo sapiens
aattttgagggctatcttttgctttaattccctttgtttatttaattatgtcatatttatttccatcagacccttaactgctttttctatagcaaagccaaaaaaaaaaaaaaaaaaagtcatcggaatcataaagagccaaggaagctgctatcattccaaacatttttgtccttcctcttctggatggctttcacagcc

SEQ ID NO: 340887 - DNA, 201 bp, Homo sapiens
tttgtagtctttcatcccttgccccctcccactttacccccaagtccccaaagtccactgtgtcattcttatgcttttatgtcctcctcataacttagctyccacatatcagtgagaacatacgatgtttggtttttcatttctgagttacttcacttagaataatagcctccagtctcacccaggttgctgcaaatgctg

SEQ ID NO: 340888 - DNA, 201 bp, Homo sapiens
tggttcaggtgggggttgacacggcagggtcagggagcgagtcagaagagctggggacaactcagtcttgttatttccgcagcgtgctggacatttttccractgtggtagccctggcccaggccagcttacctcaaggacggcgctttgatggtgtggacgtctccgaggtgctctttggccggtcacagcctgggcaca

SEQ ID NO: 340889 - DNA, 201 bp, Homo sapiens
gccatgcccagctaatttttgtatttttagtagagacagggtttcaccctgctggccaggctggtctcgaactcctgacctcaagtgatctgctggcctcrgtctcccaaagtgctgggatcacaggcatgagccactgcacctggcccatcttatatattctgtcctattgacagacctgctattacatgaagtcccaat

SEQ ID NO: 340890 - DNA, 201 bp, Homo sapiens
caagtgatctgctggcctcggtctcccaaagtgctgggatcacaggcatgagccactgcacctggcccatcttatatattctgtcctattgacagacctgstattacatgaagtcccaattgttgacttcggaaaacgctgagttgcacgccatacacagaggctgggattgaagtgagacagcagagaaagccagcaatg

SEQ ID NO: 340891 - DNA, 201 bp, Homo sapiens
catgtcggccaggctggccttgaactcctgacctccagtgatctgccctcctcagcctcccaaagtgctgggattacaggcgtgagccaccatgcttggcygacctcagcgatctttattccaaccaccttattggacaaatgaggaaactgaggccaaggagaatggaaggcatccccgaggccagccagcaatggaggg

SEQ ID NO: 340892 - DNA, 201 bp, Homo sapiens
atccccgaggccagccagcaatggaggggtccacatcctctgaccatcactggctcattctccaagtcacgtgactgctctcacgcacaccttgttatacycgactcctcagccacctggaaaatcctatcttgctctttgaacctagcaattgtcaaggaaaagtctttagcccttgcaacagtctgaatctttctacat

SEQ ID NO: 340893 - DNA, 201 bp, Homo sapiens
tgggggtactgcccaggaggctcccagccttgcacctggcctctaatgataacccccattagactaaatttcttcattcctggctgaaacaacctggcggraccccacccatagaagcattagaaggggattggcaaacaccctgaaaaagattcccccacaaaaggatcaggcaacttaaatcgcatacagataacttta

SEQ ID NO: 340894 - DNA, 201 bp, Homo sapiens
gcagagcaaagcagccctgccttctcccgaagaagaagggcacgagtcagacacccctgctgtctctgagtccacagcctggtccaggaggcctggctctcccagcagccgccttcccttctccatgccagatctgtttcctacccaggacagaaccaacaccttgtttttcccctaactgactgctcctctgtctggaaa

SEQ ID NO: 340895 - DNA, 201 bp, Homo sapiens
ccttgacctccggggctcaagcaatcctcctgcttcagcctccctagtagcttagtagctgggactgcaggtgtgtgccaccatgcctggaacactacaattttttttttttttttttttttttttttttacagagatggagcagaggggtcttgcttgttgcccaggctggtttcgaactcctggcttcaagtgatcttc

SEQ ID NO: 340896 - DNA, 201 bp, Homo sapiens
tctcctcttcctcctcctcttcttccttagcctactcaacgtgaagacaacgaggatgaagccctttatgatgatccacttccacttaatgaatagaaaayatattttgtctttcttccaattttctttttccttccttccttccttctaccttccttcctccttccttccttcctttctctctttctttctttctttact

SEQ ID NO: 340897 - DNA, 201 bp, Homo sapiens
tcgcagctctcgtctttacaacacagggcaactgtcagggttagcgaggcatttgttgtcattccctctctaggtggagccagggcgtgtgatgggagcayggggcctgagctgcagcataagtttcctctgattttcaacctggaagacgataccgcagaagctgtgcccctagaaagaggtggtgcggagtaccaggct

SEQ ID NO: 340898 - DNA, 201 bp, Homo sapiens
cctcttcctcctcctcttcttccttagcctactcaacgtgaagacaacgaggatgaagccctttatgatgatccacttccacttaatgaatagaaaatatrttttgtctttcttccaattttctttttccttccttccttccttctaccttccttcctccttccttccttcctttctctctttctttctttctttactctt

SEQ ID NO: 340899 - DNA, 201 bp, Homo sapiens
cctgtcttggcctcccaaagtggtgggattacaggtttgagctactgtgcctggccaggattttcttactaacattttcttttctctagctcattttattrtaagtctacagtatataatacatgtaacatactaaatgtgtcttaattaaatgtttatgttattggtacggcttcctggtcaacataaggctattagtag

SEQ ID NO: 340900 - DNA, 201 bp, Homo sapiens
gcagtgacgatgactattagctacatttaactttgaaacgtgctgtgttctcttcccgatcttgccccttgccctccttccctgggaatgagtgctctccmcactaaatccccaggagggttttagaagatattgatgtcagagcttcactgcaggtcgattaaatcacagtctctgggaaagagactttggcatgcgtat

SEQ ID NO: 340901 - DNA, 201 bp, Homo sapiens
ccagtgattctaatacatattcaaaatggaaccacctccctaggtttagtgagtgagggtgctggctgtgtagtcagaccggcgttcacatcttggctctrtcattttctttctttcctttttttttttttgacagagtctctgtcgtgcaggctggagtgaagtggctcaattttggctcactgcaacctccgcctcccg

SEQ ID NO: 340902 - DNA, 201 bp, Homo sapiens
gtctggagttgttcgttcctcccggtgggctcgtggtctcgctggcttcaggagtgaagctgcagaccttcatggtgagtgttacagctcataaaagcagygtggacccaaagagtgagcagtagcaagatttattgcagagagcgaaagaacaaagcttccacagtgtggaaagggacctgagcgggttgccactgctgg

SEQ ID NO: 340903 - DNA, 201 bp, Homo sapiens
acaggagcccacggagggggtgggaggctcaggcatggcgggctgcaggtcccgagccctgccccacaggaaggcagctaaggctcggtgagaaatcgagygcagtgctggtgggctggccctgctgagggacctagtacaccctccgcagctgctggcccgggttctaagcccctcattgcccggggcccgcagggccag

SEQ ID NO: 340904 - DNA, 201 bp, Homo sapiens
ggccctgctgagggacctagtacaccctccgcagctgctggcccgggttctaagcccctcattgcccggggcccgcagggccagctggctgctccgagtgyggggcccgccaagcccacgcccacccggaactccagctggcccacaagcgcagcacgcagccccagttcccgctcgcgcctctccctccacacctccctg

SEQ ID NO: 340905 - DNA, 201 bp, Homo sapiens
gggttctaagcccctcattgcccggggcccgcagggccagctggctgctccgagtgcggggcccgccaagcccacgcccacccggaactccagctggcccrcaagcgcagcacgcagccccagttcccgctcgcgcctctccctccacacctccctgcaagccgagggagccggctctcgccttggccagcctagaaaggg

SEQ ID NO: 340906 - DNA, 201 bp, Homo sapiens
tcactggattttggcaaactcgtcaaggtaaggggctcagctggggttggtggatcccattgcaatgctgagcccaggctggggtgtgggattctgcctcygggtgggggacaacttatatctgggccttagggtcatcattgtgaaacagggacacatttgctcaccagccaccagcacccagacaagaaggaacaagta

SEQ ID NO: 340907 - DNA, 201 bp, Homo sapiens
tggctgctccgagtgcggggcccgccaagcccacgcccacccggaactccagctggcccacaagcgcagcacgcagccccagttcccgctcgcgcctctcsctccacacctccctgcaagccgagggagccggctctcgccttggccagcctagaaaggggatcctacagtgcagcggtgggctgaagggctcaagtgcca

SEQ ID NO: 340908 - DNA, 201 bp, Homo sapiens
cctgtggacaccgtctcggccccagagagcaaagcctggcttgtacaccacattgcagcttcttttggcttgtccacagtgcgaggcgaagctaatggagrgctgagtgtgtgatcagctcctcagggggctgtggtacccctatggggattcctctgaaaatctctcttatgtttttctacaggcaaatggcatcttgga

SEQ ID NO: 340909 - DNA, 201 bp, Homo sapiens
aataaggtcacatcacaggttctggattgatatgaaattgaggggaacgctgttcagtctggtgcaattagctgtattacgtatctctctctctctttttyttttttttttttttgagacacagtttcactctgttgcccaggctggagtgcagtggtgcaatcttggctcactgcaacctccgcctccgggttcaagcga

SEQ ID NO: 340910 - DNA, 201 bp, Homo sapiens; identical to SEQ ID NO: 71783

SEQ ID NO: 340911 - DNA, 201 bp, Homo sapiens
ttcgttggtacagggtgccttgtatggccagtagtgtacagccaaggggccgctgagcagctttgcaaccttgtaggcgtaatttaacctcgtagagcgtkaatttctccagatctgtaaaatggggatggaggtggtattcccagaattggagggtttaatttatggtacttgtaaagtgcggatcgcagtgactggcat

SEQ ID NO: 340912 - DNA, 201 bp, Homo sapiens
ctttgaaaatcctcaatggaatgtttcatcatggaacactgaagaaacacaatctgtttatttatattcccacctaaattttagcttctttcttaagtgawttttttttccctgaagtcttgtacatgggatccattctgaaatggattattgaccaggcatgaggccactctagtgttccaagctaagaagctttaagag

SEQ ID NO: 340913 - DNA, 201 bp, Homo sapiens
tagtgagtgagggtgctggctgtgtagtcagaccggcgttcacatcttggctctatcattttctttctttcctttttttttttttgacagagtctctgtcrtgcaggctggagtgaagtggctcaattttggctcactgcaacctccgcctcccgggttcaagtgattctcctgcctcagcctcctgagtagctgggatta

SEQ ID NO: 340914 - DNA, 201 bp, Homo sapiens
gctgggattacaggcatgcgccaccacgcctggctaatttttgtatttttagtagagatggggtttcaccatgttaggctggtctcgaactcctgacctcrtgatctgcccacctcagcctcccaaagtgctgggattacaggcgtgagccactgcacccggccggctctatcattttctagctatgtgacttgggggcaa

SEQ ID NO: 340915 - DNA, 201 bp, Homo sapiens
ttacaattgcctgttcacactctagacccttttaagataaatccctttagaatacaaggtctgtggacctgtgatcatttgggtggctggcatatataatygtgtcttcctgttagagccagaacccaggatgtagcctgcactaaccaactagtctgtacaacaaaaagaggggattgctccttaagtggccacactgag

SEQ ID NO: 340916 - DNA, 201 bp, Homo sapiens
attcctcctgcctctggccatgatgcttcttaatgagctgagtgtctgcatagctcactgcagacccatcacatcaggtaaatgtgatgtctcaccattaytcttattgccgccttaaggcagatccaggaggccatctccatggcaaagaacttggctgtgcagcgtctatgtgaaaacaacatcttcccagctatggaa

SEQ ID NO: 340917 - DNA, 201 bp, Homo sapiens
actcttccctcctgggcctcccaaagcactgggattacaggcatgagccatcacacacagccaaggctagtttttggtgttaaattaggctggatttcagycagccagttttacctctatagatttaccttcttgctgtttcccatatgaatccatgttaagcaaatttgggcggagtttcctactgcctggacaggctgt

SEQ ID NO: 340918 - DNA, 201 bp, Homo sapiens
ccatgaggcatagtgccagagtccatggaattttggaattttttttttaagatggaatttccctcttgtcactcaggctggagtgcaatggcacgatctcrgatcactgcaacctccacctcctgggttcaagtgattctcctgcctcagcctcccgggtagctgggattacaggtgcctgccaccatgcctggctaattt

SEQ ID NO: 340919 - DNA, 201 bp, Homo sapiens
gccctgccccaccaaggtgctgtgcttggggctggagttgcaactctaagccccatctcatgaaacctacacccggcaaaggaactcaaaactgcatcccrctgtagaaatgtacgatagctggccgggcgcggtggctcatgcctataatcccagcactctgggaggctgaggcaggcggatcacaaggtcaagagatcg

SEQ ID NO: 340920 - DNA, 201 bp, Homo sapiens
ggctggtctcaaacttctgacctcaggtgatccacccacctcagccttccaaagtgttgggattacaggcgtgaggcaccgcacctggccgcattcactaytttgtaatggactaaaagagctaaaataaagccggtggaatgttccacatatcatggcattttgaacaaaaactagatcttttataacacagagacccgc

SEQ ID NO: 340921 - DNA, 201 bp, Homo sapiens
agataaggcttgctggcctgaatgctgagcacctgtccattggggcctccaaggccaagtccctggaaaggtttgcacacacagagcagccaccttgctgscccgttgtgtgtcgattcaggctatctgggtattgctcttaattgccattgaatgacattgacattgtgagcctgtgttgtccctgtgcagttctaagat

SEQ ID NO: 340922 - DNA, 201 bp, Homo sapiens
atgctgtctgacacatttgcgataggctccaggacaaggcaaagttccaagactgtggtccatcagcaataaattaaagatgcagacaggaaacagttaaracggcaaataagatacacggtacattctgtgcaaatttaaatgtgttatttgcagggagtgcaagaaacctttcaacgatgaggtccacaaaattcttct

SEQ ID NO: 340923 - DNA, 201 bp, Homo sapiens
caccgcacctggccgcattcactactttgtaatggactaaaagagctaaaataaagccggtggaatgttccacatatcatggcattttgaacaaaaactaratcttttataacacagagacccgcctaatggaaaaggcagtgaatattctcttgtggacacctgtcccacactgtttcctctaagccaatggctgtcacc

SEQ ID NO: 340924 - DNA, 201 bp, Homo sapiens
aggcaaatggaggcagggcgagatcacaggaccgaggcaaaattagaattgctaatgaagtttccgacatgcattgtcattgataacatcttattaggagrcagggtttgagagcagacaaccggtctgaccaaaatttattaggtgggaatttcctcgtcctaataagcctgggagcactacgggcgaccggggattatt

SEQ ID NO: 340925 - DNA, 201 bp, Homo sapiens
acctgtcccacactgtttcctctaagccaatggctgtcaccaagctggtgacaggtagaacgcctcagttcttaggtgggctcacagggattacccttgtraatcattaagacacaaacatccagtgaggactttctgagtgccaggtcttcttctctgtgccttacatgtgtgtttcatgcacacaaccacctgtgagct

SEQ ID NO: 340926 - DNA, 201 bp, Homo sapiens
taattttgagggctatcttttgctttaattccctttgtttatttaattatgtcatatttatttccatcagacccttaactgctttttctatagcaaagccaaaaaaaaaaaaaaaaaaagtcatcggaatcataaagagccaaggaagctgctatcattccaaacatttttgtccttcctcttctggatggctttcacagc

SEQ ID NO: 340927 - DNA, 201 bp, Homo sapiens; identical to SEQ ID NO: 71782

SEQ ID NO: 340928 - DNA, 201 bp, Homo sapiens
ctgccaaccttgataagatggcttcggagggaatgaggtgagtcttgagatgccaggccagcctttctttggatgtcttactcccgttcttgagaggggawggggccgtgcaaagcacttaaagagtcattgatggacccatgctgatttagttaatttattaattaatttggtttgaagccagcatagcatcgtgaagaa

SEQ ID NO: 340929 - DNA, 201 bp, Homo sapiens
aaattgtttatgcttgtgctcaacaaggatctttcacagtcagttgtgctctgatggagcagatgggccttcgttgtgggatttgttgactgacgtggccragtaccttctgccccagtggaaggaggggtgaatgctgtatttgccaaagactctgcctttctttatagccaggagtgctccttccctgtgtctactctc

SEQ ID NO: 340930 - DNA, 201 bp, Homo sapiens
tggaacaatatgtaaagtatgattttattatataaaaataatcacatgtagactcaaaaaaatcttgaaagagtcaataaagggtaacaaaacattagcartaattacctctgggcagcggagggagagttgaaggggtgaatttccccccacaataaactggtattgtttgtttcatataaattaaatgtttaggaggta

SEQ ID NO: 340931 - DNA, 201 bp, Homo sapiens
gtctataaatattaaatgaaaaattacagaaatgaatctaagttttaaattgtgcacattctgaggagtgtggtgaagtctggcaccatcccacccacccygtaacgccctggacgagtccgccctttgtccggtggatccacgctgtatacactacctgcctggtagtcacttagtagccatctcagttatcagattgat

SEQ ID NO: 340932 - DNA, 201 bp, Homo sapiens
tgcacattctgaggagtgtggtgaagtctggcaccatcccacccaccccgtaacgccctggacgagtccgccctttgtccggtggatccacgctgtatacrctacctgcctggtagtcacttagtagccatctcagttatcagattgattgtcgagatatagcagtgcttgtgttccagtcacacttatttttacttacta

SEQ ID NO: 340933 - DNA, 201 bp, Homo sapiens
cagttatcagattgattgtcgagatatagcagtgcttgtgttccagtcacacttatttttacttactaatggccccaacgtgcaagagcagtgatgtgggyaattcgaatatgccaaagagaagccgaaatgtgcttcctttaagtgaaaggtgaagttcttgacttaataaggaaagaaggctgagtgcagtggctcctg

SEQ ID NO: 340934 - DNA, 201 bp, Homo sapiens
cttgaaccctggaggcagaggctgcagtgagccaaggttgcaacactgcacctccagcctgggcaacagaacaagactccatctcaaaaaaaaaaaaaagrgaaagaaaaagaaattatatgctgaggttgttaagatctatggtgagaatgaatcttctatttttttgttttttctttttgttttttttggtagagatgg

SEQ ID NO: 340935 - DNA, 201 bp, Homo sapiens
gaagagctggggacaactcagtcttgttatttccgcagcgtgctggacatttttccaactgtggtagccctggcccaggccagcttacctcaaggacggcrctttgatggtgtggacgtctccgaggtgctctttggccggtcacagcctgggcacagggtaagtggaggaggtacttgcccacatgtaggctctttagga

SEQ ID NO: 340936 - DNA, 201 bp, Homo sapiens
cgtgctggacatttttccaactgtggtagccctggcccaggccagcttacctcaaggacggcgctttgatggtgtggacgtctccgaggtgctctttggcyggtcacagcctgggcacagggtaagtggaggaggtacttgcccacatgtaggctctttaggaggctggtctgctgcctctcacctctgtgcagacagaac

SEQ ID NO: 340937 - DNA, 201 bp, Homo sapiens
gagggttgtcacagacgtcattggagaggtgctccggagtgtttattaccatggctgctaggaataattggggtcatcaggaagtgcttcaaggactgtgstctccttgacgttgtcggtactgcctgtgggagccagctccttcatgtactaacttcctttctcagacgggagagctctgctcttgctctaactggagtt

SEQ ID NO: 340938 - DNA, 201 bp, Homo sapiens
gccacacattgcccgattattcccccagactgagcgcatttgcagaccgaggagcagcagggtgtctgagtttcctcatttgctgccccgtaggtgtctcrgtgcttgaactgcgggctgctgatgttggccagagaggaagatgatgaaaccaggcaggaagcgggcatttctgagacgatgtggggcggtgcacctgca

SEQ ID NO: 340939 - DNA, 201 bp, Homo sapiens
ttactcttacatttggtctgactttccagtctctttcaaccaataccagtccatcctatatcatcttgctgattaatcttctgaaaatgtccctttgaacrtgacacctcctcctcagacacctttattcccctttgaccttgggaatgaagtcccagctcctcccgtccccctgagtcagacctgctgcagagcccagca

SEQ ID NO: 340940 - DNA, 201 bp, Homo sapiens
cccaagtagctgggactacaagcacctgccaccacgcccggctaatgtttttgtatttttagtagagatggggtttcaccatgttagccaggatgttctcratctcctgacctcgtgatccacccacctcggcctcccaaagtgcagggattacaggtgtgagccaccgcacctggccccaaatcccttttttctaagtat

SEQ ID NO: 340941 - DNA, 201 bp, Homo sapiens
ggagtgcagtctcagctcaccacaacctctacctcccgtgttcaagcaattctcctgcctcaccctcccaagtagctgggactacaagcacctgccaccaygcccggctaatgtttttgtatttttagtagagatggggtttcaccatgttagccaggatgttctcaatctcctgacctcgtgatccacccacctcggcct

SEQ ID NO: 340942 - DNA, 201 bp, Homo sapiens
tattgggggtttgcttttcttaaaactttcaggtttgggacttaaattttggtttaagcaactcagctgctgcagcctctcttgccaggtagggattctgyggtgtccgggaggactgcccactctggggaaatgataaaggcccaaggggagtgtgtcctgttctattctgtagcactcagtctgctacttcctcaggcc

SEQ ID NO: 340943 - DNA, 201 bp, Homo sapiens
attcttattcagtaagtattgggggtgttagcagatttccttttgaattgctgggttttcattttgggttgttgtttctgtttttgagacagggtcttgcyctattgcccaggctggaatgcagtggcacaatcttggctcactgcagcctccatctcccaggctcaaacaatcctcccacctcaacctcctgagtagctg

SEQ ID NO: 340944 - DNA, 201 bp, Homo sapiens
caggcagatcatctgaggtcaggagtttgagaccagcctggccaacgtggtgaaatcccgtctctactaaaaatacaaaaattagccgggtatggtggtgygtgcctgtagtcccagctacttgggaggttggggcaggagaatcgcttgaacccaggaggcggaggttgcagtgagccgagatcatgccactgcactcca

SEQ ID NO: 340945 - DNA, 201 bp, Homo sapiens
tttattttcttggatggaagctctgctgggcagctttgccttgcctataaataaaagttcttgtcacagtcagttgctttgagccacagagggtatgacaytggattttaaaataagtcaagccccttactgaatacatttaggtgtattgccatgtctttttctataaatgtaggctgaatttgggatccagtatttcca

SEQ ID NO: 340946 - DNA, 201 bp, Homo sapiens
ccgtcgggggctggaggcggtgggagtaagcaatactggggagttgttcaagagaaggtgatactatttcccctcgggcttgctgtgagtcaacctcaccrtaagccagctggccaggccaagttagacatctgcagcataatgaaaaccacttgccagcagggggccagttgtctgcctgaatgtgtcaccctgtcccat

SEQ ID NO: 340947 - DNA, 201 bp, Homo sapiens
caggcaagtactccgcggggcaccaaatgctcattaaacgaaaggagtcaggcctaggctcttctactggcatgaatgatctcttttctttctgaacaccmaatcttggcttcacttgggacttcacctaagtgatggagtgtgtgttagcaaaactttggaggcatgatgcacaaaagcaaaaaactgggagccacccac

SEQ ID NO: 340948 - DNA, 201 bp, Homo sapiens
catcaggaattcttatttatacgcaagaaatacttcctgccagtgagagtggtcactgaacaaggtccctagaacaggtgttagacccttgtgagtgtcargcagcccctgtgtgcagggctgtgtcgtggcagccaccaacctctcagtctgccctccagcctgcaggtagatggtgatgaggggcagtgctcccactaa

SEQ ID NO: 340949 - DNA, 201 bp, Homo sapiens
tccctacccaggtgtcagacatgatgcatcaggacagggcttttgccactgcacgcttgaacttctccggacagaggaacatctgtaccctctcaacgtaygtacaatgacacccactctgaacaagaccacactttcgtcaatgtatttttccaaagcacaaaaatccccaaacctgaaaagaaaaaaagaaaacttgcc

SEQ ID NO: 340950 - DNA, 201 bp, Homo sapiens
cactcaggccccgtgtcccgggggtattgtaaacagagtctactccaggtgctggttgtaacgttgttttccctagacctctggctcatgtttccagaacrttggtccctgactggtaggctgcaccctctccctagggtacagattgggcaccgcagggatgggtcagagctctggcttggacagtcccatgagccaccg

SEQ ID NO: 340951 - DNA, 201 bp, Homo sapiens
ttatgcggcttgacagcggcaggcaatttggtagggattacagcagggagttactgaagggtcctgagtgtaatctgcgctggagatgttgtcgttggcartgtcttggaggacgtctgcaagaacctttctgacctcgggcagcacagcctggtactccgcaccacctctttctaggggcacagcttctgcggtatcgtc

SEQ ID NO: 340952 - DNA, 201 bp, Homo sapiens
tgtttgtgaaagtgaccagcacaggaactgccatgcatgaaatacttctgatgccttctcttcattccaattctataaatggcccttggctgttgatttcrgtgctttcacatttcagctatggcaaaaggatattttaaaagaacaaagctagccgggtgcggtggctcacacctataatcgcagcacattgggaggccg

SEQ ID NO: 340953 - DNA, 201 bp, Homo sapiens
acatttcagctatggcaaaaggatattttaaaagaacaaagctagccgggtgcggtggctcacacctataatcgcagcacattgggaggccgaggcgggtrgatcacctgaggttaggagttcaagaccagcctgaccaacatgaagaaaccctgtctctaccaaaaaaatacaaaaattagctgagcatggtggcgagtg

SEQ ID NO: 340954 - DNA, 201 bp, Homo sapiens
ccagcaacatcttgtccataaggctgaaccggcaagtaagtggggaaatccctcagggtttcaaagcttctgctaacgggagccaaacaaaaagatggacrtctttcaagatcaatgtctgtaaaacaagcttccaattctaatgagaatgttaacactcaggccccgtgtcccgggggtattgtaaacagagtctactcc

SEQ ID NO: 340955 - DNA, 201 bp, Homo sapiens
gaaatccctcagggtttcaaagcttctgctaacgggagccaaacaaaaagatggacatctttcaagatcaatgtctgtaaaacaagcttccaattctaatragaatgttaacactcaggccccgtgtcccgggggtattgtaaacagagtctactccaggtgctggttgtaacgttgttttccctagacctctggctcatg

SEQ ID NO: 340956 - DNA, 201 bp, Homo sapiens
cattccaattctataaatggcccttggctgttgatttcggtgctttcacatttcagctatggcaaaaggatattttaaaagaacaaagctagccgggtgcrgtggctcacacctataatcgcagcacattgggaggccgaggcgggtggatcacctgaggttaggagttcaagaccagcctgaccaacatgaagaaaccct

SEQ ID NO: 340957 - DNA, 201 bp, Homo sapiens
cttttttggctgtggctggaataaatcatttattacttgggagtcccattttggacactaataataaaatcatggcaatgcatttttgaggtttttatatatttttttgtttccttgtggttataggggacaggaggaactctttaacttcttttaaatgcagtcatttcacccttaaaaggagaggaaggggattgggcc

SEQ ID NO: 340958 - DNA, 201 bp, Homo sapiens
tctcccaggtaattgactcccaggctttacttagggctcagcaaaactgaaagccgagatgctgttttaacacagttcagccgtgagagtccctttttgaygtgtgtgtgggcggccggcacaggagaaatgagagagccagggagtcacaatccaaaaataatttctgatttccttccatggaaataaaggacgatgtaa

SEQ ID NO: 340959 - DNA, 201 bp, Homo sapiens
cactttgggaggccgaggctggaggattgcttgagcccaggagttagagaccagcctgggcaacacagcaaaaccccatctccaccaaaaaaaaaaaaaaagaaaagaaaaaattagccgggtgtggtgtcacgtgcctgtagtcccagctattcgggacgctgagatgggaggatcacctgagcctgggaggtcgaggct

SEQ ID NO: 340960 - DNA, 201 bp, Homo sapiens
gacgggaccagtgtgtcttgatgatgagaatgagtttcctcctgtgagcattaggaacccgtaactgggcggctcagtctgtgtgcttagaaggaaacctycgcctcatacgagaggcagagtccctttccctgttttctaatctataacaactaattctctgctctagtatttggaaagccataggatatttgttgtact

SEQ ID NO: 340961 - DNA, 201 bp, Homo sapiens
acggctcacatgtgcctcccccctcagcctgtccacagggtgttcatgtgtccccagcagttatggttcacatgggcctcccctcagcctgtccacggggygttcatatgtccccagcagttatggctctcttgggcctcccctcagcctgcccacgggtgttcatatgtccccggcggttacggctcacacgtgcctctt

SEQ ID NO: 340962 - DNA, 201 bp, Homo sapiens
gccgggcaccttatcaatgctgacacatgcggacctcatgatccacccgcctcaacctcccaaagtgctgggactataggcaaacagccacatttatgatytcacagttctgcagcccagaatggcaggactgggtcttcttctcagcatgacacaaggctgaaagagaggtgccaagatttctctgacttgcccttctgc

SEQ ID NO: 340963 - DNA, 201 bp, Homo sapiens
cagagatctgtaattacagctactccagcaacatcttgtccataaggctgaaccggcaagtaagtggggaaatccctcagggtttcaaagcttctgctaaygggagccaaacaaaaagatggacatctttcaagatcaatgtctgtaaaacaagcttccaattctaatgagaatgttaacactcaggccccgtgtcccggg

SEQ ID NO: 340964 - DNA, 201 bp, Homo sapiens
ggttgctggtacccttggatggagtttcagaagaggaaggtgtagaggctgggcaccatatcacgctgatacatgctaacacatacgtaacagaggccggrcaccttatcacgctgatacatgctaacacatacatgacagaggccgggcaccttatcaatgctgacacatgcggacctcatgatccacccgcctcaacct

SEQ ID NO: 340965 - DNA, 201 bp, Homo sapiens
agttttttcttatacttttagaagaaacccacttaatatactaacttgtaatagacgccagtcacttttttttttttttttttttttttttttttttttttagagagatgtctctcttgcgtgatctcaaagtttctggtaacactttggtttctatggaattgctggaattcactgctatcatgtgcacctctattcatc

SEQ ID NO: 340966 - DNA, 201 bp, Homo sapiens
tggagtggctacatgggaaagatgtttatggctgctaccaactacctccctacccaggtgtcagacatgatgcatcaggacagggcttttgccactgcacrcttgaacttctccggacagaggaacatctgtaccctctcaacgtacgtacaatgacacccactctgaacaagaccacactttcgtcaatgtatttttcca

SEQ ID NO: 340967 - DNA, 201 bp, Homo sapiens
gcctcatccacactgtcacgttcaaagacaagaaataatcctgaaagtagatcccaaggccagaatgcaaaggaatagccagaagcccagaccagatcagygggctaagggtttgtcaaaggcagaatctggtgacagctagggtgaggggggctttgtcattggaagcgaatccatcgcccatcttcgttgtcatcacgg

SEQ ID NO: 340968 - DNA, 201 bp, Homo sapiens
tggtctgttatgcggcttgacagcggcaggcaatttggtagggattacagcagggagttactgaagggtcctgagtgtaatctgcgctggagatgttgtcrttggcaatgtcttggaggacgtctgcaagaacctttctgacctcgggcagcacagcctggtactccgcaccacctctttctaggggcacagcttctgcgg

SEQ ID NO: 340969 - DNA, 201 bp, Homo sapiens
ttgggaggccaaggcaggcagatcatctgaggtcaggagtttgagaccagcctggccaacgtggtgaaatcccgtctctactaaaaatacaaaaattagcygggtatggtggtgtgtgcctgtagtcccagctacttgggaggttggggcaggagaatcgcttgaacccaggaggcggaggttgcagtgagccgagatcat

SEQ ID NO: 340970 - DNA, 201 bp, Homo sapiens
acacacactgtctataattagaaacagaaaacccagttgcacctgctgctcggccagacttctggctggggcttcctgcttgccaatcagttcgatcatcycctttcccagaaatcaccccacagcccaacccctcctcttctaccctggcaccatagggctgactccttgagcttcctccacgtactgacacatcgccct

SEQ ID NO: 340971 - DNA, 201 bp, Homo sapiens
tcgtcaatgtatttttccaaagcacaaaaatccccaaacctgaaaagaaaaaaagaaaacttgccccaggctgggcacggtggcttacatctgtaatcccrgcaccttgggaggccaaggcaggcagatcatctgaggtcaggagtttgagaccagcctggccaacgtggtgaaatcccgtctctactaaaaatacaaaaa

SEQ ID NO: 340972 - DNA, 201 bp, Homo sapiens
agatggcagatggtgaggattatgacttgtcctaggcacagtacctccagggggaagacagacagcccctttgcttcctttgccctttatttgagcccccsctccccacccgccaggtcatggcataaaagcagatccccagtgcttgtttcatgtctctttcttggtttccaggttattctgaggacggcggggcgctgc

SEQ ID NO: 340973 - DNA, 201 bp, Homo sapiens
gtcaatgtatttttccaaagcacaaaaatccccaaacctgaaaagaaaaaaagaaaacttgccccaggctgggcacggtggcttacatctgtaatcccagmaccttgggaggccaaggcaggcagatcatctgaggtcaggagtttgagaccagcctggccaacgtggtgaaatcccgtctctactaaaaatacaaaaatt

SEQ ID NO: 340974 - DNA, 201 bp, Homo sapiens
agcctggtactccgcaccacctctttctaggggcacagcttctgcggtatcgtcttccaggttgaaaatcagaggaaacttatgctgcagctcaggccccrtgctcccatcacacgccctggctccacctagagagggaatgacaacaaatgcctcgctaaccctgacagttgccctgtgttgtaaagacgagagctgcga

SEQ ID NO: 340975 - DNA, 201 bp, Homo sapiens
agtggtgcgatctcggctcactgcagcctccacctccccggttcaagcgattctctcctgcctcagcctcccgagtagctgggattacaggtgagcgccascatgcccggctaatttttgtattttttagtagcgatggggtttcaccatgttggccaggctggtctcaaactcctgacctagtgatccacccacctcagc

SEQ ID NO: 340976 - DNA, 201 bp, Homo sapiens
cgagttcgagacagcctggccaacatggtgaaaccctgtctctactgaaaatacaaaaattagctgggcgtggtggcacacgcctgtaatcccagctactyggcaggctgagacaggagaatcgcttgaaccaaagaggcggaggttgcagtgagccaagatcgcaccactgcactgcagcttgggcaacagagtaagact

SEQ ID NO: 340977 - DNA, 201 bp, Homo sapiens
cacccccctcagcctcctaaagtgctgggattacaggtgtgagccactgcgcccagcctaaactgacttttttttttttgagatggagtcttgctccatcrcccaggctggagtgcagtggtgcgatctcggctcactgcagcctccacctccccggttcaagcgattctctcctgcctcagcctcccgagtagctgggat

SEQ ID NO: 340978 - DNA, 201 bp, Homo sapiens
ttttgtatttttagtagagacggggtttcaccatgttggtcacgctggtctcaaactcctgacctcaagtgatccactcgtctcggcctcccaaagtgctrggattacaggcgtgaaccgccgcacccggccggaagtagtgtttgggccaagacttggagcatcagctcctagagccagagaggagctgccacttgggca

SEQ ID NO: 340979 - DNA, 201 bp, Homo sapiens
ggcttgctgtgagtcaacctcaccataagccagctggccaggccaagttagacatctgcagcataatgaaaaccacttgccagcagggggccagttgtctscctgaatgtgtcaccctgtcccatgccacagcctgagacagtgtgcaggtgtttcatattccctgccctctggtctctgaggcatccctgagcgggacaa

SEQ ID NO: 340980 - DNA, 201 bp, Homo sapiens
catgatcacaccattgcactccagcctggacaacagagtgagaccctgtctcaaaataaaaaaaaaaaaaaacctattccctgcatggaattgaaaagtgstctaccagtcatgttgactcacgcctgtaatcccaatactttgggaggccaaggagggcggatggcttgagctcaggagtttgagaccagcctgagaaac

SEQ ID NO: 340981 - DNA, 201 bp, Homo sapiens
gagagtggctctgtgccctccactcacctggaggaagtgtaactactctcccaggtaattgactcccaggctttacttagggctcagcaaaactgaaagcygagatgctgttttaacacagttcagccgtgagagtccctttttgatgtgtgtgtgggcggccggcacaggagaaatgagagagccagggagtcacaatcc

SEQ ID NO: 340982 - DNA, 201 bp, Homo sapiens
gtacaatttggatcctcaggatggaggagagtgtgtcttaatcaaaacccacaggtgaagagactgcttttcaaaagacagcctttcgagagctggtcgtrtagagttgtcccttcgccaagaacgacaagcttcagtgcccttgcattgatttgttcttcactggcagtctcagtggcaaacctctagtgggcaagtgct

SEQ ID NO: 340983 - DNA, 201 bp, Homo sapiens
tttctgtcttggttaagggcagagacacatgtcagagggagactgcgtcccatgtagggagctaatgtgttcactagctattgcttctcgcagggtcgcarcatctacactcacttgcctcatccacactgtcacgttcaaagacaagaaataatcctgaaagtagatcccaaggccagaatgcaaaggaatagccagaag

SEQ ID NO: 340984 - DNA, 201 bp, Homo sapiens
catttaccccctttctgtcttggttaagggcagagacacatgtcagagggagactgcgtcccatgtagggagctaatgtgttcactagctattgcttctcrcagggtcgcagcatctacactcacttgcctcatccacactgtcacgttcaaagacaagaaataatcctgaaagtagatcccaaggccagaatgcaaagga

SEQ ID NO: 340985 - DNA, 201 bp, Homo sapiens
tttgagaacctgttagaatttttttaaccctcagtccccagtctcagacctacgacagagccttaggtaaaactgagaaagggctgggcacagtagctcaygcttgtaatcccagcactttgggaggccgaggcaggaggagctcttgagctcaggaggtagactaacctggacaacatagtgaaacccgggtctctacaa

SEQ ID NO: 340986 - DNA, 201 bp, Homo sapiens
ctgccaccgccccccaccgatggctgctctccttgctagcatgtcctcacctgtgtgtactgggaagagcagaggactaatctttgtctagccaatgtaasagaaagaggccattttgacggtgtgtgactgcccctggcagttgcaggtcacttcagctcatcctggcccagcagcgtgtgggtaggtctacaatttaaa

SEQ ID NO: 340987 - DNA, 201 bp, Homo sapiens
acaggtgagctccaaaaatggaacaaatgtccctgaaatttcatgtcctggtgcttctttcccaagctttattttcctccaaattgcgaacgtgaagcagygtttgctttttgagtcttagtggggtttatctcgaagctttgtcttaatggcggcagattcaaattatgtcaggctgtgtgtcctgcaggggggctgtgt

SEQ ID NO: 340988 - DNA, 201 bp, Homo sapiens
tattcttaaacattcaatttttcctgttatctgcccagtgggaaaaacatgtctgctagatttgacattttgttggatgacagagctcatgcagtttcatkccccttgatcatttcacttttttttttaagttgcctttgactttttcttcttttcttttgctcttcctgcctgtcaagacatgcgtcaccatttaggaag

SEQ ID NO: 340989 - DNA, 201 bp, Homo sapiens
gaaactccctggtaagttgacggtgacctggctgagccaacccacctgccttggctgtgtggtcatggaaggagatagataaggacgccctgccgtcgggrgctggaggcggtgggagtaagcaatactggggagttgttcaagagaaggtgatactatttcccctcgggcttgctgtgagtcaacctcaccataagccag

SEQ ID NO: 340990 - DNA, 201 bp, Homo sapiens
gtcccatgtagggagctaatgtgttcactagctattgcttctcgcagggtcgcagcatctacactcacttgcctcatccacactgtcacgttcaaagacawgaaataatcctgaaagtagatcccaaggccagaatgcaaaggaatagccagaagcccagaccagatcagtgggctaagggtttgtcaaaggcagaatctg

SEQ ID NO: 340991 - DNA, 201 bp, Homo sapiens
aacctggcaaggcatcacacgatacggtctttttcctaacaagtggtgttaaccctttgcctcttcaaaaattccaatgaggccaggcacattggctcacrcctgtaatcccagcactttgggaggctgaggccagcggatcactggaggccaggggtttgagaccagcctagccaacatggtgaaaccccatctctactt

SEQ ID NO: 340992 - DNA, 201 bp, Homo sapiens
ccagcctggccaacatggtgaaacccagtctctactaaaaatacaaaaattagccaggcgctgtggtgggtgcctgtagtcgcagctactcgggaggctgrggcaggagaatcgcttgaacccaggaggcggaggttgcagtgagccgagattgcgccactgcactccagcctgggcaatagagcaagaccctgcctcaaa

SEQ ID NO: 340993 - DNA, 201 bp, Homo sapiens
tcagagagggcgcctggccggcaagacccggagaacctttggaacctggcctgcgccgggcccagtgtcatggaggctggaatccttcttggaagtgatcratccatgtaacctcccggctgcttttcctcccagatgaaatcccggacgtctacatcgtggagcgcctcttctccagcagcctggtggtggtagtcagtc

SEQ ID NO: 340994 - DNA, 201 bp, Homo sapiens
atagataaggacgccctgccgtcgggggctggaggcggtgggagtaagcaatactggggagttgttcaagagaaggtgatactatttcccctcgggcttgytgtgagtcaacctcaccataagccagctggccaggccaagttagacatctgcagcataatgaaaaccacttgccagcagggggccagttgtctgcctgaa

SEQ ID NO: 340995 - DNA, 201 bp, Homo sapiens
tttttttttttttttttgagatagagtctcactctgttgcccaggctggagtgcagtctcagctcaccacaacctctacctcccgtgttcaagcaattctyctgcctcaccctcccaagtagctgggactacaagcacctgccaccacgcccggctaatgtttttgtatttttagtagagatggggtttcaccatgttagc

SEQ ID NO: 340996 - DNA, 201 bp, Homo sapiens
gagattacaggcacatgccaccaaacccagctaatttttgtatttttagtagagacggggtttcaccacgttggccaggctggtctccaactcctgacttygagttatctgcccattttggcctcccaaagtcctgagattacaggcgtgagccacctcacccagccacctgtgacttatttttgccattatattggcacc

SEQ ID NO: 340997 - DNA, 201 bp, Homo sapiens
cttgaacccaggaggcggaggttggagtgagctgtgatggcaccactgcactccagcccgggtgacagagcgagactccctctcaaaaaaaaaaaaaaaaaggaaaagaaaagcaaagcatgtttcttcttataagcaacaaacaaataaagttatgaaggaaagaaaaactgatttatctggtaaagtgcctctcagaca

SEQ ID NO: 340998 - DNA, 201 bp, Homo sapiens
cttgctggataatattctattataaaaatatatcacattttctttatccatttatcagttgataacatttgggttatttccactttttgacttatgaatamtgctgccatgaacattcatatacaagtttttgtgtggacatatgttaaatttctcttgggtgtatatgtaggagtggaatttctaggtcatatgagaact

SEQ ID NO: 340999 - DNA, 201 bp, Homo sapiens
gttttacttcgatgttcacatttgggctttgagagggagctgggctgaagtgtgtttcaggcatctgcaggattctgtgacttacaggcaaacgcctgttyccctattttcatggaagcgagccctggggaccatatggaatcatctttttggaatgtgcaccctgagcatcaggcggggatgaccgattcccagtttccc

SEQ ID NO: 341000 - DNA, 201 bp, Homo sapiens
cctgatgggcaaaagctctatgagttccggagagggatgaaaaggtctgtgttcaatgtcaaacccattttaaagtccccgcagaagtcccgcagggaccrctggcagctgtctagggagaggacagagagtggctctgtgccctccactcacctggaggaagtgtaactactctcccaggtaattgactcccaggcttta

SEQ ID NO: 341001 - DNA, 201 bp, Homo sapiens
gcggaatcaaacccctgcttttcctatctgacttcaatacggattctcagggggcagccagaagttggcatgggaattttagccttctggttataatgacrctgtcttaaaaacaattcttatttttatgtaattatgtaaaaagcctccagatctgttttctaggttcggactcctatggggctgacagatgttttaaga

SEQ ID NO: 341002 - DNA, 201 bp, Homo sapiens; identical to SEQ ID NO: 71832

SEQ ID NO: 341003 - DNA, 201 bp, Homo sapiens
gattatttcctgtaacttgattttataaaaatagaatggactttataaaaagaagaataggacaggagtggtgtttgttcacctagtagttactttaattrtagatggttgggtgccatgaatgaccatatggggtgacaggagtgttgcatcagacaggatgtctcatttccaccttcccctgtgaatgccctgtgcatg

SEQ ID NO: 341004 - DNA, 201 bp, Homo sapiens
ggtctcaaactcctgggctcaaggatcctccttggcctcgcagagtgctggaattacaggcatgagccaccacgcttggccaaattactgtgaaggcaggsactgtgctggtgtgttcaccattatacgacctggtagaaaaggcagtgcttggtagatacgtgctcataaatatctgtttcctgactgactgttaaataa

SEQ ID NO: 341005 - DNA, 201 bp, Homo sapiens
ctcactgcaatctcttcctcctgggttcaggtgattctcatgcctcagcctcccgagtagctgagattacaggtgtgcaccaccatacctggctaattttwaaaatatttttagtagagatggggtttcgccatgttggccaggctggtcttgaactcctggcctcaagtgattctcctgcctcagcctcccaaagtgctg

SEQ ID NO: 341006 - DNA, 201 bp, Homo sapiens
cctcctgtcacccttgcggcggccccgacgcagttgccggactgaaaccagcagatctggccccagccgcattccttcttccctctccctcccagctgggmggctccggcaatgaaaacaccgccacgtgggcctgctgcctttgcgtcacgcgcctttgtccaatggagagccgcgttacgaagccaggggcgggtcgcc

SEQ ID NO: 341007 - DNA, 201 bp, Homo sapiens
aacacacacatgcacacacacatacacgcagagccttgggcacaggtggaagggaaaaggtagacagagggtgtttataacattttccaagaattgttgayatggcacataaataaacatgcctctatgctcaacgtggtgttcttcctcctcagagacagatgttcaaaaccaataaaacaaactcctctctaaagggac

SEQ ID NO: 341008 - DNA, 201 bp, Homo sapiens
ataaggacgccctgccgtcgggggctggaggcggtgggagtaagcaatactggggagttgttcaagagaaggtgatactatttcccctcgggcttgctgtsagtcaacctcaccataagccagctggccaggccaagttagacatctgcagcataatgaaaaccacttgccagcagggggccagttgtctgcctgaatgtg

SEQ ID NO: 341009 - DNA, 201 bp, Homo sapiens
taatggaattggaagaaaagtagatgctgtttcagagtcctggggtaaaatgtaaaaatgagcaatacacacacacacacacacacacacacacacacacmtatatatatatttttgagacggggtctcactctgtagcccaggctggagtgcagtggcacgatctccactcactgcaacctttgcctcctgggttcaagc

SEQ ID NO: 341010 - DNA, 201 bp, Homo sapiens
acctgactaatttttgtatttttaatagagacagggtttcactatgttggccagcccgatctcaaactcctgacctcaggtgacccacctgcctcggcctsccaaagtgctgggatcacaggtgtgggccaccttgcctggcctgaaatttctcagtttctaaataggttcttggcagctcctcttctccaacttgaagtt

SEQ ID NO: 341011 - DNA, 201 bp, Homo sapiens
ctcccgagtagctgggactacaggcacatgcaaccacacctgactaatttttgtatttttaatagagacagggtttcactatgttggccagcccgatctcraactcctgacctcaggtgacccacctgcctcggcctcccaaagtgctgggatcacaggtgtgggccaccttgcctggcctgaaatttctcagtttctaaa

SEQ ID NO: 341012 - DNA, 201 bp, Homo sapiens
agaatgcaaaggaatagccagaagcccagaccagatcagtgggctaagggtttgtcaaaggcagaatctggtgacagctagggtgaggggggctttgtcaytggaagcgaatccatcgcccatcttcgttgtcatcacggtttatgttttccttggcccttaggatccagaagttgccacggctgctagttgcgtcatcca

SEQ ID NO: 341013 - DNA, 201 bp, Homo sapiens
atgtgtgtacatccataaacacaatcttcaaaatgcatcatcaaaattctgctttaggcttagaatcaagttaggactcatatgaaagatgaatgatttgkatttggtcagggtctttgtaaggaacggttcggtagactgataagtctgtgtgattacagaggctgctggtttgcctagaagagtccatttatattcaca

SEQ ID NO: 341014 - DNA, 201 bp, Homo sapiens
tagcttagaaagtttaaacgtttcttcccttctgggaatatttatgttttaacataagactctgaagcacagctggaggtatgcgtccaaggcttctgctmcaagactgcttagctctctctgccacaaagacacgcccagtattttcagagggaagaagtaagaaacgaaggcttggcatcttgaagtgttaaatctgga

SEQ ID NO: 341015 - DNA, 201 bp, Homo sapiens
gaggctagggggcaaaaggcatctatttgcagacagatctgttgttagaatacctgtcgttattcccatgctgtcattatcctccacagatccctagcaaytggaactaaagccgggtataagctgttttctctgagttctgtggagcagctggatcaagtccacggaagcagtaagtgtgtgtgagagagacctcaggga

SEQ ID NO: 341016 - DNA, 201 bp, Homo sapiens
tacccactattaaacaaccaggtctcgtgagaactcactcactctatggtgggggatggtactaaaccattcataagaactctgccaccttcctccaacaytgaagattacaattcgacatgagatttggggagggacactgatctgaatcatattacagtgtttccccatgttgcccagtctggtctcaaactcctgggc

SEQ ID NO: 341017 - DNA, 201 bp, Homo sapiens
gcatgcatgtaatcccagctactcaggaggctgatgcaggagaattgtttgaaccctggaggcagaggttgcagtgagctgagattgcgccactgcactcsagtctgggtgacagagtgagactccttctcaaaaaaaaaaaaaaaaaaaagtgttcaggatccctgttctaaggaaagaaggagaaggaagagagggagg

SEQ ID NO: 341018 - DNA, 201 bp, Homo sapiens
actttatggatgaaataaggtctaagtctaaattccttgattcagagtcttttgtggccattgatcaatcacgtaaaacatcacataaaacatcactctgygattttctcatatgtagaattcttctggtccaggagcagggcttatgtttgaaaattactttaaattgctgtcactttgcattaatgttataagactcta

SEQ ID NO: 341019 - DNA, 201 bp, Homo sapiens
caggcttttcccaggagcagagcctgcctcttttgtgtggtattttttggtaccttcccttctagctgatgttccctggaataaaaggagctggctgagascagtggttcttgagcctcagtgtgcatcgcaatcacctggtattcgtctaaaaacttcccaaaccagaatctccggggagagcccagggcttgctccttg

SEQ ID NO: 341020 - DNA, 201 bp, Homo sapiens
cctgggtgacagaacgagaccctgtctgaaaaaaaaaaaattgagaaatgtgtttaaattttatttttctgcttggttaacactgatgaccttcatcattmtgagccatggatagtcttccttggggaatagcagggcaggcttttcccaggagcagagcctgcctcttttgtgtggtattttttggtaccttcccttcta

SEQ ID NO: 341021 - DNA, 201 bp, Homo sapiens
caaatgtccctgaaatttcatgtcctggtgcttctttcccaagctttattttcctccaaattgcgaacgtgaagcagtgtttgctttttgagtcttagtgrggtttatctcgaagctttgtcttaatggcggcagattcaaattatgtcaggctgtgtgtcctgcaggggggctgtgtgcccttcattgcagtccaagaat

SEQ ID NO: 341022 - DNA, 201 bp, Homo sapiens
tccaaaactaaactccaagactaaactaaagcgtgtgtttgtaaagagggtaaaaatgaaatttggaagcaaacttgcctaatttccaggtactcctcctygtggaataaaaattggtctgttatgcggcttgacagcggcaggcaatttggtagggattacagcagggagttactgaagggtcctgagtgtaatctgcgc

SEQ ID NO: 341023 - DNA, 201 bp, Homo sapiens
cgggtggatcacctgaggttaggagttcaagaccagcctgaccaacatgaagaaaccctgtctctaccaaaaaaatacaaaaattagctgagcatggtggygagtgcctgtaatcccagctacttgggaggttgagacaggaaaattacttgaacccaggaggcggaggcttcagtgagctgagatcgcaccactgcactc

SEQ ID NO: 341024 - DNA, 201 bp, Homo sapiens
atggcagatggtgaggattatgacttgtcctaggcacagtacctccagggggaagacagacagcccctttgcttcctttgccctttatttgagcccccgcyccccacccgccaggtcatggcataaaagcagatccccagtgcttgtttcatgtctctttcttggtttccaggttattctgaggacggcggggcgctgcga

SEQ ID NO: 341025 - DNA, 201 bp, Homo sapiens
aacatttttaaaatttcacaaaactaaccagcaaagacagtaagccaatcctccatttaccccctttctgtcttggttaagggcagagacacatgtcagarggagactgcgtcccatgtagggagctaatgtgttcactagctattgcttctcgcagggtcgcagcatctacactcacttgcctcatccacactgtcacgt

SEQ ID NO: 341026 - DNA, 201 bp, Homo sapiens
tctggaaatctaggaatcagactagtcatcagataagccttctttaataggggaaagcagtagcattgggaaccttttaacagctttacaatggctcttcygaagaacaaacaagcccttgatgctctttagttattgccagaataatacgtcctggattgttctcagtgggcagaacattatgctaaggcacagtctctc

SEQ ID NO: 341027 - DNA, 201 bp, Homo sapiens
tggctgctaccaactacctccctacccaggtgtcagacatgatgcatcaggacagggcttttgccactgcacgcttgaacttctccggacagaggaacatctgtaccctctcaacgtacgtacaatgacacccactctgaacaagaccacactttcgtcaatgtatttttccaaagcacaaaaatccccaaacctgaaaag

SEQ ID NO: 341028 - DNA, 201 bp, Homo sapiens
tcagacctgctgcagagcccagcagccaccacccccagaacctcctcatttcctccagccacagagacaccatcccataaaacagtatgcgccacgtgccrggctccatgctcagtccccagcatccttagttctcccagcaaccctgtcagggaggttgtgatgatgattcctgtttcccaaatgaggaaatctggacac

SEQ ID NO: 341029 - DNA, 201 bp, Homo sapiens
ccagatctgttttctaggttcggactcctatggggctgacagatgttttaagaagtttaaaggagtttattcaaaagttgaacatttttaaaatttcacawaactaaccagcaaagacagtaagccaatcctccatttaccccctttctgtcttggttaagggcagagacacatgtcagagggagactgcgtcccatgtag

SEQ ID NO: 341030 - DNA, 201 bp, Homo sapiens
cttagggacctgagcaactaaagcccggccccaggggacctcccctcccccaagcgctgagtttctaataaaggccaagcctcataaacaatcacctgtgyccgctcccatctggctggcttcgggagcaatcgctcattcgcctgctgcctgcctgccggagcatttgtcattaggaaggtttaatgggtttcctctcag

SEQ ID NO: 341031 - DNA, 201 bp, Homo sapiens
ggaggccctggagctgatcaacggtgagcagggcgagggcaggggcttgggagggggtcttctcccaggtgagcctttgtagaagtcacatcagacccttyaccccagcttgctcagctgccaggcgtggtgttggccaacacaaaaacgccagtgcatgacctgaccctgaccttcacagcagccattctctttcttttc

SEQ ID NO: 341032 - DNA, 201 bp, Homo sapiens
ccagacgatggcccctgtgcttaggcccgatttaagggttagccacaatgataatattgccagtaacagggcatgtttttctctgtgtcaagcgctttaarttctctctgaattgccgcaactctgggagccaggtagttattacttccaccttaccagcaaggaaactgaggtcagaaaactgaaggaactcgtccaaga

SEQ ID NO: 341033 - DNA, 201 bp, Homo sapiens
gagccacagcattggctcaggggtccccagaggtgctgatgacgtgaaacagggtgacattgtagagcacctggtggccgttgttccaggtatagagggcrcgctcccgggggttgtaatccagcatcgagatgtgggaatactggttgtggaagggcacgtccgtgtactcgtaactggacgtgttggtaaaataggcga

SEQ ID NO: 341034 - DNA, 201 bp, Homo sapiens
ccagatgcagccacactggaggttagggctttaacacatgaatttggggtgacacaaacattgagtccataacggatgggcagcttggatctgtcaggggcctgctctgcaacagccactgcttaagcggtcactgattcactccttggaacaggctccaacgtgggagcagcggttaccccattttacaggccagttgag

SEQ ID NO: 341035 - DNA, 201 bp, Homo sapiens
cagatgcagccacactggaggttagggctttaacacatgaatttggggtgacacaaacattgagtccataacggatgggcagcttggatctgtcaggggcctgctctgcaacagccactgcttaagcggtcactgattcactccttggaacaggctccaacgtgggagcagcggttaccccattttacaggccagttgagt

SEQ ID NO: 341036 - DNA, 201 bp, Homo sapiens
agatgcagccacactggaggttagggctttaacacatgaatttggggtgacacaaacattgagtccataacggatgggcagcttggatctgtcaggggcctgctctgcaacagccactgcttaagcggtcactgattcactccttggaacaggctccaacgtgggagcagcggttaccccattttacaggccagttgagtg

SEQ ID NO: 341037 - DNA, 201 bp, Homo sapiens
tcgctcttgttgcccacgctggagtgcagtggcaacgatctcagctcactgtaccttctacctcccagtttcaagagaaagcgtttttttgtttgtttgtttgtttgtttgtttgtttgtttgaaatggagtttcgctcttgttgcccacgctggagtgcagtggcaacgatctcagctcactgtacctttctacctccca

SEQ ID NO: 341038 - DNA, 201 bp, Homo sapiens
cgctcttgttgcccacgctggagtgcagtggcaacgatctcagctcactgtaccttctacctcccagtttcaagagaaagcgtttttttgtttgtttgtttgtttgtttgtttgtttgtttgaaatggagtttcgctcttgttgcccacgctggagtgcagtggcaacgatctcagctcactgtacctttctacctcccag

SEQ ID NO: 341039 - DNA, 201 bp, Homo sapiens
gctcttgttgcccacgctggagtgcagtggcaacgatctcagctcactgtaccttctacctcccagtttcaagagaaagcgtttttttgtttgtttgtttgtttgtttgtttgtttgtttgaaatggagtttcgctcttgttgcccacgctggagtgcagtggcaacgatctcagctcactgtacctttctacctcccagg

SEQ ID NO: 341040 - DNA, 201 bp, Homo sapiens
ttgttgcccacgctggagtgcagtggcaacgatctcagctcactgtaccttctacctcccagtttcaagagaaagcgtttttttgtttgtttgtttgtttktttgtttgtttgtttgaaatggagtttcgctcttgttgcccacgctggagtgcagtggcaacgatctcagctcactgtacctttctacctcccaggttca

SEQ ID NO: 341041 - DNA, 201 bp, Homo sapiens
gcagtgaggtggccccggccgaggtacactcggtaacagatcatcatgtgcagtgtcggcgcaggcattgggcacctgggcctcattttctcttccatgawgtggatgttctcccctcgagggttcatgccgggtgatcaggagaccatgatttgggcagctcactccccagctggcagccgggctaaatctcatcagtgc

SEQ ID NO: 341042 - DNA, 201 bp, Homo sapiens
cgtccaccatgaagtccatgtcggagaagccgccccaggagtaggggaaggtgttgttgtaaccggcgcccgggaggctcctctgcaccagcacagagcgygagcggaagtggtatttgaccaccacgttgctctggtacttgttatagaacagggagccgttgtacaccacgtggcccgtgcccgcccacggctggggca

SEQ ID NO: 341043 - DNA, 201 bp, Homo sapiens
ggcccaggggtgtcctgggagcacaaccctagctgaattcctgcctgccctcccctccaggccgagtgtactacttcaaccacatcactaacgccagccartgggagcggcccagcggcaacagcagcagtggtggcaaaaacgggcagggggagcctgccagggtccgctgctcgcacctgctggtgaagcacagccagt

SEQ ID NO: 341044 - DNA, 201 bp, Homo sapiens
ccctgctccagactgggagctcctggagaggccaccctgtgtctgtgtggttctaagctggagccacatcgaatcaggatggggctccagcacccgacagyccccatcaaatttcacaggttttggcgccgtcgggcaaggctgacacattgtcttggaggaggcccaggaagtctggccttagggtcgcagcctgagttt

SEQ ID NO: 341045 - DNA, 201 bp, Homo sapiens
cctccttctggatcttggtcttctcagatctgaccctgtcacctctttccccgaccaggccccttcccctctggtgcctgggcagcctgggggaagtatgytggaagcagcgtaatgatctggcaaggcagaggagacagcacgtcttgaaacatttttggggtcaaggactaccccatttgttccctcactcccacctag

SEQ ID NO: 341046 - DNA, 201 bp, Homo sapiens
aggtcagcccctttgtcctggggtcctcaaggtcactggcgcccttccagcctgctggccttgggccagcctctagcccctccttctggatcttggtcttstcagatctgaccctgtcacctctttccccgaccaggccccttcccctctggtgcctgggcagcctgggggaagtatgctggaagcagcgtaatgatctgg

SEQ ID NO: 341047 - DNA, 201 bp, Homo sapiens
ctcctctgttcagtcgcaaaggtgaacactcatgcggcccagccatgggccctctgagcaactgtgcagcaccctttcacccccaattaaacccagaaccmctgctctgctctcctgtgtctcatttctcctcagggaagcatagtggggaagatgtcgtggggaggggatcatagcccccccatcctaagggtcccagct

SEQ ID NO: 341048 - DNA, 201 bp, Homo sapiens
tggcctgtaggatgttattacatatgcacacccccaacatggcatctaggacagtaagtgccacccgttagtcttatatgtaagcatggcagagagaagcygagttcttgcacagaatcttgaaggctgattgaagagccagcctcctgacctctgagggcagggactggatctctctctttcccctgtattcccatcctg

SEQ ID NO: 341049 - DNA, 201 bp, Homo sapiens
acagggaggggggctgcagcactttcttcctggcatcatctctaccctggggggcatggtctcttgtgtgtctgtgcacagatgtcctcatcccaggcccrccaaggtgggtacatcctgtcctctgcctcttcctttttgtggtttaaggttgagggccctgagagtcccagggcctgtcccccagaatccctctcaaag

SEQ ID NO: 341050 - DNA, 201 bp, Homo sapiens
cagccaaggccaggggagacctgggtgccttcagcagaggtgcgcaaggaatgggcctcaccaggttgggggacccttaccaccctgaggggtagaggccrggagggtctgggcattgggctcccaggtgccacaccggccttcggggtccagcaggtggcagcacagccccttcctcaggcttcagaggctgctctgctg

SEQ ID NO: 341051 - DNA, 201 bp, Homo sapiens
gacactccatgtcacccaggcgaactgtcagcctttggagtggcacccagtagggtctttacttccagtttcttgttcacagtcttcactccttcataccyctcactccctgggtaacatcgggccaccagtaatgctggttcctagctctgcaacaccatgcacggtgtagtagctaagagcagagctttcgggtgtgaa

SEQ ID NO: 341052 - DNA, 201 bp, Homo sapiens
tccccgtgtcactgcaaactcctgaggagcaggcccagcatctgtgggcaggtcccgagtcactctgctgcctctagagcccatagcaatcgcatttgcartaataattctccttggttgagtgccaggttctggtgaactgtttggatacatggactctcctcattaaccccatgaggtttgatctccttattctctatt

SEQ ID NO: 341053 - DNA, 201 bp, Homo sapiens
gcccaggaagtctggccttagggtcgcagcctgagtttcaggcagatagggcatgagattccagcatttctgcttcgagccccgtggtagatccctgtctscctccttccccatggcctatttctgtctcatttattcattaacttcttgaacattcgtgaacacctgttttgtgcacagtgctgggttctgagggtgcag

SEQ ID NO: 341054 - DNA, 201 bp, Homo sapiens
tgctatccttcatgctgtcctcgggcttcccagggcctccttaatggccctgccacccccagctgggccgccgctcagcactggcaataaacatggtgacrgatgagtgtggacgagtgtgaggctcagcgcaggcaggagccccatctgtcgcggctgccacccgccctgcctcatcctggcctctgccagcccagccct

SEQ ID NO: 341055 - DNA, 201 bp, Homo sapiens
tccagatgcagccacactggaggttagggctttaacacatgaatttggggtgacacaaacattgagtccataacggatgggcagcttggatctgtcaggggcctgctctgcaacagccactgcttaagcggtcactgattcactccttggaacaggctccaacgtgggagcagcggttaccccattttacaggccagttga

SEQ ID NO: 341056 - DNA, 201 bp, Homo sapiens
cggccttcggggtccagcaggtggcagcacagccccttcctcaggcttcagaggctgctctgctgggcagggccagggccacacagggaggggggctgcarcactttcttcctggcatcatctctaccctggggggcatggtctcttgtgtgtctgtgcacagatgtcctcatcccaggcccaccaaggtgggtacatcct

SEQ ID NO: 341057 - DNA, 201 bp, Homo sapiens
gggctgggaaccaggcccagggagacgagttcactaccgaagtggcccctaaatgcacggcggcggccgtagccctgcctgctatccttcatgctgtcctygggcttcccagggcctccttaatggccctgccacccccagctgggccgccgctcagcactggcaataaacatggtgacggatgagtgtggacgagtgtga

SEQ ID NO: 341058 - DNA, 201 bp, Homo sapiens
attaattgcttttcttgaggatttctctaaaaattggttttaaatgagtacattaggcagtcccatttattattcgttggtttcgttcccaatatggcccyggtatccgagttcccggagatgccagcacggagcggagatgatttaatcagggtaaccattaattagagatgaggagagcctcccccaggaggagtggga

SEQ ID NO: 341059 - DNA, 201 bp, Homo sapiens
tggagtcaggaaggcggtagccattcctcctgacctggcacgtgcacaagactgcatacacacacttgctcacacacagtcacaccacacacaccacgtgmacacacacgcagccctccccacttggcttccgaaacgtgagtcactcagatgctactctgctgccgtcttgccccctctgctggcagccctgttcctcct

SEQ ID NO: 341060 - DNA, 201 bp, Homo sapiens
tgaggagggcatgggtctgggtgtggtgggcgagggtgtctcgcccatctctgggttggacaggtgcacctggtaagtagccaggccctgaggcgtcaccrtaggtacctgcagattctggaatgtcagcaggagccttgcctgcccacctggtggaagctgtgggaggaattggagcaagaggcggtgtgacttgaactt

SEQ ID NO: 341061 - DNA, 201 bp, Homo sapiens; identical to SEQ ID NO: 71839

SEQ ID NO: 341062 - DNA, 201 bp, Homo sapiens; identical to SEQ ID NO: 71843

SEQ ID NO: 341063 - DNA, 201 bp, Homo sapiens
tctttactcccaccagtggactctagaatcagttcaggtgttttatttccataggacactttaatagaaagatccaaaccaaatggaaaaaattaacttgkcttttttccctgcaacttaggaagaaaagagactccgaagtcaaaccaaagaaccgtaagtgcagcgaacctgcctttgtgctttgttgtgaaactgaat

SEQ ID NO: 341064 - DNA, 201 bp, Homo sapiens
tgctcggtgaatttggctcagcaggcacctgcctcagctgctcacttgagcctctgggtctagaaccctctggggaccgtttgaggagtgttcagtctccrtgaacgttcccttagcactctgccacttattgggtcagctgttaacatcagtacgttaatgtttcctgatggtccatgtctgttactcgcctgtcaagtg

SEQ ID NO: 341065 - DNA, 201 bp, Homo sapiens
tccttcccttaggaatgtgtgaaggagaaattgaatctcttgcacgaatttctgcaaacagaaataaagaatcagttatgtgacttggaaaccaaattacrtaaagaagaattatccgaggtaagtcagttctcagcatcctagcctctagaaaaatgtctcctcctagtaacttgtctgtgaccagggaggcagcaagat

SEQ ID NO: 341066 - DNA, 201 bp, Homo sapiens
cagctgggccccccacactctttcaggacatgagtgcattggtggctgcccgcatgcggcacatccccttggccccagggtcagactggcgcgatctgccyaacatcgaggtgcggctctcagacggcaccatggccaggaagctgcggtatacccaccatgacaggaagaacggccgcagcagctctggggccctccgtg

SEQ ID NO: 341067 - DNA, 201 bp, Homo sapiens
gcagcaccgcggcactgcaccggctattgttcttttatttttttccctctttgtccctgaaagagtcaagctactaattgtcagtaatcaaatcagaccaygatttcccaggcaaactcctggcagttctacatttaggaatgactagctagagacatcctgaagaatgagttattcggggaggcgccagccacctcctct

SEQ ID NO: 341068 - DNA, 201 bp, Homo sapiens
ttgtccaggctggactcgaactcctgcccacaagccatcctcccaccacagcctcctgagtagctggggttacaggcacgcagcaccgcggcactgcaccrgctattgttcttttatttttttccctctttgtccctgaaagagtcaagctactaattgtcagtaatcaaatcagaccatgatttcccaggcaaactcctg

SEQ ID NO: 341069 - DNA, 201 bp, Homo sapiens
ccagcctgactggtgtcttagtatgagttggagaaggtgcccctgctcctgggtcccttgggccaggcgcctacgtccaggcccagcccacatgcctgtgygggtggccctcgttatggagagggcccacgagtcagctgatcaagctcatgacttgtaaattgttggggcttggcctttccgtgttgttaccttaaaacg

SEQ ID NO: 341070 - DNA, 201 bp, Homo sapiens
atggatcccgagtccctgctggagggggacgacgggaagacctacttctaccagctgtggtatgatcaagactacgcgagattcgagtcccctccaaaaayccagccaacagaggacaacaagttcaagtgagcactggggctggactcggggtcagcaggcactttcagcccacatcactcccttttcccgtgtgcttcc

SEQ ID NO: 341071 - DNA, 201 bp, Homo sapiens
agttatgaggcgcttccccagcacaaactgacctgcttcaggtaagtgcactttcgtgtgcatgtttgcttcgtggaaggaggcacatccccagaggtgcytgcgggctcacgattctggtgatgttttttagtgcctgacctgcaacatgtcttaagctaacacttcgtggataagagccaccgtggagggctgggcgcg

SEQ ID NO: 341072 - DNA, 201 bp, Homo sapiens
tcacagaggactccctcctgcgacacgcgcagtttgtggtggagcaggtggagagttatgacgaggccggggacagtgatgagcagcccatcttcctgacrccctgcatgcgggacctgatcaagctggctggggtcacgctgggacagaggtaaggatgcggcagggaccagagtgaagactggagaccggggagggtag

SEQ ID NO: 341073 - DNA, 201 bp, Homo sapiens
aaattcctgacacaagatggagaatctttgattcttttacatagtatcaccaggcgatctctagtgatgggcagtgtgcctgcctacttctcggacctgcytttgttttggggttggtggggattaataccagagtaagagtttctcagatcttctccccaaaacccaggccccttcttttcccactcttgctctaaccat

SEQ ID NO: 341074 - DNA, 201 bp, Homo sapiens
tgctgggattacaggcatgaactactgcacccaacctcatttacttatttatttatcacccaacctcttttatttatttatttatttatttatttatttatctgagacagggtctccctctgtcacccaggctggaatgcagtggtgtggtcacagctcactgtagcctcgacctgctgggctcaagtgatcttcctgcct

SEQ ID NO: 341075 - DNA, 201 bp, Homo sapiens
gtgctgggattacaggcatgaactactgcacccaacctcatttacttatttatttatcacccaacctcttttatttatttatttatttatttatttatttatctgagacagggtctccctctgtcacccaggctggaatgcagtggtgtggtcacagctcactgtagcctcgacctgctgggctcaagtgatcttcctgcc

SEQ ID NO: 341076 - DNA, 201 bp, Homo sapiens
agtgctgggattacaggcatgaactactgcacccaacctcatttacttatttatttatcacccaacctcttttatttatttatttatttatttatttatttatctgagacagggtctccctctgtcacccaggctggaatgcagtggtgtggtcacagctcactgtagcctcgacctgctgggctcaagtgatcttcctgc

SEQ ID NO: 341077 - DNA, 201 bp, Homo sapiens
aagtgctgggattacaggcatgaactactgcacccaacctcatttacttatttatttatcacccaacctcttttatttatttatttatttatttatttatttatctgagacagggtctccctctgtcacccaggctggaatgcagtggtgtggtcacagctcactgtagcctcgacctgctgggctcaagtgatcttcctg

SEQ ID NO: 341078 - DNA, 201 bp, Homo sapiens
gctggagtgcagtggcacgatctcggctcactgcaacctccacctcctgggttcaagtgattctcctgcctcagcttcccaagtagctgggactacaggcrcctgccaccatgcccggctaatttttgtatttttagtagagacagggcttcaccgtgttggccaggctggtctggaactcctgaccttgggtcatctgct

SEQ ID NO: 341079 - DNA, 201 bp, Homo sapiens
ttagtagagacgaggtttcactgtgttagccaggatggtctcgatctcctgaccttgtgatctgcccgccttggcctcccaaagtgctgggattacaggcrtgagccaccacacctgtcctcgattcttttgtaactgggtgactgctttgagggaagcttttattttttattttattttattattatttttttaattttt

SEQ ID NO: 341080 - DNA, 201 bp, Homo sapiens
ggagtgcagtggtgcgatcttggcttactgcaaactcagcttcctgggttcatgccattctcctgcctcagcctcctgagtagctgggactacaggcgccygccaccacacccggctagttttttgtatttttagtagagacgaggtttcactgtgttagccaggatggtctcgatctcctgaccttgtgatctgcccgcc

SEQ ID NO: 341081 - DNA, 201 bp, Homo sapiens
gccactcgggactgttgctcgtggtgtgttcttaaccatattctagaccctgttcattgatatcttagggtttttgtctcaatgactcaaaagttgcctgrttttcttgctatgttctctctgggctttggtctcaaataagtgccttcaaaatgtcaacacaaagcacaagaaagccacctcttccttctagcatctgca

SEQ ID NO: 341082 - DNA, 201 bp, Homo sapiens
caattctcctgcctcagcctcccaagtagctgggattacaggcacaccctaccatgcctggctaatctttgtatttttagtagagatggggtttcaccacrttggccaggctggtctgcaattcctgaccttaagtgatctgcctgcctcggccttctgaaatactgggattacaggcatgaaccactgtgcccagccctg

SEQ ID NO: 341083 - DNA, 201 bp, Homo sapiens
gtgctgggaatacaggcatgagccactgcgcctggcctgacacgcattcttatctcccaagggaggcatggatcccgagtccctgctggagggggacgacrggaagacctacttctaccagctgtggtatgatcaagactacgcgagattcgagtcccctccaaaaacccagccaacagaggacaacaagttcaagtgagc

SEQ ID NO: 341084 - DNA, 201 bp, Homo sapiens
ctcaatcttggcccaccgcaacctctacttcctgggttcaagcgattctcctgcctcagcctcctgagtagctgggattacaagcatgggccaccatgccyggctactttttttgtatttttagtagagatggggtttctccatgttggtcaggctggtctcgaactcccgacctcaggtgatctacccgcttcggcttcc

SEQ ID NO: 341085 - DNA, 201 bp, Homo sapiens
ttgtctcattgttagtaagggctgtgtgatttgccctttttttttcctttttttttttttttttttttttttttttgagatggagttttactcttgtcgtmcaggctggaatatggtggtgtgatcttggctaactgtaatctccacctcccaggttcaggcaattctcctgcctcagcctcccaagtagctgggattaca

SEQ ID NO: 341086 - DNA, 201 bp, Homo sapiens
agagacgaggtttcactgtgttagccaggatggtctcgatctcctgaccttgtgatctgcccgccttggcctcccaaagtgctgggattacaggcatgagycaccacacctgtcctcgattcttttgtaactgggtgactgctttgagggaagcttttattttttattttattttattattatttttttaatttttttttt

SEQ ID NO: 341087 - DNA, 201 bp, Homo sapiens
ctctgtcacccaggctggagtgcagtggcacgatctcagctcgctgcaacctctgcctcccaggttcaagcgattctcctgccccaccctcctgaatagcygagattacaggcgtgcaccaccatgccaggctaactttttttgtatttttagtagagacggggtttcatcatgttgcccaggccattctcgaactccggc

SEQ ID NO: 341088 - DNA, 201 bp, Homo sapiens
tgatgggccagttggagggtccaaggatcttgtgctggaagggttttgggcccatgtgagcaggaccagaacccttccccaaggggtgcaatgcccaggtwgtcctccatctgagcaggggctggcagtacacctgcccccgggccttgggcctgggtgtccacatcaggcattgcccttctcccctcctgcaggtgggca

SEQ ID NO: 341089 - DNA, 201 bp, Homo sapiens
gcatgtgtgggacagcaccaggattccttcgttaggcattgtctcaggacctgtccctgttatgaagaaaacagccccggttggtcttacttagaaaaggrgccttaggtataaccagtgacattgcaggtgtcccaatatggccatgaaggaggcagatgacgatgaggaagtcgatgataacatcccagagatgccgtc

SEQ ID NO: 341090 - DNA, 201 bp, Homo sapiens
aaaagctttgaagatcctcccaaccatgcccgtagccctggaaacaaagggaagggcaagggaaaaggtacgtcattgtatgagtttcttttcaagttatycttctgtaacttggaggctgcctgtgaatccctcagtgtaaaaccacctctggtgttactgactctgggacagcgaggccgcctgagttaacaaggcgct

SEQ ID NO: 341091 - DNA, 201 bp, Homo sapiens
tgaacatttttcggtgggtccactctttttgagatggagtctcgctctgtcacccaggctggagtgcagtggcatgatctcggctcactgcaacttctgcytcctgggttcaaatgattcttgtgcctcagcctcttgagtagctgggattacaggcgtgagccaccaagcccggttaatttttgtatttttagtagagat

SEQ ID NO: 341092 - DNA, 201 bp, Homo sapiens
tcggggtcaaagttggccagaaggagtctgatgtcgggttatacacaaggcggcttggctgcagggtttcagcttttgtaagaagtgggtggttggctgaygtgaagctgttctgcaggagctttacgggggtctgagcagggttctccagagcacaagttgtatgagattcaagtggtcccggagtttaacactcctggt

SEQ ID NO: 341093 - DNA, 201 bp, Homo sapiens
catgtcctcaccattgttattttggttttattttatttttcttggttaacacacgtgtgtccaatgttttataacttctaaaatcttttttttttttttttaatttttttgagacagtctctctctgtcacccaggctagagtgcagtggcaccatctcagctcaccgtaacctccgcctcccgggttcaatcagttctcc

SEQ ID NO: 341094 - DNA, 201 bp, Homo sapiens
gaggggtctttaccctgcgattccctaacttgggggatctttaccctgtggttccctaactagggggggtctttaccctgcagttccctaaatgggggggmgtctaccttgcagttccccagtgtggggaggagatatctttaccctgcagttccctaactgagggggtctttaccctgcggttctcgaactagggggtct

SEQ ID NO: 341095 - DNA, 201 bp, Homo sapiens
ggtgcctccctgtgccacaggcacctcaggcagaaacctcacaggggcgattttgatattttctgaaacaattaaacaaacgatcttgtgattttttttttcccccagaacggagaaaaaaatggctcgcgccaaaacagtcatgaactccaaggtaaacatctgccgggaataaagccggtggcggcgctcacgaggcgg

SEQ ID NO: 341096 - DNA, 201 bp, Homo sapiens
tgcagttccctcatttggggaggggttatctttacctgcggttccctaagtaggggggtctttaccctatgactccctaactggggaggtctttaccctgyggttccataactggggggtctttaccctgcggttcccaactgggtcgggggtcattacctggcggttccctaattgtgggggaatctaccttgcagttcc

SEQ ID NO: 341097 - DNA, 201 bp, Homo sapiens
cggtgcctccctgtgccacaggcacctcaggcagaaacctcacaggggcgattttgatattttctgaaacaattaaacaaacgatcttgtgattttttttttcccccagaacggagaaaaaaatggctcgcgccaaaacagtcatgaactccaaggtaaacatctgccgggaataaagccggtggcggcgctcacgaggcg

SEQ ID NO: 341098 - DNA, 201 bp, Homo sapiens
acatagatcaaagatttcctgaagcctttgtaataacaggaaataaaacaagggctgtgagtggtacaggtgagagaaacacactcgagaggctgctaccrgcaggcggacacagcagggcagggccaggcgtgcagagcaagcagccaagctgacctaatggttggggggtctctaccctgtggttccctaattgggggc

SEQ ID NO: 341099 - DNA, 201 bp, Homo sapiens
gcctcacctcttagctaacatagatcaaagatttcctgaagcctttgtaataacaggaaataaaacaagggctgtgagtggtacaggtgagagaaacacaytcgagaggctgctaccggcaggcggacacagcagggcagggccaggcgtgcagagcaagcagccaagctgacctaatggttggggggtctctaccctgtg

SEQ ID NO: 341100 - DNA, 201 bp, Homo sapiens
cgagaaagtaaaggcgggttatttgtttctgaactccccctcattcttctgctcctgtttgcttgggcgggagtgcgcagggtggggctctgggttcaagwccagccccatccacccaggctccatggggccatccagactctgggaaggtcaccttttcctccttttgggggccgggatttgtggctggatgcctgtgct

SEQ ID NO: 341101 - DNA, 201 bp, Homo sapiens
tcaccctgcagagctgccaaacggaggcccgaagaaaaagaacctgaaaaagtaaatccacagatttctgatgaaaaagacgaggatgaaaaggtaaaggkctcacttttctttctttctttttttttttttttttttccccaagacggggtttcgccatgttgcccaggctggtcttaggaaaaagaagactgggcgtgg

SEQ ID NO: 341102 - DNA, 201 bp, Homo sapiens
tagaagccaggaggtggaggttgcagtgagccaagattgcgccactgcactccagcctggacaagagtgaaactctgtctcaaaaaaaaaaaaaaaaaaaagcctgttctagaaacctgtggtgatgtagatgtgtggggaccctggggcctctgaaggcctcgtctcgggatgacaagctggcagtgtgcctatagagct

SEQ ID NO: 341103 - DNA, 201 bp, Homo sapiens
gccattggcttggagatcaagctttgtatgttggccaaagcccgagagagtgcctcaggtatggtggggtgggccaggcttcctctggggcctgactgccstctgggggtacatgtgggggcagttgctggccaccgttttgggctctgggactcaggcgggtcacctacccacgttcgtggccccatctttctcaagggg

SEQ ID NO: 341104 - DNA, 201 bp, Homo sapiens
tgtagcctcgacctcccaggctcaggtgatcttcccgcctcagcctcccaagtagctgggactataggcaggcaccaccatgtccagctaatttttttttwaaattttttgtagagatagggttttgccatgttgcccaggctggtctcagtcaaactcctagactcgagttatccacctatctcagtcccccaaagtggc

SEQ ID NO: 341105 - DNA, 201 bp, Homo sapiens
atatatgtatatatatacacacatatatatacacatatatatgtatatatatacacatatatatgtatatatatacacacacacacacatacacataattstgttacagagctgctatgtaatctcacaatcatcagaaaaatgacccccaaaaggggaaccttgttcagatcagatgacttcttagcattaggcattcca

SEQ ID NO: 341106 - DNA, 201 bp, Homo sapiens
atctcgctcttgtcgcccaggctggagtgcagtggcacgatctcggttcactgcaagctctgcctcccaagttcacgccattctcctgcctccacctcccsagtagctgggactgcaggcgcccgccaacacgcccggctaatttttttttttttttttttttgtattttagtagagacggggtttcactgtgttagccag

SEQ ID NO: 341107 - DNA, 201 bp, Homo sapiens
ggccggggacagtgatgagcagcccatcttcctgacgccctgcatgcgggacctgatcaagctggctggggtcacgctgggacagaggtaaggatgcggcrgggaccagagtgaagactggagaccggggagggtagagcatggcccacatcctctgtcccagtcctctgagatgctggaacctctcccgtaggcgagccc

SEQ ID NO: 341108 - DNA, 201 bp, Homo sapiens
agagctcacctgctggccctctcactgcctccctccccttctctctgttttatgataatcacttatacaaagttcttaacaccgaagcactatctgggtgkaaaacactctcttagcctttaatcctcttttgttttccctgtgtaggaggagaagagacgcaaaacgacccccaaagaaccgtaagaatttattcttgac

SEQ ID NO: 341109 - DNA, 201 bp, Homo sapiens
ctctttcaacatcctggtgaatgagggtccacttcaggccagctggaggcctagggtcttgttccactaatggttggcctcactgtgtgtgacagccctgycaaacggaaacctcaggaagagtctgaaagagccaaatcggatgagtccatcaaggaagaagacaaagaccaggtagggccagtgctttcatttcctgac

SEQ ID NO: 341110 - DNA, 201 bp, Homo sapiens
ggggacacagcaaaattagctgggcgtggtggcatatgcctgtagtcccagctgcttggaagcctgaggcatgagaattgcttgaacccaggaggcggagrttgctgtgagctgagatcgtgccactgtactcctgcctggacaacagagcaagactctgtctcaaaaaaaaaaaaaaatgctgggcacagcggctcacgc

SEQ ID NO: 341111 - DNA, 201 bp, Homo sapiens
cctggggccgtttccctcactcctgctcggtgaatttggctcagcaggcacctgcctcagctgctcacttgagcctctgggtctagaaccctctggggacygtttgaggagtgttcagtctccgtgaacgttcccttagcactctgccacttattgggtcagctgttaacatcagtacgttaatgtttcctgatggtccat

SEQ ID NO: 341112 - DNA, 201 bp, Homo sapiens
catgttgcccaggctggtctcagtcaaactcctagactcgagttatccacctatctcagtcccccaaagtggcggagtggtaggattacaggcatgaaccrttgcattcagtctgtttggtttgttcttttttttttttttttttttttttttttttttttttttttttttaagatagtctctctctgtcatgcaatggtg

SEQ ID NO: 341113 - DNA, 201 bp, Homo sapiens
actctgcctcaagaaaaaaaaaaaggaaaaaagaaaaagaaaacaattagctgaagcaaattttgagactgagcctgaatccagaggtgggcagaataccycacctgagcggcagggccctggcagagtgggaggtgaagactcggacccctgtgtgcagtcagctgtccacggtcactgactgacgctgatcgcacatca

SEQ ID NO: 341114 - DNA, 201 bp, Homo sapiens
aaattagctgggtgtggtggtgcatgcctgtggtcccagctacttgggagactgaggcaggagaatcacttgaacccgggaggcggtggttgcagtgagcygagatcacatcactgcactccagggtaggtgatagagcgagactctgcctcaagaaaaaaaaaaaggaaaaaagaaaaagaaaacaattagctgaagcaa

SEQ ID NO: 341115 - DNA, 201 bp, Homo sapiens
ttgttgttgttgttgtttttaattttttttagatggagtctcactctttcactcaggatggagtgcagtggcacgatctcagctcactgcaacctccgccycctgggttcaagtgactctccatcctcagcttcctgagtagctgagactacaaggcatgtgccatcatacccagctaatttttatatttttagtagagat

SEQ ID NO: 341116 - DNA, 201 bp, Homo sapiens
actgtgtgtacagtggggatgctgtgggtttggttccagaccactgcagtaaagtgaatctagcaagaaagtgagtcacacacacattttggtttcctagyatgtgtaaaagttattagactaggccgtgtgcagtggctcatgcctgtaatcccagcagtttgggaggccaaggcaggaggatcgcttgagccaaggagt

SEQ ID NO: 341117 - DNA, 201 bp, Homo sapiens
tctacttaccccactgaagaagaaaagaaaattgctgtcttgaacacctggcacaagtgatcctctcacctcagccttccaaagttctgagattacaggcrtgagctactgtgcccactggtagacagtctttactcccaccagtggactctagaatcagttcaggtgttttatttccataggacactttaatagaaagat

SEQ ID NO: 341118 - DNA, 201 bp, Homo sapiens
ccaccacgcctggctaatttttgtgttttcagtggagtcggggtttctccatgttggtcaggctggtctcgaactcctgacctcgtgatccacctgcctcmgcctcccaaagtgctgggattatagtcaaaccacttcttaaccagttagtgggtatatatcttcttgaatcatctgtgccagtattctcccaaaataaaa

SEQ ID NO: 341119 - DNA, 201 bp, Homo sapiens
gacagctcactcgctgtaggttcaaatgaactagcaccttaattcctacctgcttctcaggtgtcgggttggcttaacaagttagtctatgagttagtctyagttaagtgtattttcatcatagggcacgcgcattgcttaaaaaccagtgtccacggttcttgtgaaaaccacatttcacccctccccccgaatctggtt

SEQ ID NO: 341120 - DNA, 201 bp, Homo sapiens
tgacccctggtctctcttgcatggtcatgggaagtgtcagagctcccgcagtcctggacttggtctggaatggtgtcaagccactgcccacccaccactgscttcccccttgctgcctctccccgcatgttttcccaggatgccaagaccagccctttcaccatcccctggcaccactccccttcccccaccctaaaggct

SEQ ID NO: 341121 - DNA, 201 bp, Homo sapiens
ggcggttccctaattgtgggggaatctaccttgcagttccctaatgtgaggaggggatatctttaccctgtgattcccttactgggaggggtctttacccygcgattccctaacttgggggatctttaccctgtggttccctaactagggggggtctttaccctgcagttccctaaatgggggggcgtctaccttgcagtt

SEQ ID NO: 341122 - DNA, 201 bp, Homo sapiens
aagtgcttgtaataggcatttcagtgtcagccagatcaaatgttagtattaataaaatggattgttttaagtttctattgtagcaaagtcaaactactctyattggtggctaattggtcatggccccactgagggagaaattaagtgactatcaaattgccttcttactagtctgcgttagagaggggacagtgcgtttct

SEQ ID NO: 341123 - DNA, 201 bp, Homo sapiens
ctccagcctgagtgacagagcaagactccatctcaaaaaaaaaaaaaaaagtttaaaaagaagaactttatcgtgtgtttccatggcaaccatatcgttaygaagtatctgaatttggggtcagatcattagcgtttagattcaagtagaattctcctgttttcttggaaggaatgaatcgagggcagctggcattcgaac

SEQ ID NO: 341124 - DNA, 201 bp, Homo sapiens
ttagggtgtgagactttgtgccaggagcagctgtaggccaagtcattgtgatgactgaggagcacccgacctggctgatgggatgtctgctgagtgggcgyttagagcgcctcctgggtttgggatgtgagtcagagcctttagtccatttcctttttctgctctaggtggtgttaatggcaaaaatcttggccccataaa

SEQ ID NO: 341125 - DNA, 201 bp, Homo sapiens
gttagtgtttctaagctgctacttgctgtgtatctgttcaccctgcagagctgccaaacggaggcccgaagaaaaagaacctgaaaaagtaaatccacagrtttctgatgaaaaagacgaggatgaaaaggtaaaggtctcacttttctttctttctttttttttttttttttttccccaagacggggtttcgccatgttg

SEQ ID NO: 341126 - DNA, 201 bp, Homo sapiens
atgcgcccatatttgggctgatgcaggagaagatctacatcagcaagattgtggtggagttcctgcagagcaattccgactcgacctatgaggacctgatmaacaagatcgaggtaagagatcgagggtcctcagcatccgggattcccactggaaacttgccttcagaaccagcagacactgttcttcagttggatttag

SEQ ID NO: 341127 - DNA, 201 bp, Homo sapiens
ccaactagctggggctacaggcgcctgccaccacacctggctaatttttgtgtttttatttatttatttatttatttatttatttatttatttatttattwgagacggagtctcgctctgtcgcccaggctgaagtgcagtggcttgatctccgctcactgcaagctccacctcctgggttcacaccattctcctgcctca

SEQ ID NO: 341128 - DNA, 201 bp, Homo sapiens
gtttgtcacctcgccttcttgcttctctggctgatgagatctttgtgaagatctaattttcagacgtacgaggtgctaaaactttttttttttttttttttgagatggagtcttgctctgttgcccaggctggaatgcagtggtgtgatcttgtctcaccgcaacctctgcctcccgggttcttgtgcctcagcctcctga

SEQ ID NO: 341129 - DNA, 201 bp, Homo sapiens
gctggcattcgaaccaggtgtaaaagtcatatcaaatactaaatgttaaatgagtatgtgtctgtcagggctcctgagataatgaagattgcttttggggraaagaggagctttatgaaaactgcttctttggggaagctcctggcactcacacttggggtctgtgttattttgcttgacagagttgctagaccgcttcct

SEQ ID NO: 341130 - DNA, 201 bp, Homo sapiens
gtctcgaactccttgagcttaggcaatctgcccgcctcagcctcccaaagtgccaggattataggtgtgagccaccgtgcccagccaatttgttttttttkttgttgttgttgttgtttttaattttttttagatggagtctcactctttcactcaggatggagtgcagtggcacgatctcagctcactgcaacctccgcc

SEQ ID NO: 341131 - DNA, 201 bp, Homo sapiens
ggtccaggggagaaatgatgtcatagctcaagtggcaaggcagtcttacatacatacatgttatatatatgtgtgtgtgtgtgtgtgtgtgtgtgtgtgtrtgtgtgtgtgtgtatgtatgtatgtatttagacttctttttttgagacttttttttttttttgagacagggttttgctcttgtggcacaatcttggttca

SEQ ID NO: 341132 - DNA, 201 bp, Homo sapiens
tggaggtccaggggagaaatgatgtcatagctcaagtggcaaggcagtcttacatacatacatgttatatatatgtgtgtgtgtgtgtgtgtgtgtgtgtrtgtgtgtgtgtgtgtgtatgtatgtatgtatttagacttctttttttgagacttttttttttttttgagacagggttttgctcttgtggcacaatcttgg

SEQ ID NO: 341133 - DNA, 201 bp, Homo sapiens
agcaaatttgaaatctgcagggcaggctggaggtccaggggagaaatgatgtcatagctcaagtggcaaggcagtcttacatacatacatgttatatatatgtgtgtgtgtgtgtgtgtgtgtgtgtgtgtgtgtgtgtgtgtgtatgtatgtatgtatttagacttctttttttgagacttttttttttttttgagacag

SEQ ID NO: 341134 - DNA, 201 bp, Homo sapiens
cagcaaatttgaaatctgcagggcaggctggaggtccaggggagaaatgatgtcatagctcaagtggcaaggcagtcttacatacatacatgttatatatatgtgtgtgtgtgtgtgtgtgtgtgtgtgtgtgtgtgtgtgtgtgtatgtatgtatgtatttagacttctttttttgagacttttttttttttttgagaca

SEQ ID NO: 341135 - DNA, 201 bp, Homo sapiens
gatgggcgtgagccccagggggcttcctggtcaccatggtgttcccagctcccagcccaccatggatgctcggatgctgctcacatgaggtgacagctggsccccccacactctttcaggacatgagtgcattggtggctgcccgcatgcggcacatccccttggccccagggtcagactggcgcgatctgcccaacatcg

SEQ ID NO: 341136 - DNA, 201 bp, Homo sapiens
tcctgacctcaagtaatccacctgccttggcctcccaaagtgctgggattacaggcataagccaccacgcctggccctgcttaactctctttctttctttyttttttttttttttttaatgacagagtcttgctctatcgcccaggatagagtgcaatggcgcgatctcggctcactgcaacctccgcctcccagtttcaa

SEQ ID NO: 341137 - DNA, 201 bp, Homo sapiens
gtaacagagtgagactccgtctcataaataaataaatgaataaatgcagtctcagaggatgtgttgttgtgtctcagttggagctacttttcagattgggycatcctatttcattcctttaatatcggaagtagagatttataataaagttactttctgtgaggctatcaacacttaactgatgacaagtagtagaggaat

SEQ ID NO: 341138 - DNA, 201 bp, Homo sapiens
acaccattgcactccagcctgggcaacaagagcaaaaccctatctcaaaaaaaaaaaatatatatatatatacacacgtatatatacgtgtatatatatayacacacacatatgtatacatatatacgtatgtatacacatatatacgtatatatacacatatatatgtatatatacacacatatacgtgtatatatatac

SEQ ID NO: 341139 - DNA, 201 bp, Homo sapiens
gtcactgggactacaggcgcccgccgccatactcggctaattttagtggagatggggtttcactgtgttggccaggctgatcttgaactcctgacctcgartgatccacctgcctcagccaccaaagtgctaggattacaggcatgagccaccacaccggccaacctatgccacttaatcaactagtcacagagcttcagt

SEQ ID NO: 341140 - DNA, 201 bp, Homo sapiens
ctttgggaggccaagatgggcgaatcacttgaggtcaggagttcaagaccagcctgaccaacatggcgaaaccccgtctctactaaaaattcaaaacttarctgggcgtggtggaatgtgcctttaatcccagctactcaggaggctgagtcagaaggattgcttgaacccaggaggtagaggctgcagtgatctgagatc

SEQ ID NO: 341141 - DNA, 201 bp, Homo sapiens
ggctgccgggtagccccatcactctcagtgggaagacggcccacaggagggacagtgctgagacatccgagtcaggctgcgtccctatgctggttccttaytgtttgtttttgaggcagagattgagccagaaggacagtccgtcgcgctaaaggagcaggctaaaacccatggtggcgacagctcactcgctgtaggttc

SEQ ID NO: 341142 - DNA, 201 bp, Homo sapiens
tcatcagaaaaatgacccccaaaaggggaaccttgttcagatcagatgacttcttagcattaggcattccagtaggacactctagactcttgcggggagamaaaagccagcttagttttttctaacactcatatgttaaacttgtttgtgtccaaaacttctttagaactgtgatattcttacaggcaaatgaagttgctt

SEQ ID NO: 341143 - DNA, 201 bp, Homo sapiens; identical to SEQ ID NO: 71857

SEQ ID NO: 341144 - DNA, 201 bp, Homo sapiens
tctacgagttgtgtaatcttgatcacaaaactttttcagaaagtttaaggccgggcacggtgactcatgcctgtaatctcagcactttgggaggccaagaygggcgaatcacttgaggtcaggagttcaagaccagcctgaccaacatggcgaaaccccgtctctactaaaaattcaaaacttagctgggcgtggtggaat

SEQ ID NO: 341145 - DNA, 201 bp, Homo sapiens
tgcagtggcacgatctcggctcactgcaacctctgcctcccgggttcaagtgattctcctgcctcagcctcctgagtatctgggattacaggcgcgcgcckccacgcctggctaatttttgtatttttagtagaggtggggtttcactatgttggccagactggtctcaaactcctgacctcaggtgatctgcccacttca

SEQ ID NO: 341146 - DNA, 201 bp, Homo sapiens
acgagtctggctttgagagttatgaggcgcttccccagcacaaactgacctgcttcaggtaagtgcactttcgtgtgcatgtttgcttcgtggaaggaggmacatccccagaggtgcctgcgggctcacgattctggtgatgttttttagtgcctgacctgcaacatgtcttaagctaacacttcgtggataagagccacc

SEQ ID NO: 341147 - DNA, 201 bp, Homo sapiens
tggccccataaatgaatggtggatcactggctttgatggaggtgaaaaggccctcatcggcttcagcacctgtaagtgtgtggcccatcataggctggccrgggtctgaaaggggccttcatgttctccttcctgggggctgacggggctctggtgggaattctcagcaggcttgcagaaggccatgtgactgggaacctt

SEQ ID NO: 341148 - DNA, 201 bp, Homo sapiens
ccttgaaaccagtattctaatcttttttgttcttccttccctccacacaggatgagaagagacgtagagttacatccagagaacggtaagaatagttactmtacctttctttttgttctacgagttgtgtaatcttgatcacaaaactttttcagaaagtttaaggccgggcacggtgactcatgcctgtaatctcagcac

SEQ ID NO: 341149 - DNA, 201 bp, Homo sapiens; identical to SEQ ID NO: 71853

SEQ ID NO: 341150 - DNA, 201 bp, Homo sapiens
ggtttaagcaattctcctgtctcagcttcccaagtagctgggattacaggtgtgcaccaccacgcccagctaatttttctttttccccctcgaggctgagycttgctctgtcgcccaggctggagtgcagtggccgtgatctcggctcactgcaacctccacctcccgagttcaagcaattctcctacttcagtgtcccaa

SEQ ID NO: 341151 - DNA, 201 bp, Homo sapiens
gtaagcacggtcacctgtgtcccatcgacaccggcctcatcgagaagaatatcgaactcttcttttctggttcagcaaaaccaatctatgatgatgacccrtctcttgaaggtaaggaatagtccgggattatgtttggggcacactttaaaaacagccaggcagggtggctcacatctgtaatcctagcactttgggggt

SEQ ID NO: 341152 - DNA, 201 bp, Homo sapiens
ctctcttagcctttaatcctcttttgttttccctgtgtaggaggagaagagacgcaaaacgacccccaaagaaccgtaagaatttattcttgacattatcsaaagcagatggtaatgttaaaatgatggttctagaacaaaagggaaggggtttcagtaattgccagagcaaccttaggctcattttggatcgggttggtg

SEQ ID NO: 341153 - DNA, 201 bp, Homo sapiens
tcgccatgttggccaggctggtctcaaacccttgacctcaggtaatccacccaccttggccctcaggtaatccacccaactgctgctgtatgttgggattmcaggcatcagccaccacgcccagccactaatttttgtatttttgtagagatggagtttcgccatgtttcccaggctggtctgaacgcctgggctcaagtg

SEQ ID NO: 341154 - DNA, 201 bp, Homo sapiens
ggagaatcgcttgaacctgggagtcggaggttgagctgagatcacaccattgcactccagcctgggcaacaagagcaaaaccctatctcaaaaaaaaaaaatatatatatatatacacacgtatatatacgtgtatatatatatacacacacatatgtatacatatatacgtatgtatacacatatatacgtatatataca

SEQ ID NO: 341155 - DNA, 201 bp, Homo sapiens
gctgttataccctttctcttgggaatcccgcaggcgtgagctgtatttgccttattcctctgtggttgtttatatatatctttttttttttttttttttttgagacggagtttcactcttgttgtccaggctggagtgcaatgacgtgaccttggctcaccgcagcctccacctcccgggttcaagcgattctcctgcctc

SEQ ID NO: 341156 - DNA, 201 bp, Homo sapiens
gcccccttcctctacctttaaagtcagcatttgcgggttgcatctctctctgacccgtcctccaacgttgcccgctctctgcagctagaaaggttctgtgytcttaagggctgaagtgattagattgggcccaccccagataatccaggataatctccccatctcaaggtctgtattcttagttacatctgcaaaatcgct

SEQ ID NO: 341157 - DNA, 201 bp, Homo sapiens
gcttgaacttgggaggcggaggttgcagtgagccgagatcatgccactgaactccagcctgggcaacagagcgagactccgtctcaaaaaaaaaaaaaaaatcatctgagtcttcagcgattcataatctttttgcaggtggagggtcttgcctcaaacttgccggcttaaaggacatacatttattaccttatgcaggtc

SEQ ID NO: 341158 - DNA, 201 bp, Homo sapiens
cctcccaaaatgctgggattacaggtatgatggtgtccagccggttcattgtttttattttattttattttattttattttattttattttattttatttwattttatttttgagacagagtcttgtgctgtcgcccaggctggagtgcagtggtgcgaacttggctcactgcaacctccccctcccgggttcaagtgatt

SEQ ID NO: 341159 - DNA, 201 bp, Homo sapiens
tcactgcagcctccgcttcccgggtttaagcaattctcctgtctcagcttcccaagtagctgggattacaggtgtgcaccaccacgcccagctaatttttytttttccccctcgaggctgagccttgctctgtcgcccaggctggagtgcagtggccgtgatctcggctcactgcaacctccacctcccgagttcaagcaa

SEQ ID NO: 341160 - DNA, 201 bp, Homo sapiens
taggaataatgacatgggttttcagctggtattgggttaaatgagaatatgcatggcacataaaggttcacatgctagtggctaacttagcttgtttttttcagtttttttttaagagacaggatctcactgtgtcacccaggctggaatgcagtggcacagtcatggcttactgcagccttgaacccctgagctcaagca

SEQ ID NO: 341161 - DNA, 201 bp, Homo sapiens
gatgtccgcaggcggtaggtaccatgggggggaacacggactcagggggacaggcagggcgctgggtggggggtcgcttcccctcggggtggccggtggcygctgctgacagacgggcgcgcatgcgtggggtggtgcggcgcgcagcggcagttggcgcgggcagggtggcacttccggtcgcgcgtgcccgggctgttt

SEQ ID NO: 341162 - DNA, 201 bp, Homo sapiens
tagtgaaacctcgtctctactaaaaataaacaaaaaattagctgggcttggtggcgggcacctgtaatcccagctactcaggagactgaggcaggagaatkgcgtgaacccgggaggcggagcttgcagtcagccgagatcgcaccactgcactccaacctgggctacagagcgagactcagtctcaaaaacaaaaaacaa

SEQ ID NO: 341163 - DNA, 201 bp, Homo sapiens
gacatacctgtctctactaaaaataaattagccagggttagctgggtgtggtggtgggcacctgtaatcccagctacttgggaggccgaggcacgagaatygcttgaacctgggaggaggagttgcagtgagccgagattgtgccactgcactctaacctgggtgacagagtgaaactctctcaacaaaaaccacggtagc

SEQ ID NO: 341164 - DNA, 201 bp, Homo sapiens
tacccatcatctagtgccaacagttatcaagttacagccgttgtttcatctatacccccatattgtgtgtccctgccccacctggattactttgtccatawatagtttagtatatttctagacaatgagatctcttttgacaactttttaaaaaattactcatattttacaataattgctaacatttagcagtcttttttt

SEQ ID NO: 341165 - DNA, 201 bp, Homo sapiens
acaagaaagccacctcttccttctagcatctgcaaatgttttttcctcttggttaccagagtctctggattaagctggcagtagctgctgcggccactgcyggccacctcagggccttatgtttctgtccctttgtttccttcagattctgtgtgagctgtgcccgtctggctgagatgaggcaaaaagaaatccccaggg

SEQ ID NO: 341166 - DNA, 201 bp, Homo sapiens
gttcaagtgattcttgtgcctcagcctcttgaatagctgggattataggtgtgtaccaccacgcccagctaatttttttgtatttttagtagagatggggktttgccatgttgtccaggctgttctcgaatacctgagcttggattattttcccacctcagcctctcaaagttttggtattatagatgtgagccactgtgc

SEQ ID NO: 341167 - DNA, 201 bp, Homo sapiens
ggtacgtggagatgcgtgtacacaagtgtgcacttgttggctgagtgataaatgtaggtgtgtaaacttgtgagtttccatctctctgtgacttgtaacgmaagatcacagacacgtggcgcccacaccaaggggaaaggagctcagtgcctgtccctgctttactctctgccccgcagtcgtggccaccatgagggacct

SEQ ID NO: 341168 - DNA, 201 bp, Homo sapiens
tcagggcctccattctgcaggccattgtcaacgtcatcagctcgactcgaccacccctgcgccgacagaccaacatccgctactcgccgctgaccacgctyaaaaccgtggattcctctggcagcctgtatgtgcgaacgacccaccgcctcctcttccgctgtccacgcctcctcaaccttggccttcaatgtctgtcct

SEQ ID NO: 341169 - DNA, 201 bp, Homo sapiens
aatgccagtgtgcagggaataacgtgtgtccctatgggcgggcagatgggtgtatgaaactgctggaggctaatgtttatggagcttttacaatgcaccargctgcattctaagtgccctgaatccaggaagtcatttaatcctcacatcacacccgtgaggcaggcacaatcattcaccccattttattattattttatt

SEQ ID NO: 341170 - DNA, 201 bp, Homo sapiens
cgtgtacacaagtgtgcacttgttggctgagtgataaatgtaggtgtgtaaacttgtgagtttccatctctctgtgacttgtaacgcaagatcacagacaygtggcgcccacaccaaggggaaaggagctcagtgcctgtccctgctttactctctgccccgcagtcgtggccaccatgagggacctggggaagaaggaga

SEQ ID NO: 341171 - DNA, 201 bp, Homo sapiens
agacactggaggcagctgctggggaggctctggggcagaccctcaccgtggcccagctggacgtgtgcagtgatgagtcggtggcccagtgtctcagctgyatccagggagaagtggacgtgctgggtgagacttcacagcccctgattcactaagccccatcctggtctgagtatagaccctcaatatggcaaggtctga

SEQ ID NO: 341172 - DNA, 201 bp, Homo sapiens
caacctcgtgacttcatgatcctgggcctgagaacacaggaatgattcatagcccaccccccacctccatgcatacaccagagctctgtggaccaaggggwcattcctggtcacacactccatcagcaaaatgtatttgagcacacaccagcaatgtatgtatattttttccattaaatatatatttataaccacaagttg

SEQ ID NO: 341173 - DNA, 201 bp, Homo sapiens; identical to SEQ ID NO: 71871

SEQ ID NO: 341174 - DNA, 201 bp, Homo sapiens
ccgtgctgggacccccacctccagcatgaagaggcccccatgaggtcaaatagagcttttatgcaattggacaagcgcagacacgcaggatgtgagggtgyttccccagggaggggaggaaccaagaggcgtattctgagccctgaactgctccccgaaccctgcttcccccacctccgccccaggggaagagggagacgc

SEQ ID NO: 341175 - DNA, 201 bp, Homo sapiens
tcagacttacactacccatgcctggtcgccagcatctccctggtggagccaggccccgtggtcaccgagtttgaggggaagcttctggcgcaggtttctayggctgagttcccaggcactgaccctgagaccctgcactacttccgggacctctatctcccagcctccaggaagctgttttgctccgtgggacagaaccca

SEQ ID NO: 341176 - DNA, 201 bp, Homo sapiens
gccctattttagaaatgaggaaactaaggtgcagactgtgaaaggtctttgctcaaggtctcccagctgcaaagtagcagagctgggatttgaactcaggsagcccatcccttgcacccatgtttcccactatatcacatgtagatgcaagtgaccccattcacgtgcctgctacccacaaatcacactgacccgaagaca

SEQ ID NO: 341177 - DNA, 201 bp, Homo sapiens
tttgaacccaggagttggaggctgcagacagctatgatcatgccactgcactccagcctgggcaacagagtgagaccctgtatcttaaaaaaaaaaaaaawtggacaaaataggtcagggagtggttggggcatcagacttacactacccatgcctggtcgccagcatctccctggtggagccaggccccgtggtcaccga

SEQ ID NO: 341178 - DNA, 201 bp, Homo sapiens
gagagacaagggccctaatgaagagaaaaatgaaggggatccccaagcggccccaaaggtttagagaatggagggaaataggggagtttcctgggaccagrtggagctgggaggaggtggcacccggcacccgagaacaacctctttctgaccccatatgaccccatcacacaatgccatacacccatcatcttggcacca

SEQ ID NO: 341179 - DNA, 201 bp, Homo sapiens
atcccctcatcctagaaatatttcttgagcatcttctgggtgctctgaatgctggcaacacaactggagatgaaatagacaaaaatctcagccctcaggaygggtgtcatgtggggaggagagggagaatgggtgataaacagataaaaagaaattgttgctctatctggtgggaataagtgctgagacacaaaataaagc

SEQ ID NO: 341180 - DNA, 201 bp, Homo sapiens
gccctggcctcgccctgcgctccagcgcctggccaggcggggctttttggagggggagcgctgacagctggactgggaagttgggaaactttgtgctgagsgctgattggctggctggggtggagcccagcgccaggagctgggttgttcctgccccaccccactgtggaggagaagggtcactcccacccagccctagag

SEQ ID NO: 341181 - DNA, 201 bp, Homo sapiens
cctggacacggtgtttcacattcctggagtcccaggggacttatattcagagtggatgcctaagattccatgaccatgtggatgtgtgagcgtgggaatgmggcatagtccaatcagggattaaccatatggacaggcaccttcctggactccaaagtaagaagtgtgctgtggtgtgtgtgtgtgtgtgtgtgtgtgtgt

SEQ ID NO: 341182 - DNA, 201 bp, Homo sapiens
ttgctgccatgcagaatgtctttgacaccaactttttcggagctgtccgtctcgtcaaagctgtgcttccaggcatgaagaggaggcggcagggccacatygtggtgatcagcagtgtcatgggcctgcagggtgagctgtggggacccaaccctggaaatcccaccagtgtctgatcctccccagactgggaggatggcg

SEQ ID NO: 341183 - DNA, 201 bp, Homo sapiens; identical to SEQ ID NO: 71875

SEQ ID NO: 341184 - DNA, 201 bp, Homo sapiens
tctcccaaagaccccatcaccctggaacccacaaagcccacctcccagaccctcaaagagctctcctccctctgaccctcacaggtgtcatcttcaacgaygtctatgcagcttccaagttcgccctggagggattcttcgaaagcctcgctatccagctgctgcagttcaacatcttgtgaggcgggcacgtgggcagag

SEQ ID NO: 341185 - DNA, 201 bp, Homo sapiens
cctgggtcccagcgctcagggcctccattctgcaggccattgtcaacgtcatcagctcgactcgaccacccctgcgccgacagaccaacatccgctactcrccgctgaccacgcttaaaaccgtggattcctctggcagcctgtatgtgcgaacgacccaccgcctcctcttccgctgtccacgcctcctcaaccttggcc

SEQ ID NO: 341186 - DNA, 201 bp, Homo sapiens
atgagaaagttctggagatggatagcggtgatggttgcacaacagtgtgaatgaacctaaggccactgatctgtacagttataaatggttaaaatggtaatttttttttttttttgagacagagtctcgctgtcacccaggctagagtgcagtggcacaatctcagctcactgcaacctctgcctcctgggttctagcaat

SEQ ID NO: 341187 - DNA, 201 bp, Homo sapiens
atgacctttcagaaactgactgccctttcttttcacagctggcattatgacaaaaaggcacacaagctgcattgagtcctgcctacaggggacaaggggtggggggggtctgtcaggggcccagcctgccccctgccactctcccctgtgctggtcagggcccccacggggatgttgggtggggtctgggatgtggaggga

SEQ ID NO: 341188 - DNA, 201 bp, Homo sapiens
tgagaaagttctggagatggatagcggtgatggttgcacaacagtgtgaatgaacctaaggccactgatctgtacagttataaatggttaaaatggtaatttttttttttttttgagacagagtctcgctgtcacccaggctagagtgcagtggcacaatctcagctcactgcaacctctgcctcctgggttctagcaatt

SEQ ID NO: 341189 - DNA, 201 bp, Homo sapiens
cctttcagaaactgactgccctttcttttcacagctggcattatgacaaaaaggcacacaagctgcattgagtcctgcctacaggggacaaggggtggggrgggtctgtcaggggcccagcctgccccctgccactctcccctgtgctggtcagggcccccacggggatgttgggtggggtctgggatgtggagggacaga

SEQ ID NO: 341190 - DNA, 201 bp, Homo sapiens
gagaaagttctggagatggatagcggtgatggttgcacaacagtgtgaatgaacctaaggccactgatctgtacagttataaatggttaaaatggtaatttttttttttttttgagacagagtctcgctgtcacccaggctagagtgcagtggcacaatctcagctcactgcaacctctgcctcctgggttctagcaattc

SEQ ID NO: 341191 - DNA, 201 bp, Homo sapiens
ctgaggcggaggattgtttgaacccaggagttggaggctgcagacagctatgatcatgccactgcactccagcctgggcaacagagtgagaccctgtatcttaaaaaaaaaaaaaaatggacaaaataggtcagggagtggttggggcatcagacttacactacccatgcctggtcgccagcatctccctggtggagccag

SEQ ID NO: 341192 - DNA, 201 bp, Homo sapiens
cccctgccccagcctcttggcgggagctggattctccagaatctgccatgacctcacccctgggggcggctctgctgatctcaccacggggagctggggcrggggggctaagacgttggggaggcacgggcttggatgaaggacccccattcccactcttcctaggtcagaaccctcattttccagactcctcggaggcct

SEQ ID NO: 341193 - DNA, 201 bp, Homo sapiens
cagaacagagcaacaccttatcaaaaaagaaaaagaaaaagagagagagagagaaggaaggaaggagggagggagggagggagggagggagggaggaagaragggagggaggaagagagacaagggccctaatgaagagaaaaatgaaggggatccccaagcggccccaaaggtttagagaatggagggaaataggggagt

SEQ ID NO: 341194 - DNA, 201 bp, Homo sapiens
aatcatcccctcatcctagaaatatttcttgagcatcttctgggtgctctgaatgctggcaacacaactggagatgaaatagacaaaaatctcagccctcrggacgggtgtcatgtggggaggagagggagaatgggtgataaacagataaaaagaaattgttgctctatctggtgggaataagtgctgagacacaaaata

SEQ ID NO: 341195 - DNA, 201 bp, Homo sapiens
gcagaacagagcaacaccttatcaaaaaagaaaaagaaaaagagagagagagagaaggaaggaaggagggagggagggagggagggagggagggaggaagraagggagggaggaagagagacaagggccctaatgaagagaaaaatgaaggggatccccaagcggccccaaaggtttagagaatggagggaaataggggag

SEQ ID NO: 341196 - DNA, 201 bp, Homo sapiens
aggtttcaccatgttggccagaccggtctcgaactcctggtctcaggtgatctgcctgcctgggcctcccaaagtgctgggattacaggcatgagccaccrtgcctggcctgccctattttagaaatgaggaaactaaggtgcagactgtgaaaggtctttgctcaaggtctcccagctgcaaagtagcagagctgggatt

SEQ ID NO: 341197 - DNA, 201 bp, Homo sapiens
agtccagcgttttgagaggctgaaatgggaggatcgcttgaggtcaggcatttgagaccagcctgggcaacatagcgagacccccatctcagcccaaaatktaaaaattagccaagggtggtggtgtgtgtacctgcagtcccagctactcaggaggctgaggcggaggattgtttgaacccaggagttggaggctgcaga

SEQ ID NO: 341198 - DNA, 201 bp, Homo sapiens; identical to SEQ ID NO: 71869

SEQ ID NO: 341199 - DNA, 201 bp, Homo sapiens
gtcttaccccaaaccttttccgcctagcagatcccctcaaaggagaccttaacctcattcaagacttcagcctccatccaggccctagaattaggaggagrtgcagctttataccaaatcttttttattttctattatttttacattttattttggagacagggtcttgatctgtcacccaagctggagtgcagtggtgca

SEQ ID NO: 341200 - DNA, 201 bp, Homo sapiens
gaattgctcatggattaaggggggcactattcccagcagcccttcctcccactcagggctgaggatcccctatgacaaatgctaaactgtgtttaaaggtyaccaaggtttcatatttgtccacccaagataccctggactggccttggacttggagtacggggtgaggtgcttcagggagtgtctagaagtaatgctaga

SEQ ID NO: 341201 - DNA, 201 bp, Homo sapiens
gccttgctgccatgcagaatgtctttgacaccaactttttcggagctgtccgtctcgtcaaagctgtgcttccaggcatgaagaggaggcggcagggccabatcgtggtgatcagcagtgtcatgggcctgcagggtgagctgtggggacccaaccctggaaatcccaccagtgtctgatcctccccagactgggaggatg

SEQ ID NO: 341202 - DNA, 201 bp, Homo sapiens
tcatacctgtaatcctagcactttgggaggccgagacaggaggattgaccagcctcagcaaaatagtgagactctgactctacaaaaaaattaaaaattarccagtcatagtggtgcatgcctaatcccagctactcgggaggccaaggtgggaggatcccttgagcccaggagtttgaggctgcagtgagttatgacaga

SEQ ID NO: 341203 - DNA, 201 bp, Homo sapiens
ccagttggccaagaggggtagaccagttggtcctaccaattgatttattaagggctgggtgcagtggctcatacctgtaatcctagcactttgggaggccragacaggaggattgaccagcctcagcaaaatagtgagactctgactctacaaaaaaattaaaaattagccagtcatagtggtgcatgcctaatcccagct

SEQ ID NO: 341204 - DNA, 201 bp, Homo sapiens
tttgagacagggtctcactctctcacccagacggtagtgcagtggctccatctcggctcactgcagcctcaacctcctgggctcaagcaatcctcccaccrcagcctcccaagtagccaggactacaggtgggggccacccaccacacctggcaaatttgtaaaatataatttttttgtagagatgggatctcgctatact

SEQ ID NO: 341205 - DNA, 201 bp, Homo sapiens
tactctggaggctgagataggaggatcgcttgaggctgtggtgagctatgatggtgccactgcactccagcctgagtgacagagcaagatgctgtctcttaaaaacaaacaaacaaaaaccagtgatgtctatagtaggtgcggagaagaaatgtttggcagatgaagaaaatgaggtgcagagaggatttaagagattct

SEQ ID NO: 341206 - DNA, 201 bp, Homo sapiens
actctggaggctgagataggaggatcgcttgaggctgtggtgagctatgatggtgccactgcactccagcctgagtgacagagcaagatgctgtctcttaaaaacaaacaaacaaaaaccagtgatgtctatagtaggtgcggagaagaaatgtttggcagatgaagaaaatgaggtgcagagaggatttaagagattctc

SEQ ID NO: 341207 - DNA, 201 bp, Homo sapiens
ctctggaggctgagataggaggatcgcttgaggctgtggtgagctatgatggtgccactgcactccagcctgagtgacagagcaagatgctgtctcttaaaaacaaacaaacaaaaaccagtgatgtctatagtaggtgcggagaagaaatgtttggcagatgaagaaaatgaggtgcagagaggatttaagagattctct

SEQ ID NO: 341208 - DNA, 201 bp, Homo sapiens
tggaggctgagataggaggatcgcttgaggctgtggtgagctatgatggtgccactgcactccagcctgagtgacagagcaagatgctgtctcttaaaaacaaacaaacaaaaaccagtgatgtctatagtaggtgcggagaagaaatgtttggcagatgaagaaaatgaggtgcagagaggatttaagagattctctctt

SEQ ID NO: 341209 - DNA, 201 bp, Homo sapiens
caccccagactgcagaacagagcaacaccttatcaaaaaagaaaaagaaaaagagagagagagagaaggaaggaaggagggagggagggagggagggaggragggaggaagaaagggagggaggaagagagacaagggccctaatgaagagaaaaatgaaggggatccccaagcggccccaaaggtttagagaatggaggg

SEQ ID NO: 341210 - DNA, 201 bp, Homo sapiens
accccagactgcagaacagagcaacaccttatcaaaaaagaaaaagaaaaagagagagagagagaaggaaggaaggagggagggagggagggagggagggrgggaggaagaaagggagggaggaagagagacaagggccctaatgaagagaaaaatgaaggggatccccaagcggccccaaaggtttagagaatggaggga

SEQ ID NO: 341211 - DNA, 201 bp, Homo sapiens
ccagactgcagaacagagcaacaccttatcaaaaaagaaaaagaaaaagagagagagagagaaggaaggaaggagggagggagggagggagggagggaggraggaagaaagggagggaggaagagagacaagggccctaatgaagagaaaaatgaaggggatccccaagcggccccaaaggtttagagaatggagggaaat

SEQ ID NO: 341212 - DNA, 201 bp, Homo sapiens
ctaaactgtgtttaaaggtcaccaaggtttcatatttgtccacccaagataccctggactggccttggacttggagtacggggtgaggtgcttcagggagygtctagaagtaatgctagaagagtgagggactttaaggtaacccttagtacctcttctcttagtgaataatgctggaatgggcctggtggggcccctgga

SEQ ID NO: 341213 - DNA, 201 bp, Homo sapiens
gagtgctggaattacaggcatgcaccaccacacctggccaaaaatcaattttttttgagatggaatttcactcttgttgcctaggctagagtgcaatggcrcaatctcagctcactgcaacctccacctcctgggttcaagtgattctcctgcctcagcctcccaagtagctgggattacaggcaggcgccaccacacttg

SEQ ID NO: 341214 - DNA, 201 bp, Homo sapiens
gaattacaggcatgcaccaccacacctggccaaaaatcaattttttttgagatggaatttcactcttgttgcctaggctagagtgcaatggcgcaatctcrgctcactgcaacctccacctcctgggttcaagtgattctcctgcctcagcctcccaagtagctgggattacaggcaggcgccaccacacttggctaattt

SEQ ID NO: 341215 - DNA, 201 bp, Homo sapiens
gaggcggaggattgtttgaacccaggagttggaggctgcagacagctatgatcatgccactgcactccagcctgggcaacagagtgagaccctgtatcttwaaaaaaaaaaaaaatggacaaaataggtcagggagtggttggggcatcagacttacactacccatgcctggtcgccagcatctccctggtggagccaggc

SEQ ID NO: 341216 - DNA, 201 bp, Homo sapiens; identical to SEQ ID NO: 71877

SEQ ID NO: 341217 - DNA, 201 bp, Homo sapiens
tctcagccctcaggacgggtgtcatgtggggaggagagggagaatgggtgataaacagataaaaagaaattgttgctctatctggtgggaataagtgctgrgacacaaaataaagcatgctgagagtggcagggggtgggtgggggttatttttagaagggtttcactagggcatttcctagattggaataatcactaccc

SEQ ID NO: 341218 - DNA, 201 bp, Homo sapiens
acttgaacccgggaggcagaggttgcagtgagctgagatcacgccactgctgcactccagcctgggcaacagagtgagactctgtctcaaaaaataaacaaaaaaaaaaagcctccaagctgaaaagcctcctgaactgagtagaaccccaaattcaatagaatttccaaacttggattgactcccttccaaactcagtag

SEQ ID NO: 341219 - DNA, 201 bp, Homo sapiens
tgaggcaggagaattgcttcaacctgggagatggaggttgcagtgagctgagatagcgtcactgcactccagcctgggtgacagagtgagactccatctcaaaaaaaaaaataaataaataaataaataaatagaataaaaaactagtcgggcatggtggcgtgtgcctgtggtcccagctacctgggaggctgaggcagg

SEQ ID NO: 341220 - DNA, 201 bp, Homo sapiens
ggagaattgcttcaacctgggagatggaggttgcagtgagctgagatagcgtcactgcactccagcctgggtgacagagtgagactccatctcaaaaaaawaaataaataaataaataaataaatagaataaaaaactagtcgggcatggtggcgtgtgcctgtggtcccagctacctgggaggctgaggcaggaggatca

SEQ ID NO: 341221 - DNA, 201 bp, Homo sapiens
aattgcttcaacctgggagatggaggttgcagtgagctgagatagcgtcactgcactccagcctgggtgacagagtgagactccatctcaaaaaaaaaaawaaataaataaataaataaatagaataaaaaactagtcgggcatggtggcgtgtgcctgtggtcccagctacctgggaggctgaggcaggaggatcacttg

SEQ ID NO: 341222 - DNA, 201 bp, Homo sapiens
ctggcccttttctgaattttggagagacatggaaaataagcccttcttcctttctcccctggggctcgtgaacagcttagctaagaggctgagctgtgctggggccagtcgtgctgggttcctatcctagctttgccacttatgagctgcatgatcttggagaagtcacatcgcctctctgagccttggtgccttcacctg

SEQ ID NO: 341223 - DNA, 201 bp, Homo sapiens
ctaaaaatacaaaaattagctgggcgcacgcctgcaatcccagctacttgggaggctgaggtgggaggaggattgcatgaacccaggaggcggaggttgcrgtgagccgagattgcgccacttcactccagcctgggtgacaaagccagactccgtctcaaaaaaaaaaaaagaaatagcaagtaaagctgtatgataatt

SEQ ID NO: 341224 - DNA, 201 bp, Homo sapiens
acaaaaattagctgggcgcacgcctgcaatcccagctacttgggaggctgaggtgggaggaggattgcatgaacccaggaggcggaggttgcagtgagccragattgcgccacttcactccagcctgggtgacaaagccagactccgtctcaaaaaaaaaaaaagaaatagcaagtaaagctgtatgataattcaagatgg

SEQ ID NO: 341225 - DNA, 201 bp, Homo sapiens
gaaccaggagagttgcttgaacccaggatggggaagttgcagtgagccaagatcgtgccactgcattccaacctgggcaacaagagcagaactctgtctcaaaaaaaaaaaaaaaaaagaaagaaaattaaatttgagacagggccttgctatgttgcccaggatggcctcgaacttctggccttgaagtcctaggctcaa

SEQ ID NO: 341226 - DNA, 201 bp, Homo sapiens
gtggtgggcagaacccctgggcggggcaggcgggggcggggccagtgggtagagccaaccgctggatgggaccagtgggcgcggcctgcggatggagccasccattaggttgttcctgtgggcggagatagctactgggtgtggctgattagggcagggccaatccctgggcgggggctggtggagctgggccctatggat

SEQ ID NO: 341227 - DNA, 201 bp, Homo sapiens
gagcaacattgcaagatcctcttttcctttcctttcctgtcctgtcctgtcctgtcctttcctttccttcttctttctctttcttcttttctgtttttggttttttttttttgagatcgggtctctctgtcacccaggctagagggcacggatcttggttccctgcaaactccgcctcctgggctgcagcaattctcctgc

SEQ ID NO: 341228 - DNA, 201 bp, Homo sapiens
tgagcgtcggtgctctgacatgtggtctgtgttccctctgcctggtgtatcctaagaactggtgtcctctaaccacctggtgttcttagttattgttcctsctctgatggtgctccagggtctgattgcttgtgctccagcgatgtgtgcaactgacagctttgcccgtgtgctctacctggatgccccactgctggggat

SEQ ID NO: 341229 - DNA, 201 bp, Homo sapiens; identical to SEQ ID NO: 71881

SEQ ID NO: 341230 - DNA, 201 bp, Homo sapiens
cccaggtgctggccagcctccggagcgtccgtagcaacttctcactcctgaccaatgtgcccgttcccagtaacaagtaagtgaaggctgggctgcaacasctgtgatcataaggtgaagcatatgcgggttctgctctcagccctgctgtgtgacctctggcaggcaggtgacctctctgaacctctgttcagacaacag

SEQ ID NO: 341231 - DNA, 201 bp, Homo sapiens
aataatgcctcccttagataactgctgtgaggagaggagatgatgtctagaaagtgctagaatattgccctgcgtacataggagtggatcttaattgtttyagtgcaagagatgtggctgagagctgccagtccttctgggggtgggggatagagacatccttaggggcttggaggatttgtggagagttaggcaagagag

SEQ ID NO: 341232 - DNA, 201 bp, Homo sapiens
gccaggccgatctcaaattcatgacctcaagtgatctgcccaccttggcctcccaaagtgctgtgattacagatgtgagccaccgcgcccagccccattcttttttttttttttttttttttctgagatggagtctcactctgtcgcccaggctggagggcagtggcttgatctcggctcacggcaacctccgcctcctgg

SEQ ID NO: 341233 - DNA, 201 bp, Homo sapiens
cccgagtagttgggactacaggcacccgccaccatgcctggctaatttttttgcattttttagtggagacggggtttcaccgtgttagccaggatggtctygatctcctgacctcatgatctgcccacctcagcctcccagattgctgggattacaggcatgagccaccgcgcctggcctcagttcctttttttctctttt

SEQ ID NO: 341234 - DNA, 201 bp, Homo sapiens
aatgcctcccttagataactgctgtgaggagaggagatgatgtctagaaagtgctagaatattgccctgcgtacataggagtggatcttaattgtttcagkgcaagagatgtggctgagagctgccagtccttctgggggtgggggatagagacatccttaggggcttggaggatttgtggagagttaggcaagagagcag

SEQ ID NO: 341235 - DNA, 201 bp, Homo sapiens
tcccgggttcgagccattgtcctgcctcagcctcctgagtaggtgggattacatgtgcccaccaccatgccctgctaatttttgtatttttagtagagacrgggtttcaccatgttggccaggctggtcttgaactccagacatcaggtgatccacccacctcagcctcccaaagtgctgggattacaggcgtgagccact

SEQ ID NO: 341236 - DNA, 201 bp, Homo sapiens
cataacagcctgcacgcagctgacgtgctgcagtccacccacgtactgctggccacgcctgcactagatgtgagtgactgccctgtgagtgaccgtccccrtctctctttgtgactgcctcttcagcctcctgtgtgtctctctgaccctgtgtctctgacctccatctctctttgacgccatttctctctcttttttttt

SEQ ID NO: 341237 - DNA, 201 bp, Homo sapiens
tgttgtgttgcccaggctggagtgcagtggtgcgatcgcggctcactgcaagctcctcctcccaggttcacgccattctcctacctcagcttcccgagtarttgggactacaggcacccgccaccatgcctggctaatttttttgcattttttagtggagacggggtttcaccgtgttagccaggatggtctcgatctcct

SEQ ID NO: 341238 - DNA, 201 bp, Homo sapiens
ggcttcctcactctgggccccatggcatcagagccaacactagagaaggaaggatatttcacagaggtggactcgaaaatagagattcactgttgggcgcrgtggctcacacgggtggatcacttgaggccaggaattcgagaccaacctggccaacatggtgaaaccccatttctactaaaaatacaagaaaaatttgcc

SEQ ID NO: 341239 - DNA, 201 bp, Homo sapiens
ttgactcatggccacacacaggtgacacacagaccacagcaaccctggcccagccctcgcacatcctcgtctacactgcgttcctccacagtgggggacaytgtattttggtgagacacattctcacaaaaatacacacccagggcccacacatgttcctgtatgctgtactcccacctgcaccagatacacacaggaacg

SEQ ID NO: 341240 - DNA, 201 bp, Homo sapiens
aaatacacagataaagacacagagatgcacacaggcacccatgagcacccagcccctgctcacacaggcagatgtgcgatgccacagagatgtctatgtgygatgcccgggggcacacagacctccctctcccccagtctcttacatactcagccccccaaagagctgtgtcacctggcactacgcgcctgcctgggagac

SEQ ID NO: 341241 - DNA, 201 bp, Homo sapiens
caggcctctgggctcctgctgacgtgagctgagtcccttggggctggtggatgtgccaggatgtgctagctgggcacctgcttgggaacagagtctcaccrtcctaaactgcagcttaaatcctaggccggggagttggaggtgtgtagctatgttcctctcgccttctctggagctgaaaaaaaatccaccttaggagac

SEQ ID NO: 341242 - DNA, 201 bp, Homo sapiens
aagtgctgggattacaggcattacaggcgtgagccaccgcacccggcctcctcattcctcttgacctccctaatagcgtttcagcctcctgacccctcttmtcgcccatcccctgcagcttcgaggcagagaatgggccgacaccatctcctggccgcagccccctggactcgcaggcgagcccaggactcgtgctgcacg

SEQ ID NO: 341243 - DNA, 201 bp, Homo sapiens
tagtaatattatatacatgcatgtaatattagtaatagtgcatatacatgtatgcaatattagcaatattgcatatgcatatataatactagcaatattgyatatgcatgtgtatgtaatattagtaatattacatattacatattaccaatattacatattacctattactacaaaaaattcaaaaattatctgggtgtg

SEQ ID NO: 341244 - DNA, 201 bp, Homo sapiens
tacaggactccagcctgggcgatagagcgagatttcatctcaaaaaaacaccaggccaggcgcagtggctcatgcctgtaatcccagcactttgggaggcygaggtgggtggattacttgaggtctggagttcgaaaccagcctggccaacatggtaaaatcccatctctactaaaaatacaaaaattagccaggtgtggt

SEQ ID NO: 341245 - DNA, 201 bp, Homo sapiens
gctgaccccaaccccccagcagtcttataggggctctgttggctgagcagaaaaataggagggactcatggggtcttcaggcgttcttgggaaggactgasaccctcctcaccactgtgcttcccccatcatttcttccttgttgactcctttaccttagttcaaaaggatgttgaaccgtgagctcacacacctgtcaga

SEQ ID NO: 341246 - DNA, 201 bp, Homo sapiens
atctcagctactcgggaggctgaggtaggaaaatcgcttgaacccgggaggtggaggctacagtgagccagagatcgtgccactgcactccagcctgggcracagagcgagactctgtctcaagaaaaaaagtgttcggtgtttccagtactcccaccagtgagggtgtgtctctgagttctgaggatccacccaatggga

SEQ ID NO: 341247 - DNA, 201 bp, Homo sapiens
gccatgcaggctcacccctcctgccaagtgtccctcctgcttccctggacagagtctgctcctgcttttggggtgctgtggcagagcttgggggtggggasccaatgccctttctcctctgtgtacaatgtcacagcagaggcctgtgcagagtggcatggggggaccaggaggggcctccaagcccggttttgggtatac

SEQ ID NO: 341248 - DNA, 201 bp, Homo sapiens
gatctgcccgccttggcctcccaaagtgttgggattacaggcgtaagccaccgtgcccggcctttttcttttttttttgagatagggtctcactgtatcayccagtctggagtgcagtggcatgatcacagctcactgcagcctccaaatcctggtctcaagcaatcatcttgcatcagcctcttgagtagctgggactat

SEQ ID NO: 341249 - DNA, 201 bp, Homo sapiens
tactcgggaggctgaggtaggaaaatcgcttgaacccgggaggtggaggctacagtgagccagagatcgtgccactgcactccagcctgggcgacagagcragactctgtctcaagaaaaaaagtgttcggtgtttccagtactcccaccagtgagggtgtgtctctgagttctgaggatccacccaatgggagcataaca

SEQ ID NO: 341250 - DNA, 201 bp, Homo sapiens
ccagcggcatcacagctgaaagggttctgccgtttcgggtgagccttccccgtacgtggtagtgggctgaagaataagggagcctccaggggtggaagggktgttcacacttgttcctgctccccatcttctgcagacaaacagaatgaagtggagatcccatcacccacgatgaaggaacgagaaaaacagcaagcgccg

SEQ ID NO: 341251 - DNA, 201 bp, Homo sapiens
agcctccaagactttttttttttttttgagacggagtctcgctctgtcgccaggctggagtgcagtggcgcaatctcggctcactgcaaccttcgcctccygggttcaagcgattctcgtgcctcagcctcctgagtagcttggattacaggcacgcaccaccacacccagctaatttttgtatttttattagagacgggg

SEQ ID NO: 341252 - DNA, 201 bp, Homo sapiens
tgcacgcagctgacgtgctgcagtccacccacgtactgctggccacgcctgcactagatgtgagtgactgccctgtgagtgaccgtccccatctctctttstgactgcctcttcagcctcctgtgtgtctctctgaccctgtgtctctgacctccatctctctttgacgccatttctctctcttttttttttctttttgag

SEQ ID NO: 341253 - DNA, 201 bp, Homo sapiens
ccttagcctcacaaagtgctgggattgcaggcgtgagccactgcacctggccaactggtgtttattaagcagctactatgtgctggcccttttctgaattytggagagacatggaaaataagcccttcttcctttctcccctggggctcgtgaacagcttagctaagaggctgagctgtgctggggccagtcgtgctgggt

SEQ ID NO: 341254 - DNA, 201 bp, Homo sapiens
ccagggacttttccatatgcatcctcatccccagtgccctgggtattccagcagggtattcctgctggcatatggagaaactggagcccagagacaaaacmctttctcttttttttttttttttttttttgacagagtctcctctgtcacccaggctggagtgcagtggcgtgatctcagctcactgcaacctctgccttc

SEQ ID NO: 341255 - DNA, 201 bp, Homo sapiens
gtgctgcagtccacccacgtactgctggccacgcctgcactagatgtgagtgactgccctgtgagtgaccgtccccatctctctttgtgactgcctcttcrgcctcctgtgtgtctctctgaccctgtgtctctgacctccatctctctttgacgccatttctctctcttttttttttctttttgagacggagtcttgctc

SEQ ID NO: 341256 - DNA, 201 bp, Homo sapiens
actgtgcttcccccatcatttcttccttgttgactcctttaccttagttcaaaaggatgttgaaccgtgagctcacacacctgtcagaaatgagcaggtcyggaaaccaggtctcagagtacatttccacaacattcctgggtgagtgaggggaagcacgtgggattggaggggggacatttggggtagagagggggctgc

SEQ ID NO: 341257 - DNA, 201 bp, Homo sapiens
gagccaacgcgggcggctttggggtctgcgggagagtccccaccagagccgtgcgggcgccccagacccgccccgccctgggggcggctccagcgcgaagscggaagggccgaggcgacagggcggggtggggcccgcgggcccggggctgggcaggcggcctgcgtgggcctggcggggtgggcggcgcagctccccagc

SEQ ID NO: 341258 - DNA, 201 bp, Homo sapiens
ggggagaaaagtggctgtgggggttgaagaccggcagtcttttttttttttttttttttttttcaaataaggagaagggcgcggggggagggcggtggcaracggcatcgcgtgccctggggagcccgtgacagggggcgcacgggggcaggggtctggtccccgggtcccgcagcagagcagtttcgcgttcgagctctt

SEQ ID NO: 341259 - DNA, 201 bp, Homo sapiens
agagccaacgcgggcggctttggggtctgcgggagagtccccaccagagccgtgcgggcgccccagacccgccccgccctgggggcggctccagcgcgaasccggaagggccgaggcgacagggcggggtggggcccgcgggcccggggctgggcaggcggcctgcgtgggcctggcggggtgggcggcgcagctccccag

SEQ ID NO: 341260 - DNA, 201 bp, Homo sapiens
gaggaagggtgggggctggggcgacccgggcccggaggctctcggccccccagtggccaaccccggcattgacgccgtcaggagcccagccgtgcgtcagstgtcgccctggcaacgggggcgacgtcaccacattggtggtgcgtcagtccgctgacgtcacgccccaggagaggcaataggcaagtggcgggggcgggt

SEQ ID NO: 341261 - DNA, 201 bp, Homo sapiens
gcgacctgccatccaggtcatgtgttcatcctggggtatgtgttcagttctgtcagcctcagtctactggcctgtgaaatggggccagtcatgccttctgkgggtggccttgcggtgaggcttggtgtcactcctagtaccgggccacagagggcaaatggaagttccctttctggccagacggggtgggctgcgggggct

SEQ ID NO: 341262 - DNA, 201 bp, Homo sapiens
ccctggagacctctgatagggcatgcagtagacgtttaataaatgttgcatccttcccacttcctgtgcaaacctgaagctgcggtcacgctttggaggartgagggcgacctgccatccaggtcatgtgttcatcctggggtatgtgttcagttctgtcagcctcagtctactggcctgtgaaatggggccagtcatgcc

SEQ ID NO: 341263 - DNA, 201 bp, Homo sapiens
ccaaccccggcattgacgccgtcaggagcccagccgtgcgtcagctgtcgccctggcaacgggggcgacgtcaccacattggtggtgcgtcagtccgctgrcgtcacgccccaggagaggcaataggcaagtggcgggggcgggttctaggcccgaccggcagggggagccctggggcactgatggcagatgcgtttggct

SEQ ID NO: 341264 - DNA, 201 bp, Homo sapiens
cagggatgccaaaagattgcacacccttgccatagacacattccctgctgccctgaaattgtcagactagagggtgaagcagaaatagcaagtaaagggcygggtgcggtggctcaggcctgtaatcccagcactttgggaggccaaggcaggtggattacttgaggccaggagttcgagaccagcctggccaaaacctgg

SEQ ID NO: 341265 - DNA, 201 bp, Homo sapiens
ggaggaagggtgggggctggggcgacccgggcccggaggctctcggccccccagtggccaaccccggcattgacgccgtcaggagcccagccgtgcgtcasctgtcgccctggcaacgggggcgacgtcaccacattggtggtgcgtcagtccgctgacgtcacgccccaggagaggcaataggcaagtggcgggggcggg

SEQ ID NO: 341266 - DNA, 201 bp, Homo sapiens
ctgcttggcccattttatccattttcgagtgtatagttcagtggcattaagtacattcacattgttgtgcaaccatcaccaccatccatctccaggactgtttttttttttttttgagacagggtctcactctatcacccaggctggagtgcagtggcatcatcactgctcactgcagtctatacctccagggctcaggtg

SEQ ID NO: 341267 - DNA, 201 bp, Homo sapiens
tctgtctggttgtacatgtgtcaataggtgaccgtttccgttggggggttttatgcttttatggtctgcgggggtgtatctgcggctataggtctgcgtakccgctggtttattggctacgcatttgcagcgctggggtgttgggaatagattctgaagagtggcacgccagtgtgtacttgtgtaggtgtataggtttgc

SEQ ID NO: 341268 - DNA, 201 bp, Homo sapiens; identical to SEQ ID NO: 71894

SEQ ID NO: 341269 - DNA, 201 bp, Homo sapiens
gaggctgaggcaagagaatctcttgaacctgagaggcggaggttgcagtgagccgagatggcgccactgcactacagcctaggcaataagagcgaaactcygtctcaaaaaaacaacaaaaaccaggacctatatgttaacttatagagtgggttggagccctctgtcggttaatgtgtataaagcactttcataatgcca

SEQ ID NO: 341270 - DNA, 201 bp, Homo sapiens
gtggggtgtgtctgtctggttgtacatgtgtcaataggtgaccgtttccgttggggggttttatgcttttatggtctgcgggggtgtatctgcggctatasgtctgcgtagccgctggtttattggctacgcatttgcagcgctggggtgttgggaatagattctgaagagtggcacgccagtgtgtacttgtgtaggtgt

SEQ ID NO: 341271 - DNA, 201 bp, Homo sapiens
tggagcagctggagaccatgcagacctatcgctctgtcagcgagatggcctcgcacaaggtgtgcaggtggtgggcagaacccctgggcggggcaggcggrggcggggccagtgggtagagccaaccgctggatgggaccagtgggcgcggcctgcggatggagccagccattaggttgttcctgtgggcggagatagcta

SEQ ID NO: 341272 - DNA, 201 bp, Homo sapiens
ttgtggggtggggtgtgtctgtctggttgtacatgtgtcaataggtgaccgtttccgttggggggttttatgcttttatggtctgcgggggtgtatctgcsgctataggtctgcgtagccgctggtttattggctacgcatttgcagcgctggggtgttgggaatagattctgaagagtggcacgccagtgtgtacttgtg

SEQ ID NO: 341273 - DNA, 201 bp, Homo sapiens
tctatggtatggggtcagtccctgggtggggccaacccctgggcggcagcttcaaggcttgaagctcctgtagattatgactttccccagggctggaggarcctggtgtgtgttgtggggtggggtgtgtctgtctggttgtacatgtgtcaataggtgaccgtttccgttggggggttttatgcttttatggtctgcggg

SEQ ID NO: 341274 - DNA, 201 bp, Homo sapiens
ggagcagctggagaccatgcagacctatcgctctgtcagcgagatggcctcgcacaaggtgtgcaggtggtgggcagaacccctgggcggggcaggcgggrgcggggccagtgggtagagccaaccgctggatgggaccagtgggcgcggcctgcggatggagccagccattaggttgttcctgtgggcggagatagctac

SEQ ID NO: 341275 - DNA, 201 bp, Homo sapiens
ggggcaggcgggggcggggccagtgggtagagccaaccgctggatgggaccagtgggcgcggcctgcggatggagccagccattaggttgttcctgtgggsggagatagctactgggtgtggctgattagggcagggccaatccctgggcgggggctggtggagctgggccctatggatggagccaaccactaggttaggc

SEQ ID NO: 341276 - DNA, 201 bp, Homo sapiens
gttggtttctgacagagtctcattctgtcggccaggctggagtacagtggtgtgatctcggttcactgcaacctccgtctcccgggttcaagcaattatcyggctgcagcctcccgagtagctgggactacaggtgcctgccaccacgcccacctgatttttgtatttttagtagagattgggtttcaccgtgttggccag

SEQ ID NO: 341277 - DNA, 201 bp, Homo sapiens
gcgagactctgtctcaagaaaaaaagtgttcggtgtttccagtactcccaccagtgagggtgtgtctctgagttctgaggatccacccaatgggagcatarcatgtaaatgacccgtattaggccttttcattgactagctagctccaggtcacaatgggtgaccttggctcagctctggaagcccctgaaagctcaggaa

SEQ ID NO: 341278 - DNA, 201 bp, Homo sapiens
agcgagactctgtctcaagaaaaaaagtgttcggtgtttccagtactcccaccagtgagggtgtgtctctgagttctgaggatccacccaatgggagcatracatgtaaatgacccgtattaggccttttcattgactagctagctccaggtcacaatgggtgaccttggctcagctctggaagcccctgaaagctcagga

SEQ ID NO: 341279 - DNA, 201 bp, Homo sapiens; identical to SEQ ID NO: 71882

SEQ ID NO: 341280 - DNA, 201 bp, Homo sapiens
ggcgggcggggggcggggaggggcgggacggggcggaggagccggggctggcgccgagcgggccgcggaacgcggagcgcggagcgcggagagcgccgccsggcactgagcagagctccaggcgccgaaaggaagctgcagagcccggcccgggggcgattggcccgcagcgcccccgggtctgtccccggggcgccatgg

SEQ ID NO: 341281 - DNA, 201 bp, Homo sapiens; identical to SEQ ID NO: 71884

SEQ ID NO: 341282 - DNA, 201 bp, Homo sapiens
aggggatggaggaaccctaagatcttcaaaagtaaaaggcccttcaggaaccatcctaataggcgtgacatggtatctccttttttttttttttttttttkagacggagtcttgctttgtcacccaggctggagtgcagtggcgtgatcttggttcactgcagcctctgccacccgggttcaagcaattctcctgcctcag

SEQ ID NO: 341283 - DNA, 201 bp, Homo sapiens; identical to SEQ ID NO: 71892

SEQ ID NO: 341284 - DNA, 201 bp, Homo sapiens
aacagctcggaggagacgcttcctccggcccccggctcggaccacgcgccgcacgcggccagctctgggagctcccagttttttctgcgggatccccgagscggggaagcccccgcgggaggaagggtgggggctggggcgacccgggcccggaggctctcggccccccagtggccaaccccggcattgacgccgtcagga

SEQ ID NO: 341285 - DNA, 201 bp, Homo sapiens
agtgtctctctgttgtgttgcccaggctggagtgcagtggtgcgatcgcggctcactgcaagctcctcctcccaggttcacgccattctcctacctcagcttcccgagtagttgggactacaggcacccgccaccatgcctggctaatttttttgcattttttagtggagacggggtttcaccgtgttagccaggatggtc

SEQ ID NO: 341286 - DNA, 201 bp, Homo sapiens
tctcgatctcctgacctcatgatctgcccacctcagcctcccagattgctgggattacaggcatgagccaccgcgcctggcctcagttcctttttttctcytttttttttttttttttttttttttgagacagaatctcacactgtcgcccaggctggagtgcaatggtgcaatctcggctcactgcaagctccacctccc

SEQ ID NO: 341287 - DNA, 201 bp, Homo sapiens
ctcgatctcctgacctcatgatctgcccacctcagcctcccagattgctgggattacaggcatgagccaccgcgcctggcctcagttcctttttttctcttttttttttttttttttttttttttgagacagaatctcacactgtcgcccaggctggagtgcaatggtgcaatctcggctcactgcaagctccacctcccg

SEQ ID NO: 341288 - DNA, 201 bp, Homo sapiens
accgtgcctggcctaagctatctttatacattcatccatttgttcaacaaatgtctgttgagggcccaccaggtgctaaaggctaggttgaagaaatgatrtttacattagtttccattaatttacattgaactgaagtgctagctaaggcaataaggcaagaaaaagaaataagaaccagactgagcatagtggttcatg

SEQ ID NO: 341289 - DNA, 201 bp, Homo sapiens
catgcctgtaatccagcactttgggaggccaaggcaggaggtcacttgaattcaggagttcaggaccagcccaggggaaacaaaatgagaccctgtctctaaaaaaaaaaaaaattagcccagcatggtggcatgtgtctgtggttcccacctacacagaaggctaaggcaggaggatagttttgagcccaggaggttgag

SEQ ID NO: 341290 - DNA, 201 bp, Homo sapiens
gggagttcgagcagcctgaccagcatggagaaaccccgtctctactaaacatacaaaattagtcgggtgtgctggagggtgcctgtaatcccaactactckggaggctgaggcgggagaattgcttgaacctggaaggcggaggttgtggtgagccgagatcgtgccattgcactccagcctgggcgacaagagtgaaaac

SEQ ID NO: 341291 - DNA, 201 bp, Homo sapiens
aggcaggagaatcgcttgaacccagggggtggaggttgcagtgagccgagatcgctccattgcactccagcctaggcaacaagagtgaaactcttgtctcaaaaaaaaaaaaaaaaatattagccgggcatggtggtgtgtgcttgtaatctcagctacttgggaggctgaggcaagagaatctcttgaactcaggagaca

SEQ ID NO: 341292 - DNA, 201 bp, Homo sapiens
cccacagggtcagatgttaccatttattaaatatttactgagtgccagacactattctgttcaatatggtttgatctcatttcattctcacatggaccctrtagggaatatcattccatttcacagaaaagaaactgaggctcacagagtttaagacactgacccatggccgcacagcaataatcttcagcgcctgggtgc

SEQ ID NO: 341293 - DNA, 201 bp, Homo sapiens
cacttgaacccgggaggcagaggttgcagtgagctgagatcacgccactgctgcactccagcctgggcaacagagtgagactctgtctcaaaaaataaacaaaaaaaaaaagcctccaagctgaaaagcctcctgaactgagtagaaccccaaattcaatagaatttccaaacttggattgactcccttccaaactcagta

SEQ ID NO: 341294 - DNA, 201 bp, Homo sapiens; identical to SEQ ID NO: 71897

SEQ ID NO: 341295 - DNA, 201 bp, Homo sapiens
ctgtgggcggagatagctactgggtgtggctgattagggcagggccaatccctgggcgggggctggtggagctgggccctatggatggagccaaccactakgttaggcctgtagccgaggccaactattgggcgtggctcatgagggtggggccaatctctgggtagggtctatggtatggggtcagtccctgggtggggc

SEQ ID NO: 341296 - DNA, 201 bp, Homo sapiens
caggagaggcaataggcaagtggcgggggcgggttctaggcccgaccggcagggggagccctggggcactgatggcagatgcgtttggcttggtcttgtakgaggccctggccctgccgacatggccaccgcagtcccaacggcgcgctaggttggcgagatgaagaggagtcgcagtgccctgtccgtggcagggaccgg

SEQ ID NO: 341297 - DNA, 201 bp, Homo sapiens
gagccaaccgctggatgggaccagtgggcgcggcctgcggatggagccagccattaggttgttcctgtgggcggagatagctactgggtgtggctgattasggcagggccaatccctgggcgggggctggtggagctgggccctatggatggagccaaccactaggttaggcctgtagccgaggccaactattgggcgtgg

SEQ ID NO: 341298 - DNA, 201 bp, Homo sapiens
cgggggcggggccagtgggtagagccaaccgctggatgggaccagtgggcgcggcctgcggatggagccagccattaggttgttcctgtgggcggagatarctactgggtgtggctgattagggcagggccaatccctgggcgggggctggtggagctgggccctatggatggagccaaccactaggttaggcctgtagcc

SEQ ID NO: 341299 - DNA, 201 bp, Homo sapiens; identical to SEQ ID NO: 71879

SEQ ID NO: 341300 - DNA, 201 bp, Homo sapiens
caggcgggggcggggccagtgggtagagccaaccgctggatgggaccagtgggcgcggcctgcggatggagccagccattaggttgttcctgtgggcggaratagctactgggtgtggctgattagggcagggccaatccctgggcgggggctggtggagctgggccctatggatggagccaaccactaggttaggcctgt

SEQ ID NO: 341301 - DNA, 201 bp, Homo sapiens
tacaggcgtgagccaccgcacccggcctcctcattcctcttgacctccctaatagcgtttcagcctcctgacccctcttctcgcccatcccctgcagcttygaggcagagaatgggccgacaccatctcctggccgcagccccctggactcgcaggcgagcccaggactcgtgctgcacgccggggcggccaccagccagc

SEQ ID NO: 341302 - DNA, 201 bp, Homo sapiens
tgtatttctagtagagacagggtttcggtatgttggccaggctggtctcaaactcctgacctcaagtgattcacccaccttgcctcccaaagcgctgggawtacaggcatgagccacctcaccagacctgtatctctttcttttgatttgcgtttccctgatgagtgatgttaaggattttttttcatatgtttattggct

SEQ ID NO: 341303 - DNA, 201 bp, Homo sapiens
tgtcctgtcctgtcctgtcctttcctttccttcttctttctctttcttcttttctgtttttggttttttttttttgagatcgggtctctctgtcacccagrctagagggcacggatcttggttccctgcaaactccgcctcctgggctgcagcaattctcctgcctcagcctctagcgtagctgggattacaggtgcctac

SEQ ID NO: 341304 - DNA, 201 bp, Homo sapiens
ttcaagcaatactcctgcctcaccctcctgactagccgggactaaaggcctgtgccagcacacctggctaatttttgtatttttagtagaaatggggtttyaccatgttgaccaggctggtctcgaactcctggcctcaagtgatccacccgccttagcctcacaaagtgctgggattgcaggcgtgagccactgcacctg

SEQ ID NO: 341305 - DNA, 201 bp, Homo sapiens
tgcagtggtgcaatctcagctcactgcaacctcggcctcctgggttcaagtgattcctctgcctcagcctcccaagtagctgggactacaggcgcatgccrccatgaccacctaatttttgtatttttggtagagatggggtttcactgtcttagccaggatggtctccatctcctgaccacatgatccacccgcctcagc

SEQ ID NO: 341306 - DNA, 201 bp, Homo sapiens
taagagccactgcacccggccttttttttcttttttttttttaagacagagtctcactctgtcacccaggctggagtgcaatggcttgatctcagctcactgcaacctctgcctcctgggtgcaagctattctcctgtctcagcctcttgagtagctgggactacaggtgcccaccaccaagcctggataatttttggatt

SEQ ID NO: 341307 - DNA, 201 bp, Homo sapiens
ccctgaagtctgattgatccttgaagtttttaatctttttttttttttttttttttgagactaagtttcactcttgttgcccaggctggagtgcagtggcrcaatctcggctcactgcaacctctgcctcctgggttcaagcgattctcctgccttagcctcccaagtagctgggattacaggcatgtgccaccacaccta

SEQ ID NO: 341308 - DNA, 201 bp, Homo sapiens
gcatagtcccagctactcaagagattgaggtgggaggatcacttgagcctgggagggtgaggctgctatgagccatgatcacaccactatactccagccarggctacagagcaaaccagaccctgtctcaaaaaagaaaaccaagtttttgtgtggacgtatgttttcatttctcttggacatatacctaagagtagaagg

SEQ ID NO: 341309 - DNA, 201 bp, Homo sapiens
cagccaacatggtaaaacgccatctctactgaaaatacaaaaattagctgggcatgatggcgggtgcctataatcccagctacttgggatgctgaggcagragaatcgcttgaacgtaggaggtggaggttgcagtgagctgagattgggccactgcactccagcctgggtgacagagtgagactctgtctcaagtatgtg

SEQ ID NO: 341310 - DNA, 201 bp, Homo sapiens
acagagcaagaccctgtctcaaaaaaataaaataaaataaaaaaagtgtaacatggtttgtgaattacatctcgatatagcagttatttaaaaaggggagagtgctgcgcatggtggccatacctgtaattccattactttgggagggtgagatgggtggattgctttagcccaggagttcgagaccagcctggcaacata

SEQ ID NO: 341311 - DNA, 201 bp, Homo sapiens
ccaccacgcctagctaattttttgtatttttagtagagacgaggttcctccatgttggtcaggctggtctcgaactcgcgacctcaggtgatcccccccccatctcagcctcccaaagtgccgggattacaagtgtgagccaccgtgcccagccagatgttgaaagtttgcagctggcacatggcatgaccagagttgcat

SEQ ID NO: 341312 - DNA, 201 bp, Homo sapiens
tgttcagaatatagaagtcagggttgaaagaggctgaatatgtttgtggctcaattctttattggcttatagggatgtcgtagttattgaaactctaattyagttcaaaacctagtgggtacctaccatgtgcatggcactgtactgggtgcttggggatgcgaagatgaaatcggattggtttcttttttaaacaggtgc

SEQ ID NO: 341313 - DNA, 201 bp, Homo sapiens
ccctctggagccaatgctatgcaaaatgctcatcatgtctgtgcatctgggctgcagtgaggaaatgctgaccattgtatccatgctgtctgtgcagaacrtcttctataggcccaaggtaggaagttcagatccaagtttagatgggggtgccatgaagttggggtagttggcctgttgccattccaatgcttgatgtgg

SEQ ID NO: 341314 - DNA, 201 bp, Homo sapiens
ttttttttcttggaagacgttttatcatgttgcctaggctggtctcaactcccggactcaagcgattctccctccttggcctcccaaactgctgagattayaggtgtgagccaccatgcccaactgagagaatattttcaaaaagtttcctgagaaattatgtgctttcctttgggaggccgaggcaggcggatcacttga

SEQ ID NO: 341315 - DNA, 201 bp, Homo sapiens
tctctgcccctcttctatttccctcacatagtgattagtgatttatagatgtacctgaggtacatacagattcttgagtagttttttttcctaactttgcyggcctctacctctgcagaccatgttggatgaagatgatgtgaaagttgctgtggatgtcctgaaagaactggaagctttaatgcccagcgcagcaggcca

SEQ ID NO: 341316 - DNA, 201 bp, Homo sapiens
ctgggacctcagtttgggattgagggaagcggaaggaggaaggaggaaggagaaaggtggttgatggaccgaaagtatgttcgtgtgaatctgtctctctctgtcgcagacaccggtgcccagggtacacgctgccgtggcctcggcttgagagccctcgagaaactttagaaactttcccagagctgtcagtgaagcccg

SEQ ID NO: 341317 - DNA, 201 bp, Homo sapiens
gaagaaggtaactagtcagttggatcgagaagggtaattggcaagttgagccattgaattgggtgatttgcctgtagtttaacccagtggctattaatcayttgttctttggatctcactactcatctctcaaaaaaaaaaggatctcaccatgatggaagcaagaagttcatttttctgacaagtgcttatgtattatta

SEQ ID NO: 341318 - DNA, 201 bp, Homo sapiens
tataatagtctgagttttatgtggcccagccctggaagttaccgccagtctcaccggtggcttcctaattgcaattgaagaaatgggaaataaagtaacamgtagcttccccacatgctgacactggctagactgaccctcttatcacatgccttcttcctttctgttctaggccatgggtatcaatgatctgctgtcctt

SEQ ID NO: 341319 - DNA, 201 bp, Homo sapiens
ttgcaacaggataaactgccctgtgaagtagacttgccctccaaccccaatctgcctgccctcagatgacggtaaacagaccagcttttttttttttttttctgtcttccaatcacctgccctcatgtttaggcagcagagatctaagttataaacacagctctgccaggagaccccttggctgagaatggcattcagagt

SEQ ID NO: 341320 - DNA, 201 bp, Homo sapiens
taataccttggccttttagaagaaacaaaaaagttattgacattaacccccagtgtttaattgttttgatgttaacttcatttgtgtacaaaaatagagcraagtataaacttcataatcttttagtttatttatagctaaagatctcaattaatttgcagaaaacccacaaatatgctttttctgttacatacagaatta

SEQ ID NO: 341321 - DNA, 201 bp, Homo sapiens
ggccgccgggtaagggacagactcaacttcctgtgcttttgggaagattccctggtcagcctttcacatccttcggtctgtacaaaatcaggctgaggccrtggataagctttgagtaaaattctaaatgtttgtttttaacctgaatttctccactgtcactttaaactgtttcttctttatacaaaaaggtgttctgtt

SEQ ID NO: 341322 - DNA, 201 bp, Homo sapiens
ccaaaaatgttttaatagccatggtcaaatcattagactgagtttttcttctgaatcactttaaaaatgttattctagcgcggtgtctcatgctgtaatcycagcactttgggaggctgaggcgggcggatcacaaggtcaggagatcgagaccatcctggccaacatggtgaaaccccgtctttactaaaaatacaaaaa

SEQ ID NO: 341323 - DNA, 201 bp, Homo sapiens
ttgtgtttggcaactggggatacgatttgaattaaacagatatgatccctgcttttatgcgctacaacttagtcggggatatggatattaattaaataatyaccaaataattaaattatgatcagtgccatgtgaagaagtacaggcagtgtaattgactgtggtgggtcacttccctggggaaatcgagacccaaaggat

SEQ ID NO: 341324 - DNA, 201 bp, Homo sapiens
gtgattctcctgcctcagcctcccgagtagctgtgattacaggcatgtgccaccacacccggctaattttgtatttttagtagagacagggtttctccatkctggtcaggctggtctcgaactcctgacctcagatgatctgcccccctcggcctcccaaagcgccgggattccaggtgtgagccaccgtgcccagccaga

SEQ ID NO: 341325 - DNA, 201 bp, Homo sapiens
cacttctctcaactaaccttttttctgacatcacaggtgtgtagcaccacttgttacagtctctttcccattccctgctgccccttctatattcttttctycacattaatttgtttctttgagtacttttgatcacgggtcgctgaattgagatgctgcatgtgcagtgcccgcatgccattttatttttttcctggtaca

SEQ ID NO: 341326 - DNA, 201 bp, Homo sapiens
aaataaggatctaaggtagtcctggagaactcttgaaaggcaaggggacaagcattctaaggacacagaactatctgtgatggcctggagacgagcaagtrgggccagttcagggaatggcatagttccagtggctggaaccaagtatatgactgtgtgtatgagacaacaggaaaggagacagatggatgtaggtatttt

SEQ ID NO: 341327 - DNA, 201 bp, Homo sapiens
tccgcagctgggtcaggctcctcggtccaggtttacttcatcccgcctggacgtgatttggctttgactgtctctcctgcagcccaaagcacttcctcccygtggttgctgtagctgtctcattggagcagtgcctctccaagtttgaggatttgaacaaagaactgggactggtgacttgttaatgaacagttcagaggg

SEQ ID NO: 341328 - DNA, 201 bp, Homo sapiens
ataatcatcacttgcattctttcatggcagggatgattaatatctaactgcctttcatagaattctattaaggacagaggggatttgtcaaatgtagcagkaattctcaagagccttttttccatttcttctgcatctatcctgaatcaagtttgaaatctctgcccctcttctatttccctcacatagtgattagtgatt

SEQ ID NO: 341329 - DNA, 201 bp, Homo sapiens
ttgcaattgaagaaatgggaaataaagtaacaagtagcttccccacatgctgacactggctagactgaccctcttatcacatgccttcttcctttctgttmtaggccatgggtatcaatgatctgctgtcctttgatttcatggatgccccacctatggaaactttgatcacagccatggagcagctgtacacactggggg

SEQ ID NO: 341330 - DNA, 201 bp, Homo sapiens
gaatggtaggtggacatgtcccagggtctaggggcttttctgggcagagaaaaacctgtaaatttcctggtattttgtgattgtgtcttcactactcccartatgtcctagtataacactgcttgcctttctagagcagcagaaacctgaattaggcacaatgtatcaaaccctatgagagaattaaaatcataggggtga

SEQ ID NO: 341331 - DNA, 201 bp, Homo sapiens
gcctcccaaagtgttgggattacaggcgtgagccattgcgtcctgtactatgtcttaaacaccagtcactagatgttttggggcaaactacatctggggarccgaaactgaggaattagaaaaggctagggtcctaaagctaaagccatagacagatggagcctttatgaaggtacagaggatggatgggatcaagggcaa

SEQ ID NO: 341332 - DNA, 201 bp, Homo sapiens
gggttcacgccattctcctgcctcagcctcctgagtagctgggactacaggcacctgccaccacgcctggctaattttttgtatttttagtagagacgggrtttcaccgtgttagccagtatggtctcgatctcctgacctcgtgatccgcccgcctcagcctcccaaagtgctgggattataggtgtgagccaccgcgcc

SEQ ID NO: 341333 - DNA, 201 bp, Homo sapiens
atatataaacaaacttgtattgtttacttactggtcagaatatgaatgcatatgttctgttatttgaagttttattaatatcaccatagcccttgtatagracacacatacacacacagaaagtagatgaatgttctattctgctcgtaggtgatatcctggtcttcctgactggtcaggaagaaattgatactgcttgtg

SEQ ID NO: 341334 - DNA, 201 bp, Homo sapiens
acttcatttgtgtacaaaaatagagcgaagtataaacttcataatcttttagtttatttatagctaaagatctcaattaatttgcagaaaacccacaaatrtgctttttctgttacatacagaattataaaaccagtaacattaaaagtactaacattggctgggtttggtggctcacgcctgtaatcccagcactttgga

SEQ ID NO: 341335 - DNA, 201 bp, Homo sapiens
caccatgcccggctaattttttgtatttttagtagagatggggtttcaccgtgttagccaggatggtctcgatctcctgacctcgtgatccacccgcctcrgccttccaaagtgctgggattacataatttatgttttaatgtcactattgattttaaattttgatagggtttaatataggattttgatataggaaggaga

SEQ ID NO: 341336 - DNA, 201 bp, Homo sapiens
gcccagccaatttttgtattttttttgtagaaacacagtttcgccatgttgcccagattggaatttactgttttttgtttgtttgtttgtttgtttgtttkttttgagatggagtttcgctcttgttgccgaggctggagtgcaatggtgcgatcttggctcaccgcaacctccgcctcccagattcaagtgattctcctg

SEQ ID NO: 341337 - DNA, 201 bp, Homo sapiens
aaaaaaaaaaaaagaaagaaaaaaacaactacctagtgatgtagtttaaaaaaaaaaacttgttttaaagtagcatttttaaaaaattggactctatctaraaccctaatataaaactgatttaaaaccaccatgttatcacagtagaagggttagaaatgtggctccttgcatgtttggccttctccatcccttgtggca

SEQ ID NO: 341338 - DNA, 201 bp, Homo sapiens
aggatcgtgccactgccctccagccttagtgacagagcaagactccgtctcaaaaaaaaaaaaaaaaaagattactgatggctggcagtgagaatgtgctkcagactgctttgggaggggctcttttgagcatgacatgcctagcaccatgggacttagttctccctccacatttcttgaaagaatgtagcctctgaagtt

SEQ ID NO: 341339 - DNA, 201 bp, Homo sapiens
gttccagatgtgtctggctctccctcaggaagcggtgggaaggcctggtgcacatctctgagctccggcgggagggtcgtgtggccaatgtagctgatgtcgtgagcaaaggccagagggtcaaagtcaaagtgctgtccttcactgggaccaagaccagcctgagcatgaaggtaggtgagatggtcagcctgttcttac

SEQ ID NO: 341340 - DNA, 201 bp, Homo sapiens
taaaaaaaaaaacttgttttaaagtagcatttttaaaaaattggactctatctagaaccctaatataaaactgatttaaaaccaccatgttatcacagtaraagggttagaaatgtggctccttgcatgtttggccttctccatcccttgtggcagtgtgaggcccctcttcagagccctagaattctgtggaaacattct

SEQ ID NO: 341341 - DNA, 201 bp, Homo sapiens
acagatgcataccaccacccccggctgatttttgtattttttgtagagatggtgttttgccatgttgcccaggctggtctttaactcctgggctcgagcartctgcccaccacaacctcccaaagtgctggcattacaggcgtgagccactgtctgaaagtagcttaataaatagctctaatattagaagtttcaagaact

SEQ ID NO: 341342 - DNA, 201 bp, Homo sapiens
caagggaaatgagattgggaatttggggaagtagtgattaggaatatgaaataaggttctggaacagatgcctaaggtgtgaaattagattttttttttttgctctgttacttgttaaaggtctaatttttaaagcattttgatttttaaatttcattttaataaatatttattgagtacttactgtatgccaaacactgt

SEQ ID NO: 341343 - DNA, 201 bp, Homo sapiens; identical to SEQ ID NO: 71914

SEQ ID NO: 341344 - DNA, 201 bp, Homo sapiens
tttttgtttttttttgagacggagtctcactctgttgcccaggctggagtgcagtggcgcaatgccggcttactgcaacctctgcctcccgggttcaagtkattctcctgcctcagtctcccaagtagctgggattacaggtgcctgccaccacacccagctaatttttgtatttttaatagagacggggtttcactgtgt

SEQ ID NO: 341345 - DNA, 201 bp, Homo sapiens
tcccgggttcacgccattctcttgcctcagtctcccaagtagctgggactacaggtgcctgccaccatgcccggctaattttttgtatttttagtagagayggggtttcaccgtgttagccaggatggtctcgatctcctgacctcgtgatccacccgcctcggccttccaaagtgctgggattacataatttatgtttta

SEQ ID NO: 341346 - DNA, 201 bp, Homo sapiens
ggcttctctcgtcaaaaatggtgcagaatttacggtatgtatatgtggagaagataatctgtagatattaatgttttaatttatgtttgtttgtttgtttktttttttgagacagagttttgctctgtcgcctgggctggagtgcagtggcgccacctcagctcactgcaagctccgcctcccgggttcacgccattctct

SEQ ID NO: 341347 - DNA, 201 bp, Homo sapiens
acttgaacctgggatggggaggttgcagtgagaggatcgtgccactgccctccagccttagtgacagagcaagactccgtctcaaaaaaaaaaaaaaaaaagattactgatggctggcagtgagaatgtgcttcagactgctttgggaggggctcttttgagcatgacatgcctagcaccatgggacttagttctccctcc

SEQ ID NO: 341348 - DNA, 201 bp, Homo sapiens
aggtctaatttttaaagcattttgatttttaaatttcattttaataaatatttattgagtacttactgtatgccaaacactgttctaagtacctggataayagcagtgaacagaacagacaagagtttcagcctttggagattatatcctaattttggggtagggagcaggaaataaacatgtaaacattctggtggggag

SEQ ID NO: 341349 - DNA, 201 bp, Homo sapiens
cctgaggtcaggagtttgagaccagcctggccaacatggcgaaacgccatttctactaaaaaaaaaaaatacaaaaattagctggccatggtgactggtgctatgcaggaggctgaggcaggagaatcgcttgaactcaggagacggaggtttcagtgagctgaaatcacatcactgcactccagcctggacgaaaagagc

SEQ ID NO: 341350 - DNA, 201 bp, Homo sapiens
cagaccctgtctcaaaaaagaaaaccaagtttttgtgtggacgtatgttttcatttctcttggacatatacctaagagtagaaggcagatggacttggccrggtgtggtggctcacacctgtaatcccagcactttgggaggctgaagcggatggatcatgaggtcaggagttcgagaccagcctggccaacataatgaaa

SEQ ID NO: 341351 - DNA, 201 bp, Homo sapiens
cagcactttggaaggccaagacaggccgatcccctgaggtcaggagtttgagaccagcctggccaacatggcgaaacgccatttctactaaaaaaaaaaaatacaaaaattagctggccatggtgactggtgctatgcaggaggctgaggcaggagaatcgcttgaactcaggagacggaggtttcagtgagctgaaatca

SEQ ID NO: 341352 - DNA, 201 bp, Homo sapiens
gccagctctgggaggtaggcggggctctcatccaagtgggacaaagggactgtgtcctcctcactgacaggccggtcaaactcagccttgagagctggacrctgattgtccgggaaggccaaagagaagagggcctcgggctcacacacaaacttgtacacgtaacgctcaccagccacctatggggagagagaaggtctg

SEQ ID NO: 341353 - DNA, 201 bp, Homo sapiens
caccagactgaaggggaccacctcaccctgctagctgtgtacaactcctggaagaacaacaagttctccaacccatggtgctatgagaactttatccaggstcgttccctgcgccgggcccaggacattcgcaagcagatgttaggcataatggacaggtaagctggaatctgatgactctgcatgtttgagttgaaccac

SEQ ID NO: 341354 - DNA, 201 bp, Homo sapiens
tgggacctcagtttgggattgagggaagcggaaggaggaaggaggaaggagaaaggtggttgatggaccgaaagtatgttcgtgtgaatctgtctctctctgtcgcagacaccggtgcccagggtacacgctgccgtggcctcggcttgagagccctcgagaaactttagaaactttcccagagctgtcagtgaagcccgg

SEQ ID NO: 341355 - DNA, 201 bp, Homo sapiens
ccagggctttgtaggtggcattaggaagctgggctcaattctaatagcactgggagatgttgaaaagttcttttgttgttgttgtttttgtttctgagacrgagttttgctcttgttgcctaggctggagtgcaacaccatgatcttgactcactgcaacctccacctccctggttcaagtgattctcctgcctcagactc

SEQ ID NO: 341356 - DNA, 201 bp, Homo sapiens
ctaatttttgtatttttaatagagacggggtttcactgtgttagccaggctcatcttgaactcctaacctcaagtgatccgcctgccttggcctcccagastgttgggattacaggcatgagccaccacacctggccagattttctctctttacccttaccagatggtggtctttgttttttattactgttggataaccta

SEQ ID NO: 341357 - DNA, 201 bp, Homo sapiens
tacacttagggctggaaggaaggtcctggtgactactctgggcaccccaagatggatgtgttgggcactgtcattgtgaaaatagacctgtgaaagctgartgggctcatatcttttgtcctatcttgatagacacaagctggatgttgtttcctgtggcaagtccacagtccgagtgcagaaggccatctgcagtgggtt

SEQ ID NO: 341358 - DNA, 201 bp, Homo sapiens
ctccaacccatggtgctatgagaactttatccaggctcgttccctgcgccgggcccaggacattcgcaagcagatgttaggcataatggacaggtaagctrgaatctgatgactctgcatgtttgagttgaaccaccttgagtatcatgtcttttcatctctgtgtgtacctataaagctataggcaccttttctcttgct

SEQ ID NO: 341359 - DNA, 201 bp, Homo sapiens
tttttaaaatttttaacacctgttttctattaatataatcatcacttgcattctttcatggcagggatgattaatatctaactgcctttcatagaattctrttaaggacagaggggatttgtcaaatgtagcagtaattctcaagagccttttttccatttcttctgcatctatcctgaatcaagtttgaaatctctgccc

SEQ ID NO: 341360 - DNA, 201 bp, Homo sapiens
tctccaacccatggtgctatgagaactttatccaggctcgttccctgcgccgggcccaggacattcgcaagcagatgttaggcataatggacaggtaagcyggaatctgatgactctgcatgtttgagttgaaccaccttgagtatcatgtcttttcatctctgtgtgtacctataaagctataggcaccttttctcttgc

SEQ ID NO: 341361 - DNA, 201 bp, Homo sapiens
catgagggaaggattttttgttatttgtttttaatctttttttatccctgaagtctgattgatccttgaagtttttaatctttttttttttttttttttttgagactaagtttcactcttgttgcccaggctggagtgcagtggcgcaatctcggctcactgcaacctctgcctcctgggttcaagcgattctcctgcctt

SEQ ID NO: 341362 - DNA, 201 bp, Homo sapiens
agcccaccattggtgacatttataatggcaaagttaccagcatcatgcagtttggttgctttgtgcagctggaaggactaaggtaatgactggtgctcttytgttcacaccagtgatgggcagaatttcttttatcactgaggatgttcacattctaaaaagttactttgattaatgacactttagtcaaatcagccatac

SEQ ID NO: 341363 - DNA, 201 bp, Homo sapiens
aacataccatggacaaaactgtcgggttgaaagagagctcctaatttgctagatcgaatgctgtccatcgtcccaggttctaggtccaccaagactgctckgggcacatatttcctacctgtgtagaaaaataggaaaaagtcagcctacttgtttttctaaaagttaatgttttatcaaaatagaactttgtgatactgg

SEQ ID NO: 341364 - DNA, 201 bp, Homo sapiens
gagccccgccagtcctaccgtaggcttcgttgtagtacacgctgattctctccagctgcaaggccgaggccccgcggtcgctcccagccaagtcgatcccrtgttcctcaccaatcatctcccagaactgaaagcaggaggaaggtcagagtaaacggaccccgaaaaaggctgtgttaaccacagagaaagttagcattc

SEQ ID NO: 341365 - DNA, 201 bp, Homo sapiens
ctgtctggctggaatattgataattaaccatataccttctctcattttctcccagctacatccgatactcccagatctgtgcaaaagcagtgagagatgcmctgaagacagaattcaaagcaaatgctgagaagacttctggcagcaacgtaaaaattgtgaaagtaaagaaggaataatctgtaagttatggatttattt

SEQ ID NO: 341366 - DNA, 201 bp, Homo sapiens
tataccttctctcattttctcccagctacatccgatactcccagatctgtgcaaaagcagtgagagatgcactgaagacagaattcaaagcaaatgctgaraagacttctggcagcaacgtaaaaattgtgaaagtaaagaaggaataatctgtaagttatggatttatttagaagaacagttgcatcttaagtttttgga

SEQ ID NO: 341367 - DNA, 201 bp, Homo sapiens
ccaagatggcgtcgctgtgggcaaagcgctcaggcgggcgcggcctcgacctcgcgtgggagcgcgtctgtgtcctgcctcgcttcccgacggtgcggccyagcacccacagagtgcccctggacacctttgtgaatggcaggtttctcgagagagaggccagctcttatttagcaaacctttttcttctagaatggtgct

SEQ ID NO: 341368 - DNA, 201 bp, Homo sapiens
gcccttcctctgcttgtgttcccagttgcgggaccactgctcccagagccccgccagtcctaccgtaggcttcgttgtagtacacgctgattctctccagstgcaaggccgaggccccgcggtcgctcccagccaagtcgatcccgtgttcctcaccaatcatctcccagaactgaaagcaggaggaaggtcagagtaaac

SEQ ID NO: 341369 - DNA, 201 bp, Homo sapiens
ctccttggccttccaaagtactggaattacaggcatgagccacagcacccggcctttctttcttttttttatttttttatgtttgtttgtttgtttgtttrtttatttattttgagacagagtttcactcttgtcacctaggctggagtgccgtagcacaatcttggctcactgcaacttccacctcctgggttcaagcaa

SEQ ID NO: 341370 - DNA, 201 bp, Homo sapiens
cccttcctctgcttgtgttcccagttgcgggaccactgctcccagagccccgccagtcctaccgtaggcttcgttgtagtacacgctgattctctccagckgcaaggccgaggccccgcggtcgctcccagccaagtcgatcccgtgttcctcaccaatcatctcccagaactgaaagcaggaggaaggtcagagtaaacg

SEQ ID NO: 341371 - DNA, 201 bp, Homo sapiens; identical to SEQ ID NO: 71926

SEQ ID NO: 341372 - DNA, 201 bp, Homo sapiens; identical to SEQ ID NO: 71922

SEQ ID NO: 341373 - DNA, 201 bp, Homo sapiens; identical to SEQ ID NO: 71924

SEQ ID NO: 341374 - DNA, 201 bp, Homo sapiens; identical to SEQ ID NO: 71928

SEQ ID NO: 341375 - DNA, 201 bp, Homo sapiens
cagctgctgttcctggtctgcacggagagcagttgctggtccacttccttggtggacatcttgccccggaaaatgcaggccactgtgaggtagcggccacrgcggaggtcacaggcagccatggtattgcgggcatcgaacatctgctgggtgagctcggccacggagagggctcggtactgctggctgccctgggccgtg

SEQ ID NO: 341376 - DNA, 201 bp, Homo sapiens; identical to SEQ ID NO: 71931

SEQ ID NO: 341377 - DNA, 201 bp, Homo sapiens
gcagctgctgttcctggtctgcacggagagcagttgctggtccacttccttggtggacatcttgccccggaaaatgcaggccactgtgaggtagcggccayggcggaggtcacaggcagccatggtattgcgggcatcgaacatctgctgggtgagctcggccacggagagggctcggtactgctggctgccctgggccgt

SEQ ID NO: 341378 - DNA, 201 bp, Homo sapiens
agcagatgtcatagagggcctcattgtcaatgcagaaacaggcatctgcattctcaatcagctggtggatagacagaaccgcgttgtagggctccaccacmgtgtccgacaccttgggagaaggcatgacgctgaaggaattcatgatccggtccgggtactcctctctaatcttgttcatgagcagagtgcccatcccgg

SEQ ID NO: 341379 - DNA, 201 bp, Homo sapiens
aatgagaaactgttctgtaagcgactccgcggcacagcttctctcacagttaatgtcccttatcttctggctccatttctgcctcctccgtgacctcttcrtcttcctctagaactgctttggcatcttgaaattgttggtactcggataccaaatcatggatgttattttcagcttccccaaattcgtttatgtccatcc

SEQ ID NO: 341380 - DNA, 201 bp, Homo sapiens
tttcccggccgcctggcagttccctgtgcctccagtgggttttcctcacatttttcttcccatccattccgggcaacagtgacaactgttgccttaccctycgtcttgtcgcacatcggaagcaggtcctagaactacagaaaacgctagggggtcctccactgggtttccagggtttagtgtcactccgagaaagggggt

SEQ ID NO: 341381 - DNA, 201 bp, Homo sapiens
ctcggggcggccgtgcccgcgccgcctcgcgtcctcgcttcccgaaagcacgcggctcagtggtccttagcgagcggggacaccccggccttcttgccccsgtcgtccccgccggggtaatacggaaggtcgggggacacacgccccgggagctcttggagccaataggtgggcgcggccggccggcccgccccgggattg

SEQ ID NO: 341382 - DNA, 201 bp, Homo sapiens
gagctgacccgggaaccggagggaggtggttatgccgctcatggtcaaggacactaggtggttgagatccccataggtgggtgtcgtcagcttcagggtayggaagcagatgtcatagagggcctcattgtcaatgcagaaacaggcatctgcattctcaatcagctggtggatagacagaaccgcgttgtagggctccac

SEQ ID NO: 341383 - DNA, 201 bp, Homo sapiens
gtcctgcctcgcttcccgacggtgcggcccagcacccacagagtgcccctggacacctttgtgaatggcaggtttctcgagagagaggccagctcttattyagcaaacctttttcttctagaatggtgctggagccaggtggtgaaagtagtacagtcacatccacctcgggaaacaggagatttctctccacgtgaccgc

SEQ ID NO: 341384 - DNA, 201 bp, Homo sapiens
taatcttgttcatgagcagagtgcccatcccggagcctgtgcccccgcccagggagtggacgatctggaagccctgcaggcagtcacagctctcactctcrtgcctcaccacctctaggacattctcgatcagctcggctccctccgtgtagtggcctttggcccagttgttgccagccccagagttacctgtggccaaaa

SEQ ID NO: 341385 - DNA, 201 bp, Homo sapiens
acggcggaggtcacaggcagccatggtattgcgggcatcgaacatctgctgggtgagctcggccacggagagggctcggtactgctggctgccctgggccrtgagtggggcaaagccgggcataaagaagtgcaggcgggggaaggggaccatgttcaccgccagcttgcgcaggtctgcgttgagctgacccgggaaccg

SEQ ID NO: 341386 - DNA, 201 bp, Homo sapiens
acgctgaaggaattcatgatccggtccgggtactcctctctaatcttgttcatgagcagagtgcccatcccggagcctgtgcccccgcccagggagtggaygatctggaagccctgcaggcagtcacagctctcactctcgtgcctcaccacctctaggacattctcgatcagctcggctccctccgtgtagtggcctttg

SEQ ID NO: 341387 - DNA, 201 bp, Homo sapiens; identical to SEQ ID NO: 71930

SEQ ID NO: 341388 - DNA, 201 bp, Homo sapiens
agagcagaaacccctgccccataagttccccatcaggtgacatggcctgacacttgccctacctgatatttccaaatgatatctgaaaaatgctgggttgrccctgagctttgctgtatcagaggttctctggcaaggggaaaaaagctgatgcagcttcttggccaggagagccacagagcaaatgactaggagaccttg

SEQ ID NO: 341389 - DNA, 201 bp, Homo sapiens
ggagacggccatcctcattgagacccttttctccctgggtgttcaggagcagtggtctagctgcagcatcttctccacccaggaacatgcagtggctgtctttgccgaggctggcatgccagtgttcacctggaagggcaaaatgaaagaggggtacccgtggtgcattgaacagacactgtacttcaaggacgggcccct

SEQ ID NO: 341390 - DNA, 201 bp, Homo sapiens
gagacggccatcctcattgagacccttttctccctgggtgttcaggagcagtggtctagctgcagcatcttctccacccaggaacatgcagtggctgtctttgccgaggctggcatgccagtgttcacctggaagggcaaaatgaaagaggggtacccgtggtgcattgaacagacactgtacttcaaggacgggcccctc

SEQ ID NO: 341391 - DNA, 201 bp, Homo sapiens
ctgctccaccgggctgcgagcacgagcggggggtggaatcagcactcgggagcatccccgccctcctgaacaatggggcgccagcgccgcaccccagctcsggcggggaccgcgcgggaaccccgcgatgggagagggcagcggcagcgacgatgtagagcttggcatgccctctgctgctccagagagcctggtcgcagc

SEQ ID NO: 341392 - DNA, 201 bp, Homo sapiens; identical to SEQ ID NO: 71946

SEQ ID NO: 341393 - DNA, 201 bp, Homo sapiens; identical to SEQ ID NO: 71947

SEQ ID NO: 341394 - DNA, 201 bp, Homo sapiens; identical to SEQ ID NO: 71948

SEQ ID NO: 341395 - DNA, 201 bp, Homo sapiens; identical to SEQ ID NO: 71934

SEQ ID NO: 341396 - DNA, 201 bp, Homo sapiens; identical to SEQ ID NO: 71945

SEQ ID NO: 341397 - DNA, 201 bp, Homo sapiens
cgccagggcaagcccaggattagaaagcagccccaggccacagcccttcagtgcccccagagcctccggctggttgcaggggttggggtggggctaatagycgagcttgaccctggatgacactaaaccctgaatcaagctggaattcgggcacgcagcctcgcatcatccgcccaggatccagagctaggtcaggcgctg

SEQ ID NO: 341398 - DNA, 201 bp, Homo sapiens
cagcactcgggagcatccccgccctcctgaacaatggggcgccagcgccgcaccccagctcgggcggggaccgcgcgggaaccccgcgatgggagagggcrgcggcagcgacgatgtagagcttggcatgccctctgctgctccagagagcctggtcgcagccttgcgaggtctctgccgccattcccatttcagagatgg

SEQ ID NO: 341399 - DNA, 201 bp, Homo sapiens
ctttgggaggcccaggcgggtggattgcttgagctcaggagttcgagaccagcctggcaaaatggtgaaaccccatctctaccaaaaatacagaaaaattygcctggcatcgtcgttgcacctgtagtttgagctactctagaggctgaggtggaagaatcacttaaacccgggaggtggaggttgcagtgagtggagatg

SEQ ID NO: 341400 - DNA, 201 bp, Homo sapiens
gtgggccttgttggagccaatgtgcagcctgacttttctcctaggcaaatgaggtgctctaaagggccccaactgatttctcactttattagtcagcacckagcacagtgtcaaatacacagaaatggctcaagaattgtctgtgagccaggcacggtggcttatgcctgtaatcatagcactttgggaggccgaggtggg

SEQ ID NO: 341401 - DNA, 201 bp, Homo sapiens
tgcattgattacagccctgatctaccaatctacctctccgttgcctcttcctaaaaggattaaggatggctttcagaaatatatacaacaggataaattgwattgcccacatggctttattacttctcataggcatgcatcagccttaatactagaacttgttatttatgtgtctgtctcttacgtcagatgttctccctg

SEQ ID NO: 341402 - DNA, 201 bp, Homo sapiens
cccctgggttttgagagcttgctatgttgaacactgggttaggctggaggacaggttcaaaaaacaaaccatgtctgcccctgaggagctcacagtacagrgtttctatgctgtcattgtggtgagggctaattttttgtttttatttgcaggttttgaaaaaccatcagcaatccagcaacgagcaatcaagcagatcat

SEQ ID NO: 341403 - DNA, 201 bp, Homo sapiens
ttgatccctagatcacttcagattgaagaagcaccaaagggaaaccagattccctcaaccagataacactccggtgggcggggagtagggacggagagaaygcgtggatgtggcctggtgctgtaaaaatgagatttcctgtcaaacgtaccttatcaccactctgcctctaacccagtgggaacactgggcgtgcacctt

SEQ ID NO: 341404 - DNA, 201 bp, Homo sapiens
tggcagtggagagggaagagtggaaatttgacactctgtgtgacctctacgacacactgaccatcactcaggcggtcatcttctgcaacaccaaaagaaargtaagaggcactgcacagcatccatgtgctgaagggaaactgcagattgagtctctgaatgacataaatcaagatttttcagtaaagggccagtttgtcc

SEQ ID NO: 341405 - DNA, 201 bp, Homo sapiens
tcacgcctggctgtgtcggcgctttcggtgtgtgtcccccgtgcagagctcggcgctgggtctgtcgggggctgcagccgcttcgaggcacctcagcgtcsttcattcagcagataactgatttctacctattagcttttctaggtactggggttttggcggtaaaccggaagggtttgcgcctttacgggttttgaattt

SEQ ID NO: 341406 - DNA, 201 bp, Homo sapiens
gccatttgagcagagttctggatgaaggagactgttatgagaagagggaagagcagttggggcagaaggaacagctggtgccagggccttgcagcccttakccagctgcattccaggaactgaaagaagtcccctgtggtgggattttggagagctagtcggggcagatctagcaaagacgtgtagggtgacgaataattt

SEQ ID NO: 341407 - DNA, 201 bp, Homo sapiens
cactcaggcggtcatcttctgcaacaccaaaagaaaggtaagaggcactgcacagcatccatgtgctgaagggaaactgcagattgagtctctgaatgacrtaaatcaagatttttcagtaaagggccagtttgtccatattttaagctttcagggtatgtgttctcttgtaaaagcagctgtagacaatatgcaaacggt

SEQ ID NO: 341408 - DNA, 201 bp, Homo sapiens
atggaaaattccatgaggtcagcattctttcccccataagggaatagggcaggagcttttctgggataataccataatgctttttaaaaaaaaatttgaawtttaaattttttacatttttcgagacagggtcttactctgtctcccagactggagtgcagtcgtgtgattacagctcatagcagcctcaagcgatcctcc

SEQ ID NO: 341409 - DNA, 201 bp, Homo sapiens
cttaggttgaggtgataactagccttaactagccaggttggtcaccttggttacaagcgtgtgtcttcttttccagtaagtaggggggttttctgttcatygtttcgattagtttaattccacagtggtcagaaagcgtggattgggtggtttcattcatttgaacttgattcagacttccttctttgcccaccttgtggt

SEQ ID NO: 341410 - DNA, 201 bp, Homo sapiens
ttgctctcggtgactacatgaatgtccagtgccatgcctgcattggaggcaccaatgttggcgaggacatcaggaagctggattacggacagcatgttgtygcgggcactccagggcgtgtttttggtaagcacttttgtcgctaaaaatggtgctgccggtagtatttgtaagaagtgcttaaatggtacaggacagctt

SEQ ID NO: 341411 - DNA, 201 bp, Homo sapiens
gtgtagaaatcactcagcccaattcattgagcccctgggttttgagagcttgctatgttgaacactgggttaggctggaggacaggttcaaaaaacaaacmatgtctgcccctgaggagctcacagtacagggtttctatgctgtcattgtggtgagggctaattttttgtttttatttgcaggttttgaaaaaccatcag

SEQ ID NO: 341412 - DNA, 201 bp, Homo sapiens
aagccaacttcactgtatcctcaatgcatggagacatgccccagaaagagcgggagtccatcatgaaggagttccggtcgggcgccaggtgggtctgctaygctgtggctctgcaggtcagggtttgctagactgtgtctaagcacttcatatgtaccgcctaagtgcaggccccacacccggggggatgccaagcttctg

SEQ ID NO: 341413 - DNA, 201 bp, Homo sapiens
actctgtgtgacctctacgacacactgaccatcactcaggcggtcatcttctgcaacaccaaaagaaaggtaagaggcactgcacagcatccatgtgctgmagggaaactgcagattgagtctctgaatgacataaatcaagatttttcagtaaagggccagtttgtccatattttaagctttcagggtatgtgttctctt

SEQ ID NO: 341414 - DNA, 201 bp, Homo sapiens
cactgcaacctttgcctctcagtttcaagctattctcctgcctcaccctcccaagtagctgggattacaggcatgcaccaccatgcccgactaattttcakatttttagtagagacgggggtttcaccatgttggtcaggctggtctcaaactcctgacctcaggtgatccaccctccttggcctcctaaagtgctgggat

SEQ ID NO: 341415 - DNA, 201 bp, Homo sapiens
ggaacattttggcacttacacttccagatgctgcacacccagatttttttttttttttaaacaaaactgttgtctatattctacaatttggtggttttttwaaaatagagattggtctttacaaataatatcccacgttagtgtagaaatcactcagcccaattcattgagcccctgggttttgagagcttgctatgttga

SEQ ID NO: 341416 - DNA, 201 bp, Homo sapiens
tcgagataataatggcataaataataatcggtgatcatctcggaggagaaacagtctttctttttggaaaacgtggatgtttctctctcccaccctggacrtgaacctgtgctttgtttcaggggctgcttgctctcggtgactacatgaatgtccagtgccatgcctgcattggaggcaccaatgttggcgaggacatca

SEQ ID NO: 341417 - DNA, 201 bp, Homo sapiens
gattccctcaaccagataacactccggtgggcggggagtagggacggagagaacgcgtggatgtggcctggtgctgtaaaaatgagatttcctgtcaaacrtaccttatcaccactctgcctctaacccagtgggaacactgggcgtgcaccttccatttctgggtgtgccgccctaaacatccctcacctgtcttgctcc

SEQ ID NO: 341418 - DNA, 201 bp, Homo sapiens
ctctcagtttcaagctattctcctgcctcaccctcccaagtagctgggattacaggcatgcaccaccatgcccgactaattttcatatttttagtagagaygggggtttcaccatgttggtcaggctggtctcaaactcctgacctcaggtgatccaccctccttggcctcctaaagtgctgggatttcaggcatgagtta

SEQ ID NO: 341419 - DNA, 201 bp, Homo sapiens
agtgaaactctgtctcaaaaaaaaaataaattgtacccattttatacttaacgtagtataaagatgtatgtttaaaaagatgtatattaagatgttaatgytggtttcttcggtggatgggattatgaattttatatattcttttctgttaatgatatagcttttgtaataagaaaccagcaggccgggtgtggtggctca

SEQ ID NO: 341420 - DNA, 201 bp, Homo sapiens
cgattaacaagtactgcttttgtgatttagttgtgaaacaccgacttatttatttaatccaatcctgttttctgatacctcaaaattttcttcctaattarcattttgccattaatcattatataaattgctggtttgtattaagtcatttttggtgtggcttgtgtgctctcggtagttttttacagccttagaaatgta

SEQ ID NO: 341421 - DNA, 201 bp, Homo sapiens
aacagagcaagaccctgtctcaaacaaaacaaaacaacccatcttttataatcctcattgtggtttgaaccaataattctaaatttaaaaattaggtgackatttatttatcagtgtttcgtttagaatcgtattccatgtggtgcacattgtgaaatgttaagtaggatacagaatggaggcctgtgtgacggaagtggt

SEQ ID NO: 341422 - DNA, 201 bp, Homo sapiens
tcaggtaatttgccattcttaaaacaaactgttatgtaattctaggaaatacttgctttttcttctgtaactacagtgttcaaaaagtacaatttaaaatkttctagtatgtattgactcagcaaatttttacacagagtcttagttgtacactaatatatgcactaatattctgtcatgattttctatttaactagagga

SEQ ID NO: 341423 - DNA, 201 bp, Homo sapiens
caaaaaagactcatttacacaaaaatttctttggaagagagagttagtccaaaatcctagaaggaaaagagttgtatttagataaaggggagtcctccttyttctgacacctatgaaacacctcttgaagttagagagtctgtggctccattgcccccgtgcagaagccatgtctactctctttcttcatggacacttaac

SEQ ID NO: 341424 - DNA, 201 bp, Homo sapiens
gcttcgtcttcgccttccaccatgattgtaagtttcctgaggtctccccagccacactgaactgtgagtcaattaaacttctttcctttttaaagcacccrggctcaggcagttctttatagcaatatgaaaatggactaatatactgctctgcagtgtttaggagaatgtggagaaactggaacccccatacattgctag

SEQ ID NO: 341425 - DNA, 201 bp, Homo sapiens
tgagggaagccaacttcactgtatcctcaatgcatggagacatgccccagaaagagcgggagtccatcatgaaggagttccggtcgggcgccaggtgggtstgctatgctgtggctctgcaggtcagggtttgctagactgtgtctaagcacttcatatgtaccgcctaagtgcaggccccacacccggggggatgccaag

SEQ ID NO: 341426 - DNA, 201 bp, Homo sapiens
ccagaatgtgccaccgttcctggttagttttttgttttgtttagaaatggggtctcttgctgtattgcccaggctggtctcgaattcctggcttcaattamtgctgcctctgcgtcccagagtgttgggaatacaggcctgagccaccacgccgtgacatgagggtctttatgactcacaatctgaaaggcagggaagatt

SEQ ID NO: 341427 - DNA, 201 bp, Homo sapiens
tgagcacacctggccccctccccccatagagtcattatatggagaaaatgaagtaagagggttttgtgagtgcaccccaacattttctgggaaaaagtttktacatccagttaggatgattctgagttttaagagcagttaccttacgaatattgatactggttctgcaaatgatgcggtaaagtcccgaatgcacatctc

SEQ ID NO: 341428 - DNA, 201 bp, Homo sapiens
gctttttaaaaaaaaatttgaaatttaaattttttacatttttcgagacagggtcttactctgtctcccagactggagtgcagtcgtgtgattacagctcwtagcagcctcaagcgatcctcccacctcaccctcccaagtagctgggactacaggcacacatcaccatgcccaattaatttttgtattttctgtagagac

SEQ ID NO: 341429 - DNA, 201 bp, Homo sapiens
agctcgtgtcaaaacccggacctcaggctatcctcttgcctgagtgtaaaggaattgaaagcatgcaaattcttttaaaattcctgttttaaaaaaccaawtaggctgggcaacatatagagaccgtatctctaccaataataaaaaattagccaggtagggcggcacatgcctatagtcccagctactcaggaggctgtg

SEQ ID NO: 341430 - DNA, 201 bp, Homo sapiens
aacaccgccaactttagaagtaccaccccctccatccctttcgtaaggaactgggtgccccgccctcaacgagatcccgcgggaactgcatatggcgcgasagcagaaacaccttacttttccctgcggcaaacgcccagttccctttcacgtgacgaagagtgccccgtcccccagaggcgtggccgcgtcgcgcgtacg

SEQ ID NO: 341431 - DNA, 201 bp, Homo sapiens
cttcttctgctcgtcggcgatggcctggcggacacagctgagcaggccgtccaggtcgctccagccgtcaggagccaggctgctgtatagacagggcgccyggtccaggtctccctcctcctgcctcgcagcctccaggagctgctcctctgaggtgcccaaccgctgtaggcccttcctgcacaggccagagttgggggg

SEQ ID NO: 341432 - DNA, 201 bp, Homo sapiens
aggctgaagggactctggccaggcctctcttcccgcccaggcatcatcgggaagaagcacgtggggccggagaccgtgtacccgtttgactttgcgtacayggaggagaatggctccgtcctccaggtggggcggaacatcactagaattaagctgctcgtccggaaattcctgcagactcaggatgaccggtatgagtcg

SEQ ID NO: 341433 - DNA, 201 bp, Homo sapiens
ggcctctcttcccgcccaggcatcatcgggaagaagcacgtggggccggagaccgtgtacccgtttgactttgcgtacacggaggagaatggctccgtccyccaggtggggcggaacatcactagaattaagctgctcgtccggaaattcctgcagactcaggatgaccggtatgagtcggggcccctgccccttccccct

SEQ ID NO: 341434 - DNA, 201 bp, Homo sapiens
taacccatttgcaggaggccccggggagaaggctggacaccgctcccccggtgcctgttctaagcctggctccccaccgcctgccccaggtgccttacttygtccccaacaccccggcagcccgagccgacctggccgctcagtacaccaccgtcggccgcatggaccaaggtgggcttgcagaaccgggcactggagggg

SEQ ID NO: 341435 - DNA, 201 bp, Homo sapiens
ccgcccaggcatcatcgggaagaagcacgtggggccggagaccgtgtacccgtttgactttgcgtacacggaggagaatggctccgtcctccaggtggggyggaacatcactagaattaagctgctcgtccggaaattcctgcagactcaggatgaccggtatgagtcggggcccctgccccttccccctggcggccggta

SEQ ID NO: 341436 - DNA, 201 bp, Homo sapiens
cgcccaggcatcatcgggaagaagcacgtggggccggagaccgtgtacccgtttgactttgcgtacacggaggagaatggctccgtcctccaggtggggcrgaacatcactagaattaagctgctcgtccggaaattcctgcagactcaggatgaccggtatgagtcggggcccctgccccttccccctggcggccggtac

SEQ ID NO: 341437 - DNA, 201 bp, Homo sapiens
tgtggccttgagcaagtcacctacctccttgtgcctcagtttcctcatctgtaagatggtgggtgtaatgagatgccactctagttatggagattggcggsgctaatgctttgtatgtaaacacttagtgcgaggcctggtgggctcactcagcgtgaaccgccatggccacagtgtcccaggaacgccatggtgcaggga

SEQ ID NO: 341438 - DNA, 201 bp, Homo sapiens; identical to SEQ ID NO: 71969

SEQ ID NO: 341439 - DNA, 201 bp, Homo sapiens
ctatcgggcagggagtgggaggtacagccagtgtctctgggtgctggccactcgaagtctaaatcagggccccgagaaggcccctggggatgggagggccrtgggagaacaggtgcggcaggcgggctctggctgtccgggggccccggacctcatgcgcctttgctggcagcatcagaatgggatgtacgggctgcacca

SEQ ID NO: 341440 - DNA, 201 bp, Homo sapiens
ttcttttcctttaagtccacagtcctgtcagatcaggatctcatccttatgattcatttacccttaattaaggaccctgtctccagatacagtgatgttgrcgttagggcttcagcatatgaattctgggaggacacagttcagaccatagcaggcccacagccaagtgccgagacactctgggtttggagaagggcagct

SEQ ID NO: 341441 - DNA, 201 bp, Homo sapiens
gccactcgaagtctaaatcagggccccgagaaggcccctggggatgggagggccgtgggagaacaggtgcggcaggcgggctctggctgtccgggggcccyggacctcatgcgcctttgctggcagcatcagaatgggatgtacgggctgcaccaggacgtgcaccacttcaactccttcgacaaggtgcggagcctgccg

SEQ ID NO: 341442 - DNA, 201 bp, Homo sapiens
ccaaggcacgctcagcccccgtggcctgcccttagctcttgtcccaaaggatctgggcctgggtctcctggctgggctgtgtgtccacgagaacccacagygcgcttagggccgagaggggcagagaagggagcagaaagggttgggaggctgaagggactctggccaggcctctcttcccgcccaggcatcatcgggaag

SEQ ID NO: 341443 - DNA, 201 bp, Homo sapiens; identical to SEQ ID NO: 71971

SEQ ID NO: 341444 - DNA, 201 bp, Homo sapiens; identical to SEQ ID NO: 71972

SEQ ID NO: 341445 - DNA, 201 bp, Homo sapiens; identical to SEQ ID NO: 71974

SEQ ID NO: 341446 - DNA, 201 bp, Homo sapiens; identical to SEQ ID NO: 71975

SEQ ID NO: 341447 - DNA, 201 bp, Homo sapiens; identical to SEQ ID NO: 71976

SEQ ID NO: 341448 - DNA, 201 bp, Homo sapiens; identical to SEQ ID NO: 71977

SEQ ID NO: 341449 - DNA, 201 bp, Homo sapiens; identical to SEQ ID NO: 71978

SEQ ID NO: 341450 - DNA, 201 bp, Homo sapiens
gtgctccaggagctgcgtgacgccggtgtcctgaacgacacactggtgatcttcacgtccgacaacgggatccccttccccagcggcaggaccaacctgtmctggccgggcactgctgaacccttactggtgtcatccccggagcacccaaaacgctggggccaagtcagcgaggcctacgtgagcctcctaggtatgcct

SEQ ID NO: 341451 - DNA, 201 bp, Homo sapiens
gctaggattctcgcttggatcctgctgctttcaaaaccattgccttttccccgcctacctccgatgagcttcagaatcacctgggatgcttgttaatatcyaaattgcaaatcccagggtgtccgattccgtagatcttggcgggctcaagaatttgcatgtctgacaagttcccaggtgatgccgatactgtgggcctgg

SEQ ID NO: 341452 - DNA, 201 bp, Homo sapiens
ccttggcaatgagcctcctcccgtgcaggcctttcttcctctacgtcgccttccacgacccccaccgctgtgggcactcccagccccagtacggaaccttstgtgagaagtttggcaacggagagagcggcatgggtcgtatcccagactggaccccccaggcctacgacccactggacgtgctggtaggacggcccctcc

SEQ ID NO: 341453 - DNA, 201 bp, Homo sapiens
ccaggagctgcgtgacgccggtgtcctgaacgacacactggtgatcttcacgtccgacaacgggatccccttccccagcggcaggaccaacctgtactggycgggcactgctgaacccttactggtgtcatccccggagcacccaaaacgctggggccaagtcagcgaggcctacgtgagcctcctaggtatgcctttgtc

SEQ ID NO: 341454 - DNA, 201 bp, Homo sapiens
ctctacgtcgccttccacgacccccaccgctgtgggcactcccagccccagtacggaaccttctgtgagaagtttggcaacggagagagcggcatgggtcstatcccagactggaccccccaggcctacgacccactggacgtgctggtaggacggcccctcccgtgtttcaggacgcccgtcagccctgggtcggggacc

SEQ ID NO: 341455 - DNA, 201 bp, Homo sapiens
ccttctggcatcacagtcccagcctccctcactcccagtgctgtttctcgtgaccgcagccgaccgtgcactctctgtctcccacctcacgcagcggatgrcggaggctttgagagtggcgcgtacaacaacagcgccatcgccaccccgcacctggacgccttggcccgccgcagcctcctctttcgcaatgccttcacc

SEQ ID NO: 341456 - DNA, 201 bp, Homo sapiens
cgccaccccgcacctggacgccttggcccgccgcagcctcctctttcgcaatgccttcacctcggtcagcagctgctctcccagccgcgccagcctcctcmctggcctgccccaggtgaggtgcaaggggcgggaggagggggtgggcagggagtagacaggctgcgtccggggcccaggcctctgccacgtctcccatcc

SEQ ID NO: 341457 - DNA, 201 bp, Homo sapiens
cgagaaggcccctggggatgggagggccgtgggagaacaggtgcggcaggcgggctctggctgtccgggggccccggacctcatgcgcctttgctggcagyatcagaatgggatgtacgggctgcaccaggacgtgcaccacttcaactccttcgacaaggtgcggagcctgccgctgctgctcagccaagctggtgtgcg

SEQ ID NO: 341458 - DNA, 201 bp, Homo sapiens
ccgtgcccgcctgctgcgcgctgctgctagtcctggggctctgccgggcgcgtccccggaacgcactgctgctcctcggtgagtgccggcgccgccccccsacgcccacctgcggtggcccggggaagtggccactggcctcctccccacccgtggtcaatgctgaccctagtgtgccctgcccttgtatcccccgctgcc

SEQ ID NO: 341459 - DNA, 201 bp, Homo sapiens
aaggcccctggggatgggagggccgtgggagaacaggtgcggcaggcgggctctggctgtccgggggccccggacctcatgcgcctttgctggcagcatcrgaatgggatgtacgggctgcaccaggacgtgcaccacttcaactccttcgacaaggtgcggagcctgccgctgctgctcagccaagctggtgtgcgcaca

SEQ ID NO: 341460 - DNA, 201 bp, Homo sapiens; identical to SEQ ID NO: 71993

SEQ ID NO: 341461 - DNA, 201 bp, Homo sapiens; identical to SEQ ID NO: 71995

SEQ ID NO: 341462 - DNA, 201 bp, Homo sapiens
cgccggtgtcctgaacgacacactggtgatcttcacgtccgacaacgggatccccttccccagcggcaggaccaacctgtactggccgggcactgctgaayccttactggtgtcatccccggagcacccaaaacgctggggccaagtcagcgaggcctacgtgagcctcctaggtatgcctttgtctgtctccgtcaggaa

SEQ ID NO: 341463 - DNA, 201 bp, Homo sapiens
cacagccaagtgccgagacactctgggtttggagaagggcagctttcttcctggcctgcgggtacggagcacagcccatcccgctctccctccaggtttaygtggctgccatgtgctcacacctgtgggtactgtggggtggaggatggaagcccagctggaaggtgcccagcctcctctgtccatccatggaccacattg

SEQ ID NO: 341464 - DNA, 201 bp, Homo sapiens; identical to SEQ ID NO: 71998

SEQ ID NO: 341465 - DNA, 201 bp, Homo sapiens; identical to SEQ ID NO: 71999

SEQ ID NO: 341466 - DNA, 201 bp, Homo sapiens; identical to SEQ ID NO: 72001

SEQ ID NO: 341467 - DNA, 201 bp, Homo sapiens; identical to SEQ ID NO: 72002

SEQ ID NO: 341468 - DNA, 201 bp, Homo sapiens
gagtcttccggcgggatgcatgggcccccacgtggctcgaatgggggcaggggagaaggttccaggtactcgagttagcctggtcagagggagaagggacrtggggaaactgaggcagtgagggtcacaggttgacttccagatacagaggaggaggcagagccgaggggcttcctgtgccacgtggcagtggccccgcag

SEQ ID NO: 341469 - DNA, 201 bp, Homo sapiens
acagtgcctcctgccaccctgccagcaccgagcccctcttccagcccaccccagtggggtccaggcccctccctggagcctcaccttgcgggtcacggtgyactgctgagtcatgtcctggatgagggctatgagctgctgctgagccctgcagagaccagcagaggccctgacccagctgcctcctgccaggtgagcagg

SEQ ID NO: 341470 - DNA, 201 bp, Homo sapiens; identical to SEQ ID NO: 71953

SEQ ID NO: 341471 - DNA, 201 bp, Homo sapiens
ctcctacgagcttgcagccctggccctagatgatgaagaaagaggctctgaccaaatcggattcaggttcccaacctcggggccacagagagaaccgtagrgagacggggtggtccggagtgaggctgttctgggctaacccatttgcaggaggccccggggagaaggctggacaccgctcccccggtgcctgttctaagc

SEQ ID NO: 341472 - DNA, 201 bp, Homo sapiens
cggggccacagagagaaccgtagagagacggggtggtccggagtgaggctgttctgggctaacccatttgcaggaggccccggggagaaggctggacaccrctcccccggtgcctgttctaagcctggctccccaccgcctgccccaggtgccttacttcgtccccaacaccccggcagcccgagccgacctggccgctca

SEQ ID NO: 341473 - DNA, 201 bp, Homo sapiens
tgggagggccgtgggagaacaggtgcggcaggcgggctctggctgtccgggggccccggacctcatgcgcctttgctggcagcatcagaatgggatgtacrggctgcaccaggacgtgcaccacttcaactccttcgacaaggtgcggagcctgccgctgctgctcagccaagctggtgtgcgcacaggtgaggaccccgt

SEQ ID NO: 341474 - DNA, 201 bp, Homo sapiens
cacagtgcgcttagggccgagaggggcagagaagggagcagaaagggttgggaggctgaagggactctggccaggcctctcttcccgcccaggcatcatcrggaagaagcacgtggggccggagaccgtgtacccgtttgactttgcgtacacggaggagaatggctccgtcctccaggtggggcggaacatcactagaat

SEQ ID NO: 341475 - DNA, 201 bp, Homo sapiens
cagtgctgtttctcgtgaccgcagccgaccgtgcactctctgtctcccacctcacgcagcggatgacggaggctttgagagtggcgcgtacaacaacagcrccatcgccaccccgcacctggacgccttggcccgccgcagcctcctctttcgcaatgccttcacctcggtcagcagctgctctcccagccgcgccagcct

SEQ ID NO: 341476 - DNA, 201 bp, Homo sapiens
ggggcttcctgtgccacgtggcagtggccccgcagccttggcaatgagcctcctcccgtgcaggcctttcttcctctacgtcgccttccacgacccccacygctgtgggcactcccagccccagtacggaaccttctgtgagaagtttggcaacggagagagcggcatgggtcgtatcccagactggaccccccaggccta

SEQ ID NO: 341477 - DNA, 201 bp, Homo sapiens
gagctctgcttctcggcccctcaccacaggagttggactggtgctccaggagctgcgtgacgccggtgtcctgaacgacacactggtgatcttcacgtccracaacgggatccccttccccagcggcaggaccaacctgtactggccgggcactgctgaacccttactggtgtcatccccggagcacccaaaacgctgggg

SEQ ID NO: 341478 - DNA, 201 bp, Homo sapiens
ggaggctttgagagtggcgcgtacaacaacagcgccatcgccaccccgcacctggacgccttggcccgccgcagcctcctctttcgcaatgccttcacctsggtcagcagctgctctcccagccgcgccagcctcctcactggcctgccccaggtgaggtgcaaggggcgggaggagggggtgggcagggagtagacaggc

SEQ ID NO: 341479 - DNA, 201 bp, Homo sapiens
catttgcaggaggccccggggagaaggctggacaccgctcccccggtgcctgttctaagcctggctccccaccgcctgccccaggtgccttacttcgtccscaacaccccggcagcccgagccgacctggccgctcagtacaccaccgtcggccgcatggaccaaggtgggcttgcagaaccgggcactggagggggtgcc

SEQ ID NO: 341480 - DNA, 201 bp, Homo sapiens
ctaagcctggctccccaccgcctgccccaggtgccttacttcgtccccaacaccccggcagcccgagccgacctggccgctcagtacaccaccgtcggccrcatggaccaaggtgggcttgcagaaccgggcactggagggggtgccacggccggggtcccccatcctgggccagcgccctcttaggtcacggcataatgt

SEQ ID NO: 341481 - DNA, 201 bp, Homo sapiens
ccgcccagagtggcgtaggttcggcccttccgagggcagctcctgtgtgctgagggctctgctgctctgagatgccgcgtcccttccagacctcacgcccrccatcttggattggttctcgatcccgtaccccagctacgccatctttggctcgaagaccatccacctcactggccggtccctcctgccggcgctggaggc

SEQ ID NO: 341482 - DNA, 201 bp, Homo sapiens
ccagagtggcgtaggttcggcccttccgagggcagctcctgtgtgctgagggctctgctgctctgagatgccgcgtcccttccagacctcacgcccaccakcttggattggttctcgatcccgtaccccagctacgccatctttggctcgaagaccatccacctcactggccggtccctcctgccggcgctggaggccgag

SEQ ID NO: 341483 - DNA, 201 bp, Homo sapiens; identical to SEQ ID NO: 71970

SEQ ID NO: 341484 - DNA, 201 bp, Homo sapiens
ctgtcactcccactctacagaggaaaagaatgaggctcagagaggtgaagtaagctgctcaggattgcacagctggtaagcactaagctaggattctcgcytggatcctgctgctttcaaaaccattgccttttccccgcctacctccgatgagcttcagaatcacctgggatgcttgttaatatctaaattgcaaatccc

SEQ ID NO: 341485 - DNA, 201 bp, Homo sapiens
tgcgggtacggagcacagcccatcccgctctccctccaggtttatgtggctgccatgtgctcacacctgtgggtactgtggggtggaggatggaagcccarctggaaggtgcccagcctcctctgtccatccatggaccacattgcctctgagggagctggggaaagtgttggtctgggggttcccaccagcctctcctgt

SEQ ID NO: 341486 - DNA, 201 bp, Homo sapiens
tgcccccagtgtcctctactccagagcagggggaagaagcttggtgtggttgtaggagttcagcggcctgtccctgtttcctgctgcccagtgtgtggccytgggcactgcacctcacctttctgggcctcagctgctttgtgtaggatgaaagggttgaaatagacaacctgcaaggtcactaggcctttgagatggcat

SEQ ID NO: 341487 - DNA, 201 bp, Homo sapiens; identical to SEQ ID NO: 71973

SEQ ID NO: 341488 - DNA, 201 bp, Homo sapiens
tgttggccaggctggtctccatctcctgacctcgtgatccacctgcgttggcctcccaaagtgccgggattacaggcgtgagccaccacgcccggccggcrgtctgagtttttaaaatgtacacatcttttacaatataaaataactaggtaataaaacaaggcctgaccctgtctttttcactctgtaacgtgtgatcat

SEQ ID NO: 341489 - DNA, 201 bp, Homo sapiens
gcattcctgaaacccttcccaggacagctcccctgcccaccccgcccttgacctcaccttttccatgagggactccacagcatggcgggtcacccagcagyggcccccggacacctctccctcctggatgatgtcccctctctggctccaggcctcatactcctcctggctcaagtactctacaggtgacattggacgggg

SEQ ID NO: 341490 - DNA, 201 bp, Homo sapiens
tgtgagaagtttggcaacggagagagcggcatgggtcgtatcccagactggaccccccaggcctacgacccactggacgtgctggtaggacggcccctccygtgtttcaggacgcccgtcagccctgggtcggggaccctggcctcctacgagcttgcagccctggccctagatgatgaagaaagaggctctgaccaaatc

SEQ ID NO: 341491 - DNA, 201 bp, Homo sapiens
attcttgaagaccagatcctggcctaaatgagtggcatccccctgccccagctgaccaactagcagcagctcccaaagcccctcacccacttggagccagyggcccctgtgccagctcaccaggcctcaccctccatcctgctggggtccaactggcccctgtcaaaggacaaacgcagagggctggccttggctttgtcc

SEQ ID NO: 341492 - DNA, 201 bp, Homo sapiens
cccagccccatgattcttgaagaccagatcctggcctaaatgagtggcatccccctgccccagctgaccaactagcagcagctcccaaagcccctcacccrcttggagccagtggcccctgtgccagctcaccaggcctcaccctccatcctgctggggtccaactggcccctgtcaaaggacaaacgcagagggctggcc

SEQ ID NO: 341493 - DNA, 201 bp, Homo sapiens
cgacacactggtgatcttcacgtccgacaacgggatccccttccccagcggcaggaccaacctgtactggccgggcactgctgaacccttactggtgtcayccccggagcacccaaaacgctggggccaagtcagcgaggcctacgtgagcctcctaggtatgcctttgtctgtctccgtcaggaaaggtgtgggagtgga

SEQ ID NO: 341494 - DNA, 201 bp, Homo sapiens
tggagcccagcggccggatgcagcagcaggtgggtctacacacaccacccgctgcctccctccgtgtctgcggctgagctctgcttctcggcccctcaccrcaggagttggactggtgctccaggagctgcgtgacgccggtgtcctgaacgacacactggtgatcttcacgtccgacaacgggatccccttccccagcgg

SEQ ID NO: 341495 - DNA, 201 bp, Homo sapiens
gagaaccgtagagagacggggtggtccggagtgaggctgttctgggctaacccatttgcaggaggccccggggagaaggctggacaccgctcccccggtgyctgttctaagcctggctccccaccgcctgccccaggtgccttacttcgtccccaacaccccggcagcccgagccgacctggccgctcagtacaccaccgt

SEQ ID NO: 341496 - DNA, 201 bp, Homo sapiens
gcctcctaggtatgcctttgtctgtctccgtcaggaaaggtgtgggagtggatctgggacggggccatgacctgtcagatgctgctccacacccattaccwaatgtggctctcatatcatctgggtgaggaagggactgtcactcccactctacagaggaaaagaatgaggctcagagaggtgaagtaagctgctcaggat

SEQ ID NO: 341497 - DNA, 201 bp, Homo sapiens
ctttcttctctttttattttttaattttttttagagacgggtctcactgtgttgctcaggctggtcttgaactcctgggctcaagcgatcctcccacctcsggttcccaaagtgctgggatgacaggcgtgagccccaggcccagctgagtttgccactttctaaatgaggctgtgtgctatgcagtattaagagtttcca

SEQ ID NO: 341498 - DNA, 201 bp, Homo sapiens; identical to SEQ ID NO: 71986

SEQ ID NO: 341499 - DNA, 201 bp, Homo sapiens
gagagaaccgtagagagacggggtggtccggagtgaggctgttctgggctaacccatttgcaggaggccccggggagaaggctggacaccgctcccccggygcctgttctaagcctggctccccaccgcctgccccaggtgccttacttcgtccccaacaccccggcagcccgagccgacctggccgctcagtacaccacc

SEQ ID NO: 341500 - DNA, 201 bp, Homo sapiens; identical to SEQ ID NO: 71989

SEQ ID NO: 341501 - DNA, 201 bp, Homo sapiens; identical to SEQ ID NO: 71990

SEQ ID NO: 341502 - DNA, 201 bp, Homo sapiens; identical to SEQ ID NO: 71991

SEQ ID NO: 341503 - DNA, 201 bp, Homo sapiens; identical to SEQ ID NO: 71992

SEQ ID NO: 341504 - DNA, 201 bp, Homo sapiens
ttcaaaaccattgccttttccccgcctacctccgatgagcttcagaatcacctgggatgcttgttaatatctaaattgcaaatcccagggtgtccgattcmgtagatcttggcgggctcaagaatttgcatgtctgacaagttcccaggtgatgccgatactgtgggcctggggacccctctctgagcatccgtgcacccc

SEQ ID NO: 341505 - DNA, 201 bp, Homo sapiens
gcaatctcggctcactacaaccaccacctcccaggttcgagcgatttttctgtctcagcctccaaagtagctaggactgcaatcgcaccgcacgccaccaygcccagctaatttttatatttttagtagagacggggtttcaccacattggccaggctggtcttgaactcctgacctcgtgatccgcccacctcagcctcc

SEQ ID NO: 341506 - DNA, 201 bp, Homo sapiens
aggtagcatgcctgctggggtatcatcaagcttgttgggtcatcatgcctgcatgagtatcttgcccacttgggtaccatgcctgcctgctaacatgcctrtgcaggtaccaggcttgcctgggtaccatgcccatctgcttatacccaccagctatcagtccagcctgtgtaccatgcccacctgccaacatacccaccg

SEQ ID NO: 341507 - DNA, 201 bp, Homo sapiens; identical to SEQ ID NO: 71996

SEQ ID NO: 341508 - DNA, 201 bp, Homo sapiens; identical to SEQ ID NO: 71997

SEQ ID NO: 341509 - DNA, 201 bp, Homo sapiens; identical to SEQ ID NO: 72000

SEQ ID NO: 341510 - DNA, 201 bp, Homo sapiens
ttcttaaacccttggaggaggcacagtttctcgctcaggatcttcccaaccgccctgggcacgaggagcacaggccggggccgggcgggtcgatggggccrcaccagggtatagggcaccagggtgaggcagctctcggcccagaagcacgtgctggagcctgtggaggagaggatcctgagggtgggtgaggctgcggca

SEQ ID NO: 341511 - DNA, 201 bp, Homo sapiens; identical to SEQ ID NO: 55183

SEQ ID NO: 341512 - DNA, 201 bp, Homo sapiens; identical to SEQ ID NO: 276080

SEQ ID NO: 341513 - DNA, 201 bp, Homo sapiens; identical to SEQ ID NO: 276081

SEQ ID NO: 341514 - DNA, 201 bp, Homo sapiens; identical to SEQ ID NO: 276082

SEQ ID NO: 341515 - DNA, 201 bp, Homo sapiens; identical to SEQ ID NO: 55188

SEQ ID NO: 341516 - DNA, 201 bp, Homo sapiens; identical to SEQ ID NO: 55189

SEQ ID NO: 341517 - DNA, 201 bp, Homo sapiens; identical to SEQ ID NO: 55190

SEQ ID NO: 341518 - DNA, 201 bp, Homo sapiens; identical to SEQ ID NO: 276086

SEQ ID NO: 341519 - DNA, 201 bp, Homo sapiens; identical to SEQ ID NO: 276087

SEQ ID NO: 341520 - DNA, 201 bp, Homo sapiens; identical to SEQ ID NO: 276088

SEQ ID NO: 341521 - DNA, 201 bp, Homo sapiens; identical to SEQ ID NO: 55186

SEQ ID NO: 341522 - DNA, 201 bp, Homo sapiens; identical to SEQ ID NO: 55187

SEQ ID NO: 341523 - DNA, 201 bp, Homo sapiens; identical to SEQ ID NO: 276091

SEQ ID NO: 341524 - DNA, 201 bp, Homo sapiens; identical to SEQ ID NO: 276092

SEQ ID NO: 341525 - DNA, 201 bp, Homo sapiens; identical to SEQ ID NO: 276093

SEQ ID NO: 341526 - DNA, 201 bp, Homo sapiens; identical to SEQ ID NO: 55193

SEQ ID NO: 341527 - DNA, 201 bp, Homo sapiens; identical to SEQ ID NO: 276095

SEQ ID NO: 341528 - DNA, 201 bp, Homo sapiens; identical to SEQ ID NO: 276096

SEQ ID NO: 341529 - DNA, 201 bp, Homo sapiens; identical to SEQ ID NO: 276097

SEQ ID NO: 341530 - DNA, 201 bp, Homo sapiens; identical to SEQ ID NO: 55195

SEQ ID NO: 341531 - DNA, 201 bp, Homo sapiens; identical to SEQ ID NO: 276098

SEQ ID NO: 341532 - DNA, 201 bp, Homo sapiens; identical to SEQ ID NO: 55184

SEQ ID NO: 341533 - DNA, 201 bp, Homo sapiens
gggaggctgaggcaggcaaatcacgagatcaggagttggagaccagcctgaccacatggtgaaaccccatctctactaaaaatataaaaatcagctgggcktggcggtgcatgtctgtaatcccagctactcaggaggctgaggcaggagaatcgcttgaacctgggagatggaggttacagtgagccgagatcgcgccac

SEQ ID NO: 341534 - DNA, 201 bp, Homo sapiens; identical to SEQ ID NO: 276103

SEQ ID NO: 341535 - DNA, 201 bp, Homo sapiens; identical to SEQ ID NO: 276102

SEQ ID NO: 341536 - DNA, 201 bp, Homo sapiens; identical to SEQ ID NO: 276104

SEQ ID NO: 341537 - DNA, 201 bp, Homo sapiens; identical to SEQ ID NO: 276105

SEQ ID NO: 341538 - DNA, 201 bp, Homo sapiens; identical to SEQ ID NO: 276107

SEQ ID NO: 341539 - DNA, 201 bp, Homo sapiens; identical to SEQ ID NO: 276106

SEQ ID NO: 341540 - DNA, 201 bp, Homo sapiens; identical to SEQ ID NO: 276108

SEQ ID NO: 341541 - DNA, 201 bp, Homo sapiens; identical to SEQ ID NO: 276109

SEQ ID NO: 341542 - DNA, 201 bp, Homo sapiens; identical to SEQ ID NO: 55191

SEQ ID NO: 341543 - DNA, 201 bp, Homo sapiens; identical to SEQ ID NO: 276111

SEQ ID NO: 341544 - DNA, 201 bp, Homo sapiens; identical to SEQ ID NO: 276112

SEQ ID NO: 341545 - DNA, 201 bp, Homo sapiens; identical to SEQ ID NO: 276114

SEQ ID NO: 341546 - DNA, 201 bp, Homo sapiens
ccttttctttctttccttttttttttttttttttttttttttttgagacagagtctcactctgtcaccgaggctggagtgtagtgccacaatcttggctcmctgcacccttgacctcctgggctcaagcaatcctcccacctgaacctctcgagtacctggtattacaggcatgctccaccatgcccaagtaatttttgcg

SEQ ID NO: 341547 - DNA, 201 bp, Homo sapiens
cttgagcccaggaagtcaaggctacagtgagctgtgtttgcaccactgcactccagcctgggtaacaaagtgagatcctatctcaaaaaaaaaaaaaaaaraaaagaatcatacttattggttcattgtttctgaagaaaccaaaatgggaaatgtacatttttttgacattattaccaaattatcactgacatctcaatc

SEQ ID NO: 341548 - DNA, 201 bp, Homo sapiens
gtgctgtcctgctgctgccactcattgacttcctagtccttttagccttgacatttggactgcacagtgtttctctctggtaacctctgaatttgctgttttgttgttgttgttgttgttgttgttgttgtttcttttttagacacagtttcactctgttgcctggagtgcagtggcgcaatctcagctcactgcaacctc

SEQ ID NO: 341549 - DNA, 201 bp, Homo sapiens
gctacccagacccacagattcatggctgaatcccagaagcagcctgggagattttgtggggagatgaggcaaagtcatctacttccttggcaaggtaaagrattcctttcaggaatcatcttctacctcaagctgccgtgttttagttaaacatcacagctcagtattgggacagaaatgtagaaggaaaaaaatgctgaa

SEQ ID NO: 341550 - DNA, 201 bp, Homo sapiens
tgctgtcctgctgctgccactcattgacttcctagtccttttagccttgacatttggactgcacagtgtttctctctggtaacctctgaatttgctgttttgttgttgttgttgttgttgttgttgttgtttcttttttagacacagtttcactctgttgcctggagtgcagtggcgcaatctcagctcactgcaacctct

SEQ ID NO: 341551 - DNA, 201 bp, Homo sapiens
gctgtcctgctgctgccactcattgacttcctagtccttttagccttgacatttggactgcacagtgtttctctctggtaacctctgaatttgctgttttgttgttgttgttgttgttgttgttgttgtttcttttttagacacagtttcactctgttgcctggagtgcagtggcgcaatctcagctcactgcaacctctg

SEQ ID NO: 341552 - DNA, 201 bp, Homo sapiens
ttagtagggatggtgtttcaccatgttggccaggatggtctcaatctcttgacctcgtgatccacctgcctcaggcttccaaagtgctgggattacaggcrtgagccaccacacctggccaaattgtcagctctttatcctggcactgaaggtgcttgacaagttgatcccaccctacctttccattgttaaagtcagtta

SEQ ID NO: 341553 - DNA, 201 bp, Homo sapiens
agttcgagaccagcctggccaacatggcaaaacaccgtctctactaaaaatacaaaaattagctgagtgtggtggcacgtgcctgtagtcccagctactckggaggctgaggcacaagaatcacttaactcggggcgcagaggttacagtgggtcgacatcacgccactgcacaccagcctgggtgacagcaaagctctgt

SEQ ID NO: 341554 - DNA, 201 bp, Homo sapiens
gccaatccctaacctcatctttgccatagaacagtatgaaaaatttctcatccacctttctaagaagtccaaggtaaacattctcttattatgtgctaccrttcccatttaccttcttgacagatctggcaaactgaagcagcacaactacaatggaggaaaagagactctgggccatttgtgtgtttgccatcccccctc

SEQ ID NO: 341555 - DNA, 201 bp, Homo sapiens
tagatagcttcagttttttctctttttacaattgtgttacctctaatttatcagaaattggtttgagagactgactttccaaacatttttccaaacttagttttttttttttctttgggacagagtctcgctctgtcacccaggctggagtgcagtggcacaatctcggttcactgcagcctccatcctccatctcctggg

SEQ ID NO: 341556 - DNA, 201 bp, Homo sapiens
ttcgggaaaccaagccaatccctaacctcatctttgccatagaacagtatgaaaaatttctcatccacctttctaagaagtccaaggtaaacattctcttwttatgtgctaccattcccatttaccttcttgacagatctggcaaactgaagcagcacaactacaatggaggaaaagagactctgggccatttgtgtgttt

SEQ ID NO: 341557 - DNA, 201 bp, Homo sapiens
aattcattgctcagtatattttgcatttctaggtgtactgagtggggaagaatgtaagaaacagttgattaacaccctgtgttctggcaggtgagtcttgktaatatgtataactttcttaggaatacaagtggcggaaaaaaaaccactttatttcaggaatttatgtctggaggttttaagtccttcttttttgttgtt

SEQ ID NO: 341558 - DNA, 201 bp, Homo sapiens
aaataaactttgtcattttcttctaccaggtgggatcagcaatatgtaatccaactcacctccatgttcaagtaagcatcatcttttcctttttctttgtrtatcctgctttgtgaacttacttgctagaaattaaactatagcaaacgtaaacatcactctctcctgattgtaagaatattagtagttatgttttctgtt

SEQ ID NO: 341559 - DNA, 201 bp, Homo sapiens
atggatgatctaccactgacagtatagctactttagattgggtcagggaaaacctctctcagatgtgctattttaactgaagcctgaatgataagatccawaatatatagatcagagaacattctcaggtagggaaataatacaaaggcagaagaacagtgtgacatgtctgagaaagaggattttgggttttttttgttt

SEQ ID NO: 341560 - DNA, 201 bp, Homo sapiens
agtagcatccctggcctccacctaccagatgccagtagcagccccctagttttaacagccaaaaatgtctccagaaattgccagttgtccttaagggacaraatcacccctggttggaaagaggaagaaacgagagatctactgtctcctaaggccacttagtcatgcagtaaatgtatcacagggctgttactgatcttt

SEQ ID NO: 341561 - DNA, 201 bp, Homo sapiens
gagtttcctcatctccaagtcttaatgatacctataaagacacatttcacaaaatatgctatatagactgagacagtcctcaaaaaaaaaaggaattcagsgagagatgctcatactgtatatctctcaccttagagattcgtggtgtccatttgcatattaaaggtgctgagaccagtcatggtggttaatggaggctga

SEQ ID NO: 341562 - DNA, 201 bp, Homo sapiens
atggcacaatcttggctcacggcaacgtccaccttccgggctgaagcaatcctcccacctcagcctcccaagtagctgggactataggaatgccaccacaycgggctgatttttttgtatttttagtagaggctggtcttgaactcctgggatcaagtgatgcgcccgccttggcctcccaaagtgctggcattacaggca

SEQ ID NO: 341563 - DNA, 201 bp, Homo sapiens
aagtcttaatgatacctataaagacacatttcacaaaatatgctatatagactgagacagtcctcaaaaaaaaaaggaattcagcgagagatgctcatacygtatatctctcaccttagagattcgtggtgtccatttgcatattaaaggtgctgagaccagtcatggtggttaatggaggctgaggtaagaagatcactt

SEQ ID NO: 341564 - DNA, 201 bp, Homo sapiens
tatcatcatgcaactgggaactctgcttacatttttccacgagctggtgcagacagctctgccatcaggcagctgtgtggacaccttgttaaaggacttgkgcaaaatgtacaccacacttacagcccttgtcagatatgtgagtatttgagacaagcagattcgccccaccattctaccccagtgagccaggagatgagg

SEQ ID NO: 341565 - DNA, 201 bp, Homo sapiens
agcctcccaagtagctgggactataggaatgccaccacatcgggctgatttttttgtatttttagtagaggctggtcttgaactcctgggatcaagtgatscgcccgccttggcctcccaaagtgctggcattacaggcatgagccactgcaccttatagctcataactttctgttgaatcttttaggctattggatgttg

SEQ ID NO: 341566 - DNA, 201 bp, Homo sapiens
ggcacactttttctgtaaagggccagatagtaaatgtgggtcatacagtctctatcacacctactcaactctactattagaacataaaagcagccatagayaacttacaaataaacgagcatggctatgttccaatgaaattttcttatcaaaaacaggcagtgggccagatttatactatgggctatagtcagtcaacca

SEQ ID NO: 341567 - DNA, 201 bp, Homo sapiens
gtagtgggttggatttggccaacaggctgtatgtagtttgccaaccactgttctgtgcattacatcaggaggaacatagtattagctaccttactatttgwgaggctgaatcatttgcttttaagaaaatgaccattgattttcttcatttataggtacatatgtatccctttgtattagaaagaaatctataggatcata

SEQ ID NO: 341568 - DNA, 201 bp, Homo sapiens
tgtaaaatgttggaaggttttgattttcgtgtttctgaccccattttcaagcattttcttctgggaatcactactacttcctagactgctattattttccyctcattacacagtaatcagtttcatttcctccctaggcattttcctcctcctccatccatatttgacttaaagccttactgacaagtcagctgatctgca

SEQ ID NO: 341569 - DNA, 201 bp, Homo sapiens
ctgaatcatttgcttttaagaaaatgaccattgattttcttcatttataggtacatatgtatccctttgtattagaaagaaatctataggatcatagttcragatagtattcaaaatccttttcccaacaacatttcacagaaggttttcgttttcccatctattgatgattcttggcctaaatcagtaattataccagga

SEQ ID NO: 341570 - DNA, 201 bp, Homo sapiens
gctatgtttgccaagtatgtagcatctttttctatcataggaagacgttgtcttctaatgttggagctaaagttatctctgccatctcctagtaccacctrttcacagtgatcatgagaattcctagccccgcagagcaatttcatcaaataaggcattttgctaagtgctttatgtgcttttttcatttagtcttcagag

SEQ ID NO: 341571 - DNA, 201 bp, Homo sapiens
ggacacaacctctgggaagatggttcacttcccacttggtcagtgaggtcgatccgtgactgcttccttgccctcttctgctgccttcaccctcttccatsctctaccctgccttccagggccaaaaacagattactgcataccagcccctctggaatgtctgcagttccttattttccagaacgtggcatgtggaacaag

SEQ ID NO: 341572 - DNA, 201 bp, Homo sapiens
ttttctagataacaacaaatactggaattataaatgaaatggatcagtgcaattatctctactggcatttgggtccttccagattgaactgccaaaaattktagattactggtatacaagtacaactgcatttgattgggagacagactagttttcccctaaagccatacagttttgtaagtgacagcttcagaggaaaac

SEQ ID NO: 341573 - DNA, 201 bp, Homo sapiens
gaaatggggtatcttaaggtgccttatatagagattcttcatgcccgctgagacgtatttgttttcttgtcttgaacaagggctagtttaaattgttgcakattgtgatttatagtggttttataaattctggtaggataaaattttacaaggcaaaaattaaaagtgtctttggactcttaattaggtatgttaacttgg

SEQ ID NO: 341574 - DNA, 201 bp, Homo sapiens; identical to SEQ ID NO: 72036

SEQ ID NO: 341575 - DNA, 201 bp, Homo sapiens; identical to SEQ ID NO: 72037

SEQ ID NO: 341576 - DNA, 201 bp, Homo sapiens
tgccatttgctttttttttaatatgatccttttacacttaaataataatttttggttactaaatctattgattttcttcctctgagatgtcttctattacttttttttttttttttaagagacagagtcttcctctgttatccaggctggagtgcactagtgcagtctaactcactgcagcctccagctcctaggctcaaa

SEQ ID NO: 341577 - DNA, 201 bp, Homo sapiens
tctattgcccaggctggagtgcactggtgtgatctcagctcactgcaaccttcatacctcagcctcccgagtagctgtgattacaggcatgtgccaccacrcctggctaatttttgtattttttagtagagacggggttttgctgtgttggccaggctggtctcgagctcttggcctcaagtgatccgcctgtctcagcct

SEQ ID NO: 341578 - DNA, 201 bp, Homo sapiens
cttgaaattgagcttattttacataatgtgtttaattatacacctgagttaatataagacctataagatgtattctttcctgtgtaatgcgtctaccacarcatacttacatgcagccatacagggcaagaacatactgcttttgttttgtttgttcagggtagagtgaaacaccacagaaagaatcctgtgttgatcttt

SEQ ID NO: 341579 - DNA, 201 bp, Homo sapiens
agatcatgccattgcactccagcctgggcaacaagaacaaaattctgcctaaataaataaaaaggtagggggggtgactgaattaaaaatacaaagggacaaaaaaaaccaaacctaaaagactaagactgacatttaaattttatcaaagtaaaggatttggggagggagagaaaatgaggaaccactaagaataacgat

SEQ ID NO: 341580 - DNA, 201 bp, Homo sapiens
ttagaatacagattcctaataaggcaattccagggaattttcaggattattttggttaggttaagaatcatcttgccactgagcttaagaagaagaagaaraaagaatcagctacttaaagatagtcctaagtttgttgagcacccattgcataataggtatgaaatattcagttaacagggaaggaaaacaaatcaagtt

SEQ ID NO: 341581 - DNA, 201 bp, Homo sapiens
gatcatgccattgcactccagcctgggcaacaagaacaaaattctgcctaaataaataaaaaggtagggggggtgactgaattaaaaatacaaagggacaaaaaaaaccaaacctaaaagactaagactgacatttaaattttatcaaagtaaaggatttggggagggagagaaaatgaggaaccactaagaataacgatt

SEQ ID NO: 341582 - DNA, 201 bp, Homo sapiens
ttcattttagtgtttcagagtatactattgtccttgttaactgtaataaacattaaaacgtatataaaacagaagtaagcttccttatagaagccatatgrtaacagtattgggtagaaatgacctaaggctaataagcaaacttgttctgtttttacccactgattctttttcagccccttctcaaagtcagcatgtcaa

SEQ ID NO: 341583 - DNA, 201 bp, Homo sapiens
ctgtctgtgtaagtgttgtacctgagccatggggaatagctttgtcattctttccattctactccatgtgaagtgacttgtgtcctatagcggcttgtgtsctgaggcctgtaacccacctgtaggtggccaggtgaccacagttattatattacccccacagctgtgtgtagtgaatcacaccaggcactcttttctttc

SEQ ID NO: 341584 - DNA, 201 bp, Homo sapiens
ccattgcactccagcctgggcaacaagaacaaaattctgcctaaataaataaaaaggtagggggggtgactgaattaaaaatacaaagggacaaaaaaaaccaaacctaaaagactaagactgacatttaaattttatcaaagtaaaggatttggggagggagagaaaatgaggaaccactaagaataacgattataaaag

SEQ ID NO: 341585 - DNA, 201 bp, Homo sapiens
ataggatgccaataaaggaaatccatttatgttgtctgggattgtcagttgtcaaaaaggctgtagctgttagtaaggaaagcaacaattaaccaataagkaaaacttccattttgctcaacattttctctttttgttaatacctctcaaatgagtgctgtcctgctgctgccactcattgacttcctagtccttttagcc

SEQ ID NO: 341586 - DNA, 201 bp, Homo sapiens
cattgcactccagcctgggcaacaagaacaaaattctgcctaaataaataaaaaggtagggggggtgactgaattaaaaatacaaagggacaaaaaaaaccaaacctaaaagactaagactgacatttaaattttatcaaagtaaaggatttggggagggagagaaaatgaggaaccactaagaataacgattataaaagg

SEQ ID NO: 341587 - DNA, 201 bp, Homo sapiens
gggcaacaagagcgaaactccatcttaaaagagtgaaaaaaagtgcagtcattgacatagggtcttttttctagtcttgccttcccctggcgccccccccmcctttttttttttgttgttgttgttgttttggctttttttttggctttttttgagagagtctcgctctattgcccagggtggaatgccgtggtgcaatct

SEQ ID NO: 341588 - DNA, 201 bp, Homo sapiens
ggccgggcagagacgctcctcacttcccagacggggtggcggctgggcagaggctgcaatctcggcactttgggaggccaaggcaggcggctgggaggtgkaggttgtagcgagccgagatcacgccactgcactccagcctgggcaccattgagcactgagtgaacgagactccgtctgcaatcccggcacctcgggagg

SEQ ID NO: 341589 - DNA, 201 bp, Homo sapiens
tgggaggtgtgagtttgcagtgagatcaccccactgcactccagcctgggtgacagagtgagactctgtctcaaaaaaaaaaaaaaaacctgagtaatctyatctctattcaaaaaaacctgagtaatcttatctctattcaaagaaattgaatttgtggttcaaacttttttcacaaaacttaagatctaggtctattcc

SEQ ID NO: 341590 - DNA, 201 bp, Homo sapiens
gatagccttattagatcctctaaaataactggctggttagttacacatgcttgccccagtcagttaatgaacctttaaataatgcattctccattttatgkaattgaatttttggctcttcagagtatgaatattgttaactctgttaaagtcttataatttatccataactgtctacttcattctgtagtgctgcattat

SEQ ID NO: 341591 - DNA, 201 bp, Homo sapiens
ataagtgtaggattataaaatgggatagtaattgccttatatgttaggctgtttcttctccctaatgttctttctcagctgatatactgctcctttttccrtaagtgatctcatcctatccaggtccctgcctggaaaagaatccctcttcaaggtatatgtacaaacaagtaaagacattgagtatcatgggattttttt

SEQ ID NO: 341592 - DNA, 201 bp, Homo sapiens
tcaaacttttttcacaaaacttaagatctaggtctattccgtggtaaattcatccaaacatttaagggagaagtaatgtaaattctgtgcaaattcttccrggaaataggagagaacatattccacctcatttaattaatgaggtcagcattaccctgataccaaaccagacccagaccattgcaagaaaactgcatagca

SEQ ID NO: 341593 - DNA, 201 bp, Homo sapiens
gaagtaaaccatttctagtttttgttttgttttgttttaatgctgttcctttacacagaagaaatttttttaggtcactgtagagcatcaagcttaaagartcatgcttaagaatttttactgaaaataaaacaaagaatcatgcttggtcgggcatggtggctcaagcctataatcccaacactttgggaggctgaggtg

SEQ ID NO: 341594 - DNA, 201 bp, Homo sapiens
ttcttgacagatctggcaaactgaagcagcacaactacaatggaggaaaagagactctgggccatttgtgtgtttgccatcccccctctcccccccccccytttttttttttgagactgtgtctcattctgtcacccaggctggagtgcacattcaagtgatcctctggcctcagcctccagagtagctgggactacagtc

SEQ ID NO: 341595 - DNA, 201 bp, Homo sapiens
gctctaatgtacctggccccatccactctctttacccacttggcagctgcactcaggagagtcatgtagcattttgatgtcaatggcttcttctcttgtcrttttgtcccataagtatcctcagtatagcaaaagtcctaaaaggaggtgccactgtcttattactctacactttggaggactccttcctcttcttcaaca

SEQ ID NO: 341596 - DNA, 201 bp, Homo sapiens
aaaaaaaagaatcatacttattggttcattgtttctgaagaaaccaaaatgggaaatgtacatttttttgacattattaccaaattatcactgacatctcmatcttaattactgaaacagttttcaaaaatttattttctcttgaataaaaaaatgctagatcatatctgaggttaaacaacttttctagtaattcctcta

SEQ ID NO: 341597 - DNA, 201 bp, Homo sapiens
aagtagaattgatcctgtttgatgctgaaccttatatgtagcaatagtttaatgtgatctgtacttttaggctaataaacatggtatttatcctactaatraatcatctaagcacagaacaaggggaaagttgagtgattctgtctttccagatgattcacattatattctgattttttgagttttactcatatccaaacg

SEQ ID NO: 341598 - DNA, 201 bp, Homo sapiens
tcttcctttgaactcctatttaaactctccctttaccatttggtaggcaataaactatgtttggaattaatagatatttgatattgctctgtgatttaccyctttaattctttaaaaaaatttttttacttccaactaaattattaaaatttttgaagaaagactatgttttatacttttatgttcctaataggaccatat

SEQ ID NO: 341599 - DNA, 201 bp, Homo sapiens
ttctttaaaaaaatttttttacttccaactaaattattaaaatttttgaagaaagactatgttttatacttttatgttcctaataggaccatattacgctkgtgcatagtaaaaattcagaaatatttattgatttattttagcttagaagtaagaagatgtgtgctactacttatgtctaggcagtgtaatcggtttctt

SEQ ID NO: 341600 - DNA, 201 bp, Homo sapiens
atctctctacaagaaccactggtgagacttttattcttccttcaaccattatttttagtattaaggatagggttgaactttgcaaagagatacctttcccygtgaaactctcttcctggttcttccaatgaatgtttacttttaagtcttccctgcttatcatttctgaaccattatcattttggatctattggtaagtta

SEQ ID NO: 341601 - DNA, 201 bp, Homo sapiens
actcaagagtatttaatttacttattttctcctacaggattatctgctgtgttgtattcagcattgtttggcctggtataagaatacagtcatacccttamagcagggagaggaggaagaggaggaggaagaggcattctacgaagacctagatgatatattggagtccattactaatagaatgattaagagtgagctgga

SEQ ID NO: 341602 - DNA, 201 bp, Homo sapiens
tgaacaactttataagttatccatcaacactcaagagtatttaatttacttattttctcctacaggattatctgctgtgttgtattcagcattgtttggcytggtataagaatacagtcatacccttacagcagggagaggaggaagaggaggaggaagaggcattctacgaagacctagatgatatattggagtccatta

SEQ ID NO: 341603 - DNA, 201 bp, Homo sapiens
ggagcttacattatagtagaaagacactgacaaataatcaaatacatagttatttcaggtaacagggaaggtatataagcattgctgggtttggtgccttktctaagcctgagatcaatggataggctccagggagctgtgagccaccagaaattgggtacatagttcattatctacattttgcatggggttggaacggaa

SEQ ID NO: 341604 - DNA, 201 bp, Homo sapiens
gcttttcgtaaaatctgctttggtttacttgtgcttttaagattgtggagaagagaacagcaatgtttaatacataatccatgcttagcaaggggcaagtwacctctggggtttaatgaaatggggtatcttaaggtgccttatatagagattcttcatgcccgctgagacgtatttgttttcttgtcttgaacaagggct

SEQ ID NO: 341605 - DNA, 201 bp, Homo sapiens
tgtctaaaaattatggtgtttgtaatacttggcgtctctgaatgatctgaacgtgacagaagagtactttttcatattgagtgtttaggtcattggggtaraagactgttgccagagacttgtacctttttctttctttgcagttgactaatctccttcagaatcaagcagtgaaaggaaaagttgctggagcactcctga

SEQ ID NO: 341606 - DNA, 201 bp, Homo sapiens
gtgcctgagacacgacaagctacctcctgttctggttaggcactccaccccacacaccctgtacacatacctgagggacctgactgggttataacttaacttttttttttttttttgagacagagtttcactcttgttgcccaggcaggaatgcaatggcacggtcttggctgaccgcagcctccgcctcctgggttcaag

SEQ ID NO: 341607 - DNA, 201 bp, Homo sapiens
tgaggcaggagaatcgcctgaacctggagggcggaggttgcagtgagcaaagatcgcactgttgtgctccagcctagcaacaagagcgaaactccgtctcaaaaaaaaaaaaaaataaagaatcagccatcaagtgggctgtcatctgggtttagctgaaggagttcttagtaatgggctgatagttgagactctctgtca

SEQ ID NO: 341608 - DNA, 201 bp, Homo sapiens; identical to SEQ ID NO: 72016

SEQ ID NO: 341609 - DNA, 201 bp, Homo sapiens
attcccatttaccttcttgacagatctggcaaactgaagcagcacaactacaatggaggaaaagagactctgggccatttgtgtgtttgccatcccccctctcccccccccccttttttttttttgagactgtgtctcattctgtcacccaggctggagtgcacattcaagtgatcctctggcctcagcctccagagtagc
